United States Patent Application Publication US 2006/0107345 A1 - sequence listing, part 8

SEQ ID NO: 30838 - DNA, 1273 bp, Triticum aestivum
  misc_feature (1151)..(1152): n is a, c, g, or t
attctcctccccgctcgctcctatcctcccccatgccgccgcccccttccccccgctcgcctctgccgcctcctctccttccccgcacgtccggcctaccccctcctccctcctcctccatcctccctcattcgtcatcacggcagaccatctcccgtcacttgggccccatgctggcggccgggtcggggtggaggcgcagcagggctgcaggggccctacgtgtactacctctacagccagtacgggttcgacaagggcgacatcggccgcctcttcatcgccggctttggctcctccatgctcttcggcaccatcgtcgggtcgctcgccgacaagcagggaaggaagagggcgtgcatcacctacatcctcagctgcatcacgaagcactcgccgcagtacaggattctgatgataggccgtgtgcttggaggcattgcaacatcgctgctcttctcggcattcgagtcgtggctcgtggcggagcacaacaagggagagttgactgatgtacatgagacccaggcgaaaatgagtgtgctagcggaggctccagggatgcagggtgatagggcccagtctatgctccggttgtgttgttggggaagcttcggacgggatttagataaggaaaaggagtcccgtgcgaaatcgagcgtcctggtgttgggactgatgatccgcacttgttgtctaaatgcagaacatgcgcattgcagtgctttctatcagtaccgacgaccacaaatgggatggatcgagcaaccaagactcagagtgtggttgacagtgcggcctgctcccaaccctgcagataactctgggtttgaactggaaccttgtgtcatttggtgcaatgggtaattttgttcacagtacttgcttatgaagttaaagttggcatatatgcctgcccatgaacaagtctattgatacatgttttttaaagcacacatgttagtgggtctccgtgtcatttgcgtacatgatttcaaatggatccatttgcgtacatgatttcaaatggatccatttgcgtacatgatttcaaatggatctttgcgaatatggtagcaagtattttgtgctatgaaattaaaatgtgtacatacatctcatcgtagacaacaatccaacatgtttcttannaaaaaaaaaaaaaaaaaaaaaaaaaaaaaaaaaaaaaaaaaaaaaaaaaaaaaaaaaaaaaaaaaagaaaaaaaaaaaaaaaaaggtttatcgataccgccaacctcaagggggggcccgg

SEQ ID NO: 30839 - protein, 288 aa, Triticum aestivum
ILLPARSYPPPCRRPLPPARLCRLLSFPARPAYPLLPPPPSSLIRHHGRPSPVTWAPCWRPGRGGGAAGLQGPYVYYLYSQYGFDKGDIGRLFIAGFGSSMLFGTIVGSLADKQGRKRACITYILSCITKHSPQYRILMIGRVLGGIATSLLFSAFESWLVAEHNKGELTDVHETQAKMSVLAEAPGMQGDRAQSMLRLCCWGSFGRDLDKEKESRAKSSVLVLGLMIRTCCLNAEHAHCSAFYQYRRPQMGWIEQPRLRVWLTVRPAPNPADNSGFELEPCVIWCNG

SEQ ID NO: 30840 - protein, 188 aa, Triticum aestivum
MLFGTIVGSLADKQGRKRACITYILSCITKHSPQYRILMIGRVLGGIATSLLFSAFESWLVAEHNKGELTDVHETQAKMSVLAEAPGMQGDRAQSMLRLCCWGSFGRDLDKEKESRAKSSVLVLGLMIRTCCLNAEHAHCSAFYQYRRPQMGWIEQPRLRVWLTVRPAPNPADNSGFELEPCVIWCNG

SEQ ID NO: 30841 - protein, 169 aa, Triticum aestivum
SPPRSLLSSPMPPPPSPRSPLPPPLLPRTSGLPPPPSSSILPHSSSRQTISRHLGPMLAAGSGWRRSRAAGALRVLPLQPVRVRQGRHRPPLHRRLWLLHALRHHRRVARRQAGKEEGVHHLHPQLHHEALAAVQDSDDRPCAWRHCNIAALLGIRVVARGGAQQGRVD

SEQ ID NO: 30842 - DNA, 658 bp, Triticum aestivum
acctttttactcctccactggccgctgccaaccaataactcaccagctgccgcttcttttaccgtgctcactccgctcactccacctctcgcacccacgccagaaacagggccgggcttcttccaggatgcaggttgcggccggctgcgagggctcgccggcggcgacggaggggggcgaccagcaaagctccaagaagccgaggctggccgccgagccactcctcctccatgcaccggtgaagcaagagatggccgtgctccaaacggccggagacggggccgcggtcgtggcggcggaccacggctccaggatggagatcgccgtgaagatggacgtgaccctgctccattgccccctctgcatcacccccttgaagccccccgtccttcagtgcaagggcgggcacgtggcctgcggcggctgcctcgtggagccctgcgcggagtgcggcagcgccttcgacgtccgcagcacggtgatggacgccgtcgtctcctcgaccacggccgagtgcgaccacgacggctgcgggcgctacgtcacctaccacgagctcgacggccaccgcggcgagtgcccgcacgcgccctgcgactgcgcggtccgcggctgcggcttcgtcggcccggcgccggcgctcctcggccacctcacc

SEQ ID NO: 30843 - protein, 219 aa, Triticum aestivum
TFLLLHWPLPTNNSPAAASFTVLTPLTPPLAPTPETGPGFFQDAGCGRLRGLAGGDGGGRPAKLQEAEAGRRATPPPCTGEARDGRAPNGRRRGRGRGGGPRLQDGDRREDGRDPAPLPPLHHPLEAPRPSVQGRARGLRRLPRGALRGVRQRLRRPQHGDGRRRLLDHGRVRPRRLRALRHLPRARRPPRRVPARALRLRGPRLRLRRPGAGAPRPPH

SEQ ID NO: 30844 - protein, 219 aa, Triticum aestivum
PFYSSTGRCQPITHQLPLLLPCSLRSLHLSHPRQKQGRASSRMQVAAGCEGSPAATEGGDQQSSKKPRLAAEPLLLHAPVKQEMAVLQTAGDGAAVVAADHGSRMEIAVKMDVTLLHCPLCITPLKPPVLQCKGGHVACGGCLVEPCAECGSAFDVRSTVMDAVVSSTTAECDHDGCGRYVTYHELDGHRGECPHAPCDCAVRGCGFVGPAPALLGHLT

SEQ ID NO: 30845 - protein, 177 aa, Triticum aestivum
MQVAAGCEGSPAATEGGDQQSSKKPRLAAEPLLLHAPVKQEMAVLQTAGDGAAVVAADHGSRMEIAVKMDVTLLHCPLCITPLKPPVLQCKGGHVACGGCLVEPCAECGSAFDVRSTVMDAVVSSTTAECDHDGCGRYVTYHELDGHRGECPHAPCDCAVRGCGFVGPAPALLGHLT

SEQ ID NO: 30846 - DNA, 565 bp, Triticum aestivum
taaacaagaataacaaaacgtggaatgttccagcagaagaatttgatacggtggttgatacaaatattaaaggaacagcaaatgtacttcgccattttgtaccacttatgatacagaagaaacatgggatgataatcaatttatcctctggttggggaaggtctgctgctgcagaggttgctccatattgtgcttcaaagtgggctattgaaggtttaacacgctcattagcaaaggagttgcctcctggattggcagcaattgctcttagccctggtgttgtgaataccgacatgcttacttcatgctttggaagttcagctgcgttataccaatctactgagcaatgggcacccaaggcagccacaatgattctaagcctttcactggaagataatggtgcctcactaactgtatgatgctgtagcaatgttgtattaatcacagatcggttctcaagtaattatgacatttaacttgcagctgttgaatatcaattatgttgtagtaataagataaaaaggttcatgtacttgtgctcgttggtttggctaaccgttgtttc

SEQ ID NO: 30847 - protein, 138 aa, Triticum aestivum
NKNNKTWNVPAEEFDTVVDTNIKGTANVLRHFVPLMIQKKHGMIINLSSGWGRSAAAEVAPYCASKWAIEGLTRSLAKELPPGLAAIALSPGVVNTDMLTSCFGSSAALYQSTEQWAPKAATMILSLSLEDNGASLTV

SEQ ID NO: 30848 - protein, 103 aa, Triticum aestivum
MIQKKHGMIINLSSGWGRSAAAEVAPYCASKWAIEGLTRSLAKELPPGLAAIALSPGVVNTDMLTSCFGSSAALYQSTEQWAPKAATMILSLSLEDNGASLTV

SEQ ID NO: 30849 - protein, 96 aa, Triticum aestivum
MIINLSSGWGRSAAAEVAPYCASKWAIEGLTRSLAKELPPGLAAIALSPGVVNTDMLTSCFGSSAALYQSTEQWAPKAATMILSLSLEDNGASLTV

SEQ ID NO: 30850 - DNA, 860 bp, Triticum aestivum
ctctctctctctttccgtgccactccccaatccgttctccaatcccactcccctatgccggcgtccgggacgcgctcccggggccgcccgccgcagccggtggaggagggggcgcgcgacgaagaagcgccggtggaggaggcgggcgagctcggcgccgacggcgatgcggcggttcgtgcgttaccggctcacccggtgagctctaccagctcgggtgatgaggatggggaggaggcgggggatggggatgatgaggacgcggaggggacgctcctccccagctgccccgtgtgtatgaatccgtggaccgccgatggcgagcatcgcgtaagttgcattccttgtgggcatgtctatggcagatcttgcttagaaaaatggttagcacagtgtggaaagaaaagtgccatgtgtcctcagtgcggcaagatgtttagacaaaagaacattatcaacctctatgcaccagagattgttgttccaaataatgatcttgaaaagcaagtattgtcactgagagataaaaatgaatttcttgagaatcaacaacaaaaattaattgaggagattgcattggagcagcaaaaggagaaagaggcgctggaggagggaggcgatgcagctcaagagtgacgtggtactggtgccggtccaaatgtttgtgtagaacagaggaagcagctagcggaagtcaaacattgatgtgtttgtaatgcacggtgtcggctgaggactaatgtacggagattgtagtcatgtgctcacctgatacatggataatgattttcagttcagtacccagaattttgagttctagtgatggttagtgtcttatgtctaagtgatcaaattgaata

SEQ ID NO: 30851 - protein, 211 aa, Triticum aestivum
LSLSFRATPQSVLQSHSPMPASGTRSRGRPPQPVEEGARDEEAPVEEAGELGADGDAAVRALPAHPVSSTSSGDEDGEEAGDGDDEDAEGTLLPSCPVCMNPWTADGEHRVSCIPCGHVYGRSCLEKWLAQCGKKSAMCPQCGKMFRQKNIINLYAPEIVVPNNDLEKQVLSLRDKNEFLENQQQKLIEEIALEQQKEKEALEEGGDAAQE

SEQ ID NO: 30852 - protein, 193 aa, Triticum aestivum
MPASGTRSRGRPPQPVEEGARDEEAPVEEAGELGADGDAAVRALPAHPVSSTSSGDEDGEEAGDGDDEDAEGTLLPSCPVCMNPWTADGEHRVSCIPCGHVYGRSCLEKWLAQCGKKSAMCPQCGKMFRQKNIINLYAPEIVVPNNDLEKQVLSLRDKNEFLENQQQKLIEEIALEQQKEKEALEEGGDAAQE

SEQ ID NO: 30853 - protein, 112 aa, Triticum aestivum
MNPWTADGEHRVSCIPCGHVYGRSCLEKWLAQCGKKSAMCPQCGKMFRQKNIINLYAPEIVVPNNDLEKQVLSLRDKNEFLENQQQKLIEEIALEQQKEKEALEEGGDAAQE

SEQ ID NO: 30854 - DNA, 559 bp, Triticum aestivum
atcctccgccacagccaccactcccaacacagctcaatcccaccggagagacaggcagaagcagctgcggcggcggagatgtcgggccgcggcaagggcggcaaggggctggggaagggcggcgccaagcgccaccggaaggtgctccgcgacaacattcagggcatcacgaagccggcgatccggcggctggcgcggcggggcggcgtgaagcgcatctcggggctcatctacgaggagacccgcggcgtgctcaagatcttcctcgagaacgtcatccgcgacgccgtcacctacaccgagcacgcccgccgcaagaccgtcaccgccatggacgtcgtctacgcgctcaagcgccagggccgcaccctctacggcttcggcggctaggccaccaacgccgggctgctccagccagcaacgagataaattatttctataaggctagtagtatttgtctatggttcgtggtctcttcggtgttgtttgctctgctctgttcctgcttgatgttgggatcgatgtactagtaccaagactgaatgaaaatcgaatttgg

SEQ ID NO: 30855 - protein, 175 aa, Triticum aestivum
PPPQPPLPTQLNPTGETGRSSCGGGDVGPRQGRQGAGEGRRQAPPEGAPRQHSGHHEAGDPAAGAAGRREAHLGAHLRGDPRRAQDLPRERHPRRRHLHRARPPQDRHRHGRRLRAQAPGPHPLRLRRLGHQRRAAPASNEINYFYKASSICLWFVVSSVLFALLCSCLMLGSMY

SEQ ID NO: 30856 - protein, 129 aa, Triticum aestivum
ILRHSHHSQHSSIPPERQAEAAAAAEMSGRGKGGKGLGKGGAKRHRKVLRDNIQGITKPAIRRLARRGGVKRISGLIYEETRGVLKIFLENVIRDAVTYTEHARRKTVTAMDVVYALKRQGRTLYGFGG

SEQ ID NO: 30857 - protein, 103 aa, Triticum aestivum; identical to SEQ ID NO: 71

SEQ ID NO: 30858 - DNA, 676 bp, Triticum aestivum
cctaatcgaaaatttattcctgcaccaccggaagttgcaatgcgtatgttgagggagcagggtgggccaccacctttcgagccgaatgctggtccacgtcctaggaaagcaggaagggctggtggtcccccaatgggtggtccatcaccaatccttaatgctccacttcctataatgcatgatccacgtatgcaagatccacgcatgcaagatccccgtaaaatacgaagctatcaagatctggacgctcctggagatgaagtgacagttttggactaccggagcctgtagtcgtgtgctgtacggccttttaatcttcgaagccgtggacgataccaccaccgcaacgggaccttgctcatctccattagtttgaccgtggcggaggaacactgatgcggtgccccgtcccgtgagctatgttatactactcaatggtgcttctaaaactgaaccacatgaaatcaaagcaactggcgcactgaaagcacggttgtggagtgtgtatttccaacagaattttttagcttttcaaaatttccaccatctagagagagagagagtagaggtctctgctgccgtatccagaactccagaccagatattcctcaccgtgtatgcaatctgtaatttatatacaggaaaaaacggttggtagatggaaccctgattggtc

SEQ ID NO: 30859 - protein, 96 aa, Triticum aestivum
PNRKFIPAPPEVAMRMLREQGGPPPFEPNAGPRPRKAGRAGGPPMGGPSPILNAPLPIMHDPRMQDPRMQDPRKIRSYQDLDAPGDEVTVLDYRSL

SEQ ID NO: 30860 - protein, 83 aa, Triticum aestivum
MRMLREQGGPPPFEPNAGPRPRKAGRAGGPPMGGPSPILNAPLPIMHDPRMQDPRMQDPRKIRSYQDLDAPGDEVTVLDYRSL

SEQ ID NO: 30861 - protein, 81 aa, Triticum aestivum
MLREQGGPPPFEPNAGPRPRKAGRAGGPPMGGPSPILNAPLPIMHDPRMQDPRMQDPRKIRSYQDLDAPGDEVTVLDYRSL

SEQ ID NO: 30862 - DNA, 2378 bp, Triticum aestivum
  misc_feature (1809)..(1810): n is a, c, g, or t
cccctcattggctcccccgcctgcctccccccgatcgccacactccccgaccccgccgcgcggccaccgcgcccgcgccataaatcaagctagccagcgctgcttcacttgaacaacgcggcacctcacctcaccgccaccgcacacctcccctgccgcgccgccgtgacagagtaggaaggaaggcgcagcggcggcggccggcacggcaagatgatcacgggcacggacttctaccacgtcatgacggcgatggtgccgctgtacgtggcgatgatgctcgcgtacggctccgtcaagtggtggcggatcttcacgccggaccagtgctccgggatcaaccgcttcgtggcgctcttcgccgtgccgctgctctccttccacttcatctccaccaacaacccctacaccatgaacctccgcttcatcgccgccgacacgctgcagaagctcatcgtgctcgcgctcctcaccctctggagccacctctcccgcaacggctccctcgagtggaccatcacgctcttctccctctccacgctgcccaacaccctcgtcatgggcatcccgctcctcaagggcatgtacggcgacgagtccggcagcctcatggtgcagatcgtggtgctgcagtgcatcatctggtacacgctcatgctcttcatgttcgagtaccgcggcgccaggatcctcatcaccgagcagttccccgacaccgccggcgccatcgcctccatcgccgtcgacccggacgtcatgtcgctcgacggcaggagggacatgatcgagacggaggcggaggtgaaggaggacggcaagattcacgtcaccgtgcgccgctccaacgcctcccgctccgacatctactcgcgccgctccatggggttctccagcaccacgccgcgccccagcaacctcaccaacgccgagatctactcgctgcagtcgtcgcggaaccccacgccccggggctccagcttcaaccacaccgacttctactccatggtgggccgcagctccaacttcgccgccggggacgcgttcggcccggtggtgcgcaccggggccacgccgcgcccgtccaactacgaggaggacaaggccggcggcaacaacaacagcaagtacgggcagtacccggcgcccaaccccgcgatggcagcgccgcagaagccgtccaagaaggcggccaacgggcaggccaagggcgaggacggcaaggacctgcacatgttcgtgtggagctccagcgcgtcgcccgtgtccgacgtgttcggcaacggcaccgaggcgtacaacgacgccgccgccaaggacgtccgggtggccgccgcctcgccgcgcaaagcggacggcgtggagcgtgacgagttcagcttcgggaacaaggagagggacgcggaggccggcgacgagaaggccgcggcggagcagggcaccgcgggcctggtggcggcgcccacggtgatgccgccgaccagcgtgatgacccgcctcatcctcatcatggtgtggcgcaagctcatccgcaaccccaacacctactccagcctcatcggcctcatctggtccctcgtctgcttccggtggaacttcgttatgccggcgatcatcatgaagtccatcgccatcctgtccgacgccggcctcggcatggccatgttcagcctcgggctgttcatggcgctgcagccgcggatcatcgcgtgcgggaacaagcgggcgacgttcgccatggccgtgcggttcctgacgggcccggccgtcatggccgccgcctccatcgccgtcggcctccgcggcaccctnncctcccatcgccatcgtgcaggcagcgctgccccagggcattgtccccttcgtcttcgccaaggagtacagcgtgcaccccgacatcctcagcacggctgtcatcttcggcatgctcatcgcgctgcccatcacgctggtctactacatcctgctggggctgtgagctaacggagacacggccgggctgcgtgcagccatgccggcgtggcgtaggagacagacggacagaggaggggacaagggagctgcagcggctccatgcgcctgccggggacatgatgcgtgctcctgcatgcgggaggctaattactactaggattcttaattaggtgtagggatcagatggggtgaggggaggaatgtttagggcaagagtttcagttgttggtaaattataaaggactgccaagatcaagggttggggaggcaaaggatcaatccggtttggggttttagaagatgtatgtactccatgggtgtgttggcagaggtttctttccctggagggaggatggctgggctgggttggccttgtaaaatggatgtcaatttgatgaaattaatgc

SEQ ID NO: 30863 - protein, 588 aa, Triticum aestivum
  misc_feature (532)..(533): Xaa can be any naturally occurring amino acid
MITGTDFYHVMTAMVPLYVAMMLAYGSVKWWRIFTPDQCSGINRFVALFAVPLLSFHFISTNNPYTMNLRFIAADTLQKLIVLALLTLWSHLSRNGSLEWTITLFSLSTLPNTLVMGIPLLKGMYGDESGSLMVQIVVLQCIIWYTLMLFMFEYRGARILITEQFPDTAGAIASIAVDPDVMSLDGRRDMIETEAEVKEDGKIHVTVRRSNASRSDIYSRRSMGFSSTTPRPSNLTNAEIYSLQSSRNPTPRGSSFNHTDFYSMVGRSSNFAAGDAFGPVVRTGATPRPSNYEEDKAGGNNNSKYGQYPAPNPAMAAPQKPSKKAANGQAKGEDGKDLHMFVWSSSASPVSDVFGNGTEAYNDAAAKDVRVAAASPRKADGVERDEFSFGNKERDAEAGDEKAAAEQGTAGLVAAPTVMPPTSVMTRLILIMVWRKLIRNPNTYSSLIGLIWSLVCFRWNFVMPAIIMKSIAILSDAGLGMAMFSLGLFMALQPRIIACGNKRATFAMAVRFLTGPAVMAAASIAVGLRGTXXSHRHRAGSAAPGHCPLRLRQGVQRAPRHPQHGCHLRHAHRAAHHAGLLHPAGAVS

SEQ ID NO: 30864 - protein, 578 aa, Triticum aestivum
  misc_feature (522)..(523): Xaa can be any naturally occurring amino acid
MTAMVPLYVAMMLAYGSVKWWRIFTPDQCSGINRFVALFAVPLLSFHFISTNNPYTMNLRFIAADTLQKLIVLALLTLWSHLSRNGSLEWTITLFSLSTLPNTLVMGIPLLKGMYGDESGSLMVQIVVLQCIIWYTLMLFMFEYRGARILITEQFPDTAGAIASIAVDPDVMSLDGRRDMIETEAEVKEDGKIHVTVRRSNASRSDIYSRRSMGFSSTTPRPSNLTNAEIYSLQSSRNPTPRGSSFNHTDFYSMVGRSSNFAAGDAFGPVVRTGATPRPSNYEEDKAGGNNNSKYGQYPAPNPAMAAPQKPSKKAANGQAKGEDGKDLHMFVWSSSASPVSDVFGNGTEAYNDAAAKDVRVAAASPRKADGVERDEFSFGNKERDAEAGDEKAAAEQGTAGLVAAPTVMPPTSVMTRLILIMVWRKLIRNPNTYSSLIGLIWSLVCFRWNFVMPAIIMKSIAILSDAGLGMAMFSLGLFMALQPRIIACGNKRATFAMAVRFLTGPAVMAAASIAVGLRGTXXSHRHRAGSAAPGHCPLRLRQGVQRAPRHPQHGCHLRHAHRAAHHAGLLHPAGAVS

SEQ ID NO: 30865 - protein, 575 aa, Triticum aestivum
  misc_feature (519)..(520): Xaa can be any naturally occurring amino acid
MVPLYVAMMLAYGSVKWWRIFTPDQCSGINRFVALFAVPLLSFHFISTNNPYTMNLRFIAADTLQKLIVLALLTLWSHLSRNGSLEWTITLFSLSTLPNTLVMGIPLLKGMYGDESGSLMVQIVVLQCIIWYTLMLFMFEYRGARILITEQFPDTAGAIASIAVDPDVMSLDGRRDMIETEAEVKEDGKIHVTVRRSNASRSDIYSRRSMGFSSTTPRPSNLTNAEIYSLQSSRNPTPRGSSFNHTDFYSMVGRSSNFAAGDAFGPVVRTGATPRPSNYEEDKAGGNNNSKYGQYPAPNPAMAAPQKPSKKAANGQAKGEDGKDLHMFVWSSSASPVSDVFGNGTEAYNDAAAKDVRVAAASPRKADGVERDEFSFGNKERDAEAGDEKAAAEQGTAGLVAAPTVMPPTSVMTRLILIMVWRKLIRNPNTYSSLIGLIWSLVCFRWNFVMPAIIMKSIAILSDAGLGMAMFSLGLFMALQPRIIACGNKRATFAMAVRFLTGPAVMAAASIAVGLRGTXXSHRHRAGSAAPGHCPLRLRQGVQRAPRHPQHGCHLRHAHRAAHHAGLLHPAGAVS

SEQ ID NO: 30866 - DNA, 741 bp, Triticum aestivum
caagattacttgaatctgaaggaactcaaacacatctaacattcgtttacagttttgcacaagcagcagctgcagcgcaagctggtgcatcagtcgtacaaatatttgtggggcgtattcgggattgggcaaagaatcactctggtgacccagagattgatgaagctttaaagaagggagaagatgctgggcttgccttggtgaagaaagcgtatgtgtacattcacaagaatgggtacaagacaaagttgatggccgctgccgtgcgcaacaagcaagacgtgtttagccttctggggatcgactacatcatcgcgcccctgaagatactgcagtccttggatgaatctgtgaccgattccgatgaaaagtacggttatgtccagaggctgactccttcgcttgacaagatgtacaacttcagccaagaggagcttgtgaaatgggaccagctgagcctggcggcggcgatggggccagcggcggaggagctgcttgcttctgggctggaagggtacgcgaaccaggcgcggcgcgtggaggagctcttcgtcaagatctggccaccccccaatgtttgaacttcaatttgaagccgtttcttctttcttggtattttcgttccaacaaagggtgttttgtgtgtcaacatgtttacttttgtccttggaatgtctgccggacttgaaatctgaatcgtttgtggaaatatgaaggcattttgtggcgacagtttctttg

SEQ ID NO: 30867 - protein, 192 aa, Triticum aestivum
RLLESEGTQTHLTFVYSFAQAAAAAQAGASVVQIFVGRIRDWAKNHSGDPEIDEALKKGEDAGLALVKKAYVYIHKNGYKTKLMAAAVRNKQDVFSLLGIDYIIAPLKILQSLDESVTDSDEKYGYVQRLTPSLDKMYNFSQEELVKWDQLSLAAAMGPAAEELLASGLEGYANQARRVEELFVKIWPPPNV

SEQ ID NO: 30868 - protein, 109 aa, Triticum aestivum
MAAAVRNKQDVFSLLGIDYIIAPLKILQSLDESVTDSDEKYGYVQRLTPSLDKMYNFSQEELVKWDQLSLAAAMGPAAEELLASGLEGYANQARRVEELFVKIWPPPNV

SEQ ID NO: 30869 - DNA, 846 bp, Triticum aestivum
acgccgtccgtttctggctcatcaggaggtccaaaggccgcgcaagtcgacctatataagcgcctccgctccagcttgggatcaaatcacgaccaacacgtaccggatcttgaccgaccgaaccattcagtgctcgcgctcactcacgcatcatagccaagttaagcgggaaggaaggaaggaaggaagccatgtctgccgcggagggagccgtcgtgttcagcgaggagaaggaggcgctggtgctcaagtcatgggccatcatgaagaaggattccgccaaccttgggctccgcttcttcctcaagatcttcgagatcgcgccgtcggcgaggcagatgttcccgttcctgcgcgactccgacgtgccgctggagaccaaccccaagctcaagacccacgccgtgtccgtcttcgtcatgacgtgcgaggctgctgcgcagctgcggaaagccgggaagatcaccgtcagggagaccaccctgaagaggctgggcggcacgcacttgaaatacggcgtggcagatggccactttgaggtgacgcggttcgctctgctcgagacgatcaaggaggcgcttccggcggacatgtgggggccggagatgaggaacgcgtggggcgaggcctacgaccaactggtcgcggccatcaagcaagagatgaagccctctgagtagctcatccattgtactcatatcatatgccacgcaacttccgtccatatccgtccaactttcgttgcttgaccggttcactcatgtcaccatattgtgtttgtattgtgtgtttacgtgtactaacgcatattgtaaaatgggcattcaataaaggaacaaattgtgc

SEQ ID NO: 30870 - protein, 178 aa, Triticum aestivum
RRPFLAHQEVQRPRKSTYISASAPAWDQITTNTYRILTDRTIQCSRSLTHHSQVKREGRKEGSHVCRGGSRRVQRGEGGAGAQVMGHHEEGFRQPWAPLLPQDLRDRAVGEADVPVPARLRRAAGDQPQAQDPRRVRLRHDVRGCCAAAESREDHRQGDHPEEAGRHALEIRRGRWPL

SEQ ID NO: 30871 - protein, 162 aa, Triticum aestivum
MSAAEGAVVFSEEKEALVLKSWAIMKKDSANLGLRFFLKIFEIAPSARQMFPFLRDSDVPLETNPKLKTHAVSVFVMTCEAAAQLRKAGKITVRETTLKRLGGTHLKYGVADGHFEVTRFALLETIKEALPADMWGPEMRNAWGEAYDQLVAAIKQEMKPSE

SEQ ID NO: 30872 - protein, 138 aa, Triticum aestivum
MKKDSANLGLRFFLKIFEIAPSARQMFPFLRDSDVPLETNPKLKTHAVSVFVMTCEAAAQLRKAGKITVRETTLKRLGGTHLKYGVADGHFEVTRFALLETIKEALPADMWGPEMRNAWGEAYDQLVAAIKQEMKPSE

SEQ ID NO: 30873 - DNA, 678 bp, Triticum aestivum
gaggaataacctcaaagtacactatgatgggagacgtttctcgtacaagtccaagcatgatctggaggggaaagatcaactacttgatttgataaggtgtcaccaggagggtcttgctgttgtggaagtgaaggatgcatacccaagtgtattggaagatttgcaggctctgaaggcagcaggtgaagtttggctgttgtcaaacatggattcacaggaggacattgtttaccctaatgatccaaaagtgaagatcaaggttgatgatgacctgaaggagctcttccgtgggattgagttaccgcgtgatatggttgatatcgaaaaggagctccagaagaacggcatgaagccgatgaccgacaccacgaaacgacgagcagcagcccagatccatggcgtgaaaccaaaggctaagcctaagaagaagcaacgcgagataactaaacggaccaagctcacgaatgcccatctgcctgagctgttccaacatcttaaatcttgattgtgccgttatcagcaactccgatgtatttcgtttcatcctacctctagttaatgtcatcgattatatgtgcctgcaaccctagtttgtggttatgtgagctccaagatcttgatctgagagccctgttgtatgtagcataatctgacttggaagagtttgagattgttttt

SEQ ID NO: 30874 - protein, 167 aa, Triticum aestivum
RNNLKVHYDGRRFSYKSKHDLEGKDQLLDLIRCHQEGLAVVEVKDAYPSVLEDLQALKAAGEVWLLSNMDSQEDIVYPNDPKVKIKVDDDLKELFRGIELPRDMVDIEKELQKNGMKPMTDTTKRRAAAQIHGVKPKAKPKKKQREITKRTKLTNAHLPELFQHLKS

SEQ ID NO: 30875 - protein, 99 aa, Triticum aestivum
MDSQEDIVYPNDPKVKIKVDDDLKELFRGIELPRDMVDIEKELQKNGMKPMTDTTKRRAAAQIHGVKPKAKPKKKQREITKRTKLTNAHLPELFQHLKS

SEQ ID NO: 30876 - DNA, 780 bp, Triticum aestivum
caaccacttgggatcaactcacaaggattttgcgtcgattttgtaaatgaaaatcaagggacaccacctttcgcgtcgccctcatcctgctaccccgtcggcgattggctggctggccggctggccggcgtgtgtgccagagagacggacaggcctaactagcccgccaatgcatgccacggcggggagtaattggttgggcgttggccaccgcaggccgccactggtgccctcccccgatcgcatttaaccccacctcaccggcgacccgaccccgacgcgacgcggccatgttcgccaccaccatcacccccaccaccacccccagtagttgagccgcgtccctcgcgtgcgcgcacccacgtactacactacacacacgtacatctcgcaccgcgccaccaaccgcgtgccgcccgtctatatatcccgcccgcgccgcgccagcccctgccactgccactgccacactccctcacactcgccagtcaccacctgaaccgagctcaccggagcgccgccatggagctgctgccgctgctgacggtgctgctgctggcgcacgcggcggcgtacctggcctggcaggccctggcgcgcgcgcggcgggcgcgctgctacctgctcgacttcgcctgccacaagccctccgacgaccgcaaggtcaccaccgagatggccggcgccgtcatcgagcgcaacaagcgcctcggcatgcccgactaccgcttcctgctcaaggtcatcgtcaactccggcatcggcgagcacacctactgc

SEQ ID NO: 30877 - protein, 86 aa, Triticum aestivum
MELLPLLTVLLLAHAAAYLAWQALARARRARCYLLDFACHKPSDDRKVTTEMAGAVIERNKRLGMPDYRFLLKVIVNSGIGEHTYC

SEQ ID NO: 30878 - protein, 67 aa, Triticum aestivum
MKIKGHHLSRRPHPATPSAIGWLAGWPACVPERRTGLTSPPMHATAGSNWLGVGHRRPPLVPSPDRI

SEQ ID NO: 30879 - protein, 53 aa, Triticum aestivum
QPLGINSQGFCVDFVNENQGTPPFASPSSCYPVGDWLAGRLAGVCARETDRPN

SEQ ID NO: 30880 - DNA, 513 bp, Triticum aestivum
agtaatactaggctcaaagacaggaaaggtcacacgcactcccctgatctccccgtttctccccaaatcctcagcaaccccgccagatcgcgggcgatcttctcgcaggctgcctgcgacgagcgcgtgtgccaggcgccagcaaccaccggcctccttgcagtggcgcacctgcagccgctgcataataatccgtagcggcgacagtgagaaagcgagagaagaggggatgaccagcctgtccatcacggtgatgacgctgaacctgcacgaggggaatcaaccgggcgagagccctaacagctgggagaagcgccgcgacatctgcgtcagcgtcatcaccagttactcccccaccatcctctgcacccagcaagggttgaggtgccagctggactacctacagcaatgcctgcctggttatgagcaatttggcatttcaagaaaaagttcacaggacaccactgatgaatattgcacaatattctacgaaaaggagaaggtggagcttac

SEQ ID NO: 30881 - protein, 170 aa, Triticum aestivum
VILGSKTGKVTRTPLISPFLPKSSATPPDRGRSSRRLPATSACARRQQPPASLQWRTCSRCIIIRSGDSEKAREEGMTSLSITVMTLNLHEGNQPGESPNSWEKRRDICVSVITSYSPTILCTQQGLRCQLDYLQQCLPGYEQFGISRKSSQDTTDEYCTIFYEKEKVEL

SEQ ID NO: 30882 - protein, 94 aa, Triticum aestivum
MTSLSITVMTLNLHEGNQPGESPNSWEKRRDICVSVITSYSPTILCTQQGLRCQLDYLQQCLPGYEQFGISRKSSQDTTDEYCTIFYEKEKVEL

SEQ ID NO: 30883 - protein, 86 aa, Triticum aestivum
MTLNLHEGNQPGESPNSWEKRRDICVSVITSYSPTILCTQQGLRCQLDYLQQCLPGYEQFGISRKSSQDTTDEYCTIFYEKEKVEL

SEQ ID NO: 30884 - DNA, 505 bp, Triticum aestivum
aatcacgagagagagagagacctagtcgcttctctctcctcttgcgtagcgtagggatggagagctccaacggcaagccgccgcagggagaggagcaagggaaggggaaggcggcggggtcgatcggaggctaccaatcgctgcacaggctcctccagtccaacctctcccccgacctcttcaagctctggcggccgcttagccgccctccggaccgggatgccatcgacagactcctctccgaccttcgttcgttggccttccgcctggctccgccgctcccgccgcctcccccggagcccgactagaggcgtctctctcccggcgtgtgtgccgctttttgtgtgtgtgttgggcttgttgagctgtgccctcaacactaacccttgatgcttgtttgttcctggactgtgtgtgtgtgtgtgaaccttggtgttgtgaaccttgtggatgttggctttggcattggctttatctataaagcggggcgtgagcctttttcggt

SEQ ID NO: 30885 - protein, 101 aa, Triticum aestivum
SRERERPSRFSLLLRSVGMESSNGKPPQGEEQGKGKAAGSIGGYQSLHRLLQSNLSPDLFKLWRPLSRPPDRDAIDRLLSDLRSLAFRLAPPLPPPPPEPD

SEQ ID NO: 30886 - protein, 83 aa, Triticum aestivum
MESSNGKPPQGEEQGKGKAAGSIGGYQSLHRLLQSNLSPDLFKLWRPLSRPPDRDAIDRLLSDLRSLAFRLAPPLPPPPPEPD

SEQ ID NO: 30887 - protein, 56 aa, Triticum aestivum
MPSTDSSPTFVRWPSAWLRRSRRLPRSPTRGVSLPACVPLFVCVLGLLSCALNTNP

SEQ ID NO: 30888 - DNA, 1741 bp, Triticum aestivum
aaaagaaacaaacacgcacacgccacctcacgccgccccgcgcacactgcggccgcgccactcgcacacggccaccacctgctaggctgcgagcggcgagcggcgagatcggcggcgggcggaggaatggtggcgccggcgggaggagggtcgccgtcgcggtggccgtcggatgaggagcttgacattgtgcggaagaatgtggtcgagattagtggaagagatgcgagagaggttagggtggttgcttgcccctacaggatttgtcctttgggggcccacattgatcatcagggcggaatagtgactgctatgacaatcaattatggagtacttcttggctttgtgccctctgatgatgctgaggttgtactccagtctggtcaatttaaaggcattactcgattcagagttgatgacttgcaaaagcctattgagaaccgaggaaacataacttgggaaagctatgcaagaggtgcagtttatgccctgcaaaatagtggatatgatctcagaaagggtataataggttatatttctggagtgaatggacttgacagttcagggcttagttcgtctgcagctgttggcatcgcctatttgctggctttagaaaatgtaaatgatctggttttatcaccagttgataacattcagttggacaagtccattgaaaatagatatttgggtcttgaaaatggcattctagatccatcagccattttattgtctcgatatggctacctcaccttcatggattgcaagactgcctcaccttcctacgtctacttctcggaactaagtaaaagccagcaacctcaaggtcggccgccattcaagattttgttggcattttcaggtttgcaacataacctacccaagtcgcgtgggtataatatgcgagtcttcgagtgcaaagaggctgcacgtgctcttttatgtgcgtcaggctctgaagatgcaccaatactccgtaaagttgatccaggtgtatatgaggcccaaaagtgtatattagatgaaaatcttgccaagagagctgagcactatttctctgaaatgaagcgagttgttaagggaagagaggcatgggctcgtggagacctacaagaattgggacagctgatctctgcatctggccgcagctccatagtcaactacgaatgcgggagcaaagagatgatacagctgtacgagatcctcctgaaggcgccaggggtcctcggcgcgcggttcagcggcgctggcttcagaggctgctgcctcgccatcgtcgaaagcgaccgtgccgaggaggcggcggcgtacgttggcgccgagtacgagaggtcccagccagagctggtgagcaagatccccgcggatcgtcgcgtgctggtctgcgagcccggggactccgcgcaggtcatcttgcagtcatgagcgtcctgttagtcgggactttgtgaaggtgagaacacgtgcaaaattcgtacgtcctcgtccatctggaactccaccccctaaattctactccctccgtcccataatataggacgttttttgacactagtgtagcgtcaaaaaacatcttacattatgggatgaagggagtagacatttagtccaagataagactagcgttgttgtgtatgaactgtactcagtcgagctcccagatagctcatctgtgtatgtgtggaaccatttgattcattcatttccacgtaagcaataatcagtaatgcaaaggttctctttc

SEQ ID NO: 30889 - protein, 473 aa, Triticum aestivum
KRNKHAHATSRRPAHTAAAPLAHGHHLLGCERRAARSAAGGGMVAPAGGGSPSRWPSDEELDIVRKNVVEISGRDAREVRVVACPYRICPLGAHIDHQGGIVTAMTINYGVLLGFVPSDDAEVVLQSGQFKGITRFRVDDLQKPIENRGNITWESYARGAVYALQNSGYDLRKGIIGYISGVNGLDSSGLSSSAAVGIAYLLALENVNDLVLSPVDNIQLDKSIENRYLGLENGILDPSAILLSRYGYLTFMDCKTASPSYVYFSELSKSQQPQGRPPFKILLAFSGLQHNLPKSRGYNMRVFECKEAARALLCASGSEDAPILRKVDPGVYEAQKCILDENLAKRAEHYFSEMKRVVKGREAWARGDLQELGQLISASGRSSIVNYECGSKEMIQLYEILLKAPGVLGARFSGAGFRGCCLAIVESDRAEEAAAYVGAEYERSQPELVSKIPADRRVLVCEPGDSAQVILQS

SEQ ID NO: 30890 - protein, 431 aa, Triticum aestivum
MVAPAGGGSPSRWPSDEELDIVRKNVVEISGRDAREVRVVACPYRICPLGAHIDHQGGIVTAMTINYGVLLGFVPSDDAEVVLQSGQFKGITRFRVDDLQKPIENRGNITWESYARGAVYALQNSGYDLRKGIIGYISGVNGLDSSGLSSSAAVGIAYLLALENVNDLVLSPVDNIQLDKSIENRYLGLENGILDPSAILLSRYGYLTFMDCKTASPSYVYFSELSKSQQPQGRPPFKILLAFSGLQHNLPKSRGYNMRVFECKEAARALLCASGSEDAPILRKVDPGVYEAQKCILDENLAKRAEHYFSEMKRVVKGREAWARGDLQELGQLISASGRSSIVNYECGSKEMIQLYEILLKAPGVLGARFSGAGFRGCCLAIVESDRAEEAAAYVGAEYERSQPELVSKIPADRRVLVCEPGDSAQVILQS

SEQ ID NO: 30891 - protein, 369 aa, Triticum aestivum
MTINYGVLLGFVPSDDAEVVLQSGQFKGITRFRVDDLQKPIENRGNITWESYARGAVYALQNSGYDLRKGIIGYISGVNGLDSSGLSSSAAVGIAYLLALENVNDLVLSPVDNIQLDKSIENRYLGLENGILDPSAILLSRYGYLTFMDCKTASPSYVYFSELSKSQQPQGRPPFKILLAFSGLQHNLPKSRGYNMRVFECKEAARALLCASGSEDAPILRKVDPGVYEAQKCILDENLAKRAEHYFSEMKRVVKGREAWARGDLQELGQLISASGRSSIVNYECGSKEMIQLYEILLKAPGVLGARFSGAGFRGCCLAIVESDRAEEAAAYVGAEYERSQPELVSKIPADRRVLVCEPGDSAQVILQS

SEQ ID NO: 30892 - DNA, 815 bp, Triticum aestivum
aatcgaaaaaaaattcgaaccccccaaaccgctcgcgaaatccccaaatcaacgcctcctcacggcaatcaatcaagcaatcatccattcacgacgcgagcggggatcctcctccactccgatggcgtcggaggccaggtccgggggcgcgcggcgggtcccgctgcagccgcgggacggcaacgcggccgcctccccgtccttgggcggcggcggtgccgccaaatcgaaggcgaaggcgaaggcgcgggcggctgctgcgtcgccgccgtcggtgaggtcgtatgcgagccgggacgaggccgagaggagggcggcagcggcggtggtgagggagaaggaggtgtcgctggcggaggagctggagaaggcgcgggagcggcggggccgcctgcgggccgcgcggcaggtcacggagagggcgctggcggaggccgacgaggcgctgcggcgggagatgcgggagtgggagcgccgcgcggacgagcagcgccgggtcgtcgcggagctgatgcgcctcatcgggatgcccgaggtgtacgttccggtggaatcgctgagatccagggaggagaggaagaggaaacaggggacttcgtcttcagatcctccgggtccggtcacagtggcttcaacattactagaggaagaatctggaccatgcctctccgatcaggaactgctggcgacgccggcaagggaaacgaccgccgccgcagcagcgacggaaagcagcagcgcttgatccctttctttgcctgttccaaactgtttctgcacaaggcctcccaatgaaatcaaatggcttgtttggc

SEQ ID NO: 30893 - protein, 264 aa, Triticum aestivum
NRKKIRTPQTAREIPKSTPPHGNQSSNHPFTTRAGILLHSDGVGGQVRGRAAGPAAAAGRQRGRLPVLGRRRCRQIEGEGEGAGGCCVAAVGEVVCEPGRGREEGGSGGGEGEGGVAGGGAGEGAGAAGPPAGRAAGHGEGAGGGRRGAAAGDAGVGAPRGRAAPGRRGADAPHRDARGVRSGGIAEIQGGEEEETGDFVFRSSGSGHSGFNITRGRIWTMPLRSGTAGDAGKGNDRRRSSDGKQQRLIPFFACSKLFLHKASQ

SEQ ID NO: 30894 - protein, 247 aa, Triticum aestivum
IEKKFEPPKPLAKSPNQRLLTAINQAIIHSRRERGSSSTPMASEARSGGARRVPLQPRDGNAAASPSLGGGGAAKSKAKAKARAAAASPPSVRSYASRDEAERRAAAAVVREKEVSLAEELEKARERRGRLRAARQVTERALAEADEALRREMREWERRADEQRRVVAELMRLIGMPEVYVPVESLRSREERKRKQGTSSSDPPGPVTVASTLLEEESGPCLSDQELLATPARETTAAAAATESSSA

SEQ ID NO: 30895 - protein, 207 aa, Triticum aestivum
MASEARSGGARRVPLQPRDGNAAASPSLGGGGAAKSKAKAKARAAAASPPSVRSYASRDEAERRAAAAVVREKEVSLAEELEKARERRGRLRAARQVTERALAEADEALRREMREWERRADEQRRVVAELMRLIGMPEVYVPVESLRSREERKRKQGTSSSDPPGPVTVASTLLEEESGPCLSDQELLATPARETTAAAAATESSSA

SEQ ID NO: 30896 - DNA, 1745 bp, Triticum aestivum
aatcgaaagtagcacaccaccgcccagcgcagctcccgagacaccgcatttctcgtctcctctcgctctccgtccaagcaagaagtcaggacgaacacgtcacattcgaccatggacatgcccacggcggcgtgctcaccgtcctcgtcggcgccgcctccgccgtcgtcgtccggcgtcgatgtggccgttgacgcgcggacagaagaggtccggcggcgcctgctcctcgatgccgccatcgacggcaacctcgacctccttgccaggatggcgctggggttgctgccgccggcgcctagcgccacgggcgcggacgccaccgccggcgtctggtcgacgtgcggcagggcgctgcacctggccgcgaccaacggcaggaccgacgtctgccgctacctggtccaggacctcggcatccccgtcgacgccctctccgatgagcgcgagacgccgctgctcctggcggccaccttcggccacaccgccacggcggcctggctcctggagcgcggcgccagcccgcgcgccccggacgtcgacggcgagaccccgctccactgggccgcttacaacggggatcgcgacctggcgatgctgctcctgtgcaagggcgccgacgtgggcgcggcgaacccccggggcacagcgctccacgtcgccgccatgcgggggtgcccggaagtcatccgtgtcctgctgcgccacggcgccgatcccaacaagttcgccagccgtgtcttcacgcccttggtctcatcgcttcttggtggctccgtggaatgcatgaagctgctcattgaggctggggctaatgttcatgccggtggattcagtggagcgacccctctgttgttagcgtgcagccgccgtcgcaacatcggattcgtcaagtgcttgttgaaggctggagcagatccgaaccttcctgacgaacttggtaggttgccgatagaaattgctgcggtccaaggtggaaaaagacttgttcaacttctgtttcctgtgacccgatgccctccaaacatggttggctggagtgttgctggcatcatgagttatgtgaattctgctgcttacaaggagcgggtgagaaaggactcttgtaagaggaaagctgaactaaaactagaagggaacaaggcctacgaaaccaaggactacgacacggctatacttatgtacaacatggcattgaagtttgatgacccaaaggacatagacgcctccatatatgcaaacaagagcctctgttggctgcgccttggtgtgggcgacgaggcgctttcggacgcccaggcctgcatcaggttatggcctgactgggggaaaggctactaccgccaaggcgaggccttccgcttcctgcaggactacgccagcgcttacaccgcgtttgtcaaggcatcggagcttgatccgcagaaccccaagatcgccaacgccctccgggatctcttggagcgcacgaagggcgcctcggtttcacggtgcttggagggaggggtgcaaggacgaagtcaggttctgtctgggccgtgtgatcaagcagtccaagggcagggctcttttgtgcaggcagtaggtagaggtcagccactatccagtggccagtaggaaaatggtgaagcggtgtgaaaactgtggcgggagtcggaggatgtatagttgtttttcggagaaagtctaaaaaaaaccttgaacttggagtcgaaagctaaatcaaaccccgaacttctaatccg

SEQ ID NO: 30897 - protein, 501 aa, Triticum aestivum
MDMPTAACSPSSSAPPPPSSSGVDVAVDARTEEVRRRLLLDAAIDGNLDLLARMALGLLPPAPSATGADATAGVWSTCGRALHLAATNGRTDVCRYLVQDLGIPVDALSDERETPLLLAATFGHTATAAWLLERGASPRAPDVDGETPLHWAAYNGDRDLAMLLLCKGADVGAANPRGTALHVAAMRGCPEVIRVLLRHGADPNKFASRVFTPLVSSLLGGSVECMKLLIEAGANVHAGGFSGATPLLLACSRRRNIGFVKCLLKAGADPNLPDELGRLPIEIAAVQGGKRLVQLLFPVTRCPPNMVGWSVAGIMSYVNSAAYKERVRKDSCKRKAELKLEGNKAYETKDYDTAILMYNMALKFDDPKDIDASIYANKSLCWLRLGVGDEALSDAQACIRLWPDWGKGYYRQGEAFRFLQDYASAYTAFVKASELDPQNPKIANALRDLLERTKGASVSRCLEGGVQGRSQVLSGPCDQAVQGQGSFVQAVGRGQPLSSGQ

SEQ ID NO: 30898 - protein, 499 aa, Triticum aestivum
MPTAACSPSSSAPPPPSSSGVDVAVDARTEEVRRRLLLDAAIDGNLDLLARMALGLLPPAPSATGADATAGVWSTCGRALHLAATNGRTDVCRYLVQDLGIPVDALSDERETPLLLAATFGHTATAAWLLERGASPRAPDVDGETPLHWAAYNGDRDLAMLLLCKGADVGAANPRGTALHVAAMRGCPEVIRVLLRHGADPNKFASRVFTPLVSSLLGGSVECMKLLIEAGANVHAGGFSGATPLLLACSRRRNIGFVKCLLKAGADPNLPDELGRLPIEIAAVQGGKRLVQLLFPVTRCPPNMVGWSVAGIMSYVNSAAYKERVRKDSCKRKAELKLEGNKAYETKDYDTAILMYNMALKFDDPKDIDASIYANKSLCWLRLGVGDEALSDAQACIRLWPDWGKGYYRQGEAFRFLQDYASAYTAFVKASELDPQNPKIANALRDLLERTKGASVSRCLEGGVQGRSQVLSGPCDQAVQGQGSFVQAVGRGQPLSSGQ

SEQ ID NO: 30899 - protein, 448 aa, Triticum aestivum
MALGLLPPAPSATGADATAGVWSTCGRALHLAATNGRTDVCRYLVQDLGIPVDALSDERETPLLLAATFGHTATAAWLLERGASPRAPDVDGETPLHWAAYNGDRDLAMLLLCKGADVGAANPRGTALHVAAMRGCPEVIRVLLRHGADPNKFASRVFTPLVSSLLGGSVECMKLLIEAGANVHAGGFSGATPLLLACSRRRNIGFVKCLLKAGADPNLPDELGRLPIEIAAVQGGKRLVQLLFPVTRCPPNMVGWSVAGIMSYVNSAAYKERVRKDSCKRKAELKLEGNKAYETKDYDTAILMYNMALKFDDPKDIDASIYANKSLCWLRLGVGDEALSDAQACIRLWPDWGKGYYRQGEAFRFLQDYASAYTAFVKASELDPQNPKIANALRDLLERTKGASVSRCLEGGVQGRSQVLSGPCDQAVQGQGSFVQAVGRGQPLSSGQ

SEQ ID NO: 30900 - DNA, 1531 bp, Triticum aestivum
gcaactgtaccgactgcaacacagtttcttcagtaagcatgagaactatgacccatcgtctccccccagctgtggctgcggtggccgtggtcttggtggcgctgacgtgcctccaccggccagctgccgcgagcggccatgccgcggaccgcatagcccggctgcctgggcagccggcggtggacttcgacatgtactccggctacatcaccgtggacgagggcgccggacggtcgctgttctatctgctgcaagaggcgccggaggacgcccagccggcgccgctcgtgctgtggctcaacggcggccccggctgctcctccgtcgcctacggcgcgtcggaggagctcggcgcgttccgcgtcaagccccgcggcgccggcctcgtcctcaacgagtaccgctggaacaaagtggccaacgtgctgttcttggactcgccggccggcgtcgggttctcctacaccaacacctcttccgacatctacacctccggcgacaacagaacggcgcacgactcgtacgccttcctggcgaaatggttcgagaggttcccgcactacaagtaccgcgacttctacatcgccggcgagagctacgccgggcactacgtcccggagctgtcccagctggtccaccggagcaaaaaccccgtcatcaacctcaagggcttcatggtcgggaacggcctcatcgacgactaccacgactacgtgggcaccttcgagttctggtggaaccacgggatcgtctccgacgacacctaccgccgcctcaaggaggcctgcctccacgactccttcatccacccctcgccggcgtgcgacgccgccacggacgtcgccacggcggagcagggcaacatcgacatgtacagcctctacacgcccgtctgcaacatcacgtcgtcctcgtcgttggcggcgagccggccccggcccagggggcgctacccatggctgaccgggtcctacgacccgtgcacggaacggtactcgacggcgtactacaaccggcgggacgtgcagatggctctccacgccaacgtcaccggcgccatgaactacacgtgggcgacctgcagcgacaccattaatacccactggcatgatgctccgaggtccatgcttcccatttacagggagcttattgcagcgggcctcaggatttgggtgttcagcggtgacacggacgcggtagtccccttgacagcaacaagatactccatcggcggtctgggtcttccaactactaccagttggtacccttggtatgacgaccaggaggtcggcggttggagccaggtgtacaagggccttacactggtgtccgtcagaggtgccggccatgaggttcccctgcatcgcccgcggcaagcgctcgtactgtttcggtacttcctgcagggcgagcccatgccaggccagaccaagaatgcgacggtggcttagcaacaaagggatggaagtcaaatagtaatttcgatgtgagaaaacaagagtgatcatcaataaagcaatagatgcttctt

SEQ ID NO: 30901 - protein, 482 aa, Triticum aestivum
NCTDCNTVSSVSMRTMTHRLPPAVAAVAVVLVALTCLHRPAAASGHAADRIARLPGQPAVDFDMYSGYITVDEGAGRSLFYLLQEAPEDAQPAPLVLWLNGGPGCSSVAYGASEELGAFRVKPRGAGLVLNEYRWNKVANVLFLDSPAGVGFSYTNTSSDIYTSGDNRTAHDSYAFLAKWFERFPHYKYRDFYIAGESYAGHYVPELSQLVHRSKNPVINLKGFMVGNGLIDDYHDYVGTFEFWWNHGIVSDDTYRRLKEACLHDSFIHPSPACDAATDVATAEQGNIDMYSLYTPVCNITSSSSLAASRPRPRGRYPWLTGSYDPCTERYSTAYYNRRDVQMALHANVTGAMNYTWATCSDTINTHWHDAPRSMLPIYRELIAAGLRIWVFSGDTDAVVPLTATRYSIGGLGLPTTTSWYPWYDDQEVGGWSQVYKGLTLVSVRGAGHEVPLHRPRQALVLFRYFLQGEPMPGQTKNATVA

SEQ ID NO: 30902 - protein, 470 aa, Triticum aestivum
MRTMTHRLPPAVAAVAVVLVALTCLHRPAAASGHAADRIARLPGQPAVDFDMYSGYITVDEGAGRSLFYLLQEAPEDAQPAPLVLWLNGGPGCSSVAYGASEELGAFRVKPRGAGLVLNEYRWNKVANVLFLDSPAGVGFSYTNTSSDIYTSGDNRTAHDSYAFLAKWFERFPHYKYRDFYIAGESYAGHYVPELSQLVHRSKNPVINLKGFMVGNGLIDDYHDYVGTFEFWWNHGIVSDDTYRRLKEACLHDSFIHPSPACDAATDVATAEQGNIDMYSLYTPVCNITSSSSLAASRPRPRGRYPWLTGSYDPCTERYSTAYYNRRDVQMALHANVTGAMNYTWATCSDTINTHWHDAPRSMLPIYRELIAAGLRIWVFSGDTDAVVPLTATRYSIGGLGLPTTTSWYPWYDDQEVGGWSQVYKGLTLVSVRGAGHEVPLHRPRQALVLFRYFLQGEPMPGQTKNATVA

SEQ ID NO: 30903 - protein, 467 aa, Triticum aestivum
MTHRLPPAVAAVAVVLVALTCLHRPAAASGHAADRIARLPGQPAVDFDMYSGYITVDEGAGRSLFYLLQEAPEDAQPAPLVLWLNGGPGCSSVAYGASEELGAFRVKPRGAGLVLNEYRWNKVANVLFLDSPAGVGFSYTNTSSDIYTSGDNRTAHDSYAFLAKWFERFPHYKYRDFYIAGESYAGHYVPELSQLVHRSKNPVINLKGFMVGNGLIDDYHDYVGTFEFWWNHGIVSDDTYRRLKEACLHDSFIHPSPACDAATDVATAEQGNIDMYSLYTPVCNITSSSSLAASRPRPRGRYPWLTGSYDPCTERYSTAYYNRRDVQMALHANVTGAMNYTWATCSDTINTHWHDAPRSMLPIYRELIAAGLRIWVFSGDTDAVVPLTATRYSIGGLGLPTTTSWYPWYDDQEVGGWSQVYKGLTLVSVRGAGHEVPLHRPRQALVLFRYFLQGEPMPGQTKNATVA

SEQ ID NO: 30904 - DNA, 723 bp, Triticum aestivum
ctttccgtctagggttttgcttcctccccgagaaaaatcgaggcctcagccccccggagcgcgccgcgcctcgcctcgccgaccggtcgctggagatgtcccgcacgctggtgcagccggtggggcagaagcggctgaccaacgtggccgtggtgcggctgcgcaagggcggccagcggttcgagatcgcctgcttccccaacaaggtggtcaactggcgcgaccgcgtcgagaaggacctcgacgaggtgctccagtcccacaacgtctactccaacgtctccaagggcgtcctcgccaagtcctcctccctccttccccgactcccgccgtggattggactggattggatgggtcctgctaatttcgtgctgatttccggctcgactgctaatcgttgctgctgctgttgtgctctgtcagattttggagaaaggggagctccaggtttctggcaaggagagggaggcgcagctgtcttcccagttcagggacatcgccaccatcgtcatggagaagactatcagtactgagacccggcgcccctacaccatgaacatgatcgagagcatcatgcacgagatacactttgccgtcgatccaaatcttacctccaaggagcaggtagctgcctgctctctgctctcgatatgtactacccttagtgtgtgtgtgcgtgtgtgtgtgtctatatatataatggaggatcacgatttgtttagc

SEQ ID NO: 30905 - protein, 176 aa, Triticum aestivum
FRLGFCFLPEKNRGLSPPERAAPRLADRSLEMSRTLVQPVGQKRLTNVAVVRLRKGGQRFEIACFPNKVVNWRDRVEKDLDEVLQSHNVYSNVSKGVLAKSSSLLPRLPPWIGLDWMGPANFVLISGSTANRCCCCCALSDFGERGAPGFWQGEGGAAVFPVQGHRHHRHGEDYQY

SEQ ID NO: 30906 - protein, 145 aa, Triticum aestivum
MSRTLVQPVGQKRLTNVAVVRLRKGGQRFEIACFPNKVVNWRDRVEKDLDEVLQSHNVYSNVSKGVLAKSSSLLPRLPPWIGLDWMGPANFVLISGSTANRCCCCCALSDFGERGAPGFWQGEGGAAVFPVQGHRHHRHGEDYQY

SEQ ID NO: 30907 - protein, 120 aa, Triticum aestivum
FPSRVLLPPREKSRPQPPGARRASPRRPVAGDVPHAGAAGGAEAADQRGRGAAAQGRPAVRDRLLPQQGGQLARPRREGPRRGAPVPQRLLQRLQGRPRQVLLPPSPTPAVDWTGLDGSC

SEQ ID NO: 30908 - DNA, 841 bp, Triticum aestivum
accgcccagcccagcccagacgccgaccgacgccgctcgcgctcccgtctctcggcgatcctacctcctccgacgaccggctgcaaccccggccgccctcgccgccagatccgcgcggccacgcccacccgcctcgctcctcctctcgggcctcggcagatctacgcgggccgcgaccgtccctagccatgattaatttcgtgctcctaatcagccgccagggcaaggtgaggctcaccaagtggtactcgccttacacccagaaggagaggactaaggtcatccgtgagcttagtgggctcattcttactcgagggccaaaactctgcaactttgtcgagtggagaggttacaaggttgtgtacagaaggtatgccagcctctatttctgcatgtgtatcgatgctgatgataatgagctcgaagtccttgaaattatccatcattttgttgagatactggaccgttatttcggcagtgtatgcgagctggatttgatattcaatttccacaaggcgtactacgtactggatgagattctcatttctggtgagcttcaggaatctagcaagaagaatgttgcaagacttattgctgcacaggattcgttggtagaggctgctaaagaggaagctggctccatcagtaacatcattgcccaggctacgaagtaaaagtccgcgtctgatgatgccccgctgctctttggtttatgcatatgttggtaaatttgatgtaatagctcctttgctgtatccattttcccaaagaaatacgacttcccggattcaggcctgttcagaatgagtgatatgtaactacaatgcatgtgttcctttgc

SEQ ID NO: 30909 - protein, 223 aa, Triticum aestivum
RPAQPRRRPTPLALPSLGDPTSSDDRLQPRPPSPPDPRGHAHPPRSSSRASADLRGPRPSLAMINFVLLISRQGKVRLTKWYSPYTQKERTKVIRELSGLILTRGPKLCNFVEWRGYKVVYRRYASLYFCMCIDADDNELEVLEIIHHFVEILDRYFGSVCELDLIFNFHKAYYVLDEILISGELQESSKKNVARLIAAQDSLVEAAKEEAGSISNIIAQATK

SEQ ID NO: 30910 - protein, 161 aa, Triticum aestivum
MINFVLLISRQGKVRLTKWYSPYTQKERTKVIRELSGLILTRGPKLCNFVEWRGYKVVYRRYASLYFCMCIDADDNELEVLEIIHHFVEILDRYFGSVCELDLIFNFHKAYYVLDEILISGELQESSKKNVARLIAAQDSLVEAAKEEAGSISNIIAQATK

SEQ ID NO: 30911 - DNA, 589 bp, Triticum aestivum
ggatatctttgtgcagctactgcccggaacttcgagcagatacttgacgcaacccttgctggcagtagacactattcagagctgtcaagaatatcagtgaaactaaatggatcccagctaccgacttatgctctgaatgatatattggtgtcacacccctgtccggcaagtgtatcacgcttctcattaagaaaaagaagcaatggggagacctcacgtttgattaattctagatcaagtggtctcagggttgcaacagctactggatcaactgctgccatgctatcagcaggaggatttatgatgccaatatcaagtcgtgagcttcagtatatgataagggagcccatttcaccaacggatgccgacaaaccactgctgcatggattagttaagcaagagcaacatatgcttgttgtttggtacaatcaagagggtgctgtgtatattgatggttctcatgtaacatatccaatccagcatggggatacacttgaggtctcctcagatgctccagtcttaaaagttattttaccagaatatctgttaaagcaggcatctttataatgaaataacgttatcactgttc

SEQ ID NO: 30912 - protein, 188 aa, Triticum aestivum
GYLCAATARNFEQILDATLAGSRHYSELSRISVKLNGSQLPTYALNDILVSHPCPASVSRFSLRKRSNGETSRLINSRSSGLRVATATGSTAAMLSAGGFMMPISSRELQYMIREPISPTDADKPLLHGLVKQEQHMLVVWYNQEGAVYIDGSHVTYPIQHGDTLEVSSDAPVLKVILPEYLLKQASL

SEQ ID NO: 30913 - protein, 95 aa, Triticum aestivum
MLSAGGFMMPISSRELQYMIREPISPTDADKPLLHGLVKQEQHMLVVWYNQEGAVYIDGSHVTYPIQHGDTLEVSSDAPVLKVILPEYLLKQASL

SEQ ID NO: 30914 - DNA, 901 bp, Triticum aestivum
cccatctcgtcgtctccacgctaacgcctcctccccccaaactcccaactacccgcttactcctgagttctgagcccggtcgatccccgccgcagccaccgacgccgcctccgtcaactcgcacggggaacctcgccatggccgccgcgtcgtccgccacctccgtccacgacttcaccgtcaaggatgcaagcggcaaggacgtcgacctcagcgtctacaaggggaaggttcttctcattgttaacgtcgcatcccagtgtggcttgaccaactccaactacaccgagctgagccagctgtacccgaagtacaaggaccaaggctttgagatcttggctttcccatgcaatcagtttggtgggcaggagcctggcaccaatgatgagatcgttcagtttgcctgcacccgcttcaaggccgagtaccccattttcgacaaggttgatgtcaacggcagcaatgtttcccccctgtacaagttcctgaagtctagcaaaggtggccttttcggcgacagcatcaagtggaacttctccaagttcttggttgacaaggagggtcacgttgttgaccgctatgccccgaccacttccccactaagcattgagaaggatatcaagaagctgcttgggagctcttagacccgccgctggctggagcctcgagagaaatcggcactctgtattctagaaacaagaataatgtcgtgttgaaataaaatctgtacccagcatttcagaggatgcatctgctatattttcagcatcctactctgtacttgttgtatatgttgtgttaatgaatgcattcaaatattgtagctgttcggtgtgcctttcattggatcgtgttgttgtctggtcaagtttctgaataacataatttctcacattgctgc

SEQ ID NO: 30915 - protein, 213 aa, Triticum aestivum
HLVVSTLTPPPPKLPTTRLLLSSEPGRSPPQPPTPPPSTRTGNLAMAAASSATSVHDFTVKDASGKDVDLSVYKGKVLLIVNVASQCGLTNSNYTELSQLYPKYKDQGFEILAFPCNQFGGQEPGTNDEIVQFACTRFKAEYPIFDKVDVNGSNVSPLYKFLKSSKGGLFGDSIKWNFSKFLVDKEGHVVDRYAPTTSPLSIEKDIKKLLGSS

SEQ ID NO: 30916 - protein, 168 aa, Triticum aestivum
MAAASSATSVHDFTVKDASGKDVDLSVYKGKVLLIVNVASQCGLTNSNYTELSQLYPKYKDQGFEILAFPCNQFGGQEPGTNDEIVQFACTRFKAEYPIFDKVDVNGSNVSPLYKFLKSSKGGLFGDSIKWNFSKFLVDKEGHVVDRYAPTTSPLSIEKDIKKLLGSS

SEQ ID NO: 30917 - DNA, 463 bp, Triticum aestivum
tccgctacctgccggtctatgaggagacatacaagagtctgaaatcaagaggagtgcggtttcctggacgcgacaatgagagcttggcccccatatttactccaccacgctcagttgctgaagctgaagctggtgcaaacttcacgcaacagacctttgaagatgtgcatatgcatacatatactgccgaagaaacaaaggaagcttttgatgttgcgcgtaacagcatagagcttctttcaaccgttttttcatctttccctcagcaggatgctttgcaggacgacttgacgaacacccttgtgcaacaatgctaccaatcccaacacaccatccagagattcgtggagacggctggggacaacgaggccatgctcttggaggccctgaccgtgaacgacgagatccagaaagtgctatccagatacgaagagatgaagaaacccgtggcgccagcgcacgc

SEQ ID NO: 30918 - protein, 153 aa, Triticum aestivum
RYLPVYEETYKSLKSRGVRFPGRDNESLAPIFTPPRSVAEAEAGANFTQQTFEDVHMHTYTAEETKEAFDVARNSIELLSTVFSSFPQQDALQDDLTNTLVQQCYQSQHTIQRFVETAGDNEAMLLEALTVNDEIQKVLSRYEEMKKPVAPAH

SEQ ID NO: 30919 - protein, 97 aa, Triticum aestivum
MHTYTAEETKEAFDVARNSIELLSTVFSSFPQQDALQDDLTNTLVQQCYQSQHTIQRFVETAGDNEAMLLEALTVNDEIQKVLSRYEEMKKPVAPAH

SEQ ID NO: 30920 - DNA, 1162 bp, Triticum aestivum
  misc_feature (983)..(984): n is a, c, g, or t
  misc_feature (986)..(986): n is a, c, g, or t
aacatcctaatcaaaaactaataaatcccccacccccggatcgacaaagcttcccattcctccgcatcggcaggcagcagcaaaacaacagcccaatcgagggtcactccacaccaccaccactctcttcccccaatcccctcctcctccccgaaaccctagctggaatggagcccaaatccaccacccctccgccgccgggccccgtgctgggcgcgcccgtcggctacccgccggccgccgtctacccggccgccccgccccccggctacccgcacgcgccggccctctacgcgccccagccgccccccgccgccgtcgccgccgcgtcgcagcagaccgccgcgcagcagcagcagcagctgcaggtgttctgggcggagcagtaccgcgagatcgaggccaccaccgacttcaagaaccacaacctgcccctcgcccgcatcaagaagatcatgaaggccgacgaggacgtccgcatgatcgccgccgaggcgcccgtcgtcttcgcccgggcctgcgagatgttcatcctcgagctcacccaccgcggctgggcgcacgccgaggagaacaagcgccgcacgctgcagaagtccgacatcgccgccgccatcgcccgcaccgaggtcttcgacttcctggtggacatcgtgccgcgggacgaggccaaggacgccgaggcggccgtcgccgccgggatgccccaccccgccgccggcatgcccgccgccgacatggggtactactacgtcccgcagcagtaacacctgcagtatgttacagcggatttaagttgcatctaagattgtgctgttgatttagtgctctcctatgtttgtttgttcaccgctgaataatttaagatgttgccattatttgaggggcctcctctatgttacaagtgattcgatccgagaagaacccggctaggttcttctgatcgaggcagtccgtatgatgctcatgcatgtctaactgannanaaaaaaaaaaaaaaaaaaaaaaaaaaaaaaaaaaaaaaaaaaaaaaaaaaaaaaaaaaaaaaaaaaaaaaataaaaaaaaaaaaaaaaaggttaatcaaaaccgccaaccccaaggggggccccggaaccaaattcccccaaaaaaaagccaaaaaacgcgcgccaacggcccgcc

SEQ ID NO: 30921 - protein, 254 aa, Triticum aestivum
HPNQKLINPPPPDRQSFPFLRIGRQQQNNSPIEGHSTPPPLSSPNPLLLPETLAGMEPKSTTPPPPGPVLGAPVGYPPAAVYPAAPPPGYPHAPALYAPQPPPAAVAAASQQTAAQQQQQLQVFWAEQYREIEATTDFKNHNLPLARIKKIMKADEDVRMIAAEAPVVFARACEMFILELTHRGWAHAEENKRRTLQKSDIAAAIARTEVFDFLVDIVPRDEAKDAEAAVAAGMPHPAAGMPAADMGYYYVPQQ

SEQ ID NO: 30922 - protein, 199 aa, Triticum aestivum
MEPKSTTPPPPGPVLGAPVGYPPAAVYPAAPPPGYPHAPALYAPQPPPAAVAAASQQTAAQQQQQLQVFWAEQYREIEATTDFKNHNLPLARIKKIMKADEDVRMIAAEAPVVFARACEMFILELTHRGWAHAEENKRRTLQKSDIAAAIARTEVFDFLVDIVPRDEAKDAEAAVAAGMPHPAAGMPAADMGYYYVPQQ

SEQ ID NO: 30923 - DNA, 981 bp, Triticum aestivum
  misc_feature (900)..(900): n is a, c, g, or t
  misc_feature (926)..(926): n is a, c, g, or t
  misc_feature (964)..(964): n is a, c, g, or t
accattacctagaacatcctaatcgaaaaaccaactcgccaagtacagtacatcagcacagtacactcgcggcgcacgctcgagcttgctagcgacagtcagtccgtccgagctcaccgtcatccatggctctccagctcctcccctccaccctctccgtccccaagaaggggagcagcatgggcgcggtggcggtgaaggacacggcggcgttcttgggcgtgagcagcaaggcgaagaaggcgtctagcggtgaggacgcaggtggccacggcgccttcgccggtgacgacgagcccgggctcggccgcggcgaagccgagcggcaagaagactctgcggcagggcgtggtggtgatcacgggcgcgtcctccgggcttggcctcgcgtcggccaaggcgctggcagagacgggcaagtggcacgtggtcatggcgtgccgcgacttcctcaaggcctccaaggcggccaaggctgccggcatggctgacgggagctacaccatcatgcacctcgacctcgcctcgctcgacagcgtccggcagttcgtcgacgcgttccgccgcgccgagatgccgctggacgtgctcgtgtgcaacgccgccatctaccgccccacggcgcgcacgccgacattcaccgccgacgggcacgagatgagcgtgggcgtgaaccacctcggccacttcctgctcgcccgcctcctcatggaggaccttcagaagtccgactacccgtcccgccgcatggtcatcgtcggctccatcaccggcaacagcaacacgctggcgggcaacgtgccgcccaaggccagcctcggtgacctccgcgggctcgctggcggcctcagcggcacgtcgggctcggccatgatcgacggggacgagagcttcgacggngccaaggcgtacaaggacagcaaggngtgcaacatgctgaccatgcaggagttccaccggcggnaccacgaggagaccggg

SEQ ID NO: 30924 - protein, 183 aa, Triticum aestivum
  misc_feature (156)..(156): Xaa can be any naturally occurring amino acid
  misc_feature (165)..(165): Xaa can be any naturally occurring amino acid
  misc_feature (178)..(178): Xaa can be any naturally occurring amino acid
MACRDFLKASKAAKAAGMADGSYTIMHLDLASLDSVRQFVDAFRRAEMPLDVLVCNAAIYRPTARTPTFTADGHEMSVGVNHLGHFLLARLLMEDLQKSDYPSRRMVIVGSITGNSNTLAGNVPPKASLGDLRGLAGGLSGTSGSAMIDGDESFDXAKAYKDSKXCNMLTMQEFHRRXHEETG

SEQ ID NO: 30925 - protein, 166 aa, Triticum aestivum
  misc_feature (139)..(139): Xaa can be any naturally occurring amino acid
  misc_feature (148)..(148): Xaa can be any naturally occurring amino acid
  misc_feature (161)..(161): Xaa can be any naturally occurring amino acid
MADGSYTIMHLDLASLDSVRQFVDAFRRAEMPLDVLVCNAAIYRPTARTPTFTADGHEMSVGVNHLGHFLLARLLMEDLQKSDYPSRRMVIVGSITGNSNTLAGNVPPKASLGDLRGLAGGLSGTSGSAMIDGDESFDXAKAYKDSKXCNMLTMQEFHRRXHEETG

SEQ ID NO: 30926 - protein, 158 aa, Triticum aestivum
  misc_feature (131)..(131): Xaa can be any naturally occurring amino acid
  misc_feature (140)..(140): Xaa can be any naturally occurring amino acid
  misc_feature (153)..(153): Xaa can be any naturally occurring amino acid
MHLDLASLDSVRQFVDAFRRAEMPLDVLVCNAAIYRPTARTPTFTADGHEMSVGVNHLGHFLLARLLMEDLQKSDYPSRRMVIVGSITGNSNTLAGNVPPKASLGDLRGLAGGLSGTSGSAMIDGDESFDXAKAYKDSKXCNMLTMQEFHRRXHEETG

SEQ ID NO: 30927 - DNA, 867 bp, Triticum aestivum
acccgccctccaatcccttacttattcccgcccccctcactcctccatcccctagctcgcccgcctatcctctccaccttctcagccacacagagaaagagcgtccaagctccagctagctagccaccaatggccgccgcactgagcctccgcgcgcccttctccgtgcgcgccgtggcgccaccggcgccccgcgtggccctggcgcccgcggccctcagcctcgccgccgccaagcaggtgcggggagccaggctccgcgcgcaggcgacgtacaaggtgaagctggtgacgcccgagggcgaggtggagctggaggtccccgacgacgtctacatcctcgaccaggccgaggaggaggggatcgacctgccctactcctgccgcgccggctcctgctcctcctgcgccggcaagttggtgtccggcgagatcgaccagtccgaccagagcttcctcgacgacgaccagatggaggccgggtgggtgctcacctgccacgcctaccccaagtccgacatcgtcatcgagacccacaaggaggaggagctcaccgcataagctgctatacctatctctctttgcaacgagatcgagctgatatcatattatctccttatcatgcatgcattgacatggccagatactccgatttgtttgtgctcgaatgaattgctcgatgcgtgatttggtcaagtaataatgtctccgaattacctttttgtaccgtaagatatactactgtcgtaatactagcgtgtacgtaattcaacgtactgaaatgaatcctgatggctgaggagtctctctgattaataatatcttctttttaattgaaaaaaaaaaaaaaaaaagcttatcgatacc

SEQ ID NO: 30928 - protein, 143 aa, Triticum aestivum
MAAALSLRAPFSVRAVAPPAPRVALAPAALSLAAAKQVRGARLRAQATYKVKLVTPEGEVELEVPDDVYILDQAEEEGIDLPYSCRAGSCSSCAGKLVSGEIDQSDQSFLDDDQMEAGWVLTCHAYPKSDIVIETHKEEELTA

SEQ ID NO: 30929 - DNA, 841 bp, Triticum aestivum
acaagaggacagggaagaatcttgttcgcgttgagccgccgcagaccttccctttccccacgcccaggcgatcccctcaaatcccccgcaccatccccctctccttcgatcggatccgcccgcccgcccgcctgccgcaccggtcgatcgacgatgacgctgggcagctccggcgccggatcgagcgtcgtcgttcctcggaacttcaggctgctagaagagcttgagcgcggggagaagggcattggagatggaacggtcagctatggaatggatgatgctgatgacatatacatgcggtcatggactggcaccattattggtcctcacaatactgtccatgagggtcgcatctaccagctgaagctgttctgtgacaaggactaccccgagaaggcaccatctgttagatttcattcaagaatcaacatggcttgtgttaatcacgagaccggggcggttgacccgaagaagttcagtgtgctggcgaactggcagcgagagtacactatggaacatgtcttgacccagctgaagaaagatatggcggcgacgcagaaccgcaagctagtgcagcctccagaagggacattcttctagcggggtgttttcctgcccatctccagttccaacagcagcgatctatgtcactcccatgggatttgaaatgtagattcagcgtctgctgcctgcagatcttttcccagttttatgtgaaaccgtgttcctcgcgatctgcccgattgccgttaaggagatggaatgaaacatgtaccggtttgccgttaaggagtactaattaaggtctgtaattgaagaaacaacccgtgtcaaggaaata

SEQ ID NO: 30930 - protein, 199 aa, Triticum aestivum
TRGQGRILFALSRRRPSLSPRPGDPLKSPAPSPSPSIGSARPPACRTGRSTMTLGSSGAGSSVVVPRNFRLLEELERGEKGIGDGTVSYGMDDADDIYMRSWTGTIIGPHNTVHEGRIYQLKLFCDKDYPEKAPSVRFHSRINMACVNHETGAVDPKKFSVLANWQREYTMEHVLTQLKKDMAATQNRKLVQPPEGTFF

SEQ ID NO: 30931 - protein, 148 aa, Triticum aestivum
MTLGSSGAGSSVVVPRNFRLLEELERGEKGIGDGTVSYGMDDADDIYMRSWTGTIIGPHNTVHEGRIYQLKLFCDKDYPEKAPSVRFHSRINMACVNHETGAVDPKKFSVLANWQREYTMEHVLTQLKKDMAATQNRKLVQPPEGTFF

SEQ ID NO: 30932 - protein, 109 aa, Triticum aestivum
MDDADDIYMRSWTGTIIGPHNTVHEGRIYQLKLFCDKDYPEKAPSVRFHSRINMACVNHETGAVDPKKFSVLANWQREYTMEHVLTQLKKDMAATQNRKLVQPPEGTFF

SEQ ID NO: 30933 - DNA, 709 bp, Triticum aestivum
atactctctatcgctttgtcccctcgctccaaacccgccgccgccgccgccgccgcccacgctagggttcgctcgcacgccgccgtcgccgccccctaaccccacagcacgtcgccgatagccagccagcaatggaaaatctccccgatgaattgctcgcggacatcctccgcagttttcctccacggagtctcgcggtgtgccggagcgtctgcaagcactggtgcgctgtcgtcgatgcccgcgggctgctcctcgcggtcgcgcgtcaagttccgtgctctctgcacggcatctacgttaactacgccatgatgcgaaggtcctgattcttctcccgcgtcgctccgcggactactagcccaatcgatggcatgctcagtttcctgcctggccagctgatgcgctatcgtagcgtcctggaccaccgcaacggtctcctcctgtacgaaaacagtcaggggatgtatgtgtgcaacccagcgacacgacggtgggcgacccctgtcggagccgccgcgcacggaaacttcctacagccacctgtttttctaccgccatcgtatgtatctaatgttcgatccaactatgtctctgcactacaatgtattattcttccctgatgtgcctgagaagccaaagccaccccatcttcaacctggtgagtcacaaatttcaagagcagattacgagcatgagcgtaactctt

SEQ ID NO: 30934 - protein, 82 aa, Triticum aestivum
MLSFLPGQLMRYRSVLDHRNGLLLYENSQGMYVCNPATRRWATPVGAAAHGNFLQPPVFLPPSYVSNVRSNYVSALQCIILP

SEQ ID NO: 30935 - protein, 80 aa, Triticum aestivum
MCATQRHDGGRPLSEPPRTETSYSHLFFYRHRMYLMFDPTMSLHYNVLFFPDVPEKPKPPHLQPGESQISRADYEHERNS

SEQ ID NO: 30936 - protein, 73 aa, Triticum aestivum
MRYRSVLDHRNGLLLYENSQGMYVCNPATRRWATPVGAAAHGNFLQPPVFLPPSYVSNVRSNYVSALQCIILP

SEQ ID NO: 30937 - DNA, 775 bp, Triticum aestivum
aatatgcagcaccagtagtatatagcagtaaaaaatactttgtacactcgtggcatcgccatcgatttgtcttgaactctcgatgagcaacaatcaatgggacatcaagatagtgctacgccgcgccgcatcgccgtccgcgctggccggccggcaacggagctgcgacgaagaccggcgaggcggagcggcaacgcgcgacggcggccggccatcagtattcagtaggggcgcatgccgacgtagttgccgggcgggtcgtagttgcaggtgatgaaggtgccgcggccgccgtagcactcgaccatggcgcaccccacgcgggtgctgccgcgccacacgatctgcgtgtagtgcccgcacatgccgccgctgcagcggttgctccagtagtcgtaccggggccgctccgccagccacgcccccacggcctgcgcgggcgcccagccggtgccgctgccccagaagaggttctcgccgtagggccccgacgagtgcaccagcgcgcagtccccgcgccgcgactcggcgtacgaccgcgcgtacgccgccacccgctcgtcccacctcagcgccggcagccccatcgccgcccgcgccgcgttctgctggaacaggaactgcgccctgtagtccccgccgccgccgcgggggtagccggcgtccaccacgacgacgaggaacgccgcattgcacagcgcgacggcgaggagggcgatggccagctgggctcgagtacaagtggaggaggccatgggaggtgggtggtgatgct

SEQ ID NO: 30938 - protein, 63 aa, Triticum aestivum
MSNNQWDIKIVLRRAASPSALAGRQRSCDEDRRGGAATRDGGRPSVFSRGACRRSCRAGRSCR

SEQ ID NO: 30939 - protein, 43 aa, Triticum aestivum
MGHQDSATPRRIAVRAGRPATELRRRPARRSGNARRRPAISIQ

SEQ ID NO: 30940 - DNA, 714 bp, Triticum aestivum
caaatctggaatgttattcttggaagttagtcttatagcatttctacttcaaggaaatgaagccagtggttatgagtctttgggacgtacctttgttatctctggtgctgtagttagtgctgatgtattgctcaagaccatatatgtattcggatttggtgttcctttgtttatcgatgctgaccaaggaactggtgggaaatggggcctatggattctccacaaattggtgcttacaggagtctatggcttgattattttcatgcatcactcaaggtggaaagacaggctacctgcaaaaccagcatattaccagtatgtgtgcgcaatgctggcacttaacggcctgtcgctgtttggctgtttccttgttgcatgtggagctggatttggtttatggctgtacaacctcactgctgtctgttaccatgctctttaccttccacttctgtatgtgactttcatggcagacttcttccaggaggaagatatgcttctagagaacgtatactactccgagatgaaagacgccgggttctttgatgctgactgggattaaacctgcctgcagatcccgttccacgctgtatgacttatttgtatgtgaatttgcacggagtagcttcatcctggagattgaatgaatcttagaacagagattgtaccctaacaagcaacaaccattataatcaatggaaatgtgtaaatttatcg

SEQ ID NO: 30941 - protein, 185 aa, Triticum aestivum
KSGMLFLEVSLIAFLLQGNEASGYESLGRTFVISGAVVSADVLLKTIYVFGFGVPLFIDADQGTGGKWGLWILHKLVLTGVYGLIIFMHHSRWKDRLPAKPAYYQYVCAMLALNGLSLFGCFLVACGAGFGLWLYNLTAVCYHALYLPLLYVTFMADFFQEEDMLLENVYYSEMKDAGFFDADWD

SEQ ID NO: 30942 - protein, 182 aa, Triticum aestivum
MLFLEVSLIAFLLQGNEASGYESLGRTFVISGAVVSADVLLKTIYVFGFGVPLFIDADQGTGGKWGLWILHKLVLTGVYGLIIFMHHSRWKDRLPAKPAYYQYVCAMLALNGLSLFGCFLVACGAGFGLWLYNLTAVCYHALYLPLLYVTFMADFFQEEDMLLENVYYSEMKDAGFFDADWD

SEQ ID NO: 30943 - protein, 98 aa, Triticum aestivum
MHHSRWKDRLPAKPAYYQYVCAMLALNGLSLFGCFLVACGAGFGLWLYNLTAVCYHALYLPLLYVTFMADFFQEEDMLLENVYYSEMKDAGFFDADWD

SEQ ID NO: 30944 - DNA, 1405 bp, Triticum aestivum
atgcccaggtctgacgtgtttctccaagaggccctaggtaccgtggccgccgccgtctccacccgcacacaatcccggctcgccgcacgttcacccccccgacagccgacctcgcctgcctcccgccaccggtgccccgccttcaagggtctccaggccaattcgactctgttcacggcggcagagccgagtgttccggcggcgggcggagcccggggtccgtcaagctcgtagatacgggattgggagcaccacttgaccagacaggcctccgttcggctcggccctcggaacccaaaccccgacgcccgtcgccgatgacgccgacgccggcgcgcgcctccgcggccgcggcccacgccctgctgcgcagaacgagatgcttcgccgcggcgaatcagatccggacggcctcgagggccttctccagcgcgccggcgggagcgtccgagccgcagggcccagagaaagtcgccggagatgacgagcttgatgttgctatcgtcggtggaggcatggtgggcctggctgttgcttgtgcactctccaatatgccattgaccaaacacctgcgagttgccgtcatcgatagcaatcctgcattgaagtcaatgaattatctcaagaaagatggtatacctgattcaagggtcagcactgttactcctgcaaccatttccttcttcagagatattggtgcatgggagcatattctacagcagagacatgctttctttggtaaaatgcaggtgtgggattacactggactgggatacacaaggtacaacgcaagagatgtgtccaaagaatatcttggatgtgtggtggagaacaaggtgctttgcaactcacttctgttacgcttacaggagcaaaaggaagacattggaaagatggtctaccctacccgattggtgtctcttgctttcccatcaaagagcagaaacgtaggagtagcaggactgaagccaccatcaactgaggcagaggaactacgccgtagtaatttggttaaacttgacctaagtgatggacagactttatattcaaagttggtggtaggagcagatggttccaaatccaatgtaaggcagattgcgggcataaaaacaactggttggagttatcctcagagtgcgattatctgtacagtagagcatactgcagcgaatgactgtgcatggcagaggtttctcccttctggtccgattgccctgcttccaataggcgacaacttcagcaatatagtgtggacaatgagcccagaggaggcatcacggcataagtcaatgagctctgaagattttgtgatgtcagtgaaccgtgcattggattttggttatggaccgcatcccaactctagtagtcttgaccattacgtggaaaggttgttttctgactttgg

SEQ ID NO: 30945 - protein, 362 aa, Triticum aestivum
MTPTPARASAAAAHALLRRTRCFAAANQIRTASRAFSSAPAGASEPQGPEKVAGDDELDVAIVGGGMVGLAVACALSNMPLTKHLRVAVIDSNPALKSMNYLKKDGIPDSRVSTVTPATISFFRDIGAWEHILQQRHAFFGKMQVWDYTGLGYTRYNARDVSKEYLGCVVENKVLCNSLLLRLQEQKEDIGKMVYPTRLVSLAFPSKSRNVGVAGLKPPSTEAEELRRSNLVKLDLSDGQTLYSKLVVGADGSKSNVRQIAGIKTTGWSYPQSAIICTVEHTAANDCAWQRFLPSGPIALLPIGDNFSNIVWTMSPEEASRHKSMSSEDFVMSVNRALDFGYGPHPNSSSLDHYVERLFSDF

SEQ ID NO: 30946 - protein, 296 aa, Triticum aestivum
MVGLAVACALSNMPLTKHLRVAVIDSNPALKSMNYLKKDGIPDSRVSTVTPATISFFRDIGAWEHILQQRHAFFGKMQVWDYTGLGYTRYNARDVSKEYLGCVVENKVLCNSLLLRLQEQKEDIGKMVYPTRLVSLAFPSKSRNVGVAGLKPPSTEAEELRRSNLVKLDLSDGQTLYSKLVVGADGSKSNVRQIAGIKTTGWSYPQSAIICTVEHTAANDCAWQRFLPSGPIALLPIGDNFSNIVWTMSPEEASRHKSMSSEDFVMSVNRALDFGYGPHPNSSSLDHYVERLFSDF

SEQ ID NO: 30947 - protein, 284 aa, Triticum aestivum
MPLTKHLRVAVIDSNPALKSMNYLKKDGIPDSRVSTVTPATISFFRDIGAWEHILQQRHAFFGKMQVWDYTGLGYTRYNARDVSKEYLGCVVENKVLCNSLLLRLQEQKEDIGKMVYPTRLVSLAFPSKSRNVGVAGLKPPSTEAEELRRSNLVKLDLSDGQTLYSKLVVGADGSKSNVRQIAGIKTTGWSYPQSAIICTVEHTAANDCAWQRFLPSGPIALLPIGDNFSNIVWTMSPEEASRHKSMSSEDFVMSVNRALDFGYGPHPNSSSLDHYVERLFSDF

SEQ ID NO: 30948 - DNA, 434 bp, Triticum aestivum
agcaaaactcaccggtatctagccaagttagctcgagctccattgtcacaatacgagcgtctacacacccacattgcacctccagggccaggccaacctcgaacgccatggaagcccctctgcaccagctggcccccatgcagcaagcactgctcgcccgtcctcagaactgcaagcacgacgccgcggcgaccatggccgcgacggacatggcgtgcctccagcagcagcagcagctgatgcagctgcagccggcggtggcgaacccgaacacgccctcgggcgcggcacgggagcagtgcccgcggtgcgcgtctcacgacaccaagttctgctactacaacaactacaacacgtcgcagccgcgccacttctgccgcgcctgccgccgctactggacgctcgggggctcctccgcaacgtcccatcggggc

SEQ ID NO: 30949 - protein, 144 aa, Triticum aestivum
QNSPVSSQVSSSSIVTIRASTHPHCTSRARPTSNAMEAPLHQLAPMQQALLARPQNCKHDAAATMAATDMACLQQQQQLMQLQPAVANPNTPSGAAREQCPRCASHDTKFCYYNNYNTSQPRHFCRACRRYWTLGGSSATSHRG

SEQ ID NO: 30950 - protein, 109 aa, Triticum aestivum
MEAPLHQLAPMQQALLARPQNCKHDAAATMAATDMACLQQQQQLMQLQPAVANPNTPSGAAREQCPRCASHDTKFCYYNNYNTSQPRHFCRACRRYWTLGGSSATSHRG

SEQ ID NO: 30951 - protein, 99 aa, Triticum aestivum
MQQALLARPQNCKHDAAATMAATDMACLQQQQQLMQLQPAVANPNTPSGAAREQCPRCASHDTKFCYYNNYNTSQPRHFCRACRRYWTLGGSSATSHRG

SEQ ID NO: 30952 - DNA, 1197 bp, Triticum aestivum
gaccaacttggagcctccctgttcttaaaaaatcaaccaacttgccagcgaacgagcgaccaccgacggctcctcgtcgccgccggtgatcgaggtgggccccgcaggccggatctcgggaggaggaggaggagcaatgtcgcgggcgtcgctgtccccgtcgtcgtcgggcgacgaggaggaggaggacgacgagggggtcgacgggtaccgcaagggcggataccacgccgtcctcctcctcctcctcgcctccccgcggccacacctcgactcgctccctcgagatcatctgttccatccttttgaggctgagatggcggctaccttcaatgttaatgctgaggcaggccttaaaaagcttgatggctaccttctgtctcgcagttacatctctggataccaagcttccaaggatgacttggctgtgtattcagagttctcagttgctccaccatcaacttgcaccaatgttgcaaggtggtacaatcacattgatgcactcctgaagctgagtggagttactgcccctggtcaaggtgtgaaggttctgtcatcagttgtccctgaaacctcaactactgatgttgctgaggctcctgcagctgatgatgacgatgacagcgatgttgacctttttggagaggaaaccgaggaggagaaaaaggcagctgaagagcgcgctgccaaagcaaaggcttctaccaagaagaaagaatctggcaagtcatcagttttgcttgatgttaagccatgggacgatgagaccgacatggtcaagctggaggaagctgtccgaagcatcaagatggagggccttctgtggggtgcttccaagctcatgcccgttggatatggcatcaagaagctccagattatgatgaccatcattgatgacctcgtctctgtcgacactcttattgaagaccatctctgcgttgaaccagccaacgagtacatccagagctgtgacattgttgccttcaacaaaatctaaatcttcctgaggcaggtgatggcggtgggcgcacaatatatctacagttttctgttgccgtgatggtgtcgtagctaaagcaagcataacatatctgccctgtgaggtttttggaccttagatcgagttgattcgtagtattactactgagtgttatttgcttcgtatgaaatgagacaatgtggttggattcctgttgc

SEQ ID NO: 30953 - protein, 286 aa, Triticum aestivum
MSRASLSPSSSGDEEEEDDEGVDGYRKGGYHAVLLLLLASPRPHLDSLPRDHLFHPFEAEMAATFNVNAEAGLKKLDGYLLSRSYISGYQASKDDLAVYSEFSVAPPSTCTNVARWYNHIDALLKLSGVTAPGQGVKVLSSVVPETSTTDVAEAPAADDDDDSDVDLFGEETEEEKKAAEERAAKAKASTKKKESGKSSVLLDVKPWDDETDMVKLEEAVRSIKMEGLLWGASKLMPVGYGIKKLQIMMTIIDDLVSVDTLIEDHLCVEPANEYIQSCDIVAFNKI

SEQ ID NO: 30954 - protein, 226 aa, Triticum aestivum
MAATFNVNAEAGLKKLDGYLLSRSYISGYQASKDDLAVYSEFSVAPPSTCTNVARWYNHIDALLKLSGVTAPGQGVKVLSSVVPETSTTDVAEAPAADDDDDSDVDLFGEETEEEKKAAEERAAKAKASTKKKESGKSSVLLDVKPWDDETDMVKLEEAVRSIKMEGLLWGASKLMPVGYGIKKLQIMMTIIDDLVSVDTLIEDHLCVEPANEYIQSCDIVAFNKI

SEQ ID NO: 30955 - DNA, 813 bp, Triticum aestivum
gcatccaacccctcctgctgctgctgtgttgcccgtgttgccgccccgaccgccgcctccaccacccacccacccacaccgcgccggcctcttccccctgtcccgtctccctcatggcctccgccgccgcatccgccgtctccttcgccaggcccgtcaaggcaatcaatgccaactcggtctccttctctgctccaaggaaaggcaatgtatccttccgtcttcagccagttccccagagattttctgtttcctgtgctgccaaaaaggagacagtagaaaaggtttgtgatattgtgaagagccagcttgcgcttgctgacgacactgtagtttctggctcctctacgtttgctgatcttggtgccgattccttggacacggttgagattgtcatgggcctcgaggaggctttcgggatcagcgtggaggagtcgagtgcgcagaccatcgcaacggtggaagacgccgccaacctcatcgacagccttgttgcaaactaaacatatttctttgcaataatgggctacccactgcaatcgttgctgctggagatgatcccgtttgacgtgctagattttactgtggagagtcggtgacatctgtatcagtgtttttgcctgtcttgccatattaagacattatttattaagcgaatgttgaaggaattttttcttgttgaagctgtgttggagactgatttcagggtctgaacatgctgtgctggaattaactacccctgtctttcttgggttcaaagaaaaaaaaaaaaaaaaaagcttatcgataccgtcgacctcgagggggggcccg

SEQ ID NO: 30956 - protein, 166 aa, Triticum aestivum
IQPLLLLLCCPCCRPDRRLHHPPTHTAPASSPCPVSLMASAAASAVSFARPVKAINANSVSFSAPRKGNVSFRLQPVPQRFSVSCAAKKETVEKVCDIVKSQLALADDTVVSGSSTFADLGADSLDTVEIVMGLEEAFGISVEESSAQTIATVEDAANLIDSLVAN

SEQ ID NO: 30957 - protein, 129 aa, Triticum aestivum
MASAAASAVSFARPVKAINANSVSFSAPRKGNVSFRLQPVPQRFSVSCAAKKETVEKVCDIVKSQLALADDTVVSGSSTFADLGADSLDTVEIVMGLEEAFGISVEESSAQTIATVEDAANLIDSLVAN

SEQ ID NO: 30958 - protein, 96 aa, Triticum aestivum
HPTPPAAAVLPVLPPRPPPPPPTHPHRAGLFPLSRLPHGLRRRIRRLLRQARQGNQCQLGLLLCSKERQCILPSSASSPEIFCFLCCQKGDSRKGL

SEQ ID NO: 30959 - DNA, 500 bp, Triticum aestivum
cacacacacacacacacacacacacacactgacacacacacacgcacacgctacagagcagagtcttgctccttctcctgcctgtagagcatccatcacgtacgttcacggacaaacatgtctccggtgaaggtgttcgggcatccgatgttgacaaacgtcgcacgggtgatgctcttcctggaggaggtcggcgccgagtacgagctcgtgcccatcgacttcgtcgccggcgagcacaagaggtcccaacacgtccagctaaacccgttcgcgaagatgcctgggttccaagatggcgatctcgtcctgttcgagtcgcgcgccatcgccaagtacatcctccgcaagtacggggggacagccggcctggacctcctcggagaaaacagcggaatcgaagaattagcagtggtggacatgtggacggaggtggaggcccagcagtactacccggccatctcgccggtggtgttcgagtgcatcatcattcccttcat

SEQ ID NO: 30960 - protein, 127 aa, Triticum aestivum
MSPVKVFGHPMLTNVARVMLFLEEVGAEYELVPIDFVAGEHKRSQHVQLNPFAKMPGFQDGDLVLFESRAIAKYILRKYGGTAGLDLLGENSGIEELAVVDMWTEVEAQQYYPAISPVVFECIIIPF

SEQ ID NO: 30961 - protein, 117 aa, Triticum aestivum
MLTNVARVMLFLEEVGAEYELVPIDFVAGEHKRSQHVQLNPFAKMPGFQDGDLVLFESRAIAKYILRKYGGTAGLDLLGENSGIEELAVVDMWTEVEAQQYYPAISPVVFECIIIPF

SEQ ID NO: 30962 - protein, 109 aa, Triticum aestivum
MLFLEEVGAEYELVPIDFVAGEHKRSQHVQLNPFAKMPGFQDGDLVLFESRAIAKYILRKYGGTAGLDLLGENSGIEELAVVDMWTEVEAQQYYPAISPVVFECIIIPF

SEQ ID NO: 30963 - DNA, 1020 bp, Triticum aestivum
aagaataccccacttaaactttcttatgtatatcaatgtgccggctgtgattctttccatcttcaatcccttgggaggactgttactaagaataatagcttgaagcatgcgcctggtattggacctgttgttcctcaagaatgcagcgactgtgaaaagaaatttaatgtgggtgggccaatatggtctgctcctattcatgatcaagattgggtactttctacgctgacagatgttaggcaaatgaaggatagatatcccgcatacaacaaaattacttcagttctaactactgtatcagaggaattgcatgacattccattattttttagtctccacaacatatctgggactgtgaagtgcacatcaccatctgcagttatgttccggtcagcggttataaatgcaggatatcagatctcaagcagtcactgtaatccgcttgggctgaagtctgatgccccctgggatgttatttgggacatcatgcgctgctgggtgaaaaaccatccaatcaaggaacagccgcgtgactctccgggcactgcaatcctttctaaatctccacagctagaagcaaatttctctagagcagttgctgccctcagcaaggctcaggttaagaaggtgaatcggttccttccaaacccagaaagtcactggggtccgaaggtcagagcaggtcggagaattactagcaagcatatctctctgttaggcgcagaggctctcaatggagctatcagccaccaagatggaaatggagcggtgacagataagccagcttctgatactggagcaactgtcacgaatgaagaagagaatgagccttcaaccaaacgccagaaaactggcgatggtgaacaggccagcgaaccttgatcgacatggtcgtctaaacttttgttcgttaatcttgatatcactagttgtttctttcttgtgacccaacagattattgatattacctacggtgacatgttttgggcagtgaattttgatcaggcgatctatttttcc

SEQ ID NO: 30964 - protein, 293 aa, Triticum aestivum
KNTPLKLSYVYQCAGCDSFHLQSLGRTVTKNNSLKHAPGIGPVVPQECSDCEKKFNVGGPIWSAPIHDQDWVLSTLTDVRQMKDRYPAYNKITSVLTTVSEELHDIPLFFSLHNISGTVKCTSPSAVMFRSAVINAGYQISSSHCNPLGLKSDAPWDVIWDIMRCWVKNHPIKEQPRDSPGTAILSKSPQLEANFSRAVAALSKAQVKKVNRFLPNPESHWGPKVRAGRRITSKHISLLGAEALNGAISHQDGNGAVTDKPASDTGATVTNEEENEPSTKRQKTGDGEQASEP

SEQ ID NO: 30965 - protein, 212 aa, Triticum aestivum
MKDRYPAYNKITSVLTTVSEELHDIPLFFSLHNISGTVKCTSPSAVMFRSAVINAGYQISSSHCNPLGLKSDAPWDVIWDIMRCWVKNHPIKEQPRDSPGTAILSKSPQLEANFSRAVAALSKAQVKKVNRFLPNPESHWGPKVRAGRRITSKHISLLGAEALNGAISHQDGNGAVTDKPASDTGATVTNEEENEPSTKRQKTGDGEQASEP

SEQ ID NO: 30966 - protein, 166 aa, Triticum aestivum
MFRSAVINAGYQISSSHCNPLGLKSDAPWDVIWDIMRCWVKNHPIKEQPRDSPGTAILSKSPQLEANFSRAVAALSKAQVKKVNRFLPNPESHWGPKVRAGRRITSKHISLLGAEALNGAISHQDGNGAVTDKPASDTGATVTNEEENEPSTKRQKTGDGEQASEP

SEQ ID NO: 30967 - DNA, 424 bp, Triticum aestivum
aatcccgtgtggtgcctttacctcgttctccggctctccgtcccattccatccaccgcgtccagacacaatcttaccggcgacgcctcgcgacctcctcagctcctcacccccttcgccgccgctgccaccgcggggacccgctctgatcccgtcagttgtagaagtaactgattagcctgatggctatggtcgatgagcctctctatccaattgccgtgctgatagatgagcttaaaaatgaagatattcaattgcgcctgaactccatcagaagactttccactattgcacgggcacttggagaagaaagaaccaggaaggaactgattcctttcctcagcgaaaacaatgatgatgaagatgaggtgcttcttgcaatggctgaagaattgggtgtgttcattccttatgttggggtgtag

SEQ ID NO: 30968 - protein, 80 aa, Triticum aestivum
MAMVDEPLYPIAVLIDELKNEDIQLRLNSIRRLSTIARALGEERTRKELIPFLSENNDDEDEVLLAMAEELGVFIPYVGV

SEQ ID NO: 30969 - protein, 78 aa, Triticum aestivum
MVDEPLYPIAVLIDELKNEDIQLRLNSIRRLSTIARALGEERTRKELIPFLSENNDDEDEVLLAMAEELGVFIPYVGV

SEQ ID NO: 30970 - protein, 58 aa, Triticum aestivum
NPVWCLYLVLRLSVPFHPPRPDTILPATPRDLLSSSPPSPPLPPRGPALIPSVVEVTD

SEQ ID NO: 30971 - DNA, 1795 bp, Triticum aestivum
atacggcccaactttttactcctgtcgggcttcacctgatctctccctttgtcttaaagaaaaggaaaaaaaaaagaggacagatctctccctgttccgcttcctcctccgccgtgtcaagcaaaccacggcgatggacgaaaccctcgccaccgtcctctcctacctcccgcctccctcggtctccaccaccgcatccccgtcctcctcgtccaccgcctccgatgacgatgaccgcatcaactgcctcccggacgtgctcctccgcaacatcatctctcgcctccccaccaaggacgcggcccgcaccaccatcctctcctcccgctggcgcagcctctgggcttccaccccactccggctcgacgacgctggactcgttcctaccgccgtcaccgccgcgctgaactcccacccgggctcggtcacttccgcccgcctctcctccgagcacctcgcttaccaggaacccgacgtcctcgactcctggttcgcctccctctcagccaagaacgtcgaggaactctccgtcgtcaacggatcctggcctgctgaatgtgagtggcgtcctccccccagcctccttggatgcgcgtccctccgccgcgtctggctcgggctctgccagttcccggacatttccggcctcgctccggccttccccagcctgcaagagctcgggattgtccattgctccatgcaggaccgcgagctccacgctgtgctcccgcgctgccccgagcttgagaggctcgctttcgtgctgacacaggactacccaaggtacatccacatctggtcagggagcctccagtccctggttgtgtggaggtccatggtcagagaggtgcaccttgacgatgcccccaacttggagcggttgctgttggagccgattggcggtgcctctactcacgtcaagattattaatgcaccgaggctgaaaattttcgggtactttgacgttggactgcatcagctcaagatcggccccactgtgatcaaggatgggatagggatgaaggtgaaaccgaatgcgatggttcggacccttaggacattggcattgaaggtgcagtttggagacgagaagcaagtcaagctggtgcccctcttgcttagatgcttcccatgcctagaaaccttgtatatcaagtcatctccttctgaatcaccaaccaatgttgatgtggatttctgggatcaagtaggccacactgaatgtgttacctcacatattaagaagtttgtgttcgaagctgcccgaggagaggataccgagctggcatttgtcaagtttgtcatggaaagagcccaaatattggaggagatgcgtgttttcgtggatgatggttgctctagagatgttgtgctaaggcgtttatcttcagaagaatgtgtgtctgcagatgctagcgtggtggtggagaggcaagacatgtcccatgcgtggagcttcgaaagagctagcaacatgtcacagtgtgacccctttggttgctaaagttggaggataacaaagaagtgacaagatcacgtctcttcaagccttacccagatggaatgaaaaaaagagatgggtcctgaaccgagtcaagccataggcccctgaagcaagttgtagtctttttgtcttctataccttggttcagtacaagcttcgaacctttggttttgcttgtgttagacgtgctttgtggacctgaacatcggctgttgtaattgaatatgattatgtggatttgtgctttatggagctgcaactggtttcaacttgttaaagatcgtgtgctgc

SEQ ID NO: 30972 - protein, 500 aa, Triticum aestivum
YGPTFYSCRASPDLSLCLKEKEKKKRTDLSLFRFLLRRVKQTTAMDETLATVLSYLPPPSVSTTASPSSSSTASDDDDRINCLPDVLLRNIISRLPTKDAARTTILSSRWRSLWASTPLRLDDAGLVPTAVTAALNSHPGSVTSARLSSEHLAYQEPDVLDSWFASLSAKNVEELSVVNGSWPAECEWRPPPSLLGCASLRRVWLGLCQFPDISGLAPAFPSLQELGIVHCSMQDRELHAVLPRCPELERLAFVLTQDYPRYIHIWSGSLQSLVVWRSMVREVHLDDAPNLERLLLEPIGGASTHVKIINAPRLKIFGYFDVGLHQLKIGPTVIKDGIGMKVKPNAMVRTLRTLALKVQFGDEKQVKLVPLLLRCFPCLETLYIKSSPSESPTNVDVDFWDQVGHTECVTSHIKKFVFEAARGEDTELAFVKFVMERAQILEEMRVFVDDGCSRDVVLRRLSSEECVSADASVVVERQDMSHAWSFERASNMSQCDPFGC

SEQ ID NO: 30973 - protein, 456 aa, Triticum aestivum
MDETLATVLSYLPPPSVSTTASPSSSSTASDDDDRINCLPDVLLRNIISRLPTKDAARTTILSSRWRSLWASTPLRLDDAGLVPTAVTAALNSHPGSVTSARLSSEHLAYQEPDVLDSWFASLSAKNVEELSVVNGSWPAECEWRPPPSLLGCASLRRVWLGLCQFPDISGLAPAFPSLQELGIVHCSMQDRELHAVLPRCPELERLAFVLTQDYPRYIHIWSGSLQSLVVWRSMVREVHLDDAPNLERLLLEPIGGASTHVKIINAPRLKIFGYFDVGLHQLKIGPTVIKDGIGMKVKPNAMVRTLRTLALKVQFGDEKQVKLVPLLLRCFPCLETLYIKSSPSESPTNVDVDFWDQVGHTECVTSHIKKFVFEAARGEDTELAFVKFVMERAQILEEMRVFVDDGCSRDVVLRRLSSEECVSADASVVVERQDMSHAWSFERASNMSQCDPFGC

SEQ ID NO: 30974 - protein, 268 aa, Triticum aestivum
MQDRELHAVLPRCPELERLAFVLTQDYPRYIHIWSGSLQSLVVWRSMVREVHLDDAPNLERLLLEPIGGASTHVKIINAPRLKIFGYFDVGLHQLKIGPTVIKDGIGMKVKPNAMVRTLRTLALKVQFGDEKQVKLVPLLLRCFPCLETLYIKSSPSESPTNVDVDFWDQVGHTECVTSHIKKFVFEAARGEDTELAFVKFVMERAQILEEMRVFVDDGCSRDVVLRRLSSEECVSADASVVVERQDMSHAWSFERASNMSQCDPFGC

SEQ ID NO: 30975 - DNA, 1229 bp, Triticum aestivum
tgaacccgtctcttactttacctccttggaggaaaacccaactggagcccctcctttttctgccttcggcttgggtcctatattataaaccaaagggaggaaggacagctagctagctgtatcagagagccccatacctagtcgatcgtctgctctcttctgcctagctaggtttaccctccttatctgcgtgtttggcagagttccgggctgagactaagaagaggtcgagatggggaggggaaggattgagatcaagaggatcgagaacaccactagccggcaggtgaccttctgcaagcgccggaacgggctcctcaaaaaggcctacgagctctccgtcctgtgcgacgccgaggtggcgctcatcgtcttctccagccgcggccgcctctacgagtactccaacaacagtgtcaaggctacaattgacaggtacaagaaggcacatgcttgtggctcaacctctggggtacctctcatagaagtcaatgctcagcaatactaccagcaagaagctgcaaagctgcgccaccagatccagatgctgcaaagcactaacaagcacttggttggtgattctgttgggaacctgtcactcaaggagctgaagcaactcgaaagccggcttgagaaaggcattgcgaagatcagggccaggaagaatgagctcctatcttctgagatcaactacatggtcaaaagggagatagagcttcagagtgacagcattgatctcagaaccaagattgcggaggaggagcagcggttgcagcaggtgactatcgccaggccctcggtggcgccggagctgaaccctttcaccgcactggacatgaagtgcttcttccctgccaacctcttcgaggcggcggtgcatgcgcacgcgcaggcacaggctcaggctcaggctcaggcctcgcttcagctgaacctaggctaccagcagcttgctccaccgggcgccggcgatgtggctcatcagttctagtcaacctgcaggagctcttgcttgactacacacactgcaataaaactggaaagtcgtcggcagtgttatcagtactcaactgttccggtcaaaccgtctggctaagatatatgtgtgctaagttttattgtctcaagtacctctaaatttgccgctggtgtagaaccaaatttctgagataaaacctattgattaataattatttttttccttttcttttttgatgaaaaggaggtcg

SEQ ID NO: 30976 - protein, 252 aa, Triticum aestivum
MGRGRIEIKRIENTTSRQVTFCKRRNGLLKKAYELSVLCDAEVALIVFSSRGRLYEYSNNSVKATIDRYKKAHACGSTSGVPLIEVNAQQYYQQEAAKLRHQIQMLQSTNKHLVGDSVGNLSLKELKQLESRLEKGIAKIRARKNELLSSEINYMVKREIELQSDSIDLRTKIAEEEQRLQQVTIARPSVAPELNPFTALDMKCFFPANLFEAAVHAHAQAQAQAQAQASLQLNLGYQQLAPPGAGDVAHQF

SEQ ID NO: 30977 - protein, 148 aa, Triticum aestivum
MLQSTNKHLVGDSVGNLSLKELKQLESRLEKGIAKIRARKNELLSSEINYMVKREIELQSDSIDLRTKIAEEEQRLQQVTIARPSVAPELNPFTALDMKCFFPANLFEAAVHAHAQAQAQAQAQASLQLNLGYQQLAPPGAGDVAHQF

SEQ ID NO: 30978 - DNA, 496 bp, Triticum aestivum
aaaaacctccaaaacaattccaattcctcccctcccacagttccactccatccctcgcccccgcccctcctcgctccggagcctcctcccgggccaccgccatgctgcccgcgcgcttcctcaagctctcgctgctacgccgcctcggcaccgcccgtgcggccggagtgcccccgccgtggcagaccaggcaatttccggtgcggggttaccagcctcgaggttattctaccggaggaagctccaagtatgatagaccgatgagacagtttgctgaagataacgagtcaaattctcagccactaatatattacattgtcccatctgccattctagcctttgttggactagccacttatgttcactataatgatgagaggcgtgcagttcccttaggtaaacaagcacagcagaccagtattcccaaaaggtgcactaccaacagacctgcaatcggaggaccatttaagctctatgatacagaaaacaatgtggt

SEQ ID NO: 30979 - protein, 164 aa, Triticum aestivum
KPPKQFQFLPSHSSTPSLAPAPPRSGASSRATAMLPARFLKLSLLRRLGTARAAGVPPPWQTRQFPVRGYQPRGYSTGGSSKYDRPMRQFAEDNESNSQPLIYYIVPSAILAFVGLATYVHYNDERRAVPLGKQAQQTSIPKRCTTNRPAIGGPFKLYDTENNV

SEQ ID NO: 30980 - protein, 131 aa, Triticum aestivum
MLPARFLKLSLLRRLGTARAAGVPPPWQTRQFPVRGYQPRGYSTGGSSKYDRPMRQFAEDNESNSQPLIYYIVPSAILAFVGLATYVHYNDERRAVPLGKQAQQTSIPKRCTTNRPAIGGPFKLYDTENNV

SEQ ID NO: 30981 - protein, 87 aa, Triticum aestivum
KNLQNNSNSSPPTVPLHPSPPPLLAPEPPPGPPPCCPRASSSSRCYAASAPPVRPECPRRGRPGNFRCGVTSLEVILPEEAPSMIDR

SEQ ID NO: 30982 - DNA, 1389 bp, Triticum aestivum
atacttctggctagtcaaactgtgatccctcgctcctccgcaccgccgccgccgctgcgatgtccaccgccgccgccgccgccggccgaggtctcaaatccgtctcccgcgccgccttctcctggaagccgacgggccgggcgcagcagacgctcgcggcggcggtgagcaggtcgggcgtgggactccactcgggcgcgcgcgccaccgccaggttgctccctgcgcgcgccggcgaggggaggtacttcgtcgtggaggaggcgagggtggcggcggaggcggggaatgccgagccacagtctccgctctgcaccacgctgcggagcgggagcggcggcgcgcgggtgcgcacggtggagcacctgctctcggccatggaggcgttcggtgtcgacaactgccgcgtcgaggtcagcggcggcgatgagatccctttgcttgatggatcagcgcaagagtgggtggaggccattcggggtgcaggtctgtgtgcggccgaggatatcggtggacagaagttggagaaactggcacccaagatcgacgagcctgtttacctgcgtaaggacgattgctttgtagctgcattcccttcctcgcaaatccacatcacctatggaattgattttccaaaggcgccagcgattggttgtcaatggttcaatactttcctggatgctgatatatactcaagcaagatagctcctgcaagaactttctgtatttttgaagaggttgaaaaaatgcgtgatgccgggcttataaaaggaggatcactggaaaatgctatggtttgcagtatgtctggtggttggcttaacccaccacttcgttttgatgatgaaccttgccgccacaagattttagatcttataggtgacttctcacttcttgcacggaatggcagccagggttttccaattgctcatgtagttgcctacaaggctggccatgccctgcacaccagtttcctacaccatttatcgggggagaccagtgtggaccaaggaacgcttgcttggtgatcttgaagcgtgtgcatgtggagcgggtactgttcatatgttggtgatagtgatgctcgacaggaagacggcagatttcagcatataccgtactaataaccatctgatggccctcgccctcactctgacagtcggaccggttgtactgtacatctcctccatctttggcaagtgatttctttagttcacgagccatatacagtatcattatcacatgctttggggagattgatccgaagaattatgtttgtacaccatgtgttatagttgtacctgaacacgtttcagtaaaaaaaaaaaaaaaaaagcttatcgataccgtcgactgtttaaacacaataaagttggaacgggagggggg

SEQ ID NO: 30983 - protein, 322 aa, Triticum aestivum
MSTAAAAAGRGLKSVSRAAFSWKPTGRAQQTLAAAVSRSGVGLHSGARATARLLPARAGEGRYFVVEEARVAAEAGNAEPQSPLCTTLRSGSGGARVRTVEHLLSAMEAFGVDNCRVEVSGGDEIPLLDGSAQEWVEAIRGAGLCAAEDIGGQKLEKLAPKIDEPVYLRKDDCFVAAFPSSQIHITYGIDFPKAPAIGCQWFNTFLDADIYSSKIAPARTFCIFEEVEKMRDAGLIKGGSLENAMVCSMSGGWLNPPLRFDDEPCRHKILDLIGDFSLLARNGSQGFPIAHVVAYKAGHALHTSFLHHLSGETSVDQGTLAW

SEQ ID NO: 30984 - protein, 216 aa, Triticum aestivum
MEAFGVDNCRVEVSGGDEIPLLDGSAQEWVEAIRGAGLCAAEDIGGQKLEKLAPKIDEPVYLRKDDCFVAAFPSSQIHITYGIDFPKAPAIGCQWFNTFLDADIYSSKIAPARTFCIFEEVEKMRDAGLIKGGSLENAMVCSMSGGWLNPPLRFDDEPCRHKILDLIGDFSLLARNGSQGFPIAHVVAYKAGHALHTSFLHHLSGETSVDQGTLAW

SEQ ID NO: 30985 - DNA, 978 bp, Triticum aestivum
gaaaccaaaaaaccctcgttccccactctggactgccctcctcctccctcggcggtttgttcatcgcctctgccgaaaaatcaaacccaaaaccaagaaagggggcgaaaatggctgaggcgaactcgtacgaggagcagcgcaggaggcaggtggaggagaacaagcggaagctggaggagctgcgcctgcaccacctctccgccgccgtccgcgaggccgccgtcaagcccaagctgaagaggaaggccccgaagccgtgggacgccgccgatgacgccccgccccggcgttccggccgtatcgccaccctccccgagcagcccgactatcgcgacaatctgggcaccgggaaaccacggcagcagaaggaagtaaagcctgatcatgcgtacgccatcgccaaggccgaagagctacaggatgagctaggctccgactacccgacctttgtcaaacccatgccacagtctcttacctcgctgcatatcccggcacagttcagcatggagcatctcccggacaatggcatgagaatggttttggtggatgaggaggaggaggagtttaaggtgagctatcgtccacacagtagcagtcttgtcgccgggtggagcgagtttgccatcgacaatgagctagttgaaggtgattgcttggtgttccagctgatcaagagggcattgttcaaggtctacatattcagggcaagttcgtactatgaaaatgagcattaatggagcagccggcaggctcctggttgcttcatgtcaacttgtgttgaactagcacagttcagaaatctgcactatctcagcggttagttatgtatgtatggctactgtcaggcattattagaatctctcgtgtgattgcaagtcgtatggtaactgtcggcatcttgtaaagtttgtcatgcgacggcaagtgtgaaacttgacatgtgatacccatcatggttgatatcctattgattcg

SEQ ID NO: 30986 - protein, 244 aa, Triticum aestivum
NQKTLVPHSGLPSSSLGGLFIASAEKSNPKPRKGAKMAEANSYEEQRRRQVEENKRKLEELRLHHLSAAVREAAVKPKLKRKAPKPWDAADDAPPRRSGRIATLPEQPDYRDNLGTGKPRQQKEVKPDHAYAIAKAEELQDELGSDYPTFVKPMPQSLTSLHIPAQFSMEHLPDNGMRMVLVDEEEEEFKVSYRPHSSSLVAGWSEFAIDNELVEGDCLVFQLIKRALFKVYIFRASSYYENEH

SEQ ID NO: 30987 - protein, 208 aa, Triticum aestivum
MAEANSYEEQRRRQVEENKRKLEELRLHHLSAAVREAAVKPKLKRKAPKPWDAADDAPPRRSGRIATLPEQPDYRDNLGTGKPRQQKEVKPDHAYAIAKAEELQDELGSDYPTFVKPMPQSLTSLHIPAQFSMEHLPDNGMRMVLVDEEEEEFKVSYRPHSSSLVAGWSEFAIDNELVEGDCLVFQLIKRALFKVYIFRASSYYENEH

SEQ ID NO: 30988 - DNA, 1705 bp, Triticum aestivum
atgttcctccagtttttcctgaatcatctgttctcacaaaagaaggtgcaactaagattgatatggattctgctcaagcacaacaaagaaatcaaaataacatggtcttgcaaggtcaagagcacatgaccttgaggaccaacaacctgactgccagcaatgactctgatgctactgttcagaagcctatgatgtggtctccatcccccaacatcggaaaaaaccatgtatccgcgtttcagcagaggccctctatggataattggatgcagctgggaagatgtgatgctagttctggtgctcaatcttttggtgattcccagggcttcttcatgcagacctttgatgaggctcctaatcgtcatggctcattcaagaaccagttccaggatcacagttctgctcgtcacttctcagacccgtacacaaagatgcagacagaggccaatgagtttcatttctggaatagccaaagcaccgtgtacggtaatccaagagatcagtcacaaggtttcagatttgaagagcacccatcaaattggttaaggcagcagcagttctccccggttgaacaaccccgagtgatccggcctcacgcatcaatagctcctgttgacttggagaaagcaagagaaggcagtggtttcaagatttttgggtttaaagttgatactaccagcaccccttctaaccatttgagctcctcaatggctgcaatccacgagcctgtgctacaaattcaagcatccgcatcgttaactcaactgcagcatacacacgctgattgtattcctgagctgtccgtaagcactgctgggactactgagaatgaaaaaagcattcagcaagctcctcacagttcgaaagacgtccaaagcaagtcccatggtgcttccacaaggagttgcacaaaggttcacaagcaaggtgttgcacttggtagatcagtggatctgtcaaagtttggtgactatgacgaactcacagctgagctagacaggatgtttgagtttgatggtgaactgatgtcttcaaacaaagattggcagattgtgtatactgatcctgagggtgacatgatgctggtgggagatgatccatgggaggagttctgcaacatagtgcgcaagatctttatctacaccaaggaggaggtccagaagatgaactcgaaatcatctgccccaagaaaggaagaaggttctggagatgctgatggcgcaaacgagaaggctcatctcgccacgtcaagccatttagataactaggcaactaggttgcgttaagccgatttgaggcatgaggtgaggtatcggacggggagctttgtcctgccctcgctcggtcccagccagccagccagccaatgaagtaactcctgatgtcttttgatgatcgccccctcctccttgtgatgcagcaacgacaacccaacccaaccctttggatttagttattacttgctaggtaatgtagagagagagaagagactttgctgcgctgcgcgattgtttatccgctggtttgcttgctcttggcagtaagatttagggccaagatttattattgtcgctgccccctgcttgaatgcatgcttgatccttagccctccctcctctttcccccccaaccaccctgatgtaaatatttatctaccttgctagctagcgttagtaagtacgtaagcaagtaccctgtattattt

SEQ ID NO: 30989 - protein, 421 aa, Triticum aestivum
VPPVFPESSVLTKEGATKIDMDSAQAQQRNQNNMVLQGQEHMTLRTNNLTASNDSDATVQKPMMWSPSPNIGKNHVSAFQQRPSMDNWMQLGRCDASSGAQSFGDSQGFFMQTFDEAPNRHGSFKNQFQDHSSARHFSDPYTKMQTEANEFHFWNSQSTVYGNPRDQSQGFRFEEHPSNWLRQQQFSPVEQPRVIRPHASIAPVDLEKAREGSGFKIFGFKVDTTSTPSNHLSSSMAAIHEPVLQIQASASLTQLQHTHADCIPELSVSTAGTTENEKSIQQAPHSSKDVQSKSHGASTRSCTKVHKQGVALGRSVDLSKFGDYDELTAELDRMFEFDGELMSSNKDWQIVYTDPEGDMMLVGDDPWEEFCNIVRKIFIYTKEEVQKMNSKSSAPRKEEGSGDADGANEKAHLATSSHLDN

SEQ ID NO: 30990 - protein, 401 aa, Triticum aestivum
MDSAQAQQRNQNNMVLQGQEHMTLRTNNLTASNDSDATVQKPMMWSPSPNIGKNHVSAFQQRPSMDNWMQLGRCDASSGAQSFGDSQGFFMQTFDEAPNRHGSFKNQFQDHSSARHFSDPYTKMQTEANEFHFWNSQSTVYGNPRDQSQGFRFEEHPSNWLRQQQFSPVEQPRVIRPHASIAPVDLEKAREGSGFKIFGFKVDTTSTPSNHLSSSMAAIHEPVLQIQASASLTQLQHTHADCIPELSVSTAGTTENEKSIQQAPHSSKDVQSKSHGASTRSCTKVHKQGVALGRSVDLSKFGDYDELTAELDRMFEFDGELMSSNKDWQIVYTDPEGDMMLVGDDPWEEFCNIVRKIFIYTKEEVQKMNSKSSAPRKEEGSGDADGANEKAHLATSSHLDN

SEQ ID NO: 30991 - protein, 388 aa, Triticum aestivum
MVLQGQEHMTLRTNNLTASNDSDATVQKPMMWSPSPNIGKNHVSAFQQRPSMDNWMQLGRCDASSGAQSFGDSQGFFMQTFDEAPNRHGSFKNQFQDHSSARHFSDPYTKMQTEANEFHFWNSQSTVYGNPRDQSQGFRFEEHPSNWLRQQQFSPVEQPRVIRPHASIAPVDLEKAREGSGFKIFGFKVDTTSTPSNHLSSSMAAIHEPVLQIQASASLTQLQHTHADCIPELSVSTAGTTENEKSIQQAPHSSKDVQSKSHGASTRSCTKVHKQGVALGRSVDLSKFGDYDELTAELDRMFEFDGELMSSNKDWQIVYTDPEGDMMLVGDDPWEEFCNIVRKIFIYTKEEVQKMNSKSSAPRKEEGSGDADGANEKAHLATSSHLDN

SEQ ID NO: 30992 - DNA, 619 bp, Triticum aestivum
acaggccacagttcatcagccattgccatttatcctctccttactcccactctaattggtagccgccgccgccgacgaggctacagcaccgaccgctcgagcgttgacgcgatctccctcgactggcgtcggagatcgttcgtcgacaacgtgccccacgccgtattttctgactacccggagtcaacgccagctctgctccggctaccctgattttcccgtcgccggaatcagtcagtataccatataaagccacgatgccttccggctcgggctccgacccgctgctcgcgcgcgccgacggcagcagcatggaggaagacgacggcatcgacgtcgcggcggtggaccaccgcggccgtcccgccccccgcgcctccaccggccgctggcggtcggcgctcttcatcatagcggtggagatcgcggagcggttctcgttctacggcgtgtcggcgaacctgatcagctacctgacggggccgctgggcgagagcaacgcccaaggccgcgtccgccatcaacgcctggaacggcgtggcgcagctgctgccgctgctcggcgccgccctcgccgactcctgcctcggccgctaccgcaccatcgtcatcgcctccc

SEQ ID NO: 30993 - protein, 120 aa, Triticum aestivum
MPSGSGSDPLLARADGSSMEEDDGIDVAAVDHRGRPAPRASTGRWRSALFIIAVEIAERFSFYGVSANLISYLTGPLGESNAQGRVRHQRLERRGAAAAAARRRPRRLLPRPLPHHRHRL

SEQ ID NO: 30994 - protein, 102 aa, Triticum aestivum
MEEDDGIDVAAVDHRGRPAPRASTGRWRSALFIIAVEIAERFSFYGVSANLISYLTGPLGESNAQGRVRHQRLERRGAAAAAARRRPRRLLPRPLPHHRHRL

SEQ ID NO: 30995 - protein, 70 aa, Triticum aestivum
TGHSSSAIAIYPLLTPTLIGSRRRRRGYSTDRSSVDAISLDWRRRSFVDNVPHAVFSDYPESTPALLRLP

SEQ ID NO: 30996 - DNA, 1436 bp, Triticum aestivum
atcatcaacgaaccgagagaagtgacactagcaaatgggctcactgctcctcttaatatgcagatcttctacatctccttctcagctcacgctgattttccacagacgagcggcttcttggaagagcttcgcccacccaacattattcttgtccacggagaagcaaatgagatgagtaggcttaagcagaaacttatcacccagtttgatgggacaaacacaaaaattgtgtctcccaagaactgccaatcggtcgagatgtatttcagctctgagaaaatggccaagacaattggcagactggcagagaaggtaccggaagtgggcgaaacagtcagcggcttgcttgtgaagaaggggttcacatatcagattatggcccctgaggacctccgtgtgtacacgcagctgtctactgccaacattactcagcggatagctgtcccgtattctggttcttttgaggtgatcaagtacagactgaagcaaatatatgagagcgtggaatcatcaaccgaagaagatgttccagtactgactgttcacgagagggtggccatccgcctggattcagagagctacgtgacgctgcagtggtcgtccgatcccataagcgacatggtgtccgactcggtggtggccatgatcttgaacattggccgtgagggtccaaaggttgttccgatcgaagaagcggtgaagacggaagaagaaacagagaaggtggcgcggaaggtggtgtactctctgatggtatcactcttcggcgacgttaaagttgcagaggaagggaagcttgttataactgtggatggagacgtcgcgcacttggatggcaggagcggtgatgttgagtccgagaacgctgggctgaaagagaggatcaagaccgcgttccggcgcatacagggtgcggtgagaccgatcccgctttcagcctcctgagctgaagccatgagaattttctatggctcgtgattgaacaaggcactagcaggctgtgttacgtgttgttatgcagccattttaatcttgagcggaatgtaattctaccacctgttgtgctttgctagatgatcagtagtccttagaagttatctgaagaatcctctcacttgcactgaatttgagctgtggtgctttactagatgatcaggtaggcctgttttactgcctctggaacatgatcgagttgtagcattgtggacaatttgtagaagttatgtgaacaatcctctcattggcactaagtttgagctgaagttgcagtgcatctgagcctttcaacttgagtgtgtgtcgatcctctgtttgagtttctgctgttggtgctcctttatctatgaacatcatgccaagtcttcttaggtgaactgtgtcatttaattttcattggcttatacgctttgtttatatcaagtgatgagcaagtagcc

SEQ ID NO: 30997 - protein, 314 aa, Triticum aestivum
IINEPREVTLANGLTAPLNMQIFYISFSAHADFPQTSGFLEELRPPNIILVHGEANEMSRLKQKLITQFDGTNTKIVSPKNCQSVEMYFSSEKMAKTIGRLAEKVPEVGETVSGLLVKKGFTYQIMAPEDLRVYTQLSTANITQRIAVPYSGSFEVIKYRLKQIYESVESSTEEDVPVLTVHERVAIRLDSESYVTLQWSSDPISDMVSDSVVAMILNIGREGPKVVPIEEAVKTEEETEKVARKVVYSLMVSLFGDVKVAEEGKLVITVDGDVAHLDGRSGDVESENAGLKERIKTAFRRIQGAVRPIPLSAS

SEQ ID NO: 30998 - protein, 295 aa, Triticum aestivum
MQIFYISFSAHADFPQTSGFLEELRPPNIILVHGEANEMSRLKQKLITQFDGTNTKIVSPKNCQSVEMYFSSEKMAKTIGRLAEKVPEVGETVSGLLVKKGFTYQIMAPEDLRVYTQLSTANITQRIAVPYSGSFEVIKYRLKQIYESVESSTEEDVPVLTVHERVAIRLDSESYVTLQWSSDPISDMVSDSVVAMILNIGREGPKVVPIEEAVKTEEETEKVARKVVYSLMVSLFGDVKVAEEGKLVITVDGDVAHLDGRSGDVESENAGLKERIKTAFRRIQGAVRPIPLSAS

SEQ ID NO: 30999 - protein, 257 aa, Triticum aestivum
MSRLKQKLITQFDGTNTKIVSPKNCQSVEMYFSSEKMAKTIGRLAEKVPEVGETVSGLLVKKGFTYQIMAPEDLRVYTQLSTANITQRIAVPYSGSFEVIKYRLKQIYESVESSTEEDVPVLTVHERVAIRLDSESYVTLQWSSDPISDMVSDSVVAMILNIGREGPKVVPIEEAVKTEEETEKVARKVVYSLMVSLFGDVKVAEEGKLVITVDGDVAHLDGRSGDVESENAGLKERIKTAFRRIQGAVRPIPLSAS

SEQ ID NO: 31000 - DNA, 1962 bp, Triticum aestivum
catagcttcattccgtctcgatctctgccttctcctgagagactcgtatcagtcggctgcccaccatcgccggtccaagaagccgcctgctcgtcggctactccgccgccccactcgcccatccacccacctcccttccccggattcaggaccggatcggccttcccctctgtagatggacatcacaatcaattccttgacgtacaaaggttcgattccagatgcaattaatcaatcaagaagggagaaaaaactctttgtaatttacatatcaggtcaagatgaaacctcaagtagtttggaacagtctacattggttgatgaacatgtggctgcagtgataagcagatgttgcatattcttgcaactaaaacaaggcaatgttgacgcgcttcaattttcagctatctatccacagaagtctgtcccaagtatatctgtcgttggactgaatggtgctatgctatggaatcatgaggggtatattagcccagaagagcttaaggaaagcattgataaagcttgggctgcacttcaactgcaggagacagcggcaaccctgttagctgcatcacttgcttcaagaatgtctgaacctgcgaatactgcttcgacaactatgcctggtgaagatggttcatctacttcagaaaatcattccaattcatcaggtcaatcctcagagtcttctgcagtccgtgggtttgctaattctactgctttggtagcacaaccacctagtagcacaagccatgctgaacttctcaagacaagtaaaatcccaaaatcagattcagctccatgcaacataaccgctgaggaaaagctagattcagcatgtcaggctctgttgccagattttccagcaagctcaaatgtggacagttccacagatccaaatcagacaggcagtacaccttcgccaaaaaggaagaatatggtggatgggaatagccctaaagttccctccaagccagcttctagcataccaactaggagtactccacagttgcctgtggaacaagataaggcaactactagcagagctattgaagtgaccacagattctgcaaagacagatgatattcagctggccattcgtatgcctgatggacctagtctgcagattaaactgacaaaagaagatgttttaaggaaggtgaagacttttgtggatgaaaaccaagatagtgggattggatcatataatcttgcaatgctttatcctagaaaagtgttcacggaacaagatctggaaaccacattgtatgagctgggtattgaaacccgccaggcccttgttgtcgttccgaatcgtcaatctgttaaagtggtaaggcaccaatcgtcattgccatccagtgatctggatcgcactggggctacagacaggtcgggtggttggggttttctgggggcagcgttatcatacgtgaatccattgtcctacttgagaggaaatcccaccccatcaaatcctgatcgactgggaaatgaaggctcgcagcagtacagaccgaactctgaatcccaacctcttcgtagtgatggaagtcaacaaacagctactcatagctctggaaataccttgagaaggcggccccgacagttcggtggcaacattcacactctaagcagtgaagaacaagatccatctgataatagaaatgtcttctggaatgggaattctacagagtttggaggtgatgaaaagaaataggggatgaccggactgcatcgaagttagatgatacttgaaccatttaatggggaaataaatatgttgggaacgaactgaggtgttaaactacagtgcttatacatatgtttggaacaaattgaggtgttaaattacagtgcttatacataacaagtaatatggcacgtgcaaccctagaatttactttgttcaccccaggaatgacctttgttatttccgtacgagcatatataatttgatgt

SEQ ID NO: 31001 - protein, 514 aa, Triticum aestivum
MDITINSLTYKGSIPDAINQSRREKKLFVIYISGQDETSSSLEQSTLVDEHVAAVISRCCIFLQLKQGNVDALQFSAIYPQKSVPSISVVGLNGAMLWNHEGYISPEELKESIDKAWAALQLQETAATLLAASLASRMSEPANTASTTMPGEDGSSTSENHSNSSGQSSESSAVRGFANSTALVAQPPSSTSHAELLKTSKIPKSDSAPCNITAEEKLDSACQALLPDFPASSNVDSSTDPNQTGSTPSPKRKNMVDGNSPKVPSKPASSIPTRSTPQLPVEQDKATTSRAIEVTTDSAKTDDIQLAIRMPDGPSLQIKLTKEDVLRKVKTFVDENQDSGIGSYNLAMLYPRKVFTEQDLETTLYELGIETRQALVVVPNRQSVKVVRHQSSLPSSDLDRTGATDRSGGWGFLGAALSYVNPLSYLRGNPTPSNPDRLGNEGSQQYRPNSESQPLRSDGSQQTATHSSGNTLRRRPRQFGGNIHTLSSEEQDPSDNRNVFWNGNSTEFGGDEKK

SEQ ID NO: 31002 - protein, 419 aa, Triticum aestivum
MLWNHEGYISPEELKESIDKAWAALQLQETAATLLAASLASRMSEPANTASTTMPGEDGSSTSENHSNSSGQSSESSAVRGFANSTALVAQPPSSTSHAELLKTSKIPKSDSAPCNITAEEKLDSACQALLPDFPASSNVDSSTDPNQTGSTPSPKRKNMVDGNSPKVPSKPASSIPTRSTPQLPVEQDKATTSRAIEVTTDSAKTDDIQLAIRMPDGPSLQIKLTKEDVLRKVKTFVDENQDSGIGSYNLAMLYPRKVFTEQDLETTLYELGIETRQALVVVPNRQSVKVVRHQSSLPSSDLDRTGATDRSGGWGFLGAALSYVNPLSYLRGNPTPSNPDRLGNEGSQQYRPNSESQPLRSDGSQQTATHSSGNTLRRRPRQFGGNIHTLSSEEQDPSDNRNVFWNGNSTEFGGDEKK

SEQ ID NO: 31003 - protein, 377 aa, Triticum aestivum
MSEPANTASTTMPGEDGSSTSENHSNSSGQSSESSAVRGFANSTALVAQPPSSTSHAELLKTSKIPKSDSAPCNITAEEKLDSACQALLPDFPASSNVDSSTDPNQTGSTPSPKRKNMVDGNSPKVPSKPASSIPTRSTPQLPVEQDKATTSRAIEVTTDSAKTDDIQLAIRMPDGPSLQIKLTKEDVLRKVKTFVDENQDSGIGSYNLAMLYPRKVFTEQDLETTLYELGIETRQALVVVPNRQSVKVVRHQSSLPSSDLDRTGATDRSGGWGFLGAALSYVNPLSYLRGNPTPSNPDRLGNEGSQQYRPNSESQPLRSDGSQQTATHSSGNTLRRRPRQFGGNIHTLSSEEQDPSDNRNVFWNGNSTEFGGDEKK

SEQ ID NO: 31004 - DNA, 665 bp, Triticum aestivum
agtcgccacactagagctagccagagagaccgaccatggcggacggaggcgtgtgggtgttccggaaggacggggtgatggagctggagagcgcggccgggtcgacgtcgagccggagcgggccggggaacaaggcgctggtgtacgtgccggcgaacgagacgatgcggtcgctgcaggcgctggagcagcgcctcggcgcgcacggctgggagcgctactacgagaaccgcgacgtggtgcagctccaccgccgcgacggcagcctcgacctcatctcgctcccgcgggactttgcgcagctccgctccacccacatgtacgtcgtcgtcgtcaagaaccgaggccacttcaaggtcctcgacctctaacatctactagtagtctgtagtagtagtatactcacgtacgcaaccactgctttcccggtcagttaagcttgcaaccttaagctctgtgtgcatgctaattccctatacggctggtatatcgttgtgagtatcctacccatatatcttttgtactatttgtatggtattatccgagttcgtgcccgtctcgggttctagaggggctttttttccaagaaaaaaaaagtcctagagtgccaagctatcctcgttatgattgaatcttgatcgttttttgggggcttgtttatgttt

SEQ ID NO: 31005 - protein, 129 aa, Triticum aestivum
VATLELARETDHGGRRRVGVPEGRGDGAGERGRVDVEPERAGEQGAGVRAGERDDAVAAGAGAAPRRARLGALLREPRRGAAPPPRRQPRPHLAPAGLCAAPLHPHVRRRRQEPRPLQGPRPLTSTSSL

SEQ ID NO: 31006 - protein, 111 aa, Triticum aestivum
MADGGVWVFRKDGVMELESAAGSTSSRSGPGNKALVYVPANETMRSLQALEQRLGAHGWERYYENRDVVQLHRRDGSLDLISLPRDFAQLRSTHMYVVVVKNRGHFKVLDL

SEQ ID NO: 31007 - protein, 97 aa, Triticum aestivum
MELESAAGSTSSRSGPGNKALVYVPANETMRSLQALEQRLGAHGWERYYENRDVVQLHRRDGSLDLISLPRDFAQLRSTHMYVVVVKNRGHFKVLDL

SEQ ID NO: 31008 - DNA, 1073 bp, Triticum aestivum
gattgacgcgcttccactcctgttcttggagccgctgattcggagccttccgggtctggttggtgctgggttttttgatcggcttttgagttgaccggagaagggaggagctgctgctctgtttcttggctaacttcggtgggcggcgatgccggactccgacaacgactccggcgggccgagcaacgcggacttctcgtcgcccaaggagcaggacaggttcctgccgatcgccaacgtgagccggatcatgaagaaggcgctgccggccaacgccaagatctccaaggacgccaaggagacggtgcaggagtgcgtgtccgagttcatctccttcatcaccggcgaggcctccgacaagtgccagcgcgagaagcgcaagaccatcaacggcgacgacctgctgtgggccatgaccacgctcggcttcgaggactacatggagccgctcaagctctacctgcacaagttccgcgagctcgagggcgagaaggccgtcggcgccggcggcgttggcgcgttaccctcccccggcggctccagctcgcagcagagggagtcgacgccaaggaacaatgcgggaggcggtgaggccggcggctacggcggcatgtacggtggcgccggggcaggaggcagcggcggcggcatgttcatgatgatggggcagcccatgtacgggtccccgccggcggcagggtaccaacatccgcagcatcaccaccagatgatgacgggagggcaaggcgggtacggctacggcgacgccggcgccggcggcgggtcttcgtcgtcctcagggttcggcaggcaagacagggcatgaccgtcccagcttgcacgagcttgttcgttggcgtatctgttttactggtaaccggagttgccaacggccagccgccaggccagttaatctctacagtaccttttttgtgttctaaatgcggtttaagtcggtcaattttattccaaattagcagcaccagcgcgactagttgcatttagcccgctactgtaaatgggctactgacaaggtgcatttacatacaaaaattaatggcaagtgcattttg

SEQ ID NO: 31009 - protein, 225 aa, Triticum aestivum
MPDSDNDSGGPSNADFSSPKEQDRFLPIANVSRIMKKALPANAKISKDAKETVQECVSEFISFITGEASDKCQREKRKTINGDDLLWAMTTLGFEDYMEPLKLYLHKFRELEGEKAVGAGGVGALPSPGGSSSQQRESTPRNNAGGGEAGGYGGMYGGAGAGGSGGGMFMMMGQPMYGSPPAAGYQHPQHHHQMMTGGQGGYGYGDAGAGGGSSSSSGFGRQDRA

SEQ ID NO: 31010 - protein, 191 aa, Triticum aestivum
MKKALPANAKISKDAKETVQECVSEFISFITGEASDKCQREKRKTINGDDLLWAMTTLGFEDYMEPLKLYLHKFRELEGEKAVGAGGVGALPSPGGSSSQQRESTPRNNAGGGEAGGYGGMYGGAGAGGSGGGMFMMMGQPMYGSPPAAGYQHPQHHHQMMTGGQGGYGYGDAGAGGGSSSSSGFGRQDRA

SEQ ID NO: 31011 - protein, 137 aa, Triticum aestivum
MTTLGFEDYMEPLKLYLHKFRELEGEKAVGAGGVGALPSPGGSSSQQRESTPRNNAGGGEAGGYGGMYGGAGAGGSGGGMFMMMGQPMYGSPPAAGYQHPQHHHQMMTGGQGGYGYGDAGAGGGSSSSSGFGRQDRA

SEQ ID NO: 31012 - DNA, 1476 bp, Triticum aestivum
cgcgttgcgtttgcgttgcccaccccccgccgcaactctctcatccatcgcatccccgcgcctcctaccgccatcccatccaactcctcttccccacgcacgcgcttcgcgcctcaaatagcacgaacggggcaatggcagcggcgcggccctgttgcagcagcagccaccggcaatcgcgcctcctcgtcctcgccgcctgcgcgtcgcccacgccgctgctgctgctttagccgtccccgacttccgctccgaggtgatcgctcccccggccggatgggtgatctgggcgtccgggttgtgggcagaggctgcgccgcgccgatggagccgcgcaaggagatggtggcgccgtcgctggagcagcaggggcagcagcagcatcctcccctcttcatggatttctcccgacgagatggagtcgcagatggcggcaacgggcggaagcggccgcgcgagaccgtggcgccgccggcacgcctcttctccctacaggcgccgcagggttctcccgggcacaaggtgatacacctggcgcagctgcaccggcggccggcggcgacgggcctgcggctcgacttcgacgagggaggctcggagcacgtggcgtgcacgtcgtcgacgtcgtcccttctccccggcgagctcgccgctcagtgcgggcggcacaacaacgagatcgaccggctgctccaggaacacgcggagagactccggcttgcgctggccgacacgaggcgtcggcagaaccgctcgctgctgggcgccgcagaggcgctggccgccggcgggtcagggaggtggaggcggagaccttcaaggcggcacggcgcggcgtcgagctggaggagcggctggccaggctgagggcggaggcggcgtcgtggcaagccaaggcaatgtccgaccagtccacggcggccgcgctgcacgcgcagttgcagcaggaagcggccacagcgcaggcgaggagtggcaaggccgccgaggaggccgagggagcggcggacgacgccgagtccggcttcatcgaccctgacagggtggtggaggtggtggccccgccaccggccaggccgtgccgcgcgtgccggctccggccggccaccaccgtgctgctcccctgcaggcacctctgcgtgtgcgccgcgtgcgatcccggcgcctctgcctcccaagccggcaccgccgccgccgcggcctgccccgcgtgccgctgccccatcaccggcaccgtgcaggtcttcttcgcgtgaaacgggtccccgccggatcatgaaatcagaaccatggaaaagctgtagtagatcagatcagacagggtgcataattccttcctctcttttctcccgtgctagtgaactgatccctccatgatcgcttcacctcttttgctggtgatctagtaaatctttactaatttgatttgaatcttgcgtgacagtttttactgctagcaacgcgttgattaggtgg

SEQ ID NO: 31013 - protein, 288 aa, Triticum aestivum
RVAFALPTPRRNSLIHRIPAPPTAIPSNSSSPRTRFAPQIARTGQWQRRGPVAAAATGNRASSSSPPARRPRRCCCFSRPRLPLRGDRSPGRMGDLGVRVVGRGCAAPMEPRKEMVAPSLEQQGQQQHPPLFMDFSRRDGVADGGNGRKRPRETVAPPARLFSLQAPQGSPGHKVIHLAQLHRRPAATGLRLDFDEGGSEHVACTSSTSSLLPGELAAQCGRHNNEIDRLLQEHAERLRLALADTRRRQNRSLLGAAEALAAGGSGRWRRRPSRRHGAASSWRSGWPG

SEQ ID NO: 31014 - protein, 196 aa, Triticum aestivum
MGDLGVRVVGRGCAAPMEPRKEMVAPSLEQQGQQQHPPLFMDFSRRDGVADGGNGRKRPRETVAPPARLFSLQAPQGSPGHKVIHLAQLHRRPAATGLRLDFDEGGSEHVACTSSTSSLLPGELAAQCGRHNNEIDRLLQEHAERLRLALADTRRRQNRSLLGAAEALAAGGSGRWRRRPSRRHGAASSWRSGWPG

SEQ ID NO: 31015 - protein, 180 aa, Triticum aestivum
MEPRKEMVAPSLEQQGQQQHPPLFMDFSRRDGVADGGNGRKRPRETVAPPARLFSLQAPQGSPGHKVIHLAQLHRRPAATGLRLDFDEGGSEHVACTSSTSSLLPGELAAQCGRHNNEIDRLLQEHAERLRLALADTRRRQNRSLLGAAEALAAGGSGRWRRRPSRRHGAASSWRSGWPG

SEQ ID NO: 31016 - DNA, 564 bp, Triticum aestivum
ctaaccttttctaaccctttctgccctccccggctttccctcccgtcggcgccgctctgctccgctgtggctgatgctgtcacgatggatccctgccgccgggcgccagcgagggctgctggccaggctgggctcacgcgcttattcccacgggagggtattcgacgcagcggcccgggacggcgaacttcgggtgttcgttgtcgccggtgaggtctccggcgattcgctcgcttcgcgcctcatggcgtccctcaggaagctctcccctgttcccgttcgttttgctggcgttggcggagaattaatgtgcaaggaagggctgcaatcactttttcccatggaagaaattgccataatggggttgtgggaactgctgccacacatatataacgtcaagaggaagatcaaggatactttagatgctgctatactatttcggcctcatgctgtagttactgttgattcaaagggtttttcgtttcgcctattgcagcaattaaaatgtacaaccaaaaagttgatagccctctgcatgtccattatgttgctccatcattctgg

SEQ ID NO: 31017 - protein, 163 aa, Triticum aestivum
MLSRWIPAAGRQRGLLARLGSRAYSHGRVFDAAARDGELRVFVVAGEVSGDSLASRLMASLRKLSPVPVRFAGVGGELMCKEGLQSLFPMEEIAIMGLWELLPHIYNVKRKIKDTLDAAILFRPHAVVTVDSKGFSFRLLQQLKCTTKKLIALCMSIMLLHHS

SEQ ID NO: 31018 - protein, 106 aa, Triticum aestivum
MASLRKLSPVPVRFAGVGGELMCKEGLQSLFPMEEIAIMGLWELLPHIYNVKRKIKDTLDAAILFRPHAVVTVDSKGFSFRLLQQLKCTTKKLIALCMSIMLLHHS

SEQ ID NO: 31019 - protein, 85 aa, Triticum aestivum
MCKEGLQSLFPMEEIAIMGLWELLPHIYNVKRKIKDTLDAAILFRPHAVVTVDSKGFSFRLLQQLKCTTKKLIALCMSIMLLHHS

SEQ ID NO: 31020 - DNA, 730 bp, Triticum aestivum
ataccgtctcctctcaacgaaagcttacaaaaaattcaccctaaatactttagtttataaataaagctcccaaaatctaagagaggagaagacaaagacttacaagaaaaaaggcatcataatggccaaattcttcatcgtgttcccttgcctctgcccctatgttttcaccaccctccttcacttggtggccgctgatgccgacgactttgacccgtttcaacatcacgggcttccgtctactgcgacacaatgccgcgtccaattcgttacccgcctcagtaaattcctcgaaggggcaaaggtaaagcttgagtgcaagagtcgtgtgaaccagacagtgacactgaccaaagaagctgtgactgacaaagacggaaaataccagatggaagttatgggagaccacgaagaggaactgtgcgagatcatcctcgtccaatcaccggacgcagagtgtggcgaagtgaacaacgaagagttcctaagaaacgcagcaaggatcagtctcacggctaacgatggcattgtctctaatgagattcgaaccattaacccacttgggttcatgaggaagactcctctcgccgattgtcctcaagttttcaaggagcttggaatcgtccctgacgtcatcttctaagcttaataccgatatacatcgatctctgaacaattttaatttttgttgtaactctttacatttcgtatataacaacatttatatttg

SEQ ID NO: 31021 - protein, 173 aa, Triticum aestivum
MAKFFIVFPCLCPYVFTTLLHLVAADADDFDPFQHHGLPSTATQCRVQFVTRLSKFLEGAKVKLECKSRVNQTVTLTKEAVTDKDGKYQMEVMGDHEEELCEIILVQSPDAECGEVNNEEFLRNAARISLTANDGIVSNEIRTINPLGFMRKTPLADCPQVFKELGIVPDVIF

SEQ ID NO: 31022 - DNA, 590 bp, Triticum aestivum
gaggccaaggccacacacctgcaataccagtgcttgccaaaaaccgctcagctgcttgctgacaagtgataagcttctcggtccattaatcggtcgacccgcgtctggtgaagatggggagggcgaactgctcggttcctctcctggtgttgctggccttcctctcctgcttcttcctcgcacacgcggcggtggccggggccggcggcaaccgcaagatgttcctgccgagggagggagcggcagccgccgccgtgtccgacgatggtgggcaggcgatgccgacgacggcggaggaggtggcggtcggaggagagatgcatctgctgctgagcgacgacgaggagatgttggccaggagggtggacctgcagacagaggactacccggggtccggggccaacggccgccatgatccacgaaacccgcattaagagttattatgccgtgctgcatgtacgataagtgcatgtaattaaccgcatgtttagttacccccacaatcatgcataattaagcatatatatcatcaccacgttgctaaacatcatgatcttaatttaatttgctagtgtatgcatctttggttg

SEQ ID NO: 31023 - protein, 137 aa, Triticum aestivum
RPRPHTCNTSACQKPLSCLLTSDKLLGPLIGRPASGEDGEGELLGSSPGVAGLPLLLLPRTRGGGRGRRQPQDVPAEGGSGSRRRVRRWWAGDADDGGGGGGRRRDASAAERRRGDVGQEGGPADRGLPGVRGQRPP

SEQ ID NO: 31024 - protein, 106 aa, Triticum aestivum
MGRANCSVPLLVLLAFLSCFFLAHAAVAGAGGNRKMFLPREGAAAAAVSDDGGQAMPTTAEEVAVGGEMHLLLSDDEEMLARRVDLQTEDYPGSGANGRHDPRNPH

SEQ ID NO: 31025 - protein, 71 aa, Triticum aestivum
MFLPREGAAAAAVSDDGGQAMPTTAEEVAVGGEMHLLLSDDEEMLARRVDLQTEDYPGSGANGRHDPRNPH

SEQ ID NO: 31026 - DNA, 1417 bp, Triticum aestivum
aggtgtatatacactctggctcgtgactcagaccttgctccgtccgtagtacttctccaagagctcctctggccagccatcttctccggcctctggtctcaatggcggaccagagccccgcccctatccgttgcaaagcggcggtgagcagagccaagggcgcgccgctcgtcatcgaggacatcgtcgtggatccgcccaaggcctacgagatccgcatgaaggtcatctgcacctccctctgccacactgacatcaccttctggcgcggcaaggaagacttcccgctcccacccgtgttcccaaggatcctaggccacgaggcgtacggggtggtggagagcgtgggggagcgcgtggaggggttcgcggtgggggacacggtggtgccgacgttcctggggcagtgcgactcctgcgccggctgcgcgtcggcggggagcaacatgtgctccgcgctgccgttcgtcgtcggccccgggatgcgccgcgacggcaccacccgcttcagggacagccagggggagccgctgcacgacttcctcgccgtgtccagcttcagccagtacaccgtcgtcgacgtcaaccaggtcgtcaaggtcgaccccgccgtgccgcccaagctcgcctgcctcctcggctgcggcgccggcaccggggtcggggctgcgtggaggttggccaaggtgcagcctggatcctcggtggtcatcttcgggctgggagcggtgggattgtcggtggcgcaaggtgcaaagatgtgcggagcagccaagatcatcggtgttgatctgaaccctgacaaagaagaactcggcaagtcttcttttctcagaggaacgagacacggagaaaacatttggttgatttcaaaatgctatctactcgtgttgcaggcaaaaaattcggcgtgacagatttcgtgaacccatcaaaactcggcgagagcccactcagccaggtgatcatcgagatgacgggcggcggcgccgactactgcttcgagtgcatcggtgtcgcgtccgtcatgaccgaggcgttcagaagcgctaagcaggggaatggcaagacggtgatcctggggctggagaaggacgggaagccgatcagcctgccgtccatcgagttcctcttcggcaagtgcgtcatggggtcgctcttcgggggcatcaagcccaagaccgacattccgatcctcgccaagaaattcatgagcaaggagctggagctggagaagctgatcacgcacgaggtgggcctgcaggagataaacacggccttcgacctgctcctgcaggggaagagcctcaggtgcatcatctggatggacaagctagcggcgtgaaaaaccatgggcgaaatgttggtccagggctggctgatgcggcgagcgaataaaactgttgcttgtttcccg

SEQ ID NO: 31027 - protein, 270 aa, Triticum aestivum
MADQSPAPIRCKAAVSRAKGAPLVIEDIVVDPPKAYEIRMKVICTSLCHTDITFWRGKEDFPLPPVFPRILGHEAYGVVESVGERVEGFAVGDTVVPTFLGQCDSCAGCASAGSNMCSALPFVVGPGMRRDGTTRFRDSQGEPLHDFLAVSSFSQYTVVDVNQVVKVDPAVPPKLACLLGCGAGTGVGAAWRLAKVQPGSSVVIFGLGAVGLSVAQGAKMCGAAKIIGVDLNPDKEELGKSSFLRGTRHGENIWLISKCYLLVLQAKNSA

SEQ ID NO: 31028 - protein, 231 aa, Triticum aestivum
MKVICTSLCHTDITFWRGKEDFPLPPVFPRILGHEAYGVVESVGERVEGFAVGDTVVPTFLGQCDSCAGCASAGSNMCSALPFVVGPGMRRDGTTRFRDSQGEPLHDFLAVSSFSQYTVVDVNQVVKVDPAVPPKLACLLGCGAGTGVGAAWRLAKVQPGSSVVIFGLGAVGLSVAQGAKMCGAAKIIGVDLNPDKEELGKSSFLRGTRHGENIWLISKCYLLVLQAKNSA

SEQ ID NO: 31029 - protein, 156 aa, Triticum aestivum
MLSTRVAGKKFGVTDFVNPSKLGESPLSQVIIEMTGGGADYCFECIGVASVMTEAFRSAKQGNGKTVILGLEKDGKPISLPSIEFLFGKCVMGSLFGGIKPKTDIPILAKKFMSKELELEKLITHEVGLQEINTAFDLLLQGKSLRCIIWMDKLAA

SEQ ID NO: 31030 - DNA, 1032 bp, Triticum aestivum
aactagcggttatatgttcgtcgacgacagacgccggccgtgaacgtgctccgggagatcgaggcgttcctgaggaggaacccctccgaggtgatcacgatcttcatcgaggactacgtggaggcgcccatggggctcacccgggtgttcaacgcctccggcctgacgcccttcctgttcccggtgtggcgcatgcccaagaacggcggcgactggccgctgctaagcgacatggtccgcgacaaccaccgcctcctcgtcttcacctccaggtccgccaaggaggccgccgagggcttcgcacacgagtggggctacgtcgtcgagaatcagtatgggagcaaagggatggtgaaggggtcgtgcccgaaccgcgccgagtcggccgccatgaacgacctgtcgaggtcgctggtgctggtgaactacttccgggacctcccaaacttcccggaggcgtgcaaggacaactcggcgcagctgctgggcatgctcgacacctgccacgccgcgtccggggacagatggcccaacttcatcgccgtcgacttctacaagagaagcgacggaggcggcgccgcggaagccacggacaaggccaacggcgggctggtttgtggatgcggaagcatagctgcctgcaacagtaatggtacatgctcgccgcgccggcgcgggagcacgccgaaaggcattttcaacaagacctcagatgccgcgtcgtggcagccgccggccatgctgcattggcagcaactgatgctgccgaccaccttccttgctctactattatgcttgtagaagaacattggactctgaatcagcaaaactttagactagttggcagactgtaaatcatagatgcaaactagaaattttatgtgccgggttctcatcacacgctgcaagtacacttttttttttgctaatgacactgcaagtacactttgctgttgaatttctgctaggccaaaattcggccattgtatgacatagcttgtaagttatgtatgtgatgaactctttgtttgg

SEQ ID NO: 31031 - protein, 223 aa, Triticum aestivum
MGLTRVFNASGLTPFLFPVWRMPKNGGDWPLLSDMVRDNHRLLVFTSRSAKEAAEGFAHEWGYVVENQYGSKGMVKGSCPNRAESAAMNDLSRSLVLVNYFRDLPNFPEACKDNSAQLLGMLDTCHAASGDRWPNFIAVDFYKRSDGGGAAEATDKANGGLVCGCGSIAACNSNGTCSPRRRGSTPKGIFNKTSDAASWQPPAMLHWQQLMLPTTFLALLLCL

SEQ ID NO: 31032 - protein, 215 aa, Triticum aestivum
LAVICSSTTDAGRERAPGDRGVPEEEPLRGDHDLHRGLRGGAHGAHPGVQRLRPDALPVPGVAHAQERRRLAAAKRHGPRQPPPPRLHLQVRQGGRRGLRTRVGLRRRESVWEQRDGEGVVPEPRRVGRHERPVEVAGAGELLPGPPKLPGGVQGQLGAAAGHARHLPRRVRGQMAQLHRRRLLQEKRRRRRRGSHGQGQRRAGLWMRKHSCLQQ

SEQ ID NO: 31033 - protein, 202 aa, Triticum aestivum
MPKNGGDWPLLSDMVRDNHRLLVFTSRSAKEAAEGFAHEWGYVVENQYGSKGMVKGSCPNRAESAAMNDLSRSLVLVNYFRDLPNFPEACKDNSAQLLGMLDTCHAASGDRWPNFIAVDFYKRSDGGGAAEATDKANGGLVCGCGSIAACNSNGTCSPRRRGSTPKGIFNKTSDAASWQPPAMLHWQQLMLPTTFLALLLCL

SEQ ID NO: 31034 - DNA, 740 bp, Triticum aestivum
agagatgcagtattgcagttgagtgattgacctttctccgaggagcagtgaggactggttcgttctacttggcaacttgcgtcttggatcatctgcccagttgtgtacagcctttgctttaaactctactctcagcgaagatcagtttgcgcgtctgcatggcgcgaatggcggtctccgtgctcttcctcatcgccggcgtcgtgctcatgctcgcgctgcacgtcctcgtcatcgtctgggcggtccggcggggcgccgtgctgcggctgcggggtgcggcgcgggagcgggaccaggagcagggggaagcgacgggtctgacggccgacgagctgggcgagctgccgttccaggacttcaaggccgccgccgcggtcgggacgggcgccgccgagtgcgcggtgtgcctggaggcgttccaggggggcgaccggtgccgcgtgctgccggggtgccaccatgggttccacgcgcagtgcgtggactcgtggctgcgccagagccgccggtgcccggtgtgccgcgccgaggtggcctgccgcggcaaggcggccggcgcggcggttgtcgatgaggccgccacatcggagatcgtcgctgaaagactgggaggtgcagatcgctagcggattttgtttgaccgagactcgtgtgccgtcgttgattagcttgtgattttttttagtacgattagcttgtgattgtacataaagtaatccatctagcatttggagtcg

SEQ ID NO: 31035 - protein, 156 aa, Triticum aestivum
MARMAVSVLFLIAGVVLMLALHVLVIVWAVRRGAVLRLRGAARERDQEQGEATGLTADELGELPFQDFKAAAAVGTGAAECAVCLEAFQGGDRCRVLPGCHHGFHAQCVDSWLRQSRRCPVCRAEVACRGKAAGAAVVDEAATSEIVAERLGGADR

SEQ ID NO: 31036 - protein, 153 aa, Triticum aestivum
MAVSVLFLIAGVVLMLALHVLVIVWAVRRGAVLRLRGAARERDQEQGEATGLTADELGELPFQDFKAAAAVGTGAAECAVCLEAFQGGDRCRVLPGCHHGFHAQCVDSWLRQSRRCPVCRAEVACRGKAAGAAVVDEAATSEIVAERLGGADR

SEQ ID NO: 31037 - protein, 139 aa, Triticum aestivum
MLALHVLVIVWAVRRGAVLRLRGAARERDQEQGEATGLTADELGELPFQDFKAAAAVGTGAAECAVCLEAFQGGDRCRVLPGCHHGFHAQCVDSWLRQSRRCPVCRAEVACRGKAAGAAVVDEAATSEIVAERLGGADR

SEQ ID NO: 31038 - DNA, 525 bp, Triticum aestivum
  misc_feature (511)..(511): n is a, c, g, or t
atcactacttcttcatctccattcaaaatttctatcctcagcttctactaggaagcacactcgtgagacatggccgccgcagtttccaccgtcggtgccatcaacagagctccgttgagcttgaacgggtcaggagcaggagctgcttcagtcccagctacgaccttcttgggaaagaaagttgtaaccgcgtcgagattcgcacagaacaacaagaagagcaacggatcattcaaggtggttgccgtgaaagaagacaaacaaaccgatggagacagatggaggggacttgcctacgacatctctgatgatcaacaagacatcaccagaggcaaaggtatggttgactcagtcttccaagctcctatgggaaccggaactcacmrcgccgtccttagctcctatgagtacctcagccaaggtcttaagcagtacaacttggacaacatgatggatgggctttacattgcccctgctttcatggacaagcttgttgttcacatcaccragnacttcttgactttg

SEQ ID NO: 31039 - protein, 152 aa, Triticum aestivum
  misc_feature (106)..(106): Xaa can be any naturally occurring amino acid
  misc_feature (147)..(148): Xaa can be any naturally occurring amino acid
MAAAVSTVGAINRAPLSLNGSGAGAASVPATTFLGKKVVTASRFAQNNKKSNGSFKVVAVKEDKQTDGDRWRGLAYDISDDQQDITRGKGMVDSVFQAPMGTGTHXAVLSSYEYLSQGLKQYNLDNMMDGLYIAPAFMDKLVVHITXXFLTL

SEQ ID NO: 31040 - protein, 101 aa, Triticum aestivum
HYFFISIQNFYPQLLLGSTLVRHGRRSFHRRCHQQSSVELERVRSRSCFSPSYDLLGKESCNRVEIRTEQQEEQRIIQGGCRERRQTNRWRQMEGTCLRHL

SEQ ID NO: 31041 - DNA, 762 bp, Triticum aestivum
agcatcactctccgccgcgccgcgagacctagccgagcccgtcgtgtatcgtcgtcgccgccaggagcacggagcgacaccgccgccgcagccagcgcttcctctccaaggatcaaatcatggggtagcattcaggggctgcaagtgaccttgccatgagcgcgtttctagctcagccactagtcggttagcatctgacagccatggcgaagcatcaccctgatctcatcatgtgccggaagcagcctggcattgctattggtcgcttgtgtgagaagtgtgatggcaagtgcgtcatctgtgactcgtatgtgcgcccatgtacgcttgtccgggtctgcgacgagtgcaactacggctcgttccagggaaggtgcgtcatctgcggcggagttggcatctcagacgcctactactgtaaaaagtgcacgcagcaggagaaggaccgagatgggtgccccaagattgtcaacctaggaagcgccaagaccgatctcttctacgagcgcaagaagtatggttttaagaagagatgaattacatgcatggatttggcgggtcctctaggcctcactctatgctgttacactaataccagaagcaggttgctggggcaacggcattgtgtccgtgttatcgtttgatcataatatacaagaatgcgtccctgatatgctctgtaatgagtagttctgttgtatggttcaaaactctagacttcctgtgcagtatgcacttgatatcaatgaccatgaatgtttg

SEQ ID NO: 31042 - protein, 110 aa, Triticum aestivum
MAKHHPDLIMCRKQPGIAIGRLCEKCDGKCVICDSYVRPCTLVRVCDECNYGSFQGRCVICGGVGISDAYYCKKCTQQEKDRDGCPKIVNLGSAKTDLFYERKKYGFKKR

SEQ ID NO: 31043 - protein, 101 aa, Triticum aestivum
MCRKQPGIAIGRLCEKCDGKCVICDSYVRPCTLVRVCDECNYGSFQGRCVICGGVGISDAYYCKKCTQQEKDRDGCPKIVNLGSAKTDLFYERKKYGFKKR

SEQ ID NO: 31044 - protein, 64 aa, Triticum aestivum
MASASSVTRMCAHVRLSGSATSATTARSREGASSAAELASQTPTTVKSARSRRRTEMGAPRLST

SEQ ID NO: 31045 - DNA, 799 bp, Triticum aestivum
acctagaacatcctaatcgaaaaatcagaagaagaagtatctttgttttcgctctcttcttctactttcgatctttgacgattagaaaaggaaagtgatggctgccgttaatgggtaccaaggaaacactccggcggcgtcaaagcaatctgctcctccgactaagactgttgatagccaatctgttctcaaaaggctgcaatctgaactaatgggcttgatgatgggtggtgacccgggaatatcggctttcccagaggaagacaacatattctgttggaaagggacaataacaggaagcaaagatactgtgtttgaaggaactgagtacagactctcactctctttctccaatgactatcctttcaagcctcctaagatcaagttccacactggttgcttccaccccaatgttgatctctacggcaatatctgtttggacattcttcaggataaatggtcgtctgcatacgatgtcaggacaatactactatcgattcagagccttttgggagaaccgaacatcagctcaccattgaacactcaagcagcgcagctctggagcaaccaagaagagtataggaagatggttgagaagctctacaagcctcccagtgcatgatagcttcaggatgtgtcattcctttgctctacaatttgtttctgatcatcaacagttttatctgtagcagtttgtgtcattcatttgctctataatttgtttctgatcttcaacagttttacctgagccaaatattgatattgatgtgagcttttcaaaaattaatcagaatgatcc

SEQ ID NO: 31046 - protein, 174 aa, Triticum aestivum
MAAVNGYQGNTPAASKQSAPPTKTVDSQSVLKRLQSELMGLMMGGDPGISAFPEEDNIFCWKGTITGSKDTVFEGTEYRLSLSFSNDYPFKPPKIKFHTGCFHPNVDLYGNICLDILQDKWSSAYDVRTILLSIQSLLGEPNISSPLNTQAAQLWSNQEEYRKMVEKLYKPPSA

SEQ ID NO: 31047 - protein, 136 aa, Triticum aestivum
MGLMMGGDPGISAFPEEDNIFCWKGTITGSKDTVFEGTEYRLSLSFSNDYPFKPPKIKFHTGCFHPNVDLYGNICLDILQDKWSSAYDVRTILLSIQSLLGEPNISSPLNTQAAQLWSNQEEYRKMVEKLYKPPSA

SEQ ID NO: 31048 - protein, 133 aa, Triticum aestivum
MMGGDPGISAFPEEDNIFCWKGTITGSKDTVFEGTEYRLSLSFSNDYPFKPPKIKFHTGCFHPNVDLYGNICLDILQDKWSSAYDVRTILLSIQSLLGEPNISSPLNTQAAQLWSNQEEYRKMVEKLYKPPSA

SEQ ID NO: 31049 - DNA, 967 bp, Triticum aestivum
aaaaatctcccctcttcgattccttttttcgagaaagagagaaacacaacactcacttccactccagagagagaaaaaaaaaacagaggagacttattagagttctcatggcgatggctgtctccggagctgtgctcagcgggcttggttcttcgttcctcgccggaggcaagaggagtgccgccgcgttgggaaacgctggagctcggagagttggtcggaaaactctgattgttgctgctgcggctgctcagcccaagaaatcgtggatccccgccgttaaaggtggcggcaacttccttgaccctgaatggctcgacggctcgctacccggagatttcgggttcgacccattgggtttgggaaaagacccggcttttctgaaatggtacagagaggcagagctgatccacggccgatgggcgatggcagctgttcttggaatcttcgtcggccaggcatggagcggcgtgccatggttcgaagccggagctgatccacgcgccatcgcgccgttctgtttcggaacgcttcttgggacccagctgcttctcatgggctgggtggagagcaaacggtgggtggacttcttcaacccggattctcagtctgttgagtgggcgaccccgtggtcgaggaccgctgagaatttcgctaactacactggtgatcaaggatatccaggtggaagattctttgatccgttgggtctcgccgggaagtcacgcgacggtgtgtacgagccagacagggagaagctggagcggttgaagcttgcggagattaagcactcgaggctcgctatgcttgcaatgttgatcttttactttgaggctggtcaggggaaaacgcctctaggtgcccttggtttgtaagaataatgatgtttttgagtctgtagatataacctctccttgctccctcttcttcaatgtgacattttgagtcaagatcatatcattgctcc

SEQ ID NO: 31050 - protein, 290 aa, Triticum aestivum
KSPLFDSFFREREKHNTHFHSRERKKKQRRLIRVLMAMAVSGAVLSGLGSSFLAGGKRSAAALGNAGARRVGRKTLIVAAAAAQPKKSWIPAVKGGGNFLDPEWLDGSLPGDFGFDPLGLGKDPAFLKWYREAELIHGRWAMAAVLGIFVGQAWSGVPWFEAGADPRAIAPFCFGTLLGTQLLLMGWVESKRWVDFFNPDSQSVEWATPWSRTAENFANYTGDQGYPGGRFFDPLGLAGKSRDGVYEPDREKLERLKLAEIKHSRLAMLAMLIFYFEAGQGKTPLGALGL

SEQ ID NO: 31051 - protein, 255 aa, Triticum aestivum
MAMAVSGAVLSGLGSSFLAGGKRSAAALGNAGARRVGRKTLIVAAAAAQPKKSWIPAVKGGGNFLDPEWLDGSLPGDFGFDPLGLGKDPAFLKWYREAELIHGRWAMAAVLGIFVGQAWSGVPWFEAGADPRAIAPFCFGTLLGTQLLLMGWVESKRWVDFFNPDSQSVEWATPWSRTAENFANYTGDQGYPGGRFFDPLGLAGKSRDGVYEPDREKLERLKLAEIKHSRLAMLAMLIFYFEAGQGKTPLGALGL

SEQ ID NO: 31052 - protein, 253 aa, Triticum aestivum
MAVSGAVLSGLGSSFLAGGKRSAAALGNAGARRVGRKTLIVAAAAAQPKKSWIPAVKGGGNFLDPEWLDGSLPGDFGFDPLGLGKDPAFLKWYREAELIHGRWAMAAVLGIFVGQAWSGVPWFEAGADPRAIAPFCFGTLLGTQLLLMGWVESKRWVDFFNPDSQSVEWATPWSRTAENFANYTGDQGYPGGRFFDPLGLAGKSRDGVYEPDREKLERLKLAEIKHSRLAMLAMLIFYFEAGQGKTPLGALGL

SEQ ID NO: 31053 - DNA, 1016 bp, Triticum aestivum
  misc_feature (217)..(218): n is a, c, g, or t
gtattaagacatgaggagctgagtcttccggagagactgcgaaaaccctaatttcgttcgtgcgcgaaaggggtttttggttctatcttcagacaacgatgatgcaccactcaaccgacgattcggaacctgatggtgctatgcccgtccaacaaagagacgactctgcctcctcctccgactctgcttccgccgtttctaatcacaccatcactannaccgtttaccatggctcctccgaccaccatctccatgttcctcagcacgccactttcggggatgtgaagaaagcctttgttctggaaactgggttggaggctactgatctgaagatcttgttcaggggagatgtgaaagatgacgctgagcagttgcaagctgctggtgttacggacgggtctgtagttgtccttgtggatgagcctaataagggagttgaccatgttgaaccgcctcctgtgatgaccgaagagattgccaaggctattgctgctgttctagcagtctctggagaggtcgatgagctctcggatagggttggtgctttagaggctgctgtcgatggagggacgatagttgcggtgaaggagtttgacatgactgctgagctgctcatgaggcagttgctcaaattggatggcatcaaggcagatggggaagctagactacagcgaaaggcagaggtacgtagggttcaaaagttgcaggaggatgtggatacgttgaaggcaagatgttacagagcaaagccgcagctgtaagcactgagtgggattcgttctgaaacggtgttggagagcttgaaccctcctccgccagctttcgccttgtaccaatgtaaacccaagattgggagaaattttactgacatttttattattctgttacgttacaaaaaaaatattgcttctttttgttattgttaaatgaggaaatgaccagaaaaatatgggttgtatcctggaatttgtatgatttttttagtatctcaatctgaatagcaatacatttttttt

SEQ ID NO: 31054 - protein, 220 aa, Triticum aestivum
  misc_feature (40)..(40): Xaa can be any naturally occurring amino acid
MMHHSTDDSEPDGAMPVQQRDDSASSSDSASAVSNHTITXTVYHGSSDHHLHVPQHATFGDVKKAFVLETGLEATDLKILFRGDVKDDAEQLQAAGVTDGSVVVLVDEPNKGVDHVEPPPVMTEEIAKAIAAVLAVSGEVDELSDRVGALEAAVDGGTIVAVKEFDMTAELLMRQLLKLDGIKADGEARLQRKAEVRRVQKLQEDVDTLKARCYRAKPQL

SEQ ID NO: 31055 - protein, 219 aa, Triticum aestivum
  misc_feature (39)..(39): Xaa can be any naturally occurring amino acid
MHHSTDDSEPDGAMPVQQRDDSASSSDSASAVSNHTITXTVYHGSSDHHLHVPQHATFGDVKKAFVLETGLEATDLKILFRGDVKDDAEQLQAAGVTDGSVVVLVDEPNKGVDHVEPPPVMTEEIAKAIAAVLAVSGEVDELSDRVGALEAAVDGGTIVAVKEFDMTAELLMRQLLKLDGIKADGEARLQRKAEVRRVQKLQEDVDTLKARCYRAKPQL

SEQ ID NO: 31056 - protein, 206 aa, Triticum aestivum
  misc_feature (26)..(26): Xaa can be any naturally occurring amino acid
MPVQQRDDSASSSDSASAVSNHTITXTVYHGSSDHHLHVPQHATFGDVKKAFVLETGLEATDLKILFRGDVKDDAEQLQAAGVTDGSVVVLVDEPNKGVDHVEPPPVMTEEIAKAIAAVLAVSGEVDELSDRVGALEAAVDGGTIVAVKEFDMTAELLMRQLLKLDGIKADGEARLQRKAEVRRVQKLQEDVDTLKARCYRAKPQL

SEQ ID NO: 31057 - DNA, 628 bp, Triticum aestivum
acgttctcagataatctcactgctcgtctgggaccatgcagagtgacgtgactacgaatccacgagcatcagacgactctagctcctctgacgtcgaagctgagatcagcgacggcgatggctttttgccgatcgatagacctcctacagtctccgaagaagacgaagtttcgctgttgatgagagcagaggcgtatcaaggctacatgaaggagcttcctcttccgacaagccgcggttctttgatcccgttcacgagatggggttgggttaggcatgtcgatcaaggagctttacggtcagcctttgcattacctcacgaacgttctattacagcgttgggatcaagcaagactgggtggtgattctgaagatcagagcttggatttgatcattcatcctttgaaagctgaagctaccatttggcttgttgaagagattcatcggctcacttcttctcatcttcagattgctgagctttggggttctgatcctatgtatcacatgttgattgatccaatcattcccaagttatcacaatcttaaacacctttttttttgtatctaagtcattctctattttaaattttagacaatgtattgtgaatgctttttctttcatctctgt

SEQ ID NO: 31058 - protein, 109 aa, Triticum aestivum
MQSDVTTNPRASDDSSSSDVEAEISDGDGFLPIDRPPTVSEEDEVSLLMRAEAYQGYMKELPLPTSRGSLIPFTRWGWVRHVDQGALRSAFALPHERSITALGSSKTGW

SEQ ID NO: 31059 - protein, 89 aa, Triticum aestivum
MSIKELYGQPLHYLTNVLLQRWDQARLGGDSEDQSLDLIIHPLKAEATIWLVEEIHRLTSSHLQIAELWGSDPMYHMLIDPIIPKLSQS

SEQ ID NO: 31060 - protein, 61 aa, Triticum aestivum
MRAEAYQGYMKELPLPTSRGSLIPFTRWGWVRHVDQGALRSAFALPHERSITALGSSKTGW

SEQ ID NO: 31061 - DNA, 870 bp, Triticum aestivum
agaacatcctaatcgaaaaataccaactctacagttaagatctacctcacagtttaataacctttatttcatactttctcctctatttcatccaaacaccaaagttttagaaatggcaacagcatcggttaacatgcagtcagtcttcgcctgtgggttggccactcgcaagatcaacacaaacaagctcttcttcgccggaaacttcccaaatctcaagaggaactatccggtgggagtgaagtgcatggctgagggagaacccatgaaggacgagtccgcaccttcgacctccgcggctaagcctttgtctagctcatcatcgccgccacctcctccacctcctactaaacctaaggtgagcacgaagtttagcgacttgctagcgtttagcggtccagcaccagaaagaataaacgggcgtttagcgatggttggattcgtggcggccttggcggttgaactttccaagggtgaaaacgttttggctcagatctcggacggcggcgtctcgtggttccttggtacgactgcgatcttgacgcttgcgtcgcttgtaccccttttcaagggtatcaccgccgagtctaagtccaaaggtttcatgacgtccgacgctgagctttggaacggacgtttcgcgatgcttggtttggtcgcgttggcgttcactgagtttgtcaagggtgggacccttgtctgaggaaagaaaatttcttattggggagaatgttatattacagttttgcccttgtaaagttatctggtatgatatgtgtttaagcctatggtgtgtttctttacatatgtattagtgacatgagactttgtggtaaagcactatatcagtaaaagtagtgatgtttttct

SEQ ID NO: 31062 - protein, 233 aa, Triticum aestivum
EHPNRKIPTLQLRSTSQFNNLYFILSPLFHPNTKVLEMATASVNMQSVFACGLATRKINTNKLFFAGNFPNLKRNYPVGVKCMAEGEPMKDESAPSTSAAKPLSSSSSPPPPPPPTKPKVSTKFSDLLAFSGPAPERINGRLAMVGFVAALAVELSKGENVLAQISDGGVSWFLGTTAILTLASLVPLFKGITAESKSKGFMTSDAELWNGRFAMLGLVALAFTEFVKGGTLV

SEQ ID NO: 31063 - protein, 196 aa, Triticum aestivum
MATASVNMQSVFACGLATRKINTNKLFFAGNFPNLKRNYPVGVKCMAEGEPMKDESAPSTSAAKPLSSSSSPPPPPPPTKPKVSTKFSDLLAFSGPAPERINGRLAMVGFVAALAVELSKGENVLAQISDGGVSWFLGTTAILTLASLVPLFKGITAESKSKGFMTSDAELWNGRFAMLGLVALAFTEFVKGGTLV

SEQ ID NO: 31064 - protein, 189 aa, Triticum aestivum
MQSVFACGLATRKINTNKLFFAGNFPNLKRNYPVGVKCMAEGEPMKDESAPSTSAAKPLSSSSSPPPPPPPTKPKVSTKFSDLLAFSGPAPERINGRLAMVGFVAALAVELSKGENVLAQISDGGVSWFLGTTAILTLASLVPLFKGITAESKSKGFMTSDAELWNGRFAMLGLVALAFTEFVKGGTLV

SEQ ID NO: 31065 - DNA, 992 bp, Triticum aestivum
attattctctttgcattttgtgttcgttgacccgataacaaaaaaggcatcgaagatgaacgttagggttttgtttctggctctccttctccttgcatcgccgctgcttcaagttgctagatgtcaagtagatgccgaggatcattccagtatcgttgacgatgttgtgggagaacacagcgattctggtgctgaggaggatgatcaggatttggataatatcaacttgacctctgctccaggggttgagactgtctctgttttccccaaaaacagtgccaaagtggttccagctggagaagagactgagctccttgttgctctcaagaacgatggcaaatctagcgtaggtgtgatggggattagggccagcgtccatcttccttatgatcacaagctgttggttcagaatctcaccatgatgaggtacaacaatgcgtccatcccaacttctgttcaagcaacattcccttacatctttgcagtcagccagtacctgcagcctggagcgtttgatctggtgggttatattatctacgacgtggaggggaagccataccagagcgtcttctacaatggaaccatcgaggtagttgaatctggaggtcttctcagcggtgagtctgtcttccttataacacttggagttgctctcctcctcctcctcggtctatgggcatacagccaagtccagcgtctcactaagaaaaccaaaaaggtgtcaaaggtggaagtaggaaccaggtctaccgacgcatcgctggacgagtggctcgagggaactcatttggccaagacattgtctgggaaatcaaaaagcaagaagaactaagaaagaacgcagtgtttagagactcgacttttagcgttttgagagagtttacaagttttaaagttgagtcttgaggaactttagggtttataaacgttactttccttttttttgttcatgcatttgtactttttagacaatcttatcactctttcttgtc

SEQ ID NO: 31066 - protein, 276 aa, Triticum aestivum
LFSLHFVFVDPITKKASKMNVRVLFLALLLLASPLLQVARCQVDAEDHSSIVDDVVGEHSDSGAEEDDQDLDNINLTSAPGVETVSVFPKNSAKVVPAGEETELLVALKNDGKSSVGVMGIRASVHLPYDHKLLVQNLTMMRYNNASIPTSVQATFPYIFAVSQYLQPGAFDLVGYIIYDVEGKPYQSVFYNGTIEVVESGGLLSGESVFLITLGVALLLLLGLWAYSQVQRLTKKTKKVSKVEVGTRSTDASLDEWLEGTHLAKTLSGKSKSKKN

SEQ ID NO: 31067 - protein, 258 aa, Triticum aestivum
MNVRVLFLALLLLASPLLQVARCQVDAEDHSSIVDDVVGEHSDSGAEEDDQDLDNINLTSAPGVETVSVFPKNSAKVVPAGEETELLVALKNDGKSSVGVMGIRASVHLPYDHKLLVQNLTMMRYNNASIPTSVQATFPYIFAVSQYLQPGAFDLVGYIIYDVEGKPYQSVFYNGTIEVVESGGLLSGESVFLITLGVALLLLLGLWAYSQVQRLTKKTKKVSKVEVGTRSTDASLDEWLEGTHLAKTLSGKSKSKKN

SEQ ID NO: 31068 - protein, 158 aa, Triticum aestivum
MGIRASVHLPYDHKLLVQNLTMMRYNNASIPTSVQATFPYIFAVSQYLQPGAFDLVGYIIYDVEGKPYQSVFYNGTIEVVESGGLLSGESVFLITLGVALLLLLGLWAYSQVQRLTKKTKKVSKVEVGTRSTDASLDEWLEGTHLAKTLSGKSKSKKN

SEQ ID NO: 31069 - DNA, 1015 bp, Triticum aestivum
  misc_feature (104)..(104): n is a, c, g, or t
  misc_feature (294)..(295): n is a, c, g, or t
tcgtcccttggtgactgaagagaagagtttaagcaaagaatggcagcacaagcgcttgtgtcttcttcacttacttcctctgttcagactgctagacagatatncggcgcaaaaccagctgtgtccgtatcacagaggaaggtttccttggttgttaaggctgcctcaactccacctgccaagcaaggagcaaacaggcaattgtggtttgcatcatcacagagtctctcttacttggatggcagcttacctggcgactttggattcgatccgcttggtctttcagacccaganngtactggaggcttcatcgagccgagatggctagcctacggagagatcatcaacgggaggttcgctatgttgggtgcacctggagctatagcacctgagattctaggaaaggccggtctgattcctgcagacactgctcttccctggttccaaaccggtgtgattccacctgcagggacatacagctactgggcagacccttacacactctttgttctcgagatggctttgatgggatttgccgagcacaggaggttgcaggactggtacaacccaggatctatgggtaaacaatacttcttgggtctagagaaaggtttcgcgggttcaggtgacccggcttaccccggtggaccattcttcaaccctcttgggtttggaaaagacgagaagtcgatgaaggagttgaaactcaaggaggtcaagaacggtagactggcaatgctcgccatcctaggctattttgtgcagggactagtgaccggtgtggggccttaccagaaccttcttgatcatttggcggatcccgtcaacaacaatgtcttgaccagcctcaagttccactgagatgatcatatatcgtattcatcacatggtgttttatgttggtttcccattctcttgtatcctacaatcttgtttgtttctcttggtaccatcagtttctctgtgttgtaacaccctgtgtaaacatattcgtcttttgtaagaaataatggcc

SEQ ID NO: 31070 - protein, 273 aa, Triticum aestivum
  misc_feature (22)..(22): Xaa can be any naturally occurring amino acid
  misc_feature (85)..(86): Xaa can be any naturally occurring amino acid
MAAQALVSSSLTSSVQTARQIXGAKPAVSVSQRKVSLVVKAASTPPAKQGANRQLWFASSQSLSYLDGSLPGDFGFDPLGLSDPXXTGGFIEPRWLAYGEIINGRFAMLGAPGAIAPEILGKAGLIPADTALPWFQTGVIPPAGTYSYWADPYTLFVLEMALMGFAEHRRLQDWYNPGSMGKQYFLGLEKGFAGSGDPAYPGGPFFNPLGFGKDEKSMKELKLKEVKNGRLAMLAILGYFVQGLVTGVGPYQNLLDHLADPVNNNVLTSLKFH

SEQ ID NO: 31071 - protein, 166 aa, Triticum aestivum
MLGAPGAIAPEILGKAGLIPADTALPWFQTGVIPPAGTYSYWADPYTLFVLEMALMGFAEHRRLQDWYNPGSMGKQYFLGLEKGFAGSGDPAYPGGPFFNPLGFGKDEKSMKELKLKEVKNGRLAMLAILGYFVQGLVTGVGPYQNLLDHLADPVNNNVLTSLKFH

SEQ ID NO: 31072 - DNA, 768 bp, Triticum aestivum
aacacttggtttagcaagagaaaaaataccaaccatggcaaccatttctactgatcaaccaagaggatcctactcctatggaacctcctatggagcaccctatggaaccacctatgagaccaacagcagcattaacaaccctccttcacgccaaaccgtgaagttcataactgctgcaactattggcatcacactcttactcctgtctgggttgaccctcacaggcactgtcataggtttgatcattgcaacccctcttctcgttatcttcagccccatccttgtccctgctgcgtttgtgctgttcctggttgcttctggctttttgttctctgggggctgtggtgtggctgccattgctgctttatcttggatttacaactacgtttctgggaaccagcctgcgggttctgacacccttgactatgcaaaagggtaccttactgataaggcaagggatgtggaggagagggcaaaggattatggaagttatgctcagggtagaattaatgaggccacacaaggaacttattagtcatgcatgcatgaatatatgcatgtgtgtatgaggttgaattgaaggtggtgatggtggtggtacccttgtggatttgcatgttcaagttctgctgtttattttgaatcttgtttgcattgtgctgtgttgttctggtttttgtaatctctcgttcgtttttttaagctaaatctttcgccttatttgtgtaacaaccatcatgttaataaatctcttttgtagctagaccg

SEQ ID NO: 31073 - protein, 177 aa, Triticum aestivum
TLGLAREKIPTMATISTDQPRGSYSYGTSYGAPYGTTYETNSSINNPPSRQTVKFITAATIGITLLLLSGLTLTGTVIGLIIATPLLVIFSPILVPAAFVLFLVASGFLFSGGCGVAAIAALSWIYNYVSGNQPAGSDTLDYAKGYLTDKARDVEERAKDYGSYAQGRINEATQGTY

SEQ ID NO: 31074 - protein, 166 aa, Triticum aestivum
MATISTDQPRGSYSYGTSYGAPYGTTYETNSSINNPPSRQTVKFITAATIGITLLLLSGLTLTGTVIGLIIATPLLVIFSPILVPAAFVLFLVASGFLFSGGCGVAAIAALSWIYNYVSGNQPAGSDTLDYAKGYLTDKARDVEERAKDYGSYAQGRINEATQGTY

SEQ ID NO: 31075 - DNA, 955 bp, Triticum aestivum
gttcactagcttcgaagtttctttcgaatagttaaaaaaaacaaacaatggcgacggttcagttcttcaaccaattcccctgccaaacccgagtccaaagcccatcaaactcaaaacccctctccaagccaccgtcttcgctggtgccaatgagcgcgctcactcgccgtccgtcgttttcccccggagaaatcgccgtttctcgttctgatttcagagtcagagtcatcgatgcggaagacgagttggatccggagacgagtgagggaggaggatctgctctattgatggcggaggaagcaatcgaatctgtggaggaaacggaggctctcaagagatcgctggtggattcgttgtacggcacagaccgagggttgagcgcatcgagcgagacgagagccgagatcggagatctaatcacacagctcgagtccaagaaccctacaccagctcccaccgatgctctcttccttctcaacggcaaatggatccagattaagttcgaggaaggtgtgatcggcactcctcagctaacggattcgattgagatcccggagtatgttgagtttcttggtcagaagattgatcttactccgatcagagggttgcttacatcggtacaagacacggctacgtctgtggctagaaccatatcgagccagccaccgttgaaattctctttgcctggggacagtgctcagtcgtggctgctcacgacttatctggacaaggacattaggatctctagaggagatggtggaagcgtctttgtgcttatcaaagaaggaagccctctgttgaacccttgaactctttaatgccaagtacaaactaagtgtttaatatattgttgttgtagtgttaatcgtttgtatgtattaactcggatggtatggagttaagtaataatgttgtagctgctataaaaatacaaaaaaaaaaatatacaaatgtt

SEQ ID NO: 31076 - protein, 253 aa, Triticum aestivum
MATVQFFNQFPCQTRVQSPSNSKPLSKPPSSLVPMSALTRRPSFSPGEIAVSRSDFRVRVIDAEDELDPETSEGGGSALLMAEEAIESVEETEALKRSLVDSLYGTDRGLSASSETRAEIGDLITQLESKNPTPAPTDALFLLNGKWIQIKFEEGVIGTPQLTDSIEIPEYVEFLGQKIDLTPIRGLLTSVQDTATSVARTISSQPPLKFSLPGDSAQSWLLTTYLDKDIRISRGDGGSVFVLIKEGSPLLNP

SEQ ID NO: 31077 - protein, 219 aa, Triticum aestivum
MSALTRRPSFSPGEIAVSRSDFRVRVIDAEDELDPETSEGGGSALLMAEEAIESVEETEALKRSLVDSLYGTDRGLSASSETRAEIGDLITQLESKNPTPAPTDALFLLNGKWIQIKFEEGVIGTPQLTDSIEIPEYVEFLGQKIDLTPIRGLLTSVQDTATSVARTISSQPPLKFSLPGDSAQSWLLTTYLDKDIRISRGDGGSVFVLIKEGSPLLNP

SEQ ID NO: 31078 - protein, 173 aa, Triticum aestivum
MAEEAIESVEETEALKRSLVDSLYGTDRGLSASSETRAEIGDLITQLESKNPTPAPTDALFLLNGKWIQIKFEEGVIGTPQLTDSIEIPEYVEFLGQKIDLTPIRGLLTSVQDTATSVARTISSQPPLKFSLPGDSAQSWLLTTYLDKDIRISRGDGGSVFVLIKEGSPLLNP

SEQ ID NO: 31079 - DNA, 420 bp, Triticum aestivum
atttttctccaagagaaacgtaaatttgcagttcctttgtcactagttttcgatgctgtagaattgaagagtgagagagagagagatagatcgttgaagacgcagcggtgatcgaaacagaggagagatctggaaatggaaggtggaggatccaacgttagatctagctactacaacgtcctcggtattcgcaaagacgcctctgtttccgatgtccgggctgcttaccgtaagctcgccatgaaatggcatccggatagatacgcgaggactcctgacgtcgccggagaagccaaacgtcgatttcagcaaatccaagaagcctattctgttctgaatgacgagaataagcgctcgatgtatgacgctggactatacgatccccatgaagatgacgacgacgacttctgcgacttcatg

SEQ ID NO: 31080 - protein, 95 aa, Triticum aestivum
MEGGGSNVRSSYYNVLGIRKDASVSDVRAAYRKLAMKWHPDRYARTPDVAGEAKRRFQQIQEAYSVLNDENKRSMYDAGLYDPHEDDDDDFCDFM

SEQ ID NO: 31081 - protein, 60 aa, Triticum aestivum
MKWHPDRYARTPDVAGEAKRRFQQIQEAYSVLNDENKRSMYDAGLYDPHEDDDDDFCDFM

SEQ ID NO: 31082 - DNA, 955 bp, Triticum aestivum
accgctccagtcccgccaggatctgccgccccacaccgtgcccagctccgccgcccccgcgccccccctctcagccgctcgacgctcgccggagcggcggatctccgacgcgtcgctccctcccgcaggcaacagacggcatctaggcagaacctcccaccattccaccggaatcggagaacctagtcgcggcgcctcaacctcgcctgaactcaccgtcgatggcggccgctgcggggtcgtacggcaagctcgacaagtcattcaagcttgccgctcgctccatactcaccgccttctcccgcgaggatcttaacaatgctttcccatcgttcacggacgccgaaagggagcgcctgtaccaaatgttcatctatgtgatcaagtctttgcatggcaatatagtggaggagttccgaaatctctgcgatgaaatagaaattgctactgcccttgacaaggtagatcagtttgccgaagaacaaactctggacgtattatcttcagacaagactagcattgaagacatcaaagaaaggatatcaaaggagaagaaggatgaaattgaacttttaaaaggtttactagagaagactcaagaaaggaacaatgccatgaaggcccgaatcgaacccttgaagcaaggggaggatttcaatgacacaagagatgttctcacgaagctgaaggaatggaattctgcatgtcagagctgcaatgaccattgagcttctctggttactcgatgtagtcaagagacatctgctgtgtagctttgtgtgttcgtagagtggaggtcgagtcaggggtcatgctcccccatgaaccaatggtgctaaccaattgtagcgtgatttcgtttcttcgttgcaaggcatagctgttgcgtttctgtattttcgtcgcctcatgtttcctgcacccatagttgatgcttgctttagtgatcatcctg

SEQ ID NO: 31083 - protein, 168 aa, Triticum aestivum
MAAAAGSYGKLDKSFKLAARSILTAFSREDLNNAFPSFTDAERERLYQMFIYVIKSLHGNIVEEFRNLCDEIEIATALDKVDQFAEEQTLDVLSSDKTSIEDIKERISKEKKDEIELLKGLLEKTQERNNAMKARIEPLKQGEDFNDTRDVLTKLKEWNSACQSCNDH

SEQ ID NO: 31084 - protein, 120 aa, Triticum aestivum
MFIYVIKSLHGNIVEEFRNLCDEIEIATALDKVDQFAEEQTLDVLSSDKTSIEDIKERISKEKKDEIELLKGLLEKTQERNNAMKARIEPLKQGEDFNDTRDVLTKLKEWNSACQSCNDH

SEQ ID NO: 31085 - protein, 104 aa, Triticum aestivum
PLQSRQDLPPHTVPSSAAPAPPLSAARRSPERRISDASLPPAGNRRHLGRTSHHSTGIGEPSRGASTSPELTVDGGRCGVVRQARQVIQACRSLHTHRLLPRGS

SEQ ID NO: 31086 - DNA, 823 bp, Triticum aestivum
agacggtgccagagtccacgctccggaagaaaaaggcaccacctttgttcgcccttctcctctccctcgtgacaccactcccagagaaagagagagacagatggcgatgcgggcggtggcggtgctgctgcttctggcggtggcgagcgtgctggcggcgggcgcggcggcgcagtcgacgggcacgccggcgtgcgcgtccaagctgacgggctgcgccggctacatgaacggcacggacgcgcagaagccgccggagacctgctgcggcccgctccgggacgccgtgaagaacgagaagccctgcctctgcgcgctttacgcctcgcccgagatcttcaaggccttcaacatcaacgtcaccgacgcgctccgcctctccaagcgctgcggcgtctccgaggacgtcagcagctgccccagcacctctctgacgaagtctcctccaggttcgagttcttctccatcaggtggcgctccatcaggtggcaagagcgccgggcaccctaccatgtcggccagcttcgcggggctgatgagcctcttcctggtcctgtggtctgcactggcataagaaatcggcgattcggcatgctagacatgttcttctttcggcttatatcccatggtagatgagctgcagctctggtggtagttcttggtggtgtcgccgcgtttgtttttgctgtgtattggttggtgttgccagttcagtagacttgctgtgaataaggatttcggcactctcttcagacctgtgatgaccagagcagagtgggcattgtgtgagacgtatttcggcttcactattttcttttctttt

SEQ ID NO: 31087 - protein, 190 aa, Triticum aestivum
DGARVHAPEEKGTTFVRPSPLPRDTTPRERERQMAMRAVAVLLLLAVASVLAAGAAAQSTGTPACASKLTGCAGYMNGTDAQKPPETCCGPLRDAVKNEKPCLCALYASPEIFKAFNINVTDALRLSKRCGVSEDVSSCPSTSLTKSPPGSSSSPSGGAPSGGKSAGHPTMSASFAGLMSLFLVLWSALA

SEQ ID NO: 31088 - protein, 157 aa, Triticum aestivum
MAMRAVAVLLLLAVASVLAAGAAAQSTGTPACASKLTGCAGYMNGTDAQKPPETCCGPLRDAVKNEKPCLCALYASPEIFKAFNINVTDALRLSKRCGVSEDVSSCPSTSLTKSPPGSSSSPSGGAPSGGKSAGHPTMSASFAGLMSLFLVLWSALA

SEQ ID NO: 31089 - protein, 155 aa, Triticum aestivum
MRAVAVLLLLAVASVLAAGAAAQSTGTPACASKLTGCAGYMNGTDAQKPPETCCGPLRDAVKNEKPCLCALYASPEIFKAFNINVTDALRLSKRCGVSEDVSSCPSTSLTKSPPGSSSSPSGGAPSGGKSAGHPTMSASFAGLMSLFLVLWSALA

SEQ ID NO: 31090 - DNA, 911 bp, Triticum aestivum
atactaactcacacacaaattactagacatcctcgttctctgtgcagttccaacaatcctagtgatggcgtgtgcaagccatgtcatgattttccttgtgttctcaaatttagccatagccatggccacccttcctcctcccttgtatgaccctaacctagggaagtgtaagaatagttgtgaggaagagctcaatctatctttgtacctacaccaagttgtgacaggaccagcccacaaccaagaagtaattctcagccctggctttcctaacatgtttggtatgatagccgtcgttgactggaccatatacgccgtccctgattccacttcaagtatcattgctcgggcaaagggaatgactatccaggctacccaaagcgaggtcaatggtgttgcctggtttcttcctttcagcatggtctttcaggattccaggtttggcggttctacgctgcaagtgatgggagcaattactggtgcagtagatggtgagtgggctattgtgggtgggactggcaaattgtccacggcacgtggtactattaagttcatagcagtccaggcacagagcaccccaacctttgaggtctacagaaggattgatatccatgcattctacacacccgcaccggccgtttaagatatgaagaatacacatgcagcactccgactggaaaggcgagccagcaatctcgcataaataaaatatgtgttttccattatgactagtagtactacctcgttgtaatatgtggtcaagtcgtctttactttcaaaaaatgcaggagtttgtggcatatcattgaaaatcttagacataaatccacaaggcctttgtccttttttgtaaaattggactgtatgatttaatttggaatattacaatcttaatatattatgtgaaaagg

SEQ ID NO: 31091 - protein, 192 aa, Triticum aestivum
MACASHVMIFLVFSNLAIAMATLPPPLYDPNLGKCKNSCEEELNLSLYLHQVVTGPAHNQEVILSPGFPNMFGMIAVVDWTIYAVPDSTSSIIARAKGMTIQATQSEVNGVAWFLPFSMVFQDSRFGGSTLQVMGAITGAVDGEWAIVGGTGKLSTARGTIKFIAVQAQSTPTFEVYRRIDIHAFYTPAPAV

SEQ ID NO: 31092 - protein, 185 aa, Triticum aestivum
MIFLVFSNLAIAMATLPPPLYDPNLGKCKNSCEEELNLSLYLHQVVTGPAHNQEVILSPGFPNMFGMIAVVDWTIYAVPDSTSSIIARAKGMTIQATQSEVNGVAWFLPFSMVFQDSRFGGSTLQVMGAITGAVDGEWAIVGGTGKLSTARGTIKFIAVQAQSTPTFEVYRRIDIHAFYTPAPAV

SEQ ID NO: 31093 - protein, 173 aa, Triticum aestivum
MATLPPPLYDPNLGKCKNSCEEELNLSLYLHQVVTGPAHNQEVILSPGFPNMFGMIAVVDWTIYAVPDSTSSIIARAKGMTIQATQSEVNGVAWFLPFSMVFQDSRFGGSTLQVMGAITGAVDGEWAIVGGTGKLSTARGTIKFIAVQAQSTPTFEVYRRIDIHAFYTPAPAV

SEQ ID NO: 31094 - DNA, 754 bp, Triticum aestivum
ggtgcgccgtccccctgagccactccccgccatggagtccaacgatggcgcatatccttgatccattggattaatccaccactggaagcagcagcctagtcaccattcctactctgacatcccctcaacgtgaagctggtgagataccagtatcacaggctgagcccatgaatatagaatcagttgtcatagaggaagacagcgaagaagatgaagcaaaagcggaagaaaatgaagcagaagaagtagtcgttcgtcctaggaggaagttgacatctcctgtttggaaggagtttaagaaagtaaaagtgatgaacagaatgaaggccaagtgtaactggtgctcaaagaagcttggaggggaaccaagaaatggaacgaagcatctccttgaccatttaaagattgtacatggaaagaaggtttagagcgcatcacactatagaggcggttccttctgtacttactacaagtcagctcaacttcaacaaataatgatgccgaacacataccaaggctgtagctgttagcttgctacctctgcaatacttttgcgcatgatcatgtttaccttaagttagttatggtcacatggaaccttatgttggagtcaataaattatgtcaagtgagccagacaaatttcgtagtcaataaattatgtcaaatgagtcggacaaaattttgtccttattaaatgtggtgtttgtatgaatactctcttcaagcgtgtgctcaagctattcaatattttt

SEQ ID NO: 31095 - protein, 86 aa, Triticum aestivum
MNIESVVIEEDSEEDEAKAEENEAEEVVVRPRRKLTSPVWKEFKKVKVMNRMKAKCNWCSKKLGGEPRNGTKHLLDHLKIVHGKKV

SEQ ID NO: 31096 - DNA, 1551 bp, Triticum aestivum
gcagatttgtttgccatcttttggggttttcttgatgagttcttggttggtatgagtggagtggtttgcgattctctttttcctgcttggaggaaggattaggttcttccatttcttgctgggtccgtgctcttgtgtgggcgtctagcttcttccatttcttgttgcattcctgctgatctctgtgggtgccagagatgagcgtaccgcacctgttccggtgtccgatcagcctggacatcttcacggacccggtgacgctctgcacggggcagacgtacgaccgtcaatgcatcgagcggtggctcgctgacggccaccgcacctgccccgtcacaatgcaggccctcggcgacgccgacaccaccgtgctcgtgcccaaccgcaccctgcgccacctcatcgagcgctggctctccgccgccaccgaccacagcctcccggagtcggcggacgacgatccatcgcttgcggcgctcaagcggtgcctccagtccgacgccacctccgccgccgccaagatcggcgcgctcaagaaggtcttggcgctggcgtccgagtccgacgtcggccgcgcgtgcatgctgcagctggggttcctctgcgtgctcctgccgctcgtcttccacgccgcgccgaccgcgccagcgcagcgccacgcggaggcggaggagctcgcgctgcagtgcgcgctcagcctcatgccgtcgaacgccgccgcgccgcagctggactgcctcaacatgctcaagaaggaggacaacctggcgtccttcgtccggctgctggggcgaggcagcggccgggccaaggcaggcctgtgccgcctcctggagaccgtcgccacggccgcggcgacgcgggacctggcgctcgtcgtggccgcctcgccgcgcgtgtggcaggcgctcctgccgctcctgcagcagcacgccggcccggcccccgacgcgcgcgcctcggaggctgcagtgcgcgcgatcgctgcggtctgcgcggccgagccggcgcgtggcagtgccatccaccacggcgcggtcggcgcgctcttcaggcacctgtcgtggtgggcgtacggcaagggcggcggggccgtgtccagcgcgctggcggcggtggaggcgctggcggagacggaggccggccggagggcggtggcgcgcgcgcccggcgcaacgcggattctcgtgaggcacgtgttcatgatgtcatcgagcaacgacgggagcgagcacgcggcggcggcgctgctagccgtgtgcagggagtcgcgggcggcgcggagcgaggcggtgggcgccggggtggtgacgcagctgctgctgctgcttcagagccagtgcggcgccagggctaaggccaaggcgagggcgctgctgaagctgctcaaatccaggtgaactagagctgagtactcattagagttagcgaggatttagatgttcttgtaagctgtaagtttctgcgtcaagaatgtctgccaatgacatggtattcaattccgggcaatttatgtagtaactctgggggattaaattgcccgggcgtttt

SEQ ID NO: 31097 - protein, 400 aa, Triticum aestivum
MSVPHLFRCPISLDIFTDPVTLCTGQTYDRQCIERWLADGHRTCPVTMQALGDADTTVLVPNRTLRHLIERWLSAATDHSLPESADDDPSLAALKRCLQSDATSAAAKIGALKKVLALASESDVGRACMLQLGFLCVLLPLVFHAAPTAPAQRHAEAEELALQCALSLMPSNAAAPQLDCLNMLKKEDNLASFVRLLGRGSGRAKAGLCRLLETVATAAATRDLALVVAASPRVWQALLPLLQQHAGPAPDARASEAAVRAIAAVCAAEPARGSAIHHGAVGALFRHLSWWAYGKGGGAVSSALAAVEALAETEAGRRAVARAPGATRILVRHVFMMSSSNDGSEHAAAALLAVCRESRAARSEAVGAGVVTQLLLLLQSQCGARAKAKARALLKLLKSR

SEQ ID NO: 31098 - protein, 353 aa, Triticum aestivum
MQALGDADTTVLVPNRTLRHLIERWLSAATDHSLPESADDDPSLAALKRCLQSDATSAAAKIGALKKVLALASESDVGRACMLQLGFLCVLLPLVFHAAPTAPAQRHAEAEELALQCALSLMPSNAAAPQLDCLNMLKKEDNLASFVRLLGRGSGRAKAGLCRLLETVATAAATRDLALVVAASPRVWQALLPLLQQHAGPAPDARASEAAVRAIAAVCAAEPARGSAIHHGAVGALFRHLSWWAYGKGGGAVSSALAAVEALAETEAGRRAVARAPGATRILVRHVFMMSSSNDGSEHAAAALLAVCRESRAARSEAVGAGVVTQLLLLLQSQCGARAKAKARALLKLLKSR

SEQ ID NO: 31099 - protein, 272 aa, Triticum aestivum
MLQLGFLCVLLPLVFHAAPTAPAQRHAEAEELALQCALSLMPSNAAAPQLDCLNMLKKEDNLASFVRLLGRGSGRAKAGLCRLLETVATAAATRDLALVVAASPRVWQALLPLLQQHAGPAPDARASEAAVRAIAAVCAAEPARGSAIHHGAVGALFRHLSWWAYGKGGGAVSSALAAVEALAETEAGRRAVARAPGATRILVRHVFMMSSSNDGSEHAAAALLAVCRESRAARSEAVGAGVVTQLLLLLQSQCGARAKAKARALLKLLKSR

SEQ ID NO: 31100 - DNA, 902 bp, Triticum aestivum
atcatccacgccgagagtccaagctccaaaaccaaaccagaaccggttgatccgtcagtagccgcggccgccggcgatggagaagggcaagggcctcgcccgccgctgggcagtggagctccacgacgcatcttcctcctcatcctcgcctgccttccccgatcctcccggcttcaccagatctgccccggaagcggaggacgccgccagcgcacggcagcgcaaggagaccgaagccgcctggaaggggcagaaggcctgggaggtggcgcaggcgcccttcaagaacctgatgatgatgggttttatgatgtggatggccgggagcacagtccacctgttcagcattggcatcgtcttctctgctctctggcagcccttcaacgcactccgatctgtcgggaaagtttttgaaccatttaaggacccaagggtggatacacttgcacctaagttgctcttcactgctctcaacttggccgctatgggtttgggtgtttggaagctcaatacattgggtcttcttccaacaaatgcatcagactgggtatcttcactgtctcctgctcgggaggttgaatatgctggtggagggatccccttgatgtaatgccccttatgatcttcaattggtaaaactctttcgttttactacttggaggatggtatctgtactaaagcgaaatttatcctgctgaagggagaaattttatgcgggtttgttgtattttttgtttcacatgtaccaaattcggattgatatctatagacaaatcacaggcttagctaaagatagcttgctcgtttttttatctcttctgcttaccatgtctgattaaatagagaagttgtcgctaactctcccattcaatgtagtggacgaactgcttttgttttgttcg

SEQ ID NO: 31101 - protein, 177 aa, Triticum aestivum
MEKGKGLARRWAVELHDASSSSSSPAFPDPPGFTRSAPEAEDAASARQRKETEAAWKGQKAWEVAQAPFKNLMMMGFMMWMAGSTVHLFSIGIVFSALWQPFNALRSVGKVFEPFKDPRVDTLAPKLLFTALNLAAMGLGVWKLNTLGLLPTNASDWVSSLSPAREVEYAGGGIPLM

SEQ ID NO: 31102 - protein, 137 aa, Triticum aestivum
IIHAESPSSKTKPEPVDPSVAAAAGDGEGQGPRPPLGSGAPRRIFLLILACLPRSSRLHQICPGSGGRRQRTAAQGDRSRLEGAEGLGGGAGALQEPDDDGFYDVDGREHSPPVQHWHRLLCSLAALQRTPICRESF

SEQ ID NO: 31103 - protein, 105 aa, Triticum aestivum; identical to SEQ ID NO: 27125

SEQ ID NO: 31104 - DNA, 720 bp, Triticum aestivum
aaaaaaggggatttccgtccgaaaaaaaagtagagcccagaaggaagcggagctcgagcgatgcactcctgggggacccggctgctggccgcggcgacgacggcggcgctcctcctcatcgccacctgcgccgccgcctccgcgctcgacgccttccacgtcccctccgtcgaagcccaagcccacgttacgaagataaatcgattccacaaacagatcaatgggaacgacaaggtgaccttgaccttcagtctatctgcaaatttggaatcacttttcacatggaacacaaagcaggtctttgcctttgtgaccgctgagtatgaaaccgcgaagaattccctgaaccaggtttcattatgggacaagataatacctgacaaagacgaggcaaatgtgcaagtggaggtgaagagcaagtatcccctgattgaccaggggaccagtctgcggggcaagaaagttcagcttgtcctccactggcacatcatgccgaacgccggcgcaatgatccgaggcaagatgcctctttcggagttcactctcccagacacctatacttcctgaaaacgaagctgtgctcctctgctccatctgataaattatgtaggaggctcgcagttgtagatctataagaagaatcctctagtgaatgcgaagcgtctttgctgcactcaggacagtagtcttgttaattcctgatttttgttcgttcacagt

SEQ ID NO: 31105 - protein, 168 aa, Triticum aestivum
MHSWGTRLLAAATTAALLLIATCAAASALDAFHVPSVEAQAHVTKINRFHKQINGNDKVTLTFSLSANLESLFTWNTKQVFAFVTAEYETAKNSLNQVSLWDKIIPDKDEANVQVEVKSKYPLIDQGTSLRGKKVQLVLHWHIMPNAGAMIRGKMPLSEFTLPDTYTS

SEQ ID NO: 31106 - protein, 105 aa, Triticum aestivum
KRGFPSEKKVEPRRKRSSSDALLGDPAAGRGDDGGAPPHRHLRRRLRARRLPRPLRRSPSPRYEDKSIPQTDQWERQGDLDLQSICKFGITFHMEHKAGLCLCDR

SEQ ID NO: 31107 - DNA, 681 bp, Triticum aestivum
acaaccgtaataacctcctcccctacaaatagcctcccaagaagccaaccaaggccagcacagcacagcacagagcaatagcaatagccatagccagcagcaatggagatagagtcggtcaagtgtgagtgctgtggcctgagggaggactgcaccccggactacattgcgagcgtgagagccggcttctacggccagtggctgtgcgggctgtgctgcgaggccgtcagggacgaggccggcaggaagaagcaggctcacccgggcgtcgaggaggccgtgcgggcgcacatggccttctgcaagaagttcaagtccaaccccgccgtccgggtcgccgacggcatgcgccagatgctccggaggcggtccggtgacttgtccaagccgccgggctcctcctcctccaacaagtacggcactgcgcaggtcggagatgattcgcccgtgtcgctatattaattgaggagtacaccgttaccattctatggcttgtagaccatctagtgcttttttctcaggctcaaatctcctgtttcttttgtcatttttggcgtatgttcttattgtggaaagaacttggaatgtacagaaagtcataaatttctacgaaatagatgctaatagtgcttggctttgaaatgagactgtgtttctttttgttcgttttaagaacgaagc

SEQ ID NO: 31108 - protein, 119 aa, Triticum aestivum
MEIESVKCECCGLREDCTPDYIASVRAGFYGQWLCGLCCEAVRDEAGRKKQAHPGVEEAVRAHMAFCKKFKSNPAVRVADGMRQMLRRRSGDLSKPPGSSSSNKYGTAQVGDDSPVSLY

SEQ ID NO: 31109 - DNA, 1022 bp, Triticum aestivum
aaaatattattaatctgttgcaccgctcggttgctgtcgatcactcaggtttttagacaaggcggcggcggagacggcggacgacaaggcgcggccggcgagcccgtggcggctgtgcaccgtgacgcaggtggaggagctcaagtgcgtgctccgactgctgccggtgtgggcgtgcggcatcatcttcgcggccgcctacacgcagatgaccaccaccttcatcctccagggtgacacgctggacccgcgcgtcggcagcttccgcgtgccccccgccgtgctcaccgtcttcgacacccctcagcgtcatgctctgggtgccgctctacgaccgcgccgtcgtgccgctcgcgcgccacctcacgggccaccaccgcgggttcacgcagctggcgcgcatgggtgtgggcttcgtcatcctcactgttgccatgctcgccgccggcacgctcgaggtggcacggcgccgcgtcgtcacgcgccacggcacctacaccggcgaggacggcgcggggtacgtgccgatgtcgatcttctggcaggtgccgcagtacgtggtggtgggtgccgcagaggtgttcacgttcatcgggcagatggagttcttctatgaccaggcgccggacgccatgcggagcgtctgctcggggctctccagcgcggcgtttgcgctgggcaactacgcgagctcggcgctcgtggccgtcgtggtgcgcgcgacgacgaggggcgggcggcccgggtggatccccgacgatatcaacgacggccatctggactactttttctggctgctcgccatgctctgcatcggcaacttcggcgcgtacctgctcgtcgcacggtggtatatctacaagaagaccgctgactgaacctggagatcacagtaatgtaatgtaacgtacgtgctaggtgtacttctctaatgcaatgaagttgtaattgggaaagccacctttgatgctgcaaatctcgggggaactctgctcaaagaagaatcagaatcgttggcctgg

SEQ ID NO: 31110 - protein, 188 aa, Triticum aestivum
MLWVPLYDRAVVPLARHLTGHHRGFTQLARMGVGFVILTVAMLAAGTLEVARRRVVTRHGTYTGEDGAGYVPMSIFWQVPQYVVVGAAEVFTFIGQMEFFYDQAPDAMRSVCSGLSSAAFALGNYASSALVAVVVRATTRGGRPGWIPDDINDGHLDYFFWLLAMLCIGNFGAYLLVARWYIYKKTAD

SEQ ID NO: 31111 - protein, 158 aa, Triticum aestivum
MGVGFVILTVAMLAAGTLEVARRRVVTRHGTYTGEDGAGYVPMSIFWQVPQYVVVGAAEVFTFIGQMEFFYDQAPDAMRSVCSGLSSAAFALGNYASSALVAVVVRATTRGGRPGWIPDDINDGHLDYFFWLLAMLCIGNFGAYLLVARWYIYKKTAD

SEQ ID NO: 31112 - protein, 147 aa, Triticum aestivum
MLAAGTLEVARRRVVTRHGTYTGEDGAGYVPMSIFWQVPQYVVVGAAEVFTFIGQMEFFYDQAPDAMRSVCSGLSSAAFALGNYASSALVAVVVRATTRGGRPGWIPDDINDGHLDYFFWLLAMLCIGNFGAYLLVARWYIYKKTAD

SEQ ID NO: 31113 - DNA, 739 bp, Triticum aestivum
attcgttaagcggccgcgcgacagtttgataacgaaatggtgcaggggcagagcccggtggtgaagctgggggcgtggggcagcgacggcggcgccgcccacgacatcgacgttgtggcggcgccaccgcaccggctgcagagcatcgccctccgctggggcaaggtcatcgactccctcgccttcacctacaccgacaaggacgggcagccgcacgccgccgggccctggggcggtgccggaggcgtgtcggaagacctgatcaccctggggccctcggagtacgtgacggaggtcggctggaccgtgggcccgttcaagctcaaggagatcgaggcgtgcgtcacctcgctcaagttcgtgaccaacctggggaccacccacggccccttcggcaacggggacggcgcgcaccacaacctgcccgtgctggacgccggcagtgtcgtcggcatgttctgccgcgccgacgactacctccacgccatcggcttctatgtccgacccttggccgtcaccgaatccacagactcgccggccaaggctgagggggagagtttgccctagccgccaaggggcaggagaggaaaaataaaataaaaggccgtttgaacatttgcgatgttgagtctatgaattgcgttacatgcatcatgtatcaatctctgcgctagctcctcatgtcattacactattatttgcttaaccctgtcgattttgtcacatatcaagtttgagc

SEQ ID NO: 31114 - protein, 176 aa, Triticum aestivum
MVQGQSPVVKLGAWGSDGGAAHDIDVVAAPPHRLQSIALRWGKVIDSLAFTYTDKDGQPHAAGPWGGAGGVSEDLITLGPSEYVTEVGWTVGPFKLKEIEACVTSLKFVTNLGTTHGPFGNGDGAHHNLPVLDAGSVVGMFCRADDYLHAIGFYVRPLAVTESTDSPAKAEGESLP

SEQ ID NO: 31115 - DNA, 871 bp, Triticum aestivum
ataggccctcctatctctgacgacgggggagaaggagaaatcagagcaggcaatggagtctacgctaatcacgagattatcccccctcctcccctctccctccaagcccaggcccctctcctcatcccccctcgccggagctcgccgcatcgcctccatttccttctcatccggcagcgtatgtggcgtcttgcgtccccgcggcggcgttacctcgtcggtcaccgcagcggcggcggcgctcggcgaggcggcagaggccgggtctgaggccatcttgctcaatgttcagggcatgatgtgcgacgggtgcgctgccagtgtgaagcggattctcgagagtcagcctgaggttacttctgctacagttgattataaggaagcaagggctgtcgtgtggacaactcctgaggtcaaggtggcagaagattggcagaaacaatgtggagagaaacttgcaagtcatcttggtacttgtggatttgagtctcacccacaagggtaaggtgaagcccgataaagtcaactctgagtcttaactgctgtcccaaatgttaaccagcagagggcacctgatgctccagatttgtgtgactctgtgtgagctcctctgtgaaagttgtcctctagagttctggaagtgcagatcattatgttcatgttcttatttctagtgtgtaagcaatgtagcttgccttgctcgtgaacttcaactggaacattccatcaaacaaattgcaaggctcgttactataagccaaggagtttgacgaaatgttgaattcatgttatgtttggctgaacttagaatgaagtgtgtaatgtcatgaagatattacaattgaaatttttgagtttcttaaaaaaaaag

SEQ ID NO: 31116 - protein, 150 aa, Triticum aestivum
MESTLITRLSPLLPSPSKPRPLSSSPLAGARRIASISFSSGSVCGVLRPRGGVTSSVTAAAAALGEAAEAGSEAILLNVQGMMCDGCAASVKRILESQPEVTSATVDYKEARAVVWTTPEVKVAEDWQKQCGEKLASHLGTCGFESHPQG

SEQ ID NO: 31117 - protein, 89 aa, Triticum aestivum
IGPPISDDGGEGEIRAGNGVYANHEIIPPPPLSLQAQAPLLIPPRRSSPHRLHFLLIRQRMWRLASPRRRYLVGHRSGGGARRGGRGRV

SEQ ID NO: 31118 - DNA, 1156 bp, Triticum aestivum
agaaccacactcagccaagagagctactagtagccgggagtgtagtgagagtagagtgagcgagaatgggtggcaaagccgctctcctggtggccctcctggccgtgagcctggtcctcgaggcccaggcgggcagcggctacggcggcggccacgcccccaccccgacgccggtcgccccaccccccaagcacgagaagccacccaagggccacaagccccctcaccaccaccaccacgccaagccaccggccgcctcccacgggccgccaacgcacgctccggcgccacccacctacagtcccccgacgcctaaacctacccctccggcccccaaacctacaccacccacgtacgccccgatcccgaagccgccgaagccatctccctcgcctccggcgtaccaccccacgcccaagcctgcgcctcccacgtataaaccaccaacccagcctaagccctcaccgccggcgtacaagcctgcccccaaggtctcaccaccagcgtacaagcccgcccccaaggtttcaccgccggcttacaagccagcccccaaggtctccccgccggcgtacaagccagcccccaaggtctcaccgccggcgtacaagccagcccccaaggtctcaccgcccggcgtacaagccagcccccaaggtctcaccgccggcgcacaagcctgtccccaaggtctcaccgccggcgtacaagcctgtccccaagccctcaccgccgacgtcgccgactccgccggcgccgaagccgactccaccgccctacaagccgccgacgcctactcctccggcgtacaagccccccaccccgagccccccgcctccgccgtaccaccactaagaagatccaccactctgtgaagttgggagcccaggatgcggtcgagaagagttgtgcgagcaggccaagaagagccacgtacggcgtcgttgatcctcctccggtgtgtgttgctgccgaactagggccgatctctgaggagatggaataatgcagatggctcccattagttatcttaccagcttatcatttgtgttcgtccagtcttagcgtctgtgttgctagcgtggcaatgtgccagtgtcactgtaaaaccattaatcactatggaaatggaagtaaaaggtgttgttttccgtgc

SEQ ID NO: 31119 - protein, 269 aa, Triticum aestivum
MGGKAALLVALLAVSLVLEAQAGSGYGGGHAPTPTPVAPPPKHEKPPKGHKPPHHHHHAKPPAASHGPPTHAPAPPTYSPPTPKPTPPAPKPTPPTYAPIPKPPKPSPSPPAYHPTPKPAPPTYKPPTQPKPSPPAYKPAPKVSPPAYKPAPKVSPPAYKPAPKVSPPAYKPAPKVSPPAYKPAPKVSPPGVQASPQGLTAGAQACPQGLTAGVQACPQALTADVADSAGAEADSTALQAADAYSSGVQAPHPEPPASAVPPLRRSTTL

SEQ ID NO: 31120 - DNA, 875 bp, Triticum aestivum
accacccacttcctgcagctcgcaaccaagcctcccaaccagctgagagctagcaggagcagcaagcgaaccaacgactcctccggtcgctcgtcggagccaggcaaggcaacgcagcatgtgtaacctcatcacgatcccgtcggtcgcctggctgcgccgcgccgtgcgccggtggcgcgcccgccgctccacctccaccccggtgccggcggggcacgtcgcggtctgcgcggacggcgcgcggttcatgggtgcggctggcgcacctcagccaccccgcgttcctggagctgctcaggcaggcggaggaggagtacggcttcccgtccggcgcctccggccctgtcgcactcccctgcgacgaggaccgcctccgcgacgtcctccgccgcgtctcttcctcgtccgactccacggagccgcgccgctcctccttctgccgccgccgcggcgactcgcggccgctgctgcaggcggtggccttcctgtgagcgcgcccgcgcggcggcaccgaacgatccagcaacgcagcgcccaatttctgggtgccagagcagcaactggtgacagactcagcactccggacgcgggaaaaagacgaaggccatcaagaccgttcgggccagcgtggcggcgtgctcccgtgccgtgcccagcgtattgccggccggcgatcgggcgcgtactggagctgcgtagtacagtgcgtgatggggaagtgatgttacatgctagtaactgattgattgaggaaggcgacgattttttgggttctttttctctgtaacgaccactcaactcgcctgtgcaaatccttgccgaggcataggagtaaattaattaataaagatttgattgattgttcttgctgc

SEQ ID NO: 31121 - protein, 208 aa, Triticum aestivum
MCNLITIPSVAWLRRAVRRWRARRSTSTPVPAGHVAVCADGARFMGAAGAPQPPRVPGAAQAGGGGVRLPVRRLRPCRTPLRRGPPPRRPPPRLFLVRLHGAAPLLLLPPPRRLAAAAAGGGLPVSAPARRHRTIQQRSAQFLGARAATGDRLSTPDAGKRRRPSRPFGPAWRRAPVPCPAYCRPAIGRVLELRSTVRDGEVMLHASN

SEQ ID NO: 31122 - protein, 164 aa, Triticum aestivum
MGAAGAPQPPRVPGAAQAGGGGVRLPVRRLRPCRTPLRRGPPPRRPPPRLFLVRLHGAAPLLLLPPPRRLAAAAAGGGLPVSAPARRHRTIQQRSAQFLGARAATGDRLSTPDAGKRRRPSRPFGPAWRRAPVPCPAYCRPAIGRVLELRSTVRDGEVMLHASN

SEQ ID NO: 31123 - DNA, 959 bp, Triticum aestivum
ataggtaatcataccacaacccgagcattctacaaccactttcatcaacgccatacacgtctcctaccctcacagttcgttgctccgcacatcagcaggacttgcaatggcgggagacggcgagctgaagctgctgggcgtgtggacgggcccgttcgtcatcagggtgcgcgtggtgctcaacctcaagtctctgccgtacgagtacgtggaggagaacctgggcagcaagagcgcgctcctcctgggctccaacccggtgcaccagagcgtgcccgtcctcctccacggcggccgccccgtgaacgagtcccaggtcatcgtgcagtacatcgacgaggtctgggcgggggccggcccgtccgtgctcccggccgacccctacgagcgcgccacggcgcgcttctgggcggcgtacgtcgacgacaaggtcgggtcggcgtggacggggatgctcttctcgtgcaagacggaggaggagagggcggaggccgtgtcccgggccgtggcggcgctggagacgctggagggcgcgttcgcggagtgctccaaggggaaggcgttcttcggcggcgacgccatcgggttcgttgacgtcgtgctcggcggctacctcgggtggttcggggcgatcgacaagatcatcgggcgccggctgatcgacccggcgaggacgccgctgctggccaggtgggaggagcagttccgcgcggcggacgcggccaagggcgtcgtgccggacgacgccgacaagatgctcgagttcttcccaccgtgctcgcttgggtcgccgccaaagcgaagtgaactgtgagcccgtgacatcgccagctcgtgacatgtgtgtttgtgtgtgtgcgtgtctgagtccgtccagtgtgtgctgaataaatgcaccgcatgtcgtgtgttgtaccaagggcaaacgatgctgaataattttgatgtttgttgatttc

SEQ ID NO: 31124 - protein, 235 aa, Triticum aestivum
MAGDGELKLLGVWTGPFVIRVRVVLNLKSLPYEYVEENLGSKSALLLGSNPVHQSVPVLLHGGRPVNESQVIVQYIDEVWAGAGPSVLPADPYERATARFWAAYVDDKVGSAWTGMLFSCKTEEERAEAVSRAVAALETLEGAFAECSKGKAFFGGDAIGFVDVVLGGYLGWFGAIDKIIGRRLIDPARTPLLARWEEQFRAADAAKGVVPDDADKMLEFFPPCSLGSPPKRSEL

SEQ ID NO: 31125 - protein, 197 aa, Triticum aestivum
IGNHTTTRAFYNHFHQRHTRLLPSQFVAPHISRTCNGGRRRAEAAGRVDGPVRHQGARGAQPQVSAVRVRGGEPGQQERAPPGLQPGAPERARPPPRRPPRERVPGHRAVHRRGLGGGRPVRAPGRPLRARHGALLGGVRRRQGRVGVDGDALLVQDGGGEGGGRVPGRGGAGDAGGRVRGVLQGEGVLRRRRHRVR

SEQ ID NO: 31126 - protein, 120 aa, Triticum aestivum
MLFSCKTEEERAEAVSRAVAALETLEGAFAECSKGKAFFGGDAIGFVDVVLGGYLGWFGAIDKIIGRRLIDPARTPLLARWEEQFRAADAAKGVVPDDADKMLEFFPPCSLGSPPKRSEL

SEQ ID NO: 31127 - DNA, 1538 bp, Triticum aestivum
atccatctccattcccaaccccaatcccaaatcccaatcccagagataacgaagatgaggaaccagaagagccgtgttcaggagtgcaaggtcgagcacatcgacctcatcccgggcatgccggacgacgtcgccgtcgactgcctggcgcgcgtcccgcacgcctccttccgctcgatgcggggcgtgtgccgcggctggaacagcgccgccaccgcgccggacttcgcgctggcgcgcgccgaggccggcgccaacgaggatctcgtctacctgctgcagttcgggaacccggcggccgcggacgcggacggggtcgcgccggagaacgcccaggcgtacggggtgtcggtgtacaacgtcaccaccggggagtggcgccgcgagggcgccgcgccgcccgtgccgatgttcgcgcagtgcgcggccgtggggagccgcctcgccgtgctgggcgggtgggaccccaagaccttcgagcccgtggcggacgtgcacgtgctcgacgcgtccaccggcgtgtggcgccgcggcgcaccgatgcggtcggcgcggtccttcttcgcctgcgccgaggcgggcggcaagatctacgtcgcgggaggccacgacaagctcaagaacgcgctgaagacggcggaggcgtacgacgcgggcgccgacgcctgggacccgctgccggacatgtcggaggagcgcgacgagtgcgacggcatggccaccgtcgctggcgaccggttcctggccgtgagcgggtaccgcacaggccgccagggcgggttcgaacgcgacgccgagtggttcgacccagcgtcccgcgagtggcgccgcctggagcgcgtgcgcgcgcctccgtcggcggcgcacgtggtggtgcgcggccgggtgtggtgcatcgagggcacggccgtgatggagtaccgcggggagcggcgcagctggcgcgaggtcgggccgtccccgccggggctcaaggccggcacggcgcgcgcggtcgccgtcggaggcggcgagcgcgtggtggtgaccggcgccatcgagtccgagggaggaggcacggggcacgcgctgtgggtgttcgacgtcaagtccaagaactggaccgtggtgcggccgccgccgcagttcgccggcttcgtcttctccattggatccgtgcgcgtgtgatgtctcggaccgctctcctgcccaaggagacttcttgctagtcatgtcatgtgtgcgagagatgagcggaagggggaaggcacagagatgtgagtagtcgacggcatcgaaggcgaagagaggtagtgtagttagctcagctgtgttcatctgcctctgttgcagaactgaattcctgctcgtatggttggactgatggatcaggggtgtagtaatccttgttttccgaatctatagaggttggattacctgattgttcttggcaagcaacatttatccgccttcttcagtcaaaaatactacgtccccaacatgtaaaaacaggcgaacactctatggatgctagtacatctcctcatgagagtaacaac

SEQ ID NO: 31128 - protein, 401 aa, Triticum aestivum
PSPFPTPIPNPNPRDNEDEEPEEPCSGVQGRAHRPHPGHAGRRRRRLPGARPARLLPLDAGRVPRLEQRRHRAGLRAGARRGRRQRGSRLPAAVREPGGRGRGRGRAGERPGVRGVGVQRHHRGVAPRGRRAARADVRAVRGRGEPPRRAGRVGPQDLRARGGRARARRVHRRVAPRRTDAVGAVLLRLRRGGRQDLRRGRPRQAQERAEDGGGVRRGRRRLGPAAGHVGGARRVRRHGHRRWRPVPGRERVPHRPPGRVRTRRRVVRPSVPRVAPPGARARASVGGARGGARPGVVHRGHGRDGVPRGAAQLARGRAVPAGAQGRHGARGRRRRRRARGGDRRHRVRGRRHGARAVGVRRQVQELDRGAAAAAVRRLRLLHWIRARVMSRTALLPKETSC

SEQ ID NO: 31129 - protein, 388 aa, Triticum aestivum
IHLHSQPQSQIPIPEITKMRNQKSRVQECKVEHIDLIPGMPDDVAVDCLARVPHASFRSMRGVCRGWNSAATAPDFALARAEAGANEDLVYLLQFGNPAAADADGVAPENAQAYGVSVYNVTTGEWRREGAAPPVPMFAQCAAVGSRLAVLGGWDPKTFEPVADVHVLDASTGVWRRGAPMRSARSFFACAEAGGKIYVAGGHDKLKNALKTAEAYDAGADAWDPLPDMSEERDECDGMATVAGDRFLAVSGYRTGRQGGFERDAEWFDPASREWRRLERVRAPPSAAHVVVRGRVWCIEGTAVMEYRGERRSWREVGPSPPGLKAGTARAVAVGGGERVVVTGAIESEGGGTGHALWVFDVKSKNWTVVRPPPQFAGFVFSIGSVRV

SEQ ID NO: 31130 - protein, 370 aa, Triticum aestivum
MRNQKSRVQECKVEHIDLIPGMPDDVAVDCLARVPHASFRSMRGVCRGWNSAATAPDFALARAEAGANEDLVYLLQFGNPAAADADGVAPENAQAYGVSVYNVTTGEWRREGAAPPVPMFAQCAAVGSRLAVLGGWDPKTFEPVADVHVLDASTGVWRRGAPMRSARSFFACAEAGGKIYVAGGHDKLKNALKTAEAYDAGADAWDPLPDMSEERDECDGMATVAGDRFLAVSGYRTGRQGGFERDAEWFDPASREWRRLERVRAPPSAAHVVVRGRVWCIEGTAVMEYRGERRSWREVGPSPPGLKAGTARAVAVGGGERVVVTGAIESEGGGTGHALWVFDVKSKNWTVVRPPPQFAGFVFSIGSVRV

SEQ ID NO: 31131 - DNA, 1978 bp, Triticum aestivum
ctctcgtagtcgcgtatctccacctccactacaccacaccatcagaagcccggccggcacggtcggtgcaaggatagctgcagacacacgcccacacagacacggtgtgacagcaattgccaccggcgatgtccgtttcttggccggcgccgtcgacgtgcgcggccgccggggccctgctggccgccgcatggctgctgtgcttcaggctgctcccggccgcggccaggccgagaaggcgggcgatgaagacagaggcgcagctccctcccggcagcttcgggtggccggtcgtcggcgagacgctggacttcgtctcctgcgcctactccccgcgccccgaggcgttcgtggacaagcgccgcctccggtacggcggcgcggtgttccggtcgcacctgttcgggtcggcgacggtggtgacggcggacgcggaggtgaaccggttcgtgctgcagagcgacgcgcggtcgttcgtgccgtggtacccgcggtcgctgacggagctcatgggcaagtcctccatcctgctcatcaacggcagcctgcagcgccgcgtccacggcctcgtcggcgccttcttcaagtcgccgcagctcaaggcgcaggtcaccgccgacatgcagcgccgcctcgcccccgcgctcgcctcctgggcgccaccagggccccgggcgcccgcctccgcatccaggaccacgccaagacgatagtgttcccgatcctggtgcggggtctgatcgggctggaggcaggcccagagatgcagcagctcaagcagcaattccaggaatttattgtcggactcatgtcccttcccattaagctgccagggactaggctctacagatccctccaggccaagaagaggatggccagggtgatacagaggatcatacaggagaagaggaggaggagggccctcgacggcggcggcgggccgagggacgccatcgacgtgctcatgggcgacggcagcgaggagctcaccgacgagctcatatccgacaacatgatcgacttcatgatccccgccgaggactccgtgccagtgctcatcacgctcgccgtcaagttcctcagcgagtgccccctcgccctgcagcagctcgaggaggagaacatggagctcaagatgaggaaaaccgacctgggtgaaaccttgcaatggactgactacatgtccttgtcattcacgcagcatgtgataacggagacgctgcggatcgggaacatcatcagcgggatcatgcgcaaggcggtccgcgacgtcgaggtgaaggggcatctcatccccaaaggatggcgcgtgttcatgtacttccggtcggtccacctcgacgacatgctctacgaggatccctgcaagttcaatccatggaggtggaaggagaaggacatgagcactagcagcttcaccccttttggcggtgggcagaggctgtgcccgggcctggatctggccaggctggaagcttccatctttctccaccacttggtcaccagcttcaggtgggtggccgaggaggaccacatcgtcaacttccccaccgtgcgcctcaagggaggcatgcccatcagggtcaccgccaaagactagctgcctgtcaatcagacggtcgtccttgatcaactccccgcagcagccaagccagccatgcatatacatgatgctgctgctgcaagtatggtatcttccatagcaaggttgaaaggatccttaaaacaagctagctaggcaacatctgatctgagagtacatagttatgggcatgcatgtataagtgttgtagggaagggttaattagccatggagtaggtgccactcatcaccgtggctcgttaatcatagccgaggaagaagactctgaccgatgatgcatgctgttatactagtataagtagtatagtgcttatgtcacaaggaatagatatctcatccctgtacatggaagaactttgccatctggtctgctcc

SEQ ID NO: 31132 - protein, 532 aa, Triticum aestivum
SRSRVSPPPLHHTIRSPAGTVGARIAADTRPHRHGVTAIATGDVRFLAGAVDVRGRRGPAGRRMAAVLQAAPGRGQAEKAGDEDRGAAPSRQLRVAGRRRDAGLRLLRLLPAPRGVRGQAPPPVRRRGVPVAPVRVGDGGDGGRGGEPVRAAERRAVVRAVVPAVADGAHGQVLHPAHQRQPAAPRPRPRRRLLQVAAAQGAGHRRHAAPPRPRARLLGATRAPGARLRIQDHAKTIVFPILVRGLIGLEAGPEMQQLKQQFQEFIVGLMSLPIKLPGTRLYRSLQAKKRMARVIQRIIQEKRRRRALDGGGGPRDAIDVLMGDGSEELTDELISDNMIDFMIPAEDSVPVLITLAVKFLSECPLALQQLEEENMELKMRKTDLGETLQWTDYMSLSFTQHVITETLRIGNIISGIMRKAVRDVEVKGHLIPKGWRVFMYFRSVHLDDMLYEDPCKFNPWRWKEKDMSTSSFTPFGGGQRLCPGLDLARLEASIFLHHLVTSFRWVAEEDHIVNFPTVRLKGGMPIRVTAKD

SEQ ID NO: 31133 - protein, 469 aa, Triticum aestivum
MAAVLQAAPGRGQAEKAGDEDRGAAPSRQLRVAGRRRDAGLRLLRLLPAPRGVRGQAPPPVRRRGVPVAPVRVGDGGDGGRGGEPVRAAERRAVVRAVVPAVADGAHGQVLHPAHQRQPAAPRPRPRRRLLQVAAAQGAGHRRHAAPPRPRARLLGATRAPGARLRIQDHAKTIVFPILVRGLIGLEAGPEMQQLKQQFQEFIVGLMSLPIKLPGTRLYRSLQAKKRMARVIQRIIQEKRRRRALDGGGGPRDAIDVLMGDGSEELTDELISDNMIDFMIPAEDSVPVLITLAVKFLSECPLALQQLEEENMELKMRKTDLGETLQWTDYMSLSFTQHVITETLRIGNIISGIMRKAVRDVEVKGHLIPKGWRVFMYFRSVHLDDMLYEDPCKFNPWRWKEKDMSTSSFTPFGGGQRLCPGLDLARLEASIFLHHLVTSFRWVAEEDHIVNFPTVRLKGGMPIRVTAKD

SEQ ID NO: 31134 - protein, 278 aa, Triticum aestivum
MQQLKQQFQEFIVGLMSLPIKLPGTRLYRSLQAKKRMARVIQRIIQEKRRRRALDGGGGPRDAIDVLMGDGSEELTDELISDNMIDFMIPAEDSVPVLITLAVKFLSECPLALQQLEEENMELKMRKTDLGETLQWTDYMSLSFTQHVITETLRIGNIISGIMRKAVRDVEVKGHLIPKGWRVFMYFRSVHLDDMLYEDPCKFNPWRWKEKDMSTSSFTPFGGGQRLCPGLDLARLEASIFLHHLVTSFRWVAEEDHIVNFPTVRLKGGMPIRVTAKD

SEQ ID NO: 31135 - DNA, 2043 bp, Triticum aestivum
gcaaacaacatccagaacgcgcagagacgcagatcgcgagcgagcgcgcacccgttaatcgcttcatctttccattccacctagagagcctttcgcgtccacgaaccgaaccaacaatggccgccgtggaggatgaggcgctgagggcgctggaagaggaggacgacgccatgatgaacgagccggacggcgagcccatggacggcctcgacgtcgacgaggaggaggaggccgactccccggcgacgatgaaggtcggcgaggagaaggagatcgggaagcaggggctgaagaagaagctcgtcaaggagggcgagggctgggaacggcccgagaccggcgacgaggtcgaagtgcactacacgggcactctcctcgacgggaccaagttcgattcgagccgagaccgcgggactcccttcaagttcaagctcgggcaggggcaggtgatcaagggatgggaccagggcatcaagaccatgaagaagggcgagaacgccgtcctcaccatcccgccggacctcgcgtacggcgaggcgggctccccgcccacgatcccgcccaacgccacgctccagttcgacgtcgagctcctctcgtgggccagcgtcaaggacatctgcaaggacggcggcatcttcaagagggtcctggtcgagggtcagaaatgggagaatcccaaggatctcgacgaagttactgtcaagtacgaggcgagacttgagggatggatccgtcgtgtccaagtcagagggtattgaattcgcagtgaaggatggttacttctgccctgcactttccaaagccgtgaagaccatgaagaagggcgagaaggtcctcctgaccgtcaagccacaatatggtttcggcgagcaaggaaggccggcttctgaggttgaagccgcggtgcccccgaattccacattgcacatcgatcttgagctagtctcctggaagacgatcaccctcatcggtgacgacaagaggatcttgaagaaggtgctcaaggaaggagaaggctacgagcgccccaacgacggggcagttgtcagagtgagactgatcggcaagttggacgacggcactgtgttcacgaagaaaggacatgaaggcgacgaaccattcgagttcaagacggatgaggagcaggtcatcgaagggctggacacgacggtgctcaccatgaagaaaggagaggtcgcgtcagctagaataccacctgaacatgcgttcggttccactgagacgaagcttgatattgctatggttcctcccaactccaccgtcttttatgaagtggacctcgtttccttcgagaaggagaaagaatcttgggacttgaagagtaatgctgagaacatcgaagcagctgctaaaaagaaagatgaaggaaatgcgtggtttaagatgggcaagtacgccaaggcttccaagagatatgagaaggctgcaaagtacattgagtatgacagctccttcagcgaggacgagaagaagcaatccaaggcagtgaagatcagcatcaagctcaacaacgcagcgtgcaaactgaaactcaaggattacaaggaagcagagaaactctgcgccaaggttttggagctggagagcacaaacgtcaaggctctgtaccggagggcgcaggcgtacaccgagctcgtggatctggagctggcagaactagatatcaagaaggctctggagatcgacccagacaacagggaggtgaaggttgcgtacaaggcgttgaaggacaagctgagggagtacaacaagagggacgccaagttctacggcaacatgttcgccaaatggaggaagacggagaacgccgccgggaagcagaacgcgcagcctatggccatcgacagcaccgcgtgacgggtctgccgcgtcctggtacagccgggtctggagtttgtatcagcgttgtaccgtggttttggttgtcttgtcctctgttctgcagcttgtgcctcgtctgtgatcggctgcgtgccttgataatgtactcataatttgctgacgtacgattctagtaag

SEQ ID NO: 31136 - protein, 354 aa, Triticum aestivum
MKKGEKVLLTVKPQYGFGEQGRPASEVEAAVPPNSTLHIDLELVSWKTITLIGDDKRILKKVLKEGEGYERPNDGAVVRVRLIGKLDDGTVFTKKGHEGDEPFEFKTDEEQVIEGLDTTVLTMKKGEVASARIPPEHAFGSTETKLDIAMVPPNSTVFYEVDLVSFEKEKESWDLKSNAENIEAAAKKKDEGNAWFKMGKYAKASKRYEKAAKYIEYDSSFSEDEKKQSKAVKISIKLNNAACKLKLKDYKEAEKLCAKVLELESTNVKALYRRAQAYTELVDLELAELDIKKALEIDPDNREVKVAYKALKDKLREYNKRDAKFYGNMFAKWRKTENAAGKQNAQPMAIDSTA

SEQ ID NO: 31137 - protein, 252 aa, Triticum aestivum
KQHPERAETQIASERAPVNRFIFPFHLESLSRPRTEPTMAAVEDEALRALEEEDDAMMNEPDGEPMDGLDVDEEEEADSPATMKVGEEKEIGKQGLKKKLVKEGEGWERPETGDEVEVHYTGTLLDGTKFDSSRDRGTPFKFKLGQGQVIKGWDQGIKTMKKGENAVLTIPPDLAYGEAGSPPTIPPNATLQFDVELLSWASVKDICKDGGIFKRVLVEGQKWENPKDLDEVTVKYEARLEGWIRRVQVRGY

SEQ ID NO: 31138 - protein, 232 aa, Triticum aestivum
MKKGEVASARIPPEHAFGSTETKLDIAMVPPNSTVFYEVDLVSFEKEKESWDLKSNAENIEAAAKKKDEGNAWFKMGKYAKASKRYEKAAKYIEYDSSFSEDEKKQSKAVKISIKLNNAACKLKLKDYKEAEKLCAKVLELESTNVKALYRRAQAYTELVDLELAELDIKKALEIDPDNREVKVAYKALKDKLREYNKRDAKFYGNMFAKWRKTENAAGKQNAQPMAIDSTA

SEQ ID NO: 31139 - DNA, 1688 bp, Triticum aestivum
agcaatttggcctagactagagtttatctcttgcatttccccgcgcgtagcagcaagcacaagaggagagatcgcgcatttatttacagagctgttgggagaatccaggaggaagtcgaagtactccggtccggccaagaagggggagacagagcgggggaggacgccggggcgccgagtttggggagaggaggagatggagacggacagcccgcggagcccggaggcggagatcgggcaccgggtggaggacctgtgggaggtggcgcagccgcagctgtccccgtcggagaagctcaactcctgcttcgaggacatccccgtcgccgccttcccgcgcacccacccctcgcaagtgatcgagataccttcggatgccagccttgctgatactgttgagacattgtccaagaataaaattttgagtgcacccataagaaacgtcgatgctccagaggatgctacttggatagacaaatacatcggtattgtggaatttgctggtattgcaatgtggttgcttcatcagtctgatgcttcaggtaatggaacagctggttctgcagttggatcacctgtggtcaatctagcatctaggttaggctctttcacattcagaagaacgtcatctggcagggtagaaaccactactgattcagaatcagatgaagctgcatcagtgggtggaagcttttttgaaacccttacttcctctgagttctacaagaacacaaaggttggcgatatctcaggaagcttccgatgggcgccatttcttgccctgcagacatctgacacattcctcactatgctgcttcttctatccaagtacaggatgaagagcctccccgtggtagatatgggggggaatcagattgagaatatcattacacaatcttccgttgtgcacatgcttgcagagtgtgttggactatcttggtttgaaagctggggaactaagaaactctgtgaactgggtcttcctctgatgaagccatacagacttgttaaggtaaatgaagaccagccagtcctaaaagccttccaactaatgagggaaaagggggttggtggtgtgcctgttatggacacaaatggaacaaaagcaattggtaacattagcatcagagatgtccaatatcttcttagtgcccccaagatatacaaacaatacaggacaatctcagccaaggatttccttaccgcggtccggcaccatctccaggagcagcacgaagcgtcgccgttgctgcacgacgtgatcacatgcaaaagagacgacgtgatcaaggaaatcatactgaagctggactcgaccaagatccacaggatctacgtggtcgacgacaagggggataccgagggggtgatcacgctgagggacataatctccaagctggtgcacgagccacggcattactttggggatttcttcgacggcgtcgtccccctacccgcaaacagtaccgtatgacaaaactctgtgatagtatgtacaaaaaatgtacattatctttttgctcattccccatcttcttcttaagttgtggttgctgttgctgttgctgtggagagacctctgtggggagtactaatgaagaaccaatggggtggatgacagtgtgcgttgaataatctgagaattgcctgagctttgcgatgagaatgatgatgcctttcttctttcg

SEQ ID NO: 31140 - protein, 490 aa, Triticum aestivum
AIWPRLEFISCISPRVAASTRGEIAHLFTELLGESRRKSKYSGPAKKGETERGRTPGRRVWGEEEMETDSPRSPEAEIGHRVEDLWEVAQPQLSPSEKLNSCFEDIPVAAFPRTHPSQVIEIPSDASLADTVETLSKNKILSAPIRNVDAPEDATWIDKYIGIVEFAGIAMWLLHQSDASGNGTAGSAVGSPVVNLASRLGSFTFRRTSSGRVETTTDSESDEAASVGGSFFETLTSSEFYKNTKVGDISGSFRWAPFLALQTSDTFLTMLLLLSKYRMKSLPVVDMGGNQIENIITQSSVVHMLAECVGLSWFESWGTKKLCELGLPLMKPYRLVKVNEDQPVLKAFQLMREKGVGGVPVMDTNGTKAIGNISIRDVQYLLSAPKIYKQYRTISAKDFLTAVRHHLQEQHEASPLLHDVITCKRDDVIKEIILKLDSTKIHRIYVVDDKGDTEGVITLRDIISKLVHEPRHYFGDFFDGVVPLPANSTV

SEQ ID NO: 31141 - protein, 425 aa, Triticum aestivum
METDSPRSPEAEIGHRVEDLWEVAQPQLSPSEKLNSCFEDIPVAAFPRTHPSQVIEIPSDASLADTVETLSKNKILSAPIRNVDAPEDATWIDKYIGIVEFAGIAMWLLHQSDASGNGTAGSAVGSPVVNLASRLGSFTFRRTSSGRVETTTDSESDEAASVGGSFFETLTSSEFYKNTKVGDISGSFRWAPFLALQTSDTFLTMLLLLSKYRMKSLPVVDMGGNQIENIITQSSVVHMLAECVGLSWFESWGTKKLCELGLPLMKPYRLVKVNEDQPVLKAFQLMREKGVGGVPVMDTNGTKAIGNISIRDVQYLLSAPKIYKQYRTISAKDFLTAVRHHLQEQHEASPLLHDVITCKRDDVIKEIILKLDSTKIHRIYVVDDKGDTEGVITLRDIISKLVHEPRHYFGDFFDGVVPLPANSTV

SEQ ID NO: 31142 - protein, 320 aa, Triticum aestivum
MWLLHQSDASGNGTAGSAVGSPVVNLASRLGSFTFRRTSSGRVETTTDSESDEAASVGGSFFETLTSSEFYKNTKVGDISGSFRWAPFLALQTSDTFLTMLLLLSKYRMKSLPVVDMGGNQIENIITQSSVVHMLAECVGLSWFESWGTKKLCELGLPLMKPYRLVKVNEDQPVLKAFQLMREKGVGGVPVMDTNGTKAIGNISIRDVQYLLSAPKIYKQYRTISAKDFLTAVRHHLQEQHEASPLLHDVITCKRDDVIKEIILKLDSTKIHRIYVVDDKGDTEGVITLRDIISKLVHEPRHYFGDFFDGVVPLPANSTV

SEQ ID NO: 31143 - DNA, 1561 bp, Triticum aestivum
aagaccagctacagaccagctacagcctagagctgagcattgcatttggtgttagactagcgcttgcccaccctgccatgacgtccaaggtagccaacagctccggcagcaacaatgcggatgccaagctatcgccgtcggggctccccgtccgggaggtcccgggcggctacggcgttcccttcttgtcgccgctgcgcgaccgccttgactactactacttccagggcgcggaggagtacttccgctcccgcatcgcccggaacggcggcgccaccgtgctgcgcgtcaacatgccccccgggccgttcatcaccaccgacttccgcgtcgtcgccttcctcgacgcgcgcagcttcagcgtgctcctcgacgacgccaaggtcgacaagaccgacacgctcgacgggaccttcatgccctccctcgcgctcttcggcggctaccgcccgctcgccttcctcgacgctgccgacccccaccacgccgcgctcaagcgcgtcatgatcagcctcgccgccgcgcggatgcaccacgtcgcgccggccttccgcaccgctttcggcgccgtgttcgacgccgccgacgccggcctcggcgacggccccgtccagttcaacaagctcaacgagcaccacatgttcgacttcacctgctccgcgctgttcggcggcacgccgccgagcaaggccatgggcgacggcgccgtgaccaaggccatcaagtggctcggcgtgcagctgcacccgctcgccagtaagatcatcaagccgtggctgctcgaggatctccttctccacaccttccgcctgccgccgttgctggttcgccgggactacgccgacctgacagcctacttcgccgaagccaccatcgacaccgaggtcgacgtcttcgcctccaagatgatcaccgttgacagaaagcccatcaagctccagatctgggacacgccaggcgaagacagattcagatcgatcactagatcatactacgatgaagttgatggagctcttctagtttatgacatcaccaggagggaaacatttaatcatctcgcgaactggttaagggacgtgaggcaatttgcaaaggacaacatgacaataatgctagttggaaacaaatgtgatctatctcagaggcgtaccgtgagctatgaggaaggtaggaagtttgcaaatgagcatggtctgatctttgtggaggcatctgccaaaactgcacaaaatgttgaggagggtttcgttcagactgctggagtcatatacaagaaaatccaggatggcgccttctaataataagctgaaattgcaaaagtctatcatcaatttggtctgcttagtgaataatgagcacctggtgaacaagtgctggtaggcctggcctacttcctgcgtggatatttatgtagctgtgtgtttactacaaatcaagcagggacacctttaggctgattcaagagtgctatctgctatgttttttttttttgagggtgtgctatctgctatgtgatcactatgttgcgctgttcaataatcaacaatttcagtccagttct

SEQ ID NO: 31144 - protein, 431 aa, Triticum aestivum
DQLQTSYSLELSIAFGVRLALAHPAMTSKVANSSGSNNADAKLSPSGLPVREVPGGYGVPFLSPLRDRLDYYYFQGAEEYFRSRIARNGGATVLRVNMPPGPFITTDFRVVAFLDARSFSVLLDDAKVDKTDTLDGTFMPSLALFGGYRPLAFLDAADPHHAALKRVMISLAAARMHHVAPAFRTAFGAVFDAADAGLGDGPVQFNKLNEHHMFDFTCSALFGGTPPSKAMGDGAVTKAIKWLGVQLHPLASKIIKPWLLEDLLLHTFRLPPLLVRRDYADLTAYFAEATIDTEVDVFASKMITVDRKPIKLQIWDTPGEDRFRSITRSYYDEVDGALLVYDITRRETFNHLANWLRDVRQFAKDNMTIMLVGNKCDLSQRRTVSYEEGRKFANEHGLIFVEASAKTAQNVEEGFVQTAGVIYKKIQDGAF

SEQ ID NO: 31145 - protein, 406 aa, Triticum aestivum
MTSKVANSSGSNNADAKLSPSGLPVREVPGGYGVPFLSPLRDRLDYYYFQGAEEYFRSRIARNGGATVLRVNMPPGPFITTDFRVVAFLDARSFSVLLDDAKVDKTDTLDGTFMPSLALFGGYRPLAFLDAADPHHAALKRVMISLAAARMHHVAPAFRTAFGAVFDAADAGLGDGPVQFNKLNEHHMFDFTCSALFGGTPPSKAMGDGAVTKAIKWLGVQLHPLASKIIKPWLLEDLLLHTFRLPPLLVRRDYADLTAYFAEATIDTEVDVFASKMITVDRKPIKLQIWDTPGEDRFRSITRSYYDEVDGALLVYDITRRETFNHLANWLRDVRQFAKDNMTIMLVGNKCDLSQRRTVSYEEGRKFANEHGLIFVEASAKTAQNVEEGFVQTAGVIYKKIQDGAF

SEQ ID NO: 31146 - protein, 334 aa, Triticum aestivum
MPPGPFITTDFRVVAFLDARSFSVLLDDAKVDKTDTLDGTFMPSLALFGGYRPLAFLDAADPHHAALKRVMISLAAARMHHVAPAFRTAFGAVFDAADAGLGDGPVQFNKLNEHHMFDFTCSALFGGTPPSKAMGDGAVTKAIKWLGVQLHPLASKIIKPWLLEDLLLHTFRLPPLLVRRDYADLTAYFAEATIDTEVDVFASKMITVDRKPIKLQIWDTPGEDRFRSITRSYYDEVDGALLVYDITRRETFNHLANWLRDVRQFAKDNMTIMLVGNKCDLSQRRTVSYEEGRKFANEHGLIFVEASAKTAQNVEEGFVQTAGVIYKKIQDGAF

SEQ ID NO: 31147 - DNA, 2099 bp, Triticum aestivum
tcgatccccacgcacgcactctcgcggaggatagctccccccaccgccacagccgaggaagagaacccaacacgagaatcccaagaggagagctcctatccccgaccaggagcgggcaatgtcagttcaggacccaacccccccgcccctccccgccgcggcgcgacccaagcgcacgtcctccgcgccgatccgcccctccgactacgcgcacagcccggcgcaccactgcatcgcgctgcgggacgccgccggcctctccgccatcctcgccggcctcccgcccctcgcccacccctcgcgcatcctctccgccgccgacgccgcgcgcgaggcccgcctctcggcctccgtctccgccgcgctcgaccgccgcgacgtgccaggcggggacaccgcgctccacctcaccgtgcgcctcaggctcccctccctcgcctccgcgctcgccgccgccggcgccgaccccacgctccagaaccacgccgggtggacgccgctccaggaggcgctctgcctggggtgcaaggacatcgcggccttcctcctccgcgcccaccggctggcggcctgggccaagctccgccgccgggcgcccgcgctctccgccgcgctgcgccgggtccaggacttctacctcgaggtggatttccacttcgagagctccgtcgtgccgctcctctcgcgcgccgcgccgtcggacacctaccggatatggaagcgcggcgccaacctgcgtgcggacaccaccctcgccggcttcgacggtctccgcattcggcgggctgaccactctttcctctttttcggcgaggagactgaggccggcggccgccgcctccccccgggatcgctccttgtactccaccgcggcaagcgcgaggtgcatgacgcgttcgcggccgccgccgccgccggggacgaggatgcggccatctccgacgcggccgcctaccggccggggctcaacatcacctccgcgaggctcgtcccgaggaccacgtggctgcgcaaggagaagacggagagcgttggggagtggaaggcgcgggtgttcgacgtccacaacatcgtcttctccttccgcacgctcaaggcagccagtaccggtcgcaaggatttgaccttcgagcttgccggagaagacgacgaggagttcttgccgctggagatccgggatgacgacgaggacggcgatttcttagtcgccgacatccccccgcccccgccacggcgcagctgctacgtacctggccggcgcagcgtggcaggaccaccctcgcatatggggacgccgcagaggaggaggaacagcgtggacgtgccgcgacggctgccaacctgtgcatcggtgggccgcggcgaggatggcgtgttcagccggaacgcgacgaccgggggagcgaagtggaaggaggaggagaccgtgaagacactgcggcccaccgtgtggctcacagaggacttcccgctgagcgtcgacgagttcttgcccctgcttgacatcttggctacccgtgtgcgcgccgtccaccgcctccgcgagctgctcaccaccaagttcccgactgggacatttcctgtgaaggttgcgatccctgttgttccgactgtgagggtagtcatcaccttcaacaagtttgttcccctggtagagccagaggagttcttcacgccgatgtcgagccccagcctgctggcgagcccaggtccggggtccatcatgcctaagccagacacccacaagagctcgtatctcaggtggacatccaagaactcgagagcaaagccagtgaacctgtcgcaggtcgcggacaacaccgaccccttcaccatccccagcgactacacctgggtaaacctaggttccaccaagacccaggacaagaagtcatccaagaccagtaaaaagggcaagagcaaagagacctaactaactaactagaggtttcatcctgtggtctcgatttagtggggagctaatacaccatgacccagaacctgtaattaccgagcatctgggacgagccctgggttagggtttaggatttagggtcgtgacaaagaactgcggcgattggtaacagctagtgtggaac

SEQ ID NO: 31148 - protein, 604 aa, Triticum aestivum
MSVQDPTPPPLPAAARPKRTSSAPIRPSDYAHSPAHHCIALRDAAGLSAILAGLPPLAHPSRILSAADAAREARLSASVSAALDRRDVPGGDTALHLTVRLRLPSLASALAAAGADPTLQNHAGWTPLQEALCLGCKDIAAFLLRAHRLAAWAKLRRRAPALSAALRRVQDFYLEVDFHFESSVVPLLSRAAPSDTYRIWKRGANLRADTTLAGFDGLRIRRADHSFLFFGEETEAGGRRLPPGSLLVLHRGKREVHDAFAAAAAAGDEDAAISDAAAYRPGLNITSARLVPRTTWLRKEKTESVGEWKARVFDVHNIVFSFRTLKAASTGRKDLTFELAGEDDEEFLPLEIRDDDEDGDFLVADIPPPPPRRSCYVPGRRSVAGPPSHMGTPQRRRNSVDVPRRLPTCASVGRGEDGVFSRNATTGGAKWKEEETVKTLRPTVWLTEDFPLSVDEFLPLLDILATRVRAVHRLRELLTTKFPTGTFPVKVAIPVVPTVRVVITFNKFVPLVEPEEFFTPMSSPSLLASPGPGSIMPKPDTHKSSYLRWTSKNSRAKPVNLSQVADNTDPFTIPSDYTWVNLGSTKTQDKKSSKTSKKGKSKET

SEQ ID NO: 31149 - protein, 373 aa, Triticum aestivum
DPHARTLAEDSSPHRHSRGREPNTRIPRGELLSPTRSGQCQFRTQPPRPSPPRRDPSARPPRRSAPPTTRTARRTTASRCGTPPASPPSSPASRPSPTPRASSPPPTPRARPASRPPSPPRSTAATCQAGTPRSTSPCASGSPPSPPRSPPPAPTPRSRTTPGGRRSRRRSAWGARTSRPSSSAPTGWRPGPSSAAGRPRSPPRCAGSRTSTSRWISTSRAPSCRSSRAPRRRTPTGYGSAAPTCVRTPPSPASTVSAFGGLTTLSSFSARRLRPAAAASPRDRSLYSTAASARCMTRSRPPPPPGTRMRPSPTRPPTGRGSTSPPRGSSRGPRGCARRRRRALGSGRRGCSTSTTSSSPSARSRQPVPVARI

SEQ ID NO: 31150 - DNA, 1356 bp, Triticum aestivum
tttttctccccccaccttccgcgtcccccctctccacctagcaagctccggccgtccgcccgcgcccgtcccgtccgtccacgagcgagccggccgggcgccgccgccgacgccgatgaagaagccgggcaagctcgcgctgccctcccaggactccaccatcggcaagttcctgacgcagagcgggaccttcaaggacggcgacctgctcgtcaacaaggacggcctccgcatcgtcccgcagagcgaggaaggcgaggctcctcctatcaagcctttggataataatcatcagttgagcatagacgatctagattcaatcaaagtgatcgggaaaggtaatagcgggaccgtgcaattggtgcgccacaaatggactggccagttttttgctctcaaggttatacagctcaatattcaggagagcatacgcaagcagatggcccaggagttgaaaataagcttgtttacacagtgccagtatgttgtcacgtgctatcagtgtttctatgtcaatggtgttatttctattgctttggagtacatggatggtggctctctcgctgatttcctcaaggctgttagaaccgttccagaggcctacctggctgcaatttgtaagcaggtgttgaaaggactgatgtacttgcatcatgagaagcgcgttatacaccgagatctgaaaccatcgaatatattgataaatcataggggtgaagtaaagatatcagattttggtgttagtgccatcatttctagttcttctgcacagcgagatacatttactggcacatttaactacatggcgcctgaaagaatcagtgggcagaaacatggtcatctgagtgatatctggagcttgggcctagttatgctggaatgtgccactggcaatttcccatatcctcctcgtgaaagcttttatgaacttcttgaagctgttgtcgaccaaccatcaccttctgcaccatcagaccagttttcaccagagttctgttcattcatttctgcttgtatccaaaaaaatgctgcagataggtcatctgcccaaaccctatcagctcatccattcctgagcatgtacgacgacctgaatatcgatctgtctgactacttcacgactgcaggatcaccgcttgccaccttcaagcaaatcgcgttgtgagacgacaaatgctcaaccatgtgtcatgagctggagctaactgaagcaagtgaatggagttatttttcttttcctgttattcatgaactgggctttgatgatatctttgaaccaaatatgatacaattggcttcataattatacaaatacaagtctgtaaagcatcagcgagcatcgaagttttgcctgtc

SEQ ID NO: 31151 - protein, 387 aa, Triticum aestivum
FSPPTFRVPPLHLASSGRPPAPVPSVHERAGRAPPPTPMKKPGKLALPSQDSTIGKFLTQSGTFKDGDLLVNKDGLRIVPQSEEGEAPPIKPLDNNHQLSIDDLDSIKVIGKGNSGTVQLVRHKWTGQFFALKVIQLNIQESIRKQMAQELKISLFTQCQYVVTCYQCFYVNGVISIALEYMDGGSLADFLKAVRTVPEAYLAAICKQVLKGLMYLHHEKRVIHRDLKPSNILINHRGEVKISDFGVSAIISSSSAQRDTFTGTFNYMAPERISGQKHGHLSDIWSLGLVMLECATGNFPYPPRESFYELLEAVVDQPSPSAPSDQFSPEFCSFISACIQKNAADRSSAQTLSAHPFLSMYDDLNIDLSDYFTTAGSPLATFKQIAL

SEQ ID NO: 31152 - protein, 349 aa, Triticum aestivum
MKKPGKLALPSQDSTIGKFLTQSGTFKDGDLLVNKDGLRIVPQSEEGEAPPIKPLDNNHQLSIDDLDSIKVIGKGNSGTVQLVRHKWTGQFFALKVIQLNIQESIRKQMAQELKISLFTQCQYVVTCYQCFYVNGVISIALEYMDGGSLADFLKAVRTVPEAYLAAICKQVLKGLMYLHHEKRVIHRDLKPSNILINHRGEVKISDFGVSAIISSSSAQRDTFTGTFNYMAPERISGQKHGHLSDIWSLGLVMLECATGNFPYPPRESFYELLEAVVDQPSPSAPSDQFSPEFCSFISACIQKNAADRSSAQTLSAHPFLSMYDDLNIDLSDYFTTAGSPLATFKQIAL

SEQ ID NO: 31153 - protein, 241 aa, Triticum aestivum
MAQELKISLFTQCQYVVTCYQCFYVNGVISIALEYMDGGSLADFLKAVRTVPEAYLAAICKQVLKGLMYLHHEKRVIHRDLKPSNILINHRGEVKISDFGVSAIISSSSAQRDTFTGTFNYMAPERISGQKHGHLSDIWSLGLVMLECATGNFPYPPRESFYELLEAVVDQPSPSAPSDQFSPEFCSFISACIQKNAADRSSAQTLSAHPFLSMYDDLNIDLSDYFTTAGSPLATFKQIAL

SEQ ID NO: 31154 - DNA, 2050 bp, Triticum aestivum
aatttccaaggagaatgcaggagcatgttctttccttcggcgatctcagagttgcatttcccagcaggcatcctgacatagtttgaaactccatcacctctcggcaagcaacaacggatacgatccagcacgggagctggtgctgttcaccgcccccagctacctacctgctgccgacctttatctctgcagaagatcgatggaaacccaggaaggcgatgcgcataggtccgaatccgatgctcacaaagtgaaagggagaggtggattcgtagccctgccgttcatcatagcaaatgaaatgttggagaaagttgcggggttcgggctcaacaccaacatgatcatgtacctcaccaagcagtaccacctgagcaacgtcaccgccggagcgacgctcttcgtgtgggctgcggcggcaaatttcgcgcccattcccggcgcgctcatagccgacatgtacacaggccgattcatggccatctcgctaggctccatcgcgtgcctaacaggggtcgttttcctatggctgagcgccatgatacccggagcacggccaccgccgtgcggcgtcggccttgccggggagcagtgcgcgcccccggggccgaggcaccttgcgtggctgatcgccggcttcacgttcctgtccatcggcgccggcggcatccggccgtgctccatggccttcggcgcggaccagttctcccggcaccccaaggagaggaggtcgaggatcctgcaggcctacttcaacgcctactacgcgtccatcggggtggccttcacggtcgccgtcaccgtgatcgtctacgtgcaggacaacgtcgggtggaaggccgggttcgccgttccgatgggcctcatgatgctctccgcggtgagcttcctcctgggctcccgcctctacgtcaaggagaaggggtccaagcaaatgttcgccgggataggcgccgccctcgtggcggcgatcaggaactacagggtgcagctgccggcgaagacggaggacggcgtgtaccatcatctcaaggactgcaagctcactgtccccacagacaggttgaggttcctgaacaaggcctgcatcatcagcaacaacgggggcgtggacttacccggcactggcgcggcggcctcagagcgtgatggcaacgttggcggcaggaggctgtgcacggtggaccaggtggagcagctcaagtcggccgtccggatcctgccgatctggtcgtccaccgtgttcctggcgcaggccatgagccagaactacgccgtgctgcaggccaacgagatggaccggcgcatcggcgtgggccagttccgcgtgccgggctgctccctcaccatgttcaacatggtgaccatgtcgctgtggtcgggcagctacgacaggtggatcgcgccggcgctgcgacgggtgacgggcgacccgcgggggctcaccatgaagcagcgcgtcggcgtgggcctgctgctggccaccgcggcgatggccgtgtccggcgcggtggagggcgcgcggcgcaggctggagctggccggcggcggcggcgccggcatgtcggcgttctggctggtgccgcagttcgcgctcatggggctggcggaggcgttcggcgtgatcggggagctcgagttcttctacacggagctgcccaagagcatggccagcttcagcatggcgctgctctacatggccatgggggtgggcaacctggtcaacagcctgatcgtcaaggtggtggacgacgcgagcaggcgcggggggaggacgagctggctctccagcgatctcaacgcgggccactacgactactactactggctgctcgccggtttgggcgccgtcaacttcgtgtacttcctctggtgcgcctggaagtacggcgaggaggggaagaacgtggagtgggaggagggtgaaggtgagagggaacggccgatggcctagttttgtaatgctgagctcgggtgtcacaatgaggccatttttaacgtgagtctgaactcagagggcaaaaaccgcaggttgcggggttggttctcc

SEQ ID NO: 31155 - protein, 584 aa, Triticum aestivum
METQEGDAHRSESDAHKVKGRGGFVALPFIIANEMLEKVAGFGLNTNMIMYLTKQYHLSNVTAGATLFVWAAAANFAPIPGALIADMYTGRFMAISLGSIACLTGVVFLWLSAMIPGARPPPCGVGLAGEQCAPPGPRHLAWLIAGFTFLSIGAGGIRPCSMAFGADQFSRHPKERRSRILQAYFNAYYASIGVAFTVAVTVIVYVQDNVGWKAGFAVPMGLMMLSAVSFLLGSRLYVKEKGSKQMFAGIGAALVAAIRNYRVQLPAKTEDGVYHHLKDCKLTVPTDRLRFLNKACIISNNGGVDLPGTGAAASERDGNVGGRRLCTVDQVEQLKSAVRILPIWSSTVFLAQAMSQNYAVLQANEMDRRIGVGQFRVPGCSLTMFNMVTMSLWSGSYDRWIAPALRRVTGDPRGLTMKQRVGVGLLLATAAMAVSGAVEGARRRLELAGGGGAGMSAFWLVPQFALMGLAEAFGVIGELEFFYTELPKSMASFSMALLYMAMGVGNLVNSLIVKVVDDASRRGGRTSWLSSDLNAGHYDYYYWLLAGLGAVNFVYFLWCAWKYGEEGKNVEWEEGEGERERPMA

SEQ ID NO: 31156 - protein, 550 aa, Triticum aestivum
MLEKVAGFGLNTNMIMYLTKQYHLSNVTAGATLFVWAAAANFAPIPGALIADMYTGRFMAISLGSIACLTGVVFLWLSAMIPGARPPPCGVGLAGEQCAPPGPRHLAWLIAGFTFLSIGAGGIRPCSMAFGADQFSRHPKERRSRILQAYFNAYYASIGVAFTVAVTVIVYVQDNVGWKAGFAVPMGLMMLSAVSFLLGSRLYVKEKGSKQMFAGIGAALVAAIRNYRVQLPAKTEDGVYHHLKDCKLTVPTDRLRFLNKACIISNNGGVDLPGTGAAASERDGNVGGRRLCTVDQVEQLKSAVRILPIWSSTVFLAQAMSQNYAVLQANEMDRRIGVGQFRVPGCSLTMFNMVTMSLWSGSYDRWIAPALRRVTGDPRGLTMKQRVGVGLLLATAAMAVSGAVEGARRRLELAGGGGAGMSAFWLVPQFALMGLAEAFGVIGELEFFYTELPKSMASFSMALLYMAMGVGNLVNSLIVKVVDDASRRGGRTSWLSSDLNAGHYDYYYWLLAGLGAVNFVYFLWCAWKYGEEGKNVEWEEGEGERERPMA

SEQ ID NO: 31157 - protein, 537 aa, Triticum aestivum
MIMYLTKQYHLSNVTAGATLFVWAAAANFAPIPGALIADMYTGRFMAISLGSIACLTGVVFLWLSAMIPGARPPPCGVGLAGEQCAPPGPRHLAWLIAGFTFLSIGAGGIRPCSMAFGADQFSRHPKERRSRILQAYFNAYYASIGVAFTVAVTVIVYVQDNVGWKAGFAVPMGLMMLSAVSFLLGSRLYVKEKGSKQMFAGIGAALVAAIRNYRVQLPAKTEDGVYHHLKDCKLTVPTDRLRFLNKACIISNNGGVDLPGTGAAASERDGNVGGRRLCTVDQVEQLKSAVRILPIWSSTVFLAQAMSQNYAVLQANEMDRRIGVGQFRVPGCSLTMFNMVTMSLWSGSYDRWIAPALRRVTGDPRGLTMKQRVGVGLLLATAAMAVSGAVEGARRRLELAGGGGAGMSAFWLVPQFALMGLAEAFGVIGELEFFYTELPKSMASFSMALLYMAMGVGNLVNSLIVKVVDDASRRGGRTSWLSSDLNAGHYDYYYWLLAGLGAVNFVYFLWCAWKYGEEGKNVEWEEGEGERERPMA

SEQ ID NO: 31158 - DNA, 1948 bp, Triticum aestivum
atctctccctccttccccctctctctctctctctctctctgacgactctgacgacttgctagctagctcctccggctcaacggaagctagcgatcgccatagcctctgcgactgctgcacccgcacttgaacaagaagaagcagcagcagaagcagaattattagaggcgcaaaggcttgcgtgcggtctcaaggaaccccgaaaaaggccgagaagaaaagaagataaaaggtagttgagtagtcttgcacgcgtccatgggttgcggcttatcgacgccggacaacgacggcgggggcggcgcgcggaggaagcaggggagcgtgggggacgtcgtcgtcttcctcccggggctccgggcgcccatgggcgtggacttgtcccaggcgctcgcggggcgcctggacaagggcgccgtggagaggctgtcggccctgagagcgcgcgtcgtcgacatggcaatgcaagaatcggcggtggccctgaagcccaggcggaaggccgccgcacggcaaggatctagcactgccaatctcttgcaggcgctggaagactacttgccacttctgctaggattggtgaaagaaggtggtgagttgaggcacagcgtgcagtttgtgtggactaaccaagaggacaaggccgaggagacggccatggcggatgcatggtacgaggtgctgtccgtgctgcatttgatggccatggtctgcttgctgcaggccaactccctgctccttccaagggcttacggcgatggttacgggccacaggtctctgaagagagcagacgtgccactgtcgacgttttcttgaaagcatctggctacttggactgcgcaattcgacaagtgctcccacagataccatcagaactaaggagacaacttccagtagacctggctgaaggcaacctcaaagctcttagcctgcaagctctcggtcagggtgttgacatgcagcttgggctggcaatcgatagcccaaaggccacactagctgtaaaaaggcgcttagcttgtgagatggtcaaatattggcaccaggttcaggagagcattccagatcttcctgtgtccgacggatgggggaaaaaacatctactatttgtcaaatggaagtacgtcgaagcgaagtctgcagcatactacttccatggtttgattcttgacgaaggaaacagtgagaaatctcacggaatggcaatagcagcattggaagcttcggaggaatttctgaaagaaagcaaaagggcctctgaagttttccatgcaactcctccaacatctaggagccccactccatttggaacagctaagtatctgtttgacaagatcccgaaagaggcttcaagcaaggtccggatcaaccaggacctatataccccagaaagggtcattggagcaccacccccgttgccggatttctcgttggcactaacacctgaagactatgatcttcctccattagacccactttggaacaaagaagacggccaccagtaagtgtacattcagcattcagcaagagtgtcttctgatgggaaggctctggcgctactgagaaagcaacgaccaggattctgccatgcggaggccggacacgacgcaaaggaagtgtacaaagatatgttccgacaaaaaaaatttgatgtcggcaaactggaagcaaattttagaaaggcctgaagatatctgaagagcatttttacagttaaatcttctctgacaatggaaacacattgtcaaaagcttgctttccaacaattcctgtaaaaattatatttccaatgagcgccatggttcctttttcttaggattttctgaacatggcttagttttggggccattctgagcctattaatgtggtaaatttgccaaacatgatcctgatcttcattcaatgcttgagacagaagcagcaacgatgaaatttaaactactcaac

SEQ ID NO: 31159 - protein, 415 aa, Triticum aestivum
MGCGLSTPDNDGGGGARRKQGSVGDVVVFLPGLRAPMGVDLSQALAGRLDKGAVERLSALRARVVDMAMQESAVALKPRRKAAARQGSSTANLLQALEDYLPLLLGLVKEGGELRHSVQFVWTNQEDKAEETAMADAWYEVLSVLHLMAMVCLLQANSLLLPRAYGDGYGPQVSEESRRATVDVFLKASGYLDCAIRQVLPQIPSELRRQLPVDLAEGNLKALSLQALGQGVDMQLGLAIDSPKATLAVKRRLACEMVKYWHQVQESIPDLPVSDGWGKKHLLFVKWKYVEAKSAAYYFHGLILDEGNSEKSHGMAIAALEASEEFLKESKRASEVFHATPPTSRSPTPFGTAKYLFDKIPKEASSKVRINQDLYTPERVIGAPPPLPDFSLALTPEDYDLPPLDPLWNKEDGHQ

SEQ ID NO: 31160 - protein, 379 aa, Triticum aestivum
MGVDLSQALAGRLDKGAVERLSALRARVVDMAMQESAVALKPRRKAAARQGSSTANLLQALEDYLPLLLGLVKEGGELRHSVQFVWTNQEDKAEETAMADAWYEVLSVLHLMAMVCLLQANSLLLPRAYGDGYGPQVSEESRRATVDVFLKASGYLDCAIRQVLPQIPSELRRQLPVDLAEGNLKALSLQALGQGVDMQLGLAIDSPKATLAVKRRLACEMVKYWHQVQESIPDLPVSDGWGKKHLLFVKWKYVEAKSAAYYFHGLILDEGNSEKSHGMAIAALEASEEFLKESKRASEVFHATPPTSRSPTPFGTAKYLFDKIPKEASSKVRINQDLYTPERVIGAPPPLPDFSLALTPEDYDLPPLDPLWNKEDGHQ

SEQ ID NO: 31161 - protein, 349 aa, Triticum aestivum
MAMQESAVALKPRRKAAARQGSSTANLLQALEDYLPLLLGLVKEGGELRHSVQFVWTNQEDKAEETAMADAWYEVLSVLHLMAMVCLLQANSLLLPRAYGDGYGPQVSEESRRATVDVFLKASGYLDCAIRQVLPQIPSELRRQLPVDLAEGNLKALSLQALGQGVDMQLGLAIDSPKATLAVKRRLACEMVKYWHQVQESIPDLPVSDGWGKKHLLFVKWKYVEAKSAAYYFHGLILDEGNSEKSHGMAIAALEASEEFLKESKRASEVFHATPPTSRSPTPFGTAKYLFDKIPKEASSKVRINQDLYTPERVIGAPPPLPDFSLALTPEDYDLPPLDPLWNKEDGHQ

SEQ ID NO: 31162 - DNA, 1127 bp, Triticum aestivum
aagaaaaaacgaatcgttcctctccacctccctgacgcgagcgaccaaagtccggcggccgacgcggcaacggcggcggagaaggtgcctgttagatcgactttctacattgccttttgagaaaacatagagggatctttctgccctctgctcttacctgaagctagaatcacggagggggtgctctgataggtctatgcaccctgtgtcgatctcctttcaacccttcactgcaacttcagcgggcaatttttcctcaaggaccactaatgtgaggtctcgctgtgattttatcaagttgctgacagttggaagaagtagtggataccgtgccatgaattccggaccaacttctgcttccaggtctgaaacgaccggggaacaggattatgctgtgggagagaatgatggtgtgatcatagtcgaccacgggtcacggcgacaggaatctaatctcatgctaaacgattttgttgcaatgttcagggcaaggactggctacaggattgttgagcctgctcacatggagctcgctgagcctactattaaagaagcatttggaaaatgtgtccagcaaggagcatcccgcattattgtcagcccatatttcctttcacctggacggcactggaaacaagatattccttctttagcagcagaagcctctaaagagcactctaacgtggcctacattgtcactgctcctcttggattgcatgagcttatggtggatattatgaacgaccgcatcaagtactgcctgaggcacgttgcaggcgatgctgatgagtgtgcagtatgtgctgggactggaaagtgccacctctactcctgacggtgatgacatgtgagttgctcgaaagtctaatcaggtcatcctgtttttggctcattggcagcacagattgatggctgaggccaataattccatcttgttaacccatgctccttgttatctgccatgtaatcagaaaacattgtaacaatgatctcggcggttttattcagcttgtagatttagagtgttttcagtagtctgaacaagatatcatgacaagagagtgtaaatttgtcatgcaaatcaaacactgcttgctatgcactaccgcaagaaaaaaactgttacc

SEQ ID NO: 31163 - protein, 212 aa, Triticum aestivum
MHPVSISFQPFTATSAGNFSSRTTNVRSRCDFIKLLTVGRSSGYRAMNSGPTSASRSETTGEQDYAVGENDGVIIVDHGSRRQESNLMLNDFVAMFRARTGYRIVEPAHMELAEPTIKEAFGKCVQQGASRIIVSPYFLSPGRHWKQDIPSLAAEASKEHSNVAYIVTAPLGLHELMVDIMNDRIKYCLRHVAGDADECAVCAGTGKCHLYS

SEQ ID NO: 31164 - protein, 166 aa, Triticum aestivum
MNSGPTSASRSETTGEQDYAVGENDGVIIVDHGSRRQESNLMLNDFVAMFRARTGYRIVEPAHMELAEPTIKEAFGKCVQQGASRIIVSPYFLSPGRHWKQDIPSLAAEASKEHSNVAYIVTAPLGLHELMVDIMNDRIKYCLRHVAGDADECAVCAGTGKCHLYS

SEQ ID NO: 31165 - protein, 125 aa, Triticum aestivum
MLNDFVAMFRARTGYRIVEPAHMELAEPTIKEAFGKCVQQGASRIIVSPYFLSPGRHWKQDIPSLAAEASKEHSNVAYIVTAPLGLHELMVDIMNDRIKYCLRHVAGDADECAVCAGTGKCHLYS

SEQ ID NO: 31166 - DNA, 1155 bp, Triticum aestivum
gtcactctcctctcctctgactcgtactctgcacagcttccccccacagaaaacaatcatggttaaaggtccaggactctacaccgaaatcggcaaaaaggccagagatcttctctacaaggactaccaaggagaccagaagctcagcgtcaccacttactcttccaccggcgttgcaatcaccaccactggaacaaacaagggagacttgtttgttggtgatgtaactacccaagtcaagaacaagaacttcactgccgatatcaaagtcgccactgattcttctctgctgaccacctttacctatgatgaggctacccctggattgaaggcaatcgtcagcgccaaggtgcctgatcagaaatctggcaaggttgagctccagtatctgcacgactatgctggtatctgcaccagtgttggtttgacagctagccccattgtcaatttctccggcgtggttggaaacaacgtcttggctcttggtaccgatgtgtccttcaacacccagtctggtgatttcaagcatttcaacgctggtttcagcttcaccaaggacgatctgattgctgcccttactctgaatgacaaaggtgacaaactgaatgcatcgtactaccacattgtgaacccgttgagcaacacagtggttggagctgaggttacccacagcttcacgactcaaaagaacgccattaccgttggtgctcagcatgctcttgacccattgacgacattgaaggcacgcgtgaacaatgatggtgtagctaacgcgctgatccagcaccagtggcgtccaaagtcgttcatcaccgtttctggagaggttaactccagggcgattgagaagggtgccaaggttgggtttgctcttgctctcaagccttgagaaagaatcaagaatccaaatgtgcccttgaggaggggtagcttagtttttttttcatcttctcggtcttctaatcttttggactaatctctctgcctggttttgctttaaaaatctttcatttgttgttttgttttaatcggtgttgggatttgtagaaaataagaaaaaaaaactattaaaaggatcgtcttgaagatgaaccgtacgaatctctttcctaattatttgtctcaatgctctgctaaaacactctgttcaattcg

SEQ ID NO: 31167 - protein, 295 aa, Triticum aestivum
SLSSPLTRTLHSFPPQKTIMVKGPGLYTEIGKKARDLLYKDYQGDQKLSVTTYSSTGVAITTTGTNKGDLFVGDVTTQVKNKNFTADIKVATDSSLLTTFTYDEATPGLKAIVSAKVPDQKSGKVELQYLHDYAGICTSVGLTASPIVNFSGVVGNNVLALGTDVSFNTQSGDFKHFNAGFSFTKDDLIAALTLNDKGDKLNASYYHIVNPLSNTVVGAEVTHSFTTQKNAITVGAQHALDPLTTLKARVNNDGVANALIQHQWRPKSFITVSGEVNSRAIEKGAKVGFALALKP

SEQ ID NO: 31168 - protein, 276 aa, Triticum aestivum
MVKGPGLYTEIGKKARDLLYKDYQGDQKLSVTTYSSTGVAITTTGTNKGDLFVGDVTTQVKNKNFTADIKVATDSSLLTTFTYDEATPGLKAIVSAKVPDQKSGKVELQYLHDYAGICTSVGLTASPIVNFSGVVGNNVLALGTDVSFNTQSGDFKHFNAGFSFTKDDLIAALTLNDKGDKLNASYYHIVNPLSNTVVGAEVTHSFTTQKNAITVGAQHALDPLTTLKARVNNDGVANALIQHQWRPKSFITVSGEVNSRAIEKGAKVGFALALKP

SEQ ID NO: 31169 - DNA, 1396 bp, Triticum aestivum
gttgattaccaaagactagtcctggtgttgccgcttttcactttccccctcccccctctcatcggatctggactctggagaggagacgagattcgccggcgatggcagaggagtcgtgggaggagggtcgggggttggacttcctcgagagcctgggcccggacatctccgccaccgtcttcagcctgctcgacgaccccgccgacctcgcgcgcgccaccaccgtctcccgctcctggcgccgattcgttattgcaaaccagttcagcaagatcctgtgcctgcgggtttatccggaggtgtccaacttcacacgtgttgagttgagcagcatcagcagtgcacaccgaaatgctggatcaagtgcttgtgctgggctggagaagctcgggagggatcatagggtgtatatgcatcttagccatggccttctctcgccgtacgaccccaaggattgcatcagtcactgcatgggcgcatccagcactgatcgtttccctgaggaggccatagaaaataccattgaaccggttgatcgtcaggagagtaaactgtcttattggtcgagtggtggccagaaagatcctgctgtgccagaatgcctgatatatagccttcagtcagagctgtgtcttgttgatgaaatcaggatacggccattaaaagcattttttcgatatggtcatccgatatattcagcaaaacacgtccggttccgcttgggctatctaaaaccaccccactggtctgaaacacatgtatatgttgaaagtgatgcggagctgattgatgatagcaactatatctggacgtacacatctccagaatttccaatgctacaggaaaatgtgatgcagtcttttaagctaccacactcagttctatgtattggtggagtggtgaagattgagcttcttggcagggtccacaaggacacgtttgatggtcggtactacatatgtgtgtctcatgtccaactagtcgggaagccactgtcagaagattttggggtcgccccgagcaaaaatgatgtagttctcagttactatctggattatcgtagattcgggggacgatcacagcaaagtacatgactttgcgatgaggatctggcacttcggtatgtcttgagggataggagaactgaaccatgagtgttagcacgctgtcctgtgggtacataaaagagatgcaacagaggagaagcttccatacaagtgaagcatatctcgtcgagctcgtgtctatcggtttcgaataaaagaagtcctttgtgatcccgtgggaaactgaaaatgtatttgtttgtgtaactgacaaggacgaaagagacgcatgattgactcgcttgttataaaatcactgctaatattattaagatcgagtgagtccatct

SEQ ID NO: 31170 - protein, 330 aa, Triticum aestivum
MAEESWEEGRGLDFLESLGPDISATVFSLLDDPADLARATTVSRSWRRFVIANQFSKILCLRVYPEVSNFTRVELSSISSAHRNAGSSACAGLEKLGRDHRVYMHLSHGLLSPYDPKDCISHCMGASSTDRFPEEAIENTIEPVDRQESKLSYWSSGGQKDPAVPECLIYSLQSELCLVDEIRIRPLKAFFRYGHPIYSAKHVRFRLGYLKPPHWSETHVYVESDAELIDDSNYIWTYTSPEFPMLQENVMQSFKLPHSVLCIGGVVKIELLGRVHKDTFDGRYYICVSHVQLVGKPLSEDFGVAPSKNDVVLSYYLDYRRFGGRSQQST

SEQ ID NO: 31171 - protein, 227 aa, Triticum aestivum
MHLSHGLLSPYDPKDCISHCMGASSTDRFPEEAIENTIEPVDRQESKLSYWSSGGQKDPAVPECLIYSLQSELCLVDEIRIRPLKAFFRYGHPIYSAKHVRFRLGYLKPPHWSETHVYVESDAELIDDSNYIWTYTSPEFPMLQENVMQSFKLPHSVLCIGGVVKIELLGRVHKDTFDGRYYICVSHVQLVGKPLSEDFGVAPSKNDVVLSYYLDYRRFGGRSQQST

SEQ ID NO: 31172 - protein, 207 aa, Triticum aestivum
MGASSTDRFPEEAIENTIEPVDRQESKLSYWSSGGQKDPAVPECLIYSLQSELCLVDEIRIRPLKAFFRYGHPIYSAKHVRFRLGYLKPPHWSETHVYVESDAELIDDSNYIWTYTSPEFPMLQENVMQSFKLPHSVLCIGGVVKIELLGRVHKDTFDGRYYICVSHVQLVGKPLSEDFGVAPSKNDVVLSYYLDYRRFGGRSQQST

SEQ ID NO: 31173 - DNA, 1948 bp, Triticum aestivum
gatctcccatccccccaccctatcgaaaccattcccaagcaaaacaccctgcgcgatcccaaaccctagccatggcgaccggggcggcggcgaagactccgaccaagccatcggcccccgcggcgcccaagaccccggccaagcccgcgccctcggccgcggcgacggcggcgaagactcccgcaaggcccccgtcctcggcggcggcgacggcgaagaccccggccaggtccgtctcccgcgcgcggttcgcgcacgcctccgagaactccgaccccaacatcctcgcctcccctccccggaccacgtccaagacccccgccaagcccgccgccgccgccaccttctccgcctccgtcaggaagaagcgtgccacgcccgccccgccgccgccggtcccgcagcgccgcttcctcgtggcgaagaagggagcgcatcggcggaggcaagccggcgcgagcggaggaggcggccagttcgacttcgacaagtgccgcgaggccgcccgcgaggcgctgcgcgcgtcgcacgaggagttcttcctcaaggagcgcgcggtgtccgcggccagcgaggagcaggagtcgcagaaggaggaggaagcggccgaagatgacgcaaacagtgccgctgttgtcgaggagggggagggagcggaggtggcggatttggaggggagcggcaaagttagagcgattcggagcagagtcatggccaaggcgatgaacagcgtgccagatgctggggcgggccgtgtcaagcacctggtgcatgccttcgagagcctgctctccatctccggggccactgctgactccgaacgggcaggcgaggaggcctgggcgctgcctggattgcagccatggaacgaggggagtgggctcgccggtggcagtgttctcctcgtccgatttcatgagcatgggaccaaccagactttgcagttcactcgatggcaagagcaacagatctagctgggacagccagaccggaggacgcaggagccggcggaactcatccgaatcactaaggagcagctggaataaaaagctcaaggtcactagccagcatcccttcaagctgagaacagagcaaaggggaagagctaaagaacaacagtttattcagaaagtccaggaaatgctaattgaggatgagaagaagcgcatacatattgctcaaggacttccgtggacaacagatgagcctgagtgcttgattaagccaccagtcaaggaaagaacagagccagtcgaccttgttctacatagtgatgtgcgcgcagttgaacgtgctgaatttgatcaatatgtgtcagagaagaccaagttcggtgaggaattaagattggagcgggaacgtcaacaaaagttagaggaggaagaaatgataagacagctgaggaaagagcttgttcctaaagcacagccaatgccgtattttgatcggccattcatccccaaaaagtcatcaaagacaataacaattccgaaggagccaaactttcatctccggcctgaaaggttatcatgcgatgcatggtcactggaaagctgaagacatggccccgcaagcaacatgaatgtcagctgcatctagcaagagccgcagagcagcatcatcaacacgcatgatttagatgctcctcattctttcaagtgcctagcttcttcttaacgtctccatgcgcaacgagactcggtctttgtggcttgggtgatctccaacttctgttctgtgtacatgcgtttatgcatatcgatagctctgtgcttcagatgcatcctccacctccagggttaaaacagcttgttgtacaagagaccgcagatgggaaattcaaggatgaatttctgtggtcttgtattcctaagttgattgccaaaaaccccgaaataccaatgtgttgatatatatgtggattttgaaaaaaaatctctattttctg

SEQ ID NO: 31174 - protein, 323 aa, Triticum aestivum
SPIPPPYRNHSQAKHPARSQTLAMATGAAAKTPTKPSAPAAPKTPAKPAPSAAATAAKTPARPPSSAAATAKTPARSVSRARFAHASENSDPNILASPPRTTSKTPAKPAAAATFSASVRKKRATPAPPPPVPQRRFLVAKKGAHRRRQAGASGGGGQFDFDKCREAAREALRASHEEFFLKERAVSAASEEQESQKEEEAAEDDANSAAVVEEGEGAEVADLEGSGKVRAIRSRVMAKAMNSVPDAGAGRVKHLVHAFESLLSISGATADSERAGEEAWALPGLQPWNEGSGLAGGSVLLVRFHEHGTNQTLQFTRWQEQQI

SEQ ID NO: 31175 - protein, 300 aa, Triticum aestivum
MATGAAAKTPTKPSAPAAPKTPAKPAPSAAATAAKTPARPPSSAAATAKTPARSVSRARFAHASENSDPNILASPPRTTSKTPAKPAAAATFSASVRKKRATPAPPPPVPQRRFLVAKKGAHRRRQAGASGGGGQFDFDKCREAAREALRASHEEFFLKERAVSAASEEQESQKEEEAAEDDANSAAVVEEGEGAEVADLEGSGKVRAIRSRVMAKAMNSVPDAGAGRVKHLVHAFESLLSISGATADSERAGEEAWALPGLQPWNEGSGLAGGSVLLVRFHEHGTNQTLQFTRWQEQQI

SEQ ID NO: 31176 - protein, 272 aa, Triticum aestivum
MLGRAVSSTWCMPSRACSPSPGPLLTPNGQARRPGRCLDCSHGTRGVGSPVAVFSSSDFMSMGPTRLCSSLDGKSNRSSWDSQTGGRRSRRNSSESLRSSWNKKLKVTSQHPFKLRTEQRGRAKEQQFIQKVQEMLIEDEKKRIHIAQGLPWTTDEPECLIKPPVKERTEPVDLVLHSDVRAVERAEFDQYVSEKTKFGEELRLERERQQKLEEEEMIRQLRKELVPKAQPMPYFDRPFIPKKSSKTITIPKEPNFHLRPERLSCDAWSLES

SEQ ID NO: 31177 - DNA, 1107 bp, Triticum aestivum
aaccaagattcaaagaatccaatccagtccaatccatcttctctttgccactcttctccgccggagctgctgccaaagtctctgtctttctctgtgtccgtccagtagatgagcatggcggcgacggcggccacggccacgccctggccctccacctcctcctccgtcctcgcccctcgcacccgccaccacgccacccgcagcccccgcgccctccgctccggcttcctcggccgcgccctcaccctcgccgcccccacagaccgcccctcccccgtctccgtctccgtgcgcgcggcctgggacggccccctctcctcggcgcgcctcatcatgcagggccgcaacgtcaagctgacggagaagctcaaggagcacatcgaggacaaggtggggcgcgcggtgcacaaccacgcgcacctggtgcgggaggtggacgtgcgcctctccgcccgcggcggcgacctcagcaagggccccaagctctcccgctgcgaggtcacgctcttcacgcgccgccacggcgtcgtgcgcgcagaggaggaggaggagtcatcctactcctccatcgacgccgccgccgccgtcgtcaagcgcaagctgaggaagatcaaggagaaggagaccgacgtgcgccacctcaagggcaccaaggagtggcaggcctccgggctgtccgacgtggaagacgagtcggaggcagaggagctggaggatgacgacgatgacgagctcgtggaggtcatcggcgccgaggacgaggagaccgtgctcaccaaggttgtgcgcaccaaggtgttcgagatggcgccgctgacggtggatgaggcgctggagcagctggagaacgtcgaccacgacttctacgccttcaggaacgagcagacaggggaggtgaacatcctgtacaagaggaaggagggagggttcgggctcatcatccccaagcaggacggccatgtcgacaaggccaccgtcaacgccaaggagaaggagcaccccgtcgccggctgacgtctcctctccatgacaccaagtggatcactagctgtagctgcattagtcggtctgttttttccctgatgataataatggtggtgggtgtcc

SEQ ID NO: 31178 - protein, 301 aa, Triticum aestivum
MSMAATAATATPWPSTSSSVLAPRTRHHATRSPRALRSGFLGRALTLAAPTDRPSPVSVSVRAAWDGPLSSARLIMQGRNVKLTEKLKEHIEDKVGRAVHNHAHLVREVDVRLSARGGDLSKGPKLSRCEVTLFTRRHGVVRAEEEEESSYSSIDAAAAVVKRKLRKIKEKETDVRHLKGTKEWQASGLSDVEDESEAEELEDDDDDELVEVIGAEDEETVLTKVVRTKVFEMAPLTVDEALEQLENVDHDFYAFRNEQTGEVNILYKRKEGGFGLIIPKQDGHVDKATVNAKEKEHPVAG

SEQ ID NO: 31179 - protein, 299 aa, Triticum aestivum
MAATAATATPWPSTSSSVLAPRTRHHATRSPRALRSGFLGRALTLAAPTDRPSPVSVSVRAAWDGPLSSARLIMQGRNVKLTEKLKEHIEDKVGRAVHNHAHLVREVDVRLSARGGDLSKGPKLSRCEVTLFTRRHGVVRAEEEEESSYSSIDAAAAVVKRKLRKIKEKETDVRHLKGTKEWQASGLSDVEDESEAEELEDDDDDELVEVIGAEDEETVLTKVVRTKVFEMAPLTVDEALEQLENVDHDFYAFRNEQTGEVNILYKRKEGGFGLIIPKQDGHVDKATVNAKEKEHPVAG

SEQ ID NO: 31180 - protein, 238 aa, Triticum aestivum
PRFKESNPVQSIFSLPLFSAGAAAKVSVFLCVRPVDEHGGDGGHGHALALHLLLRPRPSHPPPRHPQPPRPPLRLPRPRPHPRRPHRPPLPRLRLRARGLGRPPLLGAPHHAGPQRQADGEAQGAHRGQGGARGAQPRAPGAGGGRAPLRPRRRPQQGPQALPLRGHALHAPPRRRARRGGGGVILLLHRRRRRRRQAQAEEDQGEGDRRAPPQGHQGVAGLRAVRRGRRVGGRGAGG

SEQ ID NO: 31181 - DNA, 2227 bp, Triticum aestivum
atctccccgtggggacgcgccgctccactccaagctccggcgatcgcgccgccggcgccgctgaatcatctgtgctcccagcggctgtggtccaaccagtagattgtgaattgcaattcacgagaggcgcatttgccacaatggctctaactcttctccgagggatcagaacaccaaccttacttagagcaaatttcagcctgttctgtaccactcaacgccatccactagctcacttcacaactagggtggagagtgtgcagactactgagcccaaagcagtgccaaaatcaattcaacaggctaccaaggaggcggcggagcagaagatacaaggttttgaatctgttatcggcatcgagacccatgtccagctatcgaccatcacaaaggcattttgctcctgcacaaacaactatggctcccagccgaacagcactgtttgccccacctgcatgggccacccggggacattgccggttctgaatgcaaaggttgttgaatgtgcagtgaaaatgagcctcgctctcaactgcaagatctccatgacatccaagtttgatcggaagcagtatttctacccagacctacccaagggctaccagatttcccagtttgacattccaattgccgagaagggttaccttgatgtggatattccacttgagtttggtggtggccacaggcgatttggggtcacgagggttcatatggaagaagatgctggcaagctccttcattctgaatccggaagttactctcaggttgacttaaacagagccggtgttcctttgcttgagattgtctcagagccagatatgaggacagggatagaggctgctgagtatggtgctgagatacaaaggcttgttaggtacctgggagtgggcaatggtaacatggatgaaggttcccttcgctgtgatgtgaatatatctgttcgaccaattggacaatcagaatttggtacaaaggttgaaataaagaatatgaactcattttctgcaataagtagggcgatagactatgagatctcccgggcagattcttcttcacaaaggaagccaggctgatcaaattgtacaagaaacccgtctttgggatgagtcctctcagaaaacttttacaatgagaaaaaaggagggactcgccgactatagatattttcccgagcctgatcttcctgaagttgttctcactagtgagtacattgatgaaattcgcaatttaatgcccgagcttccagaggcaaagcgtaggcgctatgagaacatgggactcagcatgcaagatgttattttccttgctaatgacgataaggttgctcatttctttgattctacacttgagcatggtgctgatgcaaagctagctgccaactggatcatgggtgatattactgcttatctgaaggatgaaaagctttctattgatgaaagtaaattaacacctctggagctttccgaaatgattgcatacataaagaatggaactatcagtgggaaaattgccaaggagattgtggttgacctcattgccaaaggcgaaactgttaagtctgtgatagaggagaaggatttagttcagatcgcagatccagcagcaattgaggctatggtagatcaagtactcgctgacaatccgaagcaacttgagcagtatcgggctgggaaaaccaagttgcagggatattttgctggccaggtgatgaaagcatcaaagggtaaagcaagccctgttttattgaacaaaatcctgggagagaagctgaagggcagctgttgagggtttttttttacgcatcaagtggtccttgatgagtggagcattgaacaaaagcaaaactctgcagcaggaactacatttttgggggcgaaaacatctccgattctggtttttgtaggcgtagtccttgctttgaatttgggatggatcttgtttcccccctcgtttagagcatggattttgtaagaaaaaacaatccagttcgcataacactgtgtttgagctgataataagaatggagttgtgtgatgtaaagatgaattatctgcgtagacttgtgttactatatgctgtttttctatttattgttttacatcctagaactttgaacgtgagcatttgcattttggttgtacgcagctgtaatcttttttttttcatttggaatttagaccactgcatcaccaatattaattcactgaaataagctgacctttgtggc

SEQ ID NO: 31182 - protein, 356 aa, Triticum aestivum
LPVGTRRSTPSSGDRAAGAAESSVLPAAVVQPVDCELQFTRGAFATMALTLLRGIRTPTLLRANFSLFCTTQRHPLAHFTTRVESVQTTEPKAVPKSIQQATKEAAEQKIQGFESVIGIETHVQLSTITKAFCSCTNNYGSQPNSTVCPTCMGHPGTLPVLNAKVVECAVKMSLALNCKISMTSKFDRKQYFYPDLPKGYQISQFDIPIAEKGYLDVDIPLEFGGGHRRFGVTRVHMEEDAGKLLHSESGSYSQVDLNRAGVPLLEIVSEPDMRTGIEAAEYGAEIQRLVRYLGVGNGNMDEGSLRCDVNISVRPIGQSEFGTKVEIKNMNSFSAISRAIDYEISRADSSSQRKPG

SEQ ID NO: 31183 - protein, 310 aa, Triticum aestivum
MALTLLRGIRTPTLLRANFSLFCTTQRHPLAHFTTRVESVQTTEPKAVPKSIQQATKEAAEQKIQGFESVIGIETHVQLSTITKAFCSCTNNYGSQPNSTVCPTCMGHPGTLPVLNAKVVECAVKMSLALNCKISMTSKFDRKQYFYPDLPKGYQISQFDIPIAEKGYLDVDIPLEFGGGHRRFGVTRVHMEEDAGKLLHSESGSYSQVDLNRAGVPLLEIVSEPDMRTGIEAAEYGAEIQRLVRYLGVGNGNMDEGSLRCDVNISVRPIGQSEFGTKVEIKNMNSFSAISRAIDYEISRADSSSQRKPG

SEQ ID NO: 31184 - protein, 252 aa, Triticum aestivum
MRSPGQILLHKGSQADQIVQETRLWDESSQKTFTMRKKEGLADYRYFPEPDLPEVVLTSEYIDEIRNLMPELPEAKRRRYENMGLSMQDVIFLANDDKVAHFFDSTLEHGADAKLAANWIMGDITAYLKDEKLSIDESKLTPLELSEMIAYIKNGTISGKIAKEIVVDLIAKGETVKSVIEEKDLVQIADPAAIEAMVDQVLADNPKQLEQYRAGKTKLQGYFAGQVMKASKGKASPVLLNKILGEKLKGSC

SEQ ID NO: 31185 - DNA, 1135 bp, Triticum aestivum
atggcagtttgatctcatctcctcctcctcctcctccaccgccgcacgccacccccatccccatccccaccggagccgactgcggcggagcggagcgcaccggagatcttccttctttccttgtcggtaaggttctgtggccatgtctgacagcgagaaagaggtgccagtggaagtggaagaaggcgccacccgcggggccgactgggaggtcgtcacgctcaccgcgtccacctacgccgccgcgcccagcgggccagaaggagcagcagagggcaagaggctcggcgacggcaacgacggccgcgcctcgtccaccacgctgctcatgtcggaccacttcgtgttcccacccagcgagcacgagaacctgcccatagagaccgccctgctcgacccgcctcaggagagcaccagcgtggacgacgccggcttcaagaacgtcggtgggggctacgatgatgggtccgagacggtcaagtactatgacgaggggaagagcctgtcggtgcatgatgccgagatgatgatgggtgacgtggctgagttccacgcccaagatgacggacgcggttacgttgtccatgatgatgatgatgactcccaggacaagtctgatgcgcctctggacagcagcagcagcaagggccgtggctctggtgccccctgccagtgctggttgaagaagcacatgtcatgcctgtatgaccaggccaaggagaccaatcatctctggggtgcggttgtcgtggctgccctggttggccttgtcatcttgtggcgcaaagacaagttgcacatgagctgccttaaatggcgctctcgctcggcagtcagttaatgatccaatccgaattcctggactggtgggtctgtttgtggtcttcttcgtcgatacaatctctgacgagtcttcgcagatcgccctggaagtcattataaccaagaagaagatggccatgccaatatgattcgtgacaatgacgaaaggggtctctagttgtaataatatcaagtttgacagggtattttcttgttgccaggcttgtgagatgccaaagtttcttattgctcttgtacccatagtcgtcgtacctttgcactgtttaatacgaacggcgcgccctttcaagct

SEQ ID NO: 31186 - protein, 232 aa, Triticum aestivum
MSDSEKEVPVEVEEGATRGADWEVVTLTASTYAAAPSGPEGAAEGKRLGDGNDGRASSTTLLMSDHFVFPPSEHENLPIETALLDPPQESTSVDDAGFKNVGGGYDDGSETVKYYDEGKSLSVHDAEMMMGDVAEFHAQDDGRGYVVHDDDDDSQDKSDAPLDSSSSKGRGSGAPCQCWLKKHMSCLYDQAKETNHLWGAVVVAALVGLVILWRKDKLHMSCLKWRSRSAVS

SEQ ID NO: 31187 - protein, 170 aa, Triticum aestivum
MSDHFVFPPSEHENLPIETALLDPPQESTSVDDAGFKNVGGGYDDGSETVKYYDEGKSLSVHDAEMMMGDVAEFHAQDDGRGYVVHDDDDDSQDKSDAPLDSSSSKGRGSGAPCQCWLKKHMSCLYDQAKETNHLWGAVVVAALVGLVILWRKDKLHMSCLKWRSRSAVS

SEQ ID NO: 31188 - protein, 125 aa, Triticum aestivum
GSLISSPPPPPPPPHATPIPIPTGADCGGAERTGDLPSFLVGKVLWPCLTARKRCQWKWKKAPPAGPTGRSSRSPRPPTPPRPAGQKEQQRARGSATATTAAPRPPRCSCRTTSCSHPASTRTCP

SEQ ID NO: 31189 - DNA, 1410 bp, Triticum aestivum
ctcgatcttcttgtttcagcctccacacacttggccatctcgcaagccgtgacagggcgatcaatggcgcccctacgtccgcgcctggccgccctgctcgctctgtgcgcgtgcgccatggctccgccggcggccgccgccaacgtgtcgatcacgacgtgccggtccttctgcggcaacatcacggtggactacccgttcgcgctccacgccgggtgcggccacgcggggttccgcgacctgctctactgcatcgaccgcacgctcatgctgcacctcccctcgggctcctaccgcgtcctcgacatcgactacgcctaccgcggcctcaccctgcacgacccggccatgtccgactgccgcgccatcgaccgctccccgggcggccgcggcaacgggttcgtcgtcgagccgtggcgcgcgccgttcctggccccggacccggacaacgtgttcctcctcctcggctgccgcgccagctcgccgctcttccagggcttccccgaccgccacctgccgtgccggaacgtgtccgggatggggtgcggcgactactacggctgccccgcgtgggacgactacgggcgccggccgtcgggggcggcgtacgggtcggccgtgccgcccgagtgctgcgcggtctcgtagggcgccatccgggccgtgaacgtgagccggctccagtgcgaggggtacagcagcgcgtacagcctcgcgccggtgcgcgcggagggggccggcggctgggcgtacggcatccgggtggcgtgggcgctgccggaggcgaaccgggggttctgcggcgcgtgccgcgccacgggcggggtgtgcggccacgacgtggagagccgcggcgacctgtgcctctgcggtgactggaactcgacttccaactgcgactcctcggcggacgccgcgccgtcaagcaccgccacgcctggcatcgccattgccgctcttctcttggcccttctcgcctcaggattgtcgtccgggtcaatagcgaacatgtgagggacagagggagtgtgcctgtgaaggcgtcatgtttcatccaacagtggccactgacgagctgttcgtgccgccatgattacctccgccgtctggtgtaccgctgcaatacttttgtgtagacaaaaactagtgcgactgaaatgtttgtctgcggcataaatctttgattaggaaatcagtgtcatattacattcgaagtatacctacaaaacatatgcgagtcagaactggggtatattgtgagcttgctcgattcatcatgcttattcgatttgatgtggctccgtttgcatttgtgagtgatgcgttgcggtcctcgcggaggcatgaaaatatgtttgaatatgtttcgcccgtattaacgtataaatgcattacctagtttttttttcg

SEQ ID NO: 31190 - protein, 290 aa, Triticum aestivum
RSSCFSLHTLGHLASRDRAINGAPTSAPGRPARSVRVRHGSAGGRRQRVDHDVPVLLRQHHGGLPVRAPRRVRPRGVPRPALLHRPHAHAAPPLGLLPRPRHRLRLPRPHPARPGHVRLPRHRPLPGRPRQRVRRRAVARAVPGPGPGQRVPPPRLPRQLAALPGLPRPPPAVPERVRDGVRRLLRLPRVGRLRAPAVGGGVRVGRAARVLRGLVGRHPGREREPAPVRGVQQRVQPRAGARGGGRRLGVRHPGGVGAAGGEPGVLRRVPRHGRGVRPRRGEPRRPVPLR

SEQ ID NO: 31191 - protein, 215 aa, Triticum aestivum
LDLLVSASTHLAISQAVTGRSMAPLRPRLAALLALCACAMAPPAAAANVSITTCRSFCGNITVDYPFALHAGCGHAGFRDLLYCIDRTLMLHLPSGSYRVLDIDYAYRGLTLHDPAMSDCRAIDRSPGGRGNGFVVEPWRAPFLAPDPDNVFLLLGCRASSPLFQGFPDRHLPCRNVSGMGCGDYYGCPAWDDYGRRPSGAAYGSAVPPECCAVS

SEQ ID NO: 31192 - protein, 194 aa, Triticum aestivum
MAPLRPRLAALLALCACAMAPPAAAANVSITTCRSFCGNITVDYPFALHAGCGHAGFRDLLYCIDRTLMLHLPSGSYRVLDIDYAYRGLTLHDPAMSDCRAIDRSPGGRGNGFVVEPWRAPFLAPDPDNVFLLLGCRASSPLFQGFPDRHLPCRNVSGMGCGDYYGCPAWDDYGRRPSGAAYGSAVPPECCAVS

SEQ ID NO: 31193 - DNA, 1487 bp, Triticum aestivum
ccaccagggcttccgcggcaaccagcagaacaccgccaagccctcggtcgacatccagcccgactggaccatcctcgagcagatccccttcgccaacttcaccaagctctccttcgccgtcgccgaccagcccgaggacctgctcgtctgcggcgccgtcgactcgtacgaccgcgcctacgaccgcgtcaaccccaagacggcccgccgcctcgagcgcttcaagaaccgccagttcttcaagatcaccaccaccgacgaccccatcatccgccgcctcgccgaggaggacaaggccaccgtcttcgccaccgacgccatcctcgccgccctcatgtgcacgccccgcagcatcctctcctgggacattgtcgtgcagcgcgtcggcaacaagctcttcttcgacaagcgcgagggctcccagctcgatctgctcactgtcaacgagactgcgcaggagcagctccctgagaacaaggatgacatcaattccgcgccggcccttgctgtcgaggccacctacatcaaccagaacttctcgcagcaggtgctggtgcgtgatggcgagaaggttacctttgatgagcctaacccgtttgcctctgagaatgaggaggcggcgcctgtttgctaccgttatcgccgctggaagctggatgatgatattagcatcattgcccgctgtgaagtgcatgctgctggtgttgatcccagtggtgctcgccagttcctcacgcttaatgcactcaatgagtttgatcctaagattactggtgttgactggaagcagaagctcgagtcccagcgtggtgctgtgcttgctacagagctcaagaacaatgccaacaagctcgctcgctggactgcccaggctttactttctggtgctgacatgatgaagttgggttatgtgtcacgtgtgcacccccgcgaccacttcaaccactccatactcactgtgatgggctacaagccaagggattttgctacccagatcaacctcaacactgcaaacatgtggggcattgtcaagtcgattgtggacatctgcatgaagtttgaagagggaaagtatgtgcttgtgaaagatcctgccaagccacagatgaggatttatcaggttcctaatgatgcatttgagaatgattatgttgaagagccacttccagaggaggagcagattcgtccggctacagatgatgtcgatgctactgcacaggagatggatgctgctgccgaggcagaggctaataaagcaactactcagggtggtgagggtgagaagagtgcagatgctgctgctgcttgaagggtataatgggccatctttgctttatctagataatgtgtcttttctgttttatgacctgtttttgtggattaaagagttgaactgccttgtcttgatacagtggtcttgttttggtccatgagaaaacttggtactcttaaatttcatgcttagatgtgctaagcttagcacctac

SEQ ID NO: 31194 - protein, 435 aa, Triticum aestivum
HQGFRGNQQNTAKPSVDIQPDWTILEQIPFANFTKLSFAVADQPEDLLVCGAVDSYDRAYDRVNPKTARRLERFKNRQFFKITTTDDPIIRRLAEEDKATVFATDAILAALMCTPRSILSWDIVVQRVGNKLFFDKREGSQLDLLTVNETAQEQLPENKDDINSAPALAVEATYINQNFSQQVLVRDGEKVTFDEPNPFASENEEAAPVCYRYRRWKLDDDISIIARCEVHAAGVDPSGARQFLTLNALNEFDPKITGVDWKQKLESQRGAVLATELKNNANKLARWTAQALLSGADMMKLGYVSRVHPRDHFNHSILTVMGYKPRDFATQINLNTANMWGIVKSIVDICMKFEEGKYVLVKDPAKPQMRIYQVPNDAFENDYVEEPLPEEEQIRPATDDVDATAQEMDAAAEAEANKATTQGGEGEKSADAAAA

SEQ ID NO: 31195 - protein, 324 aa, Triticum aestivum
MCTPRSILSWDIVVQRVGNKLFFDKREGSQLDLLTVNETAQEQLPENKDDINSAPALAVEATYINQNFSQQVLVRDGEKVTFDEPNPFASENEEAAPVCYRYRRWKLDDDISIIARCEVHAAGVDPSGARQFLTLNALNEFDPKITGVDWKQKLESQRGAVLATELKNNANKLARWTAQALLSGADMMKLGYVSRVHPRDHFNHSILTVMGYKPRDFATQINLNTANMWGIVKSIVDICMKFEEGKYVLVKDPAKPQMRIYQVPNDAFENDYVEEPLPEEEQIRPATDDVDATAQEMDAAAEAEANKATTQGGEGEKSADAAAA

SEQ ID NO: 31196 - protein, 297 aa, Triticum aestivum
TRASAATSRTPPSPRSTSSPTGPSSSRSPSPTSPSSPSPSPTSPRTCSSAAPSTRTTAPTTASTPRRPAASSASRTASSSRSPPPTTPSSAASPRRTRPPSSPPTPSSPPSCARPAASSPGTLSCSASATSSSSTSARAPSSICSLSTRLRRSSSLRTRMTSIPRRPLLSRPPTSTRTSRSRCWCVMARRLPLMSLTRLPLRMRRRRLFATVIAAGSWMMILASLPAVKCMLLVLIPVVLASSSRLMHSMSLILRLLVLTGSRSSSPSVVLCLLQSSRTMPTSSLAGLPRLYFLVLT

SEQ ID NO: 31197 - DNA, 1682 bp, Triticum aestivum
aattcatatcgatccccagccaaccaagttacgaaacaaagcaagtgccggccacgtacgagagttcagccaggaggaagccattgttgccatcgacccatcttggaccggcagctcggaacgctcggagtcatctgcagcggagatgggctcgatgggacctgccgccgccgggaagccacacgcggtgtgcctgccgtacccggcgcaggggcacatcaccccgatgctcaacgtggcaagctgctccacgcccggggcttccacgtcaccttcgtcaacaccgagtacaaccacgcccgcctcgtccgctcccgcggcgccgccgccgtggccggcctcccaggcttccgcttctccaccatccccgacggcctgccgccgtccgacgacgacgacgtcacgcaggacatccctgcgctctgcaagtccaccactgagacctgcctcgggccgttccgcgaactcctcgcgcggctcaacgaccctgccaccggtcacccagcggtcacatgcgtcatctctgacgtcgtcatggggttctccatgaaggccgccaacgagctcgacctcccctacgtccagctctggaccgccagcgccatcagctatctcgggtaccgccactaccgcctcctcatcggccgtggcctcgccccactcaaagacgccgagcagctgacgaacggataccttgacacgccggtggaggacgtgccgggcttgcggagcatgaggctcagggacttcccgtccttcatacgcaccacggacccggacgagtacatggtgcactacgtcctgcgggagacggagcacacggccggtgcgtcggccgtcatcctcaacagcttcgacgaactggagggcgaggcggtgcaggccatggaggcgctcggcctgcccaaggtctacacgctcggcccgctcccgctgctggcgcacaaggagccgccctcgccgcgctccgccatcaacctcagcctctggaaggagcaggacgagtgcctgcagtggctggacggcagggagcccggctccgtcgtctacgtcaacttcggcagtatcactgtcatgaccagcgcgcagatggtggagttcgcgtggggactcgcgcagagcgggaagcagttcatgtggattgtccgtcgagacctggtgaagggcgacgccgcggtgctccccgaggagttcctggccgagacggcggggcgcgggctcatggcgtcctggtgcccgcagcagcaggtgctcgaccaccccgccgtgggcgccttcctgacgcacagtggctggaactcggcgctggagagcttgtgcggcggcgtgccggtgatcagctggccgttcttcgccgaccagcagaccaactgtaggtaccagtgcaacgagtggggtgtcggcatggagatcaacagcaacgtccggcgcgacgctgtcgcccgacttatcacggagatcatggaaggggagaaggggaagagcatgaggaagagagcgcaggagtggaaggagagcgcggtcaacgcggccatgcccggcggctcgtctcaccgaaatttcgacgagctggtccgtgacgtgctcctacccaagaactagctctacatcgatcttcactgtaattagagaacactacaactgtaccttatttgcttgttaagaaagttcgttccttccgg

SEQ ID NO: 31198 - protein, 533 aa, Triticum aestivum
NSYRSPANQVTKQSKCRPRTRVQPGGSHCCHRPILDRQLGTLGVICSGDGLDGTCRRREATRGVPAVPGAGAHHPDAQRGKLLHARGFHVTFVNTEYNHARLVRSRGAAAVAGLPGFRFSTIPDGLPPSDDDDVTQDIPALCKSTTETCLGPFRELLARLNDPATGHPAVTCVISDVVMGFSMKAANELDLPYVQLWTASAISYLGYRHYRLLIGRGLAPLKDAEQLTNGYLDTPVEDVPGLRSMRLRDFPSFIRTTDPDEYMVHYVLRETEHTAGASAVILNSFDELEGEAVQAMEALGLPKVYTLGPLPLLAHKEPPSPRSAINLSLWKEQDECLQWLDGREPGSVVYVNFGSITVMTSAQMVEFAWGLAQSGKQFMWIVRRDLVKGDAAVLPEEFLAETAGRGLMASWCPQQQVLDHPAVGAFLTHSGWNSALESLCGGVPVISWPFFADQQTNCRYQCNEWGVGMEINSNVRRDAVARLITEIMEGEKGKSMRKRAQEWKESAVNAAMPGGSSHRNFDELVRDVLLPKN

SEQ ID NO: 31199 - protein, 355 aa, Triticum aestivum
MGFSMKAANELDLPYVQLWTASAISYLGYRHYRLLIGRGLAPLKDAEQLTNGYLDTPVEDVPGLRSMRLRDFPSFIRTTDPDEYMVHYVLRETEHTAGASAVILNSFDELEGEAVQAMEALGLPKVYTLGPLPLLAHKEPPSPRSAINLSLWKEQDECLQWLDGREPGSVVYVNFGSITVMTSAQMVEFAWGLAQSGKQFMWIVRRDLVKGDAAVLPEEFLAETAGRGLMASWCPQQQVLDHPAVGAFLTHSGWNSALESLCGGVPVISWPFFADQQTNCRYQCNEWGVGMEINSNVRRDAVARLITEIMEGEKGKSMRKRAQEWKESAVNAAMPGGSSHRNFDELVRDVLLPKN

SEQ ID NO: 31200 - protein, 351 aa, Triticum aestivum
MKAANELDLPYVQLWTASAISYLGYRHYRLLIGRGLAPLKDAEQLTNGYLDTPVEDVPGLRSMRLRDFPSFIRTTDPDEYMVHYVLRETEHTAGASAVILNSFDELEGEAVQAMEALGLPKVYTLGPLPLLAHKEPPSPRSAINLSLWKEQDECLQWLDGREPGSVVYVNFGSITVMTSAQMVEFAWGLAQSGKQFMWIVRRDLVKGDAAVLPEEFLAETAGRGLMASWCPQQQVLDHPAVGAFLTHSGWNSALESLCGGVPVISWPFFADQQTNCRYQCNEWGVGMEINSNVRRDAVARLITEIMEGEKGKSMRKRAQEWKESAVNAAMPGGSSHRNFDELVRDVLLPKN

SEQ ID NO: 31201 - DNA, 2001 bp, Triticum aestivum
accgacaggattcgccgccgcgccaccccggagctcccgcccaggctcgccgcctcatcgtccgtcatccgccttgtggccgcgggagcacagacctcgccaaaacatccatccggggtcccggctgccggccaggtcgatcgcctcccctctcctccgaaatcgttccccaccaaaacatctctcgtcgccgccacgctccacgtccaggcaggatgcgctgcctccgccgcgcgggcgcggccgcccacctgctccgctccgcgacgaccggccccgccaagcacgctcgcacggccctcgagcagatgcctccgccgcctgccgccttcccatgtcgcgcgcgcgcccaccacctgctcggaggaatgcgcggccagtggctctgcacggcgacggggtccaccggcgcccccgacctcgccgtggaccagcacttcaccgtggtgcctggcctaggccccgatgtctccgaggtggcggggctcaccggcgcccacgatcttgccgtggaccaggacttcacagtggtgcctggcccaggcctcgatgtctccaaggaggcggagagggtctgccgcgtgctgtccaccgtgccggagccgagggttgcatcagccctcgacgcgctcggggcctctgtgtcgcctcagctcgtggcggaggtgctcaagaacctgagcaacgctggcatcctcgccctcgccttcttccggtgggcggagaggcagcaaggcttcgtgtacacggcggagagcttccacaacctcatcgaagcgctcggcaagatcaagcagttcaggctggtctggagcctggtggaggccatgcggtgccgcggcttgctttccaaggacacgttcaggctcatcgtcaggaggtacgccagggcaaggaaggtcaaggaagctgtcgagacgtttgagaagatggccggcttcgggctcaaagcagacttatcagattacaattggttgatcgacgtgctgagcaaatccaagcaagtcaagaaggcgcaagccatcttcaaggagatgaagaggaacggaaagtttgttcccgatttgaagacctacactgtcctcatggaaggctggggccatgagaaggacttgctgatgcttaagtcggtgtaccaagaaatgctcgatgcaggcctgaagcctgatgtcgtggcatacgggatgctcattagttccttttgcaagtctggcaaatgtgatgaggccatcaaggtgttctgtgagatggaagccaatggttgcatgccaagccctcatgtgtattgcatgcttatcaatgggcttggctcagaggagaggctggatgaggctttgaagtattttgagctttctaaggccagtgggtttcccatggaggtacctacatgtaatgcagttgttggggcttactgcagagcctcaaaattccagcatgccttcaagatggtcgatgagatgagaaagagtggaatcggtccaaattcccggacttatgatattattcttcaccatcttataaagtctcagaagatagaagaggcttataatgtgttccagggaatgggcaaggatggctgtgaacctcagctcaacacatatacaatgatggttagtatgttctgcagtaatgaaagggttgatgtggccttgaaggtgtggaaccaaatgaaggagaagggtgttctgccatgtatgcacatgttttctgcattgatcaacgggttatgctttgagaacaggctggaagaagcttgcgtatatttccaggagatgttggacaaagggatcaggccacctggtcagcttttcagtaatttaaaggaagctcttattgagggaggaagaattagtctggcacaggagatggctttgaagttggatggattacggaaaacacctatgcgtcgttgaggaatcatgcaaataatctgttgcagcagcatatggcttttggctgttagaagctcagtcaaaattgtggtaacaaagaaaacttcag

SEQ ID NO: 31202 - protein, 636 aa, Triticum aestivum
RQDSPPRHPGAPAQARRLIVRHPPCGRGSTDLAKTSIRGPGCRPGRSPPLSSEIVPHQNISRRRHAPRPGRMRCLRRAGAAAHLLRSATTGPAKHARTALEQMPPPPAAFPCRARAHHLLGGMRGQWLCTATGSTGAPDLAVDQHFTVVPGLGPDVSEVAGLTGAHDLAVDQDFTVVPGPGLDVSKEAERVCRVLSTVPEPRVASALDALGASVSPQLVAEVLKNLSNAGILALAFFRWAERQQGFVYTAESFHNLIEALGKIKQFRLVWSLVEAMRCRGLLSKDTFRLIVRRYARARKVKEAVETFEKMAGFGLKADLSDYNWLIDVLSKSKQVKKAQAIFKEMKRNGKFVPDLKTYTVLMEGWGHEKDLLMLKSVYQEMLDAGLKPDVVAYGMLISSFCKSGKCDEAIKVFCEMEANGCMPSPHVYCMLINGLGSEERLDEALKYFELSKASGFPMEVPTCNAVVGAYCRASKFQHAFKMVDEMRKSGIGPNSRTYDIILHHLIKSQKIEEAYNVFQGMGKDGCEPQLNTYTMMVSMFCSNERVDVALKVWNQMKEKGVLPCMHMFSALINGLCFENRLEEACVYFQEMLDKGIRPPGQLFSNLKEALIEGGRISLAQEMALKLDGLRKTPMRR

SEQ ID NO: 31203 - protein, 565 aa, Triticum aestivum
MRCLRRAGAAAHLLRSATTGPAKHARTALEQMPPPPAAFPCRARAHHLLGGMRGQWLCTATGSTGAPDLAVDQHFTVVPGLGPDVSEVAGLTGAHDLAVDQDFTVVPGPGLDVSKEAERVCRVLSTVPEPRVASALDALGASVSPQLVAEVLKNLSNAGILALAFFRWAERQQGFVYTAESFHNLIEALGKIKQFRLVWSLVEAMRCRGLLSKDTFRLIVRRYARARKVKEAVETFEKMAGFGLKADLSDYNWLIDVLSKSKQVKKAQAIFKEMKRNGKFVPDLKTYTVLMEGWGHEKDLLMLKSVYQEMLDAGLKPDVVAYGMLISSFCKSGKCDEAIKVFCEMEANGCMPSPHVYCMLINGLGSEERLDEALKYFELSKASGFPMEVPTCNAVVGAYCRASKFQHAFKMVDEMRKSGIGPNSRTYDIILHHLIKSQKIEEAYNVFQGMGKDGCEPQLNTYTMMVSMFCSNERVDVALKVWNQMKEKGVLPCMHMFSALINGLCFENRLEEACVYFQEMLDKGIRPPGQLFSNLKEALIEGGRISLAQEMALKLDGLRKTPMRR

SEQ ID NO: 31204 - protein, 534 aa, Triticum aestivum
MPPPPAAFPCRARAHHLLGGMRGQWLCTATGSTGAPDLAVDQHFTVVPGLGPDVSEVAGLTGAHDLAVDQDFTVVPGPGLDVSKEAERVCRVLSTVPEPRVASALDALGASVSPQLVAEVLKNLSNAGILALAFFRWAERQQGFVYTAESFHNLIEALGKIKQFRLVWSLVEAMRCRGLLSKDTFRLIVRRYARARKVKEAVETFEKMAGFGLKADLSDYNWLIDVLSKSKQVKKAQAIFKEMKRNGKFVPDLKTYTVLMEGWGHEKDLLMLKSVYQEMLDAGLKPDVVAYGMLISSFCKSGKCDEAIKVFCEMEANGCMPSPHVYCMLINGLGSEERLDEALKYFELSKASGFPMEVPTCNAVVGAYCRASKFQHAFKMVDEMRKSGIGPNSRTYDIILHHLIKSQKIEEAYNVFQGMGKDGCEPQLNTYTMMVSMFCSNERVDVALKVWNQMKEKGVLPCMHMFSALINGLCFENRLEEACVYFQEMLDKGIRPPGQLFSNLKEALIEGGRISLAQEMALKLDGLRKTPMRR

SEQ ID NO: 31205 - DNA, 1804 bp, Triticum aestivum
ccaaatccagctgaacccacccacgctctacatcacactcatcagtccccactcctcacaggcaaacgccataccatatcacacgggctagccagccatcccatcatggagaaggcgcagaagcgggtggccatcgtcggcgccggcgcgagcggcctggcggcgtgcaagcacgcgctggagcgcggcctccggccggtcgtattcgagtcctcgggcgccatcggcggcgtgtgggtgcgcgcgctggcgtccacgcgcctgcagacgccgcgcacgctctacgagttctccgacttcccctggccgccggaggtcgccgaggtgttcccggaccacgcccaggccgcggcgtacctgcgctcctacgcggagcggttcggcgtgctggaccgcgtccggttcggatgccgcgtgacaggcatggagtacgccggcgtcggcgaggacgaggtccgggcgtgggaccggtgggccggcgatgggtcggcgttcggggatggccgcggccagtggcggctcaccgtgcagcagcagggtgccggcgacgtcgagacatatgttgcggattttgtgatcctgtgcgccgggagattcagcggcatcccgaatatacccacattccctcccgacaaagggccggagaagttcgacggcacggtgatccgctccatggactactccgacatgggcaccgaaaaggccaccgagctcatcaggggcaagctcgtcaccgtcgtcggctaccagaagtccgctatcgacatcgctgcagagtgcgcaaacacaaacggagccaagtatccatgcacaataatatgtcgaacgaagaggtggatcatacccgactactacgcttggggcgttcccattgcattcttctacctcaaccgcttctcggagctcctagtacacaagccaggagaggggctgctccttagcattcttgctaccttcttatcacccttgagatggttgttctcgaagttcgtcgagagctactacagatgggcggtgcccatggataagcacggcatggtgccagaccacagtttcttccaggccatcagctcttgcttggttgcaatattgccagacaagttctatgacatggttgatcaaggaagcattgttctcaagaaagcaaagagcttcagcttctgcaaacaaggtgtgattgtcgaaggtgattccgcgccgataaagagcgacgtggtcatattcgccaccggatacaagggagaccaaaagctaaaggagatgttggcatcatccttgttcagagacattgtgactggcccaccatccagtattattcctctctacaggcaatgcgtgcatcctaggatcccacagctggcgatcatcggctactccgagagcatagcaaacctgcacacattcgacatgcgctccaaatggttggcgcatttccttgacggggtgtttcagttgcctagcataaaatctatggagatggatataaaggaatgggatgaatacatgaagaggtactctcgtgaatacttccgtcgatcttgcgttggagctctccacatctggtacaatgaccagttgtgccaggacatggggtgtgaacccaggaggaagaaagggttctttgcagattggctgttgccatatcttccatcagattacaaggatgtcggtctgaagaagtgacatgagagatctgtcgtgccatcgccgcgcttaaatcaaacagaaacattgccattccagcgattctgtgctgactattgtacaaactaaatgtcatggaataagctcttcggttgaacct

SEQ ID NO: 31206 - protein, 560 aa, Triticum aestivum
PNPAEPTHALHHTHQSPLLTGKRHTISHGLASHPIMEKAQKRVAIVGAGASGLAACKHALERGLRPVVFESSGAIGGVWVRALASTRLQTPRTLYEFSDFPWPPEVAEVFPDHAQAAAYLRSYAERFGVLDRVRFGCRVTGMEYAGVGEDEVRAWDRWAGDGSAFGDGRGQWRLTVQQQGAGDVETYVADFVILCAGRFSGIPNIPTFPPDKGPEKFDGTVIRSMDYSDMGTEKATELIRGKLVTVVGYQKSAIDIAAECANTNGAKYPCTIICRTKRWIIPDYYAWGVPIAFFYLNRFSELLVHKPGEGLLLSILATFLSPLRWLFSKFVESYYRWAVPMDKHGMVPDHSFFQAISSCLVAILPDKFYDMVDQGSIVLKKAKSFSFCKQGVIVEGDSAPIKSDVVIFATGYKGDQKLKEMLASSLFRDIVTGPPSSIIPLYRQCVHPRIPQLAIIGYSESIANLHTFDMRSKWLAHFLDGVFQLPSIKSMEMDIKEWDEYMKRYSREYFRRSCVGALHIWYNDQLCQDMGCEPRRKKGFFADWLLPYLPSDYKDVGLKK

SEQ ID NO: 31207 - protein, 525 aa, Triticum aestivum
MEKAQKRVAIVGAGASGLAACKHALERGLRPVVFESSGAIGGVWVRALASTRLQTPRTLYEFSDFPWPPEVAEVFPDHAQAAAYLRSYAERFGVLDRVRFGCRVTGMEYAGVGEDEVRAWDRWAGDGSAFGDGRGQWRLTVQQQGAGDVETYVADFVILCAGRFSGIPNIPTFPPDKGPEKFDGTVIRSMDYSDMGTEKATELIRGKLVTVVGYQKSAIDIAAECANTNGAKYPCTIICRTKRWIIPDYYAWGVPIAFFYLNRFSELLVHKPGEGLLLSILATFLSPLRWLFSKFVESYYRWAVPMDKHGMVPDHSFFQAISSCLVAILPDKFYDMVDQGSIVLKKAKSFSFCKQGVIVEGDSAPIKSDVVIFATGYKGDQKLKEMLASSLFRDIVTGPPSSIIPLYRQCVHPRIPQLAIIGYSESIANLHTFDMRSKWLAHFLDGVFQLPSIKSMEMDIKEWDEYMKRYSREYFRRSCVGALHIWYNDQLCQDMGCEPRRKKGFFADWLLPYLPSDYKDVGLKK

SEQ ID NO: 31208 - protein, 419 aa, Triticum aestivum
MEYAGVGEDEVRAWDRWAGDGSAFGDGRGQWRLTVQQQGAGDVETYVADFVILCAGRFSGIPNIPTFPPDKGPEKFDGTVIRSMDYSDMGTEKATELIRGKLVTVVGYQKSAIDIAAECANTNGAKYPCTIICRTKRWIIPDYYAWGVPIAFFYLNRFSELLVHKPGEGLLLSILATFLSPLRWLFSKFVESYYRWAVPMDKHGMVPDHSFFQAISSCLVAILPDKFYDMVDQGSIVLKKAKSFSFCKQGVIVEGDSAPIKSDVVIFATGYKGDQKLKEMLASSLFRDIVTGPPSSIIPLYRQCVHPRIPQLAIIGYSESIANLHTFDMRSKWLAHFLDGVFQLPSIKSMEMDIKEWDEYMKRYSREYFRRSCVGALHIWYNDQLCQDMGCEPRRKKGFFADWLLPYLPSDYKDVGLKK

SEQ ID NO: 31209 - DNA, 1123 bp, Triticum aestivum
aaaaaacagagttgaggaagaaacgaggcatggcgcagcagctgctgcttctcctacccgcgccttcggggacgttctcgaagccactcccttcccctgccccctccctgccccggcgccatgtcccctccatctccatcacacgccgattagtggcgggagtcgccgccgcgcgccgcgacctgctccgctgcggaatgcggcgctcagatttggtgtccgaattggagctcgccaaggacaagaagcagcagggtggtcgtgccaatgccatattctggatcttgctgcttaattttggactctatgttgcagaccacttgttacagatccggcagataaagtcactctacctgtaccatgcattcccttcttggtatcagtttgtgacatcaacgttttgccatgctaactggaaccacctttcaagcaatctgttctttgtgtacatttttgggaagcttgtggaagaggaggaaggtaactttgcactgtggatgtcttatattttgaccggtgctggagcaaacttgatttcatggttagttcttccaacgtcatctgtgtcgcttggagcatctggggctgtttttggccttttcacaattagtgtactagtaaagatgtcctgggactggagaaagattcttgaggtccttatccttggtcaatttgttgttgacaaggtcatggaagctgcacgtgcaactaccataacaggcgccgcacttcaagtaaacaacattgcccatgtctcgggtgctttgattggtgctgcgctagtatttgtgatcaacagaatccccttatcatctaatgatgataacccaaaggcttcaaaggataacaaggacaaaagaagttaatttaacctagagctgccatgctaacacactatatcgttcattacaatttttcttcttcaaatggactactcattgtgtccacattcatacgtagttctgatttctgttggaaaaaaaaggataaaagacaacatcccatagaggttctactggaaatcatcacacttgtagtgtaaggttcatttctgtacctttgtaacaatgtatcgaaaagctaaaatatttctggagtcagactcggtagcaattcatgattt

SEQ ID NO: 31210 - protein, 287 aa, Triticum aestivum
KTELRKKRGMAQQLLLLLPAPSGTFSKPLPSPAPSLPRRHVPSISITRRLVAGVAAARRDLLRCGMRRSDLVSELELAKDKKQQGGRANAIFWILLLNFGLYVADHLLQIRQIKSLYLYHAFPSWYQFVTSTFCHANWNHLSSNLFFVYIFGKLVEEEEGNFALWMSYILTGAGANLISWLVLPTSSVSLGASGAVFGLFTISVLVKMSWDWRKILEVLILGQFVVDKVMEAARATTITGAALQVNNIAHVSGALIGAALVFVINRIPLSSNDDNPKASKDNKDKRS

SEQ ID NO: 31211 - protein, 278 aa, Triticum aestivum
MAQQLLLLLPAPSGTFSKPLPSPAPSLPRRHVPSISITRRLVAGVAAARRDLLRCGMRRSDLVSELELAKDKKQQGGRANAIFWILLLNFGLYVADHLLQIRQIKSLYLYHAFPSWYQFVTSTFCHANWNHLSSNLFFVYIFGKLVEEEEGNFALWMSYILTGAGANLISWLVLPTSSVSLGASGAVFGLFTISVLVKMSWDWRKILEVLILGQFVVDKVMEAARATTITGAALQVNNIAHVSGALIGAALVFVINRIPLSSNDDNPKASKDNKDKRS

SEQ ID NO: 31212 - protein, 222 aa, Triticum aestivum
MRRSDLVSELELAKDKKQQGGRANAIFWILLLNFGLYVADHLLQIRQIKSLYLYHAFPSWYQFVTSTFCHANWNHLSSNLFFVYIFGKLVEEEEGNFALWMSYILTGAGANLISWLVLPTSSVSLGASGAVFGLFTISVLVKMSWDWRKILEVLILGQFVVDKVMEAARATTITGAALQVNNIAHVSGALIGAALVFVINRIPLSSNDDNPKASKDNKDKRS

SEQ ID NO: 31213 - DNA, 1360 bp, Triticum aestivum
aacccgattccattccgccccactcccactcgtcgccctcccgattcggtttgaaaagagacaaaagggatgctcgaccggtccctccggccggcggaggccggcgccggcgcggccggccccggcgaggtccgcgggaacgtggatcgggtcctcttcaaggacctggtcgacatggtgccgctcgtcgagtccctcatggatcggaggacgaacccgtcgtactcgcggcgcgcctcgctggtgtacacgccggcgccggccaagaagggtggtgatttgaaaagcgcaaagacaccacaaaccttgtcggcaaaaaagcggagggatcctggagacacaggaaataaaagcacacctgattcaaatggagagaacggctccgttgccccgatgactcaatcgggagcagaaaataaacccaaagacaaggatgagattggcttgctgcgtgagcaggtcgatgagctccaaaagcaacttgtcgaaaaagaggaggcattgaggtctgccgagagtactgtgagtgagatgaatgcggtgtattcgacagttgatgggttgaaacgccaagttgctgagaaagaagctttgatcaaatatgctaattctcagttacaaaatgcaaagattatgcttgcagacaagcaagcatccttagaaaaattggaatgggaggtaaagacctcaaataagaaggtggaagatcttcaaggggacgtctccatatggagtttgagataagttcattcgtgacattattcgagaaaatctcggagaatgtttcagatgattgtcacgatggtagcataccatcttatgatctagaggcacttcaatcagtgagtgaaatcgacaagattgaagtggacaagatagagcaggaaagagttacatatgctgaagctcttgctgctgcaagagcaaaccctaacgaagaacagttgagttcagttgcggaggcgcggtcaaggctgcaggtccttgttgtacaataatgcacgaggtgccagttgtagtgtatgtacgatgatgcacgggggtgccaattgtagtgtatgtacgataattttaagtcactgatgtaattataattgtgggcttgagctggttcatgtgtgtgaccggtgtgactgtaaccaatcgagcacttgaaactggacaattgttttagttttcggatcacatttacctggttctgtgctctccgttgtggattatattagaaggaaaactttggctgttgttttgatgatgagcactgggcagtgctgctatctagtgtgattttagtgtttttagacttggttgaatgtccgggcacagattgctgctaagttttatgatgttggaatttttg

SEQ ID NO: 31214 - protein, 224 aa, Triticum aestivum
MLDRSLRPAEAGAGAAGPGEVRGNVDRVLFKDLVDMVPLVESLMDRRTNPSYSRRASLVYTPAPAKKGGDLKSAKTPQTLSAKKRRDPGDTGNKSTPDSNGENGSVAPMTQSGAENKPKDKDEIGLLREQVDELQKQLVEKEEALRSAESTVSEMNAVYSTVDGLKRQVAEKEALIKYANSQLQNAKIMLADKQASLEKLEWEVKTSNKKVEDLQGDVSIWSLR

SEQ ID NO: 31215 - protein, 189 aa, Triticum aestivum
MVPLVESLMDRRTNPSYSRRASLVYTPAPAKKGGDLKSAKTPQTLSAKKRRDPGDTGNKSTPDSNGENGSVAPMTQSGAENKPKDKDEIGLLREQVDELQKQLVEKEEALRSAESTVSEMNAVYSTVDGLKRQVAEKEALIKYANSQLQNAKIMLADKQASLEKLEWEVKTSNKKVEDLQGDVSIWSLR

SEQ ID NO: 31216 - protein, 181 aa, Triticum aestivum
MDRRTNPSYSRRASLVYTPAPAKKGGDLKSAKTPQTLSAKKRRDPGDTGNKSTPDSNGENGSVAPMTQSGAENKPKDKDEIGLLREQVDELQKQLVEKEEALRSAESTVSEMNAVYSTVDGLKRQVAEKEALIKYANSQLQNAKIMLADKQASLEKLEWEVKTSNKKVEDLQGDVSIWSLR

SEQ ID NO: 31217 - DNA, 1725 bp, Triticum aestivum
aaagcttcacctcccctcaaaaaaaaaagatttaccttcaccggtctctctcgcgccaaccggcggcgctcgtctccctcgccgccgtaagcacggtggcgaagccgaacccaagcgaggtggccaagtagtcggtgagatgctgctagtagagctgctccgctgccagatccaggagtggtacccggcattccgccgccacaccgtccccaccgtcaccatccccctccccgccgccttcctccgctacctcgccggccagcccgcccaccccgtccccgacgcccctcaccaggacgcggaagggcctcccccattcctcctcccgtcgctcgcctccggccgcacccccttcccgccgctccacctcccggaccccgtcgaccacgacgacagctccgacctcttctccgtctgcgacgacgacgacgacgacgagagcccgcccctccccgccttccccgagctggaggccgcggtcgacgcggccatcgccgagctcggcggcgccgcgctccccaagctcaactggagcgcgcccaaggacgccgccttcatgtccgccgacggcaccgtccgctgcacctgcttcgccgaggtcgccatgctgctccgctcctcggactgcgtcgcgcacgacctctcctccgcgcgcccgtcctgccaggacttcgtgtgcgccagggaaggtgttcgacggaatgccggacagggcagtggtgccaaccaggcgggtgctccatcgaatggcggagggagcaccagtggtgctggttctctgagtgatcctcccactgaggatcgcaatgagggaggcaggcaagctgctgccgacagtgatgcttcggaagacgatgttggacaagaaagcggcgatgatagttgggtggacgatgggttccagtactacctcgccctccgcaagtggtacccgggcctgcgccccgaggcagagttccgatgcttcgtgcggggacggaagctggtcggcgtgtcgcagagggacacatctgcttactacccatcgttgcctgggtggagttctgaggtgcagccgaagatcgaggagttcttcgaagaagttgttgagtcgcagtttgcttctcagaattacacatttgatgtgtatgtcagagcagatggccgggtgaagctgattgatttcaatccttggggtggctatacattgccgcttatgtttacatgggaggagcttgaggatgagaagagaggagaggacaagctggagtttagagtggtaatggagcaaggtgcagtgaggccaggattaatgacagcagtgccgtatgatatgacggattggggagaagggagcggctgggatgtttttctgaagaaggctgacaatgaactgaatagacagatggcctcattagctatggattcgtaattgacatctggaacaaagcagcgcttgaggactccagtagttgaacaacttcaaccgtcgcctgtttgtaatgtttcacctgtcaaacgctagaagtaacagccttctttagattgtgatgcaaacctcacggcaatcggccgtttccccccatggcttttgcaatgctagattgctagtatgggagtaccgcatgctgcttcatctcagttttatgatatttacagaaaaatatttgtagtggaagtatatggcccatggctgaaattgcaaactctgaaacatgaatacacattccatatgcctttgctgtt

SEQ ID NO: 31218 - protein, 469 aa, Triticum aestivum
KLHLPSKKKDLPSPVSLAPTGGARLPRRRKHGGEAEPKRGGQVVGEMLLVELLRCQIQEWYPAFRRHTVPTVTIPLPAAFLRYLAGQPAHPVPDAPHQDAEGPPPFLLPSLASGRTPFPPLHLPDPVDHDDSSDLFSVCDDDDDDESPPLPAFPELEAAVDAAIAELGGAALPKLNWSAPKDAAFMSADGTVRCTCFAEVAMLLRSSDCVAHDLSSARPSCQDFVCAREGVRRNAGQGSGANQAGAPSNGGGSTSGAGSLSDPPTEDRNEGGRQAAADSDASEDDVGQESGDDSWVDDGFQYYLALRKWYPGLRPEAEFRCFVRGRKLVGVSQRDTSAYYPSLPGWSSEVQPKIEEFFEEVVESQFASQNYTFDVYVRADGRVKLIDFNPWGGYTLPLMFTWEELEDEKRGEDKLEFRVVMEQGAVRPGLMTAVPYDMTDWGEGSGWDVFLKKADNELNRQMASLAMDS

SEQ ID NO: 31219 - protein, 423 aa, Triticum aestivum
MLLVELLRCQIQEWYPAFRRHTVPTVTIPLPAAFLRYLAGQPAHPVPDAPHQDAEGPPPFLLPSLASGRTPFPPLHLPDPVDHDDSSDLFSVCDDDDDDESPPLPAFPELEAAVDAAIAELGGAALPKLNWSAPKDAAFMSADGTVRCTCFAEVAMLLRSSDCVAHDLSSARPSCQDFVCAREGVRRNAGQGSGANQAGAPSNGGGSTSGAGSLSDPPTEDRNEGGRQAAADSDASEDDVGQESGDDSWVDDGFQYYLALRKWYPGLRPEAEFRCFVRGRKLVGVSQRDTSAYYPSLPGWSSEVQPKIEEFFEEVVESQFASQNYTFDVYVRADGRVKLIDFNPWGGYTLPLMFTWEELEDEKRGEDKLEFRVVMEQGAVRPGLMTAVPYDMTDWGEGSGWDVFLKKADNELNRQMASLAMDS

SEQ ID NO: 31220 - protein, 284 aa, Triticum aestivum
MSADGTVRCTCFAEVAMLLRSSDCVAHDLSSARPSCQDFVCAREGVRRNAGQGSGANQAGAPSNGGGSTSGAGSLSDPPTEDRNEGGRQAAADSDASEDDVGQESGDDSWVDDGFQYYLALRKWYPGLRPEAEFRCFVRGRKLVGVSQRDTSAYYPSLPGWSSEVQPKIEEFFEEVVESQFASQNYTFDVYVRADGRVKLIDFNPWGGYTLPLMFTWEELEDEKRGEDKLEFRVVMEQGAVRPGLMTAVPYDMTDWGEGSGWDVFLKKADNELNRQMASLAMDS

SEQ ID NO: 31221 - DNA, 1394 bp, Triticum aestivum
actcttctcgtaacttccacactcgtgtccctttctttcctccccgtcgcttccgcagatcaaaattcaaaaccctagcgaactcctccgcaagcacgtgatcgaccggccatggcttccgccctcggagcccaggtggctgccgtggcgccgattggttcggatggtcgccactacaggagttgttcttcgctcaagggtaataactcccgcaataagtcatggactggaaaattagcatgggaaaacaagaccctgcaaccaagacatacgaagaaggtcttttgtatgtccgtgcaacaagcaagcaaaagtaaatgtaaagttgctattaaacctctggaactggagaatacaaaggagccacccctcaacttgtacaaaccaaagggaccctacacagcctcaattgtctccgttgagagaattgtaggtcctaaagctcctggtgaaacatgtcacattgtcattgaccatggtggtaatgtcccatactgggaaggacaaagttatggtgtcattcctccaggagagaacccaaagaaacctggggccccaaataccgtccgactctattctattgcgtctactaggtatggcgattcttttgatggaaggactgctagtctttgtgtgcgccgtgctgtttattatgatcctgaaactggaaaagaagatccttcaaagaagggtatctgcagtaacttcttgtgtgactcaaaaccaggtgacaaaattcagatcacaggcccctcaggcaaaataatgcttctgcctgaggatgacccaaacgcaactcatatcatgattggaactggcacgggtgttgctcctttccgtggctacctacgtcgtatgttcatggaagatgtcccatctttcaagtttggtggtctggcttggctctttcttggtgttgccaatactgacagcctgctctatgacgaagagttcacaaactaccttcagcagtatccagaaaatttcaggtatgacaaagcactaagccgggagcagaaaaacaagagcggtggcaagatgtatgtgcaggacaggatcgaggagtacagtgatgaaatcttcaagcttttggatgatggtgcacacatctacttctgtggtttgaaggggatgatgctagggattcaggacacactcaagagagtagctgagcaaagaggtgagagttgggatcagaagctgtcacagctgaaaaagaacaagcaatggcacgtcgaggtttactaggttacaatggctgagattgttaattattgtttcccggggagatggaaaacagaaagataagtaggtcattctcttcccattgtaaaattgtcaatattattcatacgcgtgtgcgtcgcatgattaataaaacaatgtgcaattac

SEQ ID NO: 31222 - protein, 378 aa, Triticum aestivum
MASALGAQVAAVAPIGSDGRHYRSCSSLKGNNSRNKSWTGKLAWENKTLQPRHTKKVFCMSVQQASKSKCKVAIKPLELENTKEPPLNLYKPKGPYTASIVSVERIVGPKAPGETCHIVIDHGGNVPYWEGQSYGVIPPGENPKKPGAPNTVRLYSIASTRYGDSFDGRTASLCVRRAVYYDPETGKEDPSKKGICSNFLCDSKPGDKIQITGPSGKIMLLPEDDPNATHIMIGTGTGVAPFRGYLRRMFMEDVPSFKFGGLAWLFLGVANTDSLLYDEEFTNYLQQYPENFRYDKALSREQKNKSGGKMYVQDRIEEYSDEIFKLLDDGAHIYFCGLKGMMLGIQDTLKRVAEQRGESWDQKLSQLKKNKQWHVEVY

SEQ ID NO: 31223 - protein, 319 aa, Triticum aestivum
MSVQQASKSKCKVAIKPLELENTKEPPLNLYKPKGPYTASIVSVERIVGPKAPGETCHIVIDHGGNVPYWEGQSYGVIPPGENPKKPGAPNTVRLYSIASTRYGDSFDGRTASLCVRRAVYYDPETGKEDPSKKGICSNFLCDSKPGDKIQITGPSGKIMLLPEDDPNATHIMIGTGTGVAPFRGYLRRMFMEDVPSFKFGGLAWLFLGVANTDSLLYDEEFTNYLQQYPENFRYDKALSREQKNKSGGKMYVQDRIEEYSDEIFKLLDDGAHIYFCGLKGMMLGIQDTLKRVAEQRGESWDQKLSQLKKNKQWHVEVY

SEQ ID NO: 31224 - DNA, 723 bp, Triticum aestivum
accacgcgcacaagcacaagtcgacgaccaaaaacagaggaagaagaagaaaaggccaggcctccaagatctcggctgcgagagagagatctgagagagacggaggtgcttcggagatgcacgacttctgcttcacgatcccctacgggttcgcggtcctggccggcggcctgctgggctacctccgccgcggcagcaccgcgtccctggccggcggcgccggcgtgggcgggcttctcctcctggcaggattcgtcagcctcaaggccttcgagaagcgccgcaactcctacctcgccctcgcactcgagaccctttgcgcactggccttgacctttgttatggggcaaagataccttgaaacttcaaagataatgccggctggtgtcgttgctggtctcagtgctctgatgtcggcattctatctattcaaaattgctaccggtggcaaccatttctcgccaaagaaagagtagaccagacggtgcttggccaaactcaaagaccatatggcatattgtgttctgcattcgaattgtaacttaactgatgctctatgttgtgcttgcacctttgctcaaatgttttgtatgcggacctggaaagtattcaccatgtaaatgaactaacatttcaattgtgcttcgctgaggcgcaaacttgtcttaattgcctgttgtcattgagcaaaagtaaatacgcctgatttcttgttcttcgatt

SEQ ID NO: 31225 - protein, 157 aa, Triticum aestivum
HAHKHKSTTKNRGRRRKGQASKISAARERSERDGGASEMHDFCFTIPYGFAVLAGGLLGYLRRGSTASLAGGAGVGGLLLLAGFVSLKAFEKRRNSYLALALETLCALALTFVMGQRYLETSKIMPAGVVAGLSALMSAFYLFKIATGGNHFSPKKE

SEQ ID NO: 31226 - protein, 119 aa, Triticum aestivum
MHDFCFTIPYGFAVLAGGLLGYLRRGSTASLAGGAGVGGLLLLAGFVSLKAFEKRRNSYLALALETLCALALTFVMGQRYLETSKIMPAGVVAGLSALMSAFYLFKIATGGNHFSPKKE

SEQ ID NO: 31227 - protein, 110 aa, Triticum aestivum
TTRTSTSRRPKTEEEEEKARPPRSRLRERDLRETEVLRRCTTSASRSPTGSRSWPAACWATSAAAAPRPWPAAPAWAGFSSWQDSSASRPSRSAATPTSPSHSRPFAHWP

SEQ ID NO: 31228 - DNA, 2315 bp, Triticum aestivum
atggtgctttgctcggttctgaatttctctaactagctaccttcgttttcgaaaaaaagctacctccgtcttggccatggaaggtgagccacaaggaaacgggcgcgcaatcggcatcgatctcggcaccacctactcgtgcgtcggagtatggcagcatggtcgtgtggagatcgtcgccaacgaccagggcaaccgcaccacgccgtcctgtgtcgccttcaccgactcagagaggctcatcggcgagggagccacctatcagggcgtaagaaatgcgtccaacactgtctacggtaagtatttgtagttgggtccgtccatttgatgacatgttcaagctgcctggaagctgatatattcttttgtatttcttcaagcatgcgtgctgctcaataatcacttcagtagatatatttatactacatgagtgtggttgttgtacacccagggacattgcacccgtgctacacccacgatcgaaaacttaacaaaacaaatgaaataattctgaaactttgcagtttcgattatgatcaaatgttttaggagcttgcaaaatgtggccagatgatatcaaaggagctctatacaaaaaacaaagttagtgagtttatatgactttttgctactaatatgaaaagaataactcgactgctcctccatgtatgtatgtagatgtcaagcggctcatcggccggaatttctccaacccgacagtgcaaagcgatgccaagcattggccatttgagatgttccagggtgccgacgacaagcccatgatcaaggtgagtttccttggcgagaagaaggagttctcgccagaggagatctcctctatggtgctcgtcaagatgaaggagacggctgaggcctaccttggaacgaccatcacgaatgccgtcgtcaccgtgccagcctacttcaacagctcccatcgccggcctcaatgtcatgcgcatcatcaatgaacctacagcggcggccatggcttacagcatcgacgggaagtggaggcacacccaggagagggttgtgctcatctatgactggggcggtggaacgctcgatgtctcgctcatcgtcatcaagaaaggtgtgctggagatcaaggctacctccggcgacactcacctgggaggcgaggatttgaccaaccatatggtcgaccatttcgccggtgagtttaagaggaggaaccagagagacatgagtggcgacaagagggcactccggcgcctcaggaactcatgcgaaaaggccaagaggatgctatcctcccagaccccagaccgtggtggaggtcgacgccccttttcgagggcatcgatttctactccagcatcaccccgtgcccggttcgagcagctcagcgtggacctcttccgcaaatgcatagagccagttgagatctgcttgagggatgccgagatggacaagaccaaagtggacgacgttgtgctcgttgggggctcaacacgtatcccccgcgtgcagcagctcctcagggagttcttccatggaaaggtgccctgcaaggacatcaacggtgatgaggccgttgcatacggagcgaccatccaggccgccatcctcatgggagacaagaagcatgaaatcctccagcatctcatcgacatcgtgccgctctctcaggccatagaggtgaagggaggtatcatggatgtgctgattccgaggaataccgccatccccacaatggtggagaagaactacgtcacatctcaggacaaccagtccagcgtaggcttcaacgtatacgagggtgagaggtccatggtaaagtataacagactgcgcggcaagttcacgctttctggcatcacagtggctcctaagggagtcactaaaatgcaggtgcgctttcagattgaccaggatgggatcctccacgtctcggcggaagaaaaggtgtctggtcagaagaacaagatcgccatcaccaacgacgtggggtattttaggatggaggaaactcagcgaatgttgcaggaggcccaggagtacaaggccgaggatgaggagcacaagagaaaggcacaagcacggaacgacattgagaactacatctacactatgcgcaacactagtatcaagaaactccaggacgctgctgatggtgctacaaagtggcttgaaaacaacgagcttaccgcccgcgagattaatgccatgaagaagcagttggagggcgtccacgccagcatctgcggccagtctagtagaccatgaaaaacaactagcggctctccctcgatattcaatagatttgatgcaatttgtttttgaataac

SEQ ID NO: 31229 - protein, 451 aa, Triticum aestivum
MPSSPCQPTSTAPIAGLNVMRIINEPTAAAMAYSIDGKWRHTQERVVLIYDWGGGTLDVSLIVIKKGVLEIKATSGDTHLGGEDLTNHMVDHFAGEFKRRNQRDMSGDKRALRRLRNSCEKAKRMLSSQTPDRGGGRRPFSRASISTPASPRARFEQLSVDLFRKCIEPVEICLRDAEMDKTKVDDVVLVGGSTRIPRVQQLLREFFHGKVPCKDINGDEAVAYGATIQAAILMGDKKHEILQHLIDIVPLSQAIEVKGGIMDVLIPRNTAIPTMVEKNYVTSQDNQSSVGFNVYEGERSMVKYNRLRGKFTLSGITVAPKGVTKMQVRFQIDQDGILHVSAEEKVSGQKNKIAITNDVGYFRMEETQRMLQEAQEYKAEDEEHKRKAQARNDIENYIYTMRNTSIKKLQDAADGATKWLENNELTAREINAMKKQLEGVHASICGQSSRP

SEQ ID NO: 31230 - protein, 432 aa, Triticum aestivum
MRIINEPTAAAMAYSIDGKWRHTQERVVLIYDWGGGTLDVSLIVIKKGVLEIKATSGDTHLGGEDLTNHMVDHFAGEFKRRNQRDMSGDKRALRRLRNSCEKAKRMLSSQTPDRGGGRRPFSRASISTPASPRARFEQLSVDLFRKCIEPVEICLRDAEMDKTKVDDVVLVGGSTRIPRVQQLLREFFHGKVPCKDINGDEAVAYGATIQAAILMGDKKHEILQHLIDIVPLSQAIEVKGGIMDVLIPRNTAIPTMVEKNYVTSQDNQSSVGFNVYEGERSMVKYNRLRGKFTLSGITVAPKGVTKMQVRFQIDQDGILHVSAEEKVSGQKNKIAITNDVGYFRMEETQRMLQEAQEYKAEDEEHKRKAQARNDIENYIYTMRNTSIKKLQDAADGATKWLENNELTAREINAMKKQLEGVHASICGQSSRP

SEQ ID NO: 31231 - protein, 421 aa, Triticum aestivum
MAYSIDGKWRHTQERVVLIYDWGGGTLDVSLIVIKKGVLEIKATSGDTHLGGEDLTNHMVDHFAGEFKRRNQRDMSGDKRALRRLRNSCEKAKRMLSSQTPDRGGGRRPFSRASISTPASPRARFEQLSVDLFRKCIEPVEICLRDAEMDKTKVDDVVLVGGSTRIPRVQQLLREFFHGKVPCKDINGDEAVAYGATIQAAILMGDKKHEILQHLIDIVPLSQAIEVKGGIMDVLIPRNTAIPTMVEKNYVTSQDNQSSVGFNVYEGERSMVKYNRLRGKFTLSGITVAPKGVTKMQVRFQIDQDGILHVSAEEKVSGQKNKIAITNDVGYFRMEETQRMLQEAQEYKAEDEEHKRKAQARNDIENYIYTMRNTSIKKLQDAADGATKWLENNELTAREINAMKKQLEGVHASICGQSSRP

SEQ ID NO: 31232 - DNA, 1792 bp, Triticum aestivum
acaaaatttctccccccaaatttcctactcgtccgtttcacgctcccacggtctcactctcacctccaaacccaaatccccaaaccctaaccacagcacctacctcctccgccgccgccgccatggcaggagcaggagtcggcggccgcaaggctcgcaactttgcgacctttcgcctattcccccgcgacggtgccgccgaccccaacgaccgcgtcttcgtccgcgtcgacaacaacgcctacaccatccccggcttcggcgacgacgaagacccttccctctcgcccaccgccgccgccgaccaattcccttcctccacctctgggcccctccccgaccacgtccgccagcagatccttgagctcggcctccccgacgatggctacaactaccttctccatctccgcgagctgcggccctccgctgtggcctcctccttcgtacccagccataccgcccgcccagagcaacttcccctggacgtgaaggcctatgatgcaagcaaggtgcgggttgcttctggcaaggtcgaggaagagttggacgaggggaggaccatgtgtaaggtggccgcaaagacggcaccggtgaggcgagttgagaaggccgtcgaccctgacgttgcaaggttgctcgatgagagcgaggatgagggtttggaggaggatttcgtcataatggcaaaccaagccgaaggggatgatatggaggatgaaagtgaggaagaggggggtggtgtgttcagtgatgtggaaaatgatgaggagttcgaggatgaagagggtgagcccaagccgagggtgccacggctgctggatgaacaatttgatctgcttgctttggaagaatatggagctagtgatgatgatgatggagctgttagagatggggaacatgaactcccgtctgaggttatagatgaactgaagttgttccacaatcaaaatgtatgcgttgatgaagaatatagaacaccagcagattttgttcgtggaaaacttgactcaaccaccgccgaggaggtggatgaatctgctaatgtgatccagaagtgtgctgaatatgctgaaaggtatttaaatgaaactgcagaagatgaagaggtcttgcttgtttcggaaagcagtgatgaatctgaagtttgggactgtgagaccattgtttccacatactctaacttggacaatcaccctggcaaaattcaaactccaggaaatcctagaaatcgtcttcccaaagtttttcctggggaaacagctacaacgaaagatatcatcaagcttcatggtaaagagaaacttcctgtagattacctgccacagaggaaaagaaaagttgaaaaggagaagaaagcaaagcccacagaagcttcagatgctgaatattattttgaaaaggttgtagttcagaaggaaacaaaagatgaaaagaaagctagaaagtccgcggtaaaagaagagaagagagaagcccggaaagcaaagaaagagctcaaagaactgtataaatttgaaacacagaaggctcagaaagttgctgctgttacaggaccatcttccatacggctaatataattgtcctgtgtcatatgtaacgtgtttcctacatctgctgaactgttgaagccttgaagacagtagtccagagcaagataggcatgtcatatgtaactgctggtacctgagacatttcatgccttgcttaaggttgtcccattctctggactggaggcagtgaatgattctgcttggcattacctttttactgctgaatgtatgagttttgtgtt

SEQ ID NO: 31233 - protein, 524 aa, Triticum aestivum
KISPPKFPTRPFHAPTVSLSPPNPNPQTLTTAPTSSAAAAMAGAGVGGRKARNFATFRLFPRDGAADPNDRVFVRVDNNAYTIPGFGDDEDPSLSPTAAADQFPSSTSGPLPDHVRQQILELGLPDDGYNYLLHLRELRPSAVASSFVPSHTARPEQLPLDVKAYDASKVRVASGKVEEELDEGRTMCKVAAKTAPVRRVEKAVDPDVARLLDESEDEGLEEDFVIMANQAEGDDMEDESEEEGGGVFSDVENDEEFEDEEGEPKPRVPRLLDEQFDLLALEEYGASDDDDGAVRDGEHELPSEVIDELKLFHNQNVCVDEEYRTPADFVRGKLDSTTAEEVDESANVIQKCAEYAERYLNETAEDEEVLLVSESSDESEVWDCETIVSTYSNLDNHPGKIQTPGNPRNRLPKVFPGETATTKDIIKLHGKEKLPVDYLPQRKRKVEKEKKAKPTEASDAEYYFEKVVVQKETKDEKKARKSAVKEEKREARKAKKELKELYKFETQKAQKVAAVTGPSSIRLI

SEQ ID NO: 31234 - protein, 484 aa, Triticum aestivum
MAGAGVGGRKARNFATFRLFPRDGAADPNDRVFVRVDNNAYTIPGFGDDEDPSLSPTAAADQFPSSTSGPLPDHVRQQILELGLPDDGYNYLLHLRELRPSAVASSFVPSHTARPEQLPLDVKAYDASKVRVASGKVEEELDEGRTMCKVAAKTAPVRRVEKAVDPDVARLLDESEDEGLEEDFVIMANQAEGDDMEDESEEEGGGVFSDVENDEEFEDEEGEPKPRVPRLLDEQFDLLALEEYGASDDDDGAVRDGEHELPSEVIDELKLFHNQNVCVDEEYRTPADFVRGKLDSTTAEEVDESANVIQKCAEYAERYLNETAEDEEVLLVSESSDESEVWDCETIVSTYSNLDNHPGKIQTPGNPRNRLPKVFPGETATTKDIIKLHGKEKLPVDYLPQRKRKVEKEKKAKPTEASDAEYYFEKVVVQKETKDEKKARKSAVKEEKREARKAKKELKELYKFETQKAQKVAAVTGPSSIRLI

SEQ ID NO: 31235 - protein, 338 aa, Triticum aestivum
MCKVAAKTAPVRRVEKAVDPDVARLLDESEDEGLEEDFVIMANQAEGDDMEDESEEEGGGVFSDVENDEEFEDEEGEPKPRVPRLLDEQFDLLALEEYGASDDDDGAVRDGEHELPSEVIDELKLFHNQNVCVDEEYRTPADFVRGKLDSTTAEEVDESANVIQKCAEYAERYLNETAEDEEVLLVSESSDESEVWDCETIVSTYSNLDNHPGKIQTPGNPRNRLPKVFPGETATTKDIIKLHGKEKLPVDYLPQRKRKVEKEKKAKPTEASDAEYYFEKVVVQKETKDEKKARKSAVKEEKREARKAKKELKELYKFETQKAQKVAAVTGPSSIRLI

SEQ ID NO: 31236 - DNA, 1282 bp, Triticum aestivum
actctctgcaaagaaagttcacgtatgtcacgcgttgatgatattctgagaaactgcatgcagctggtggatttgaggctgaaagatttaagttgtcgccaacctgcttttcatatctttggtcctaactcaaagttaaagagtctgcaattggacaactacaacactgtgggtgtctacctgggtttggtgccttatcttgaaacatttgcttgtcgtggtcagccaactatactacactatggcttggtgcctcggcttaggcatgtgagtttgaacttcttgcaaactggagatgacggcaagaatgattcctctggtagcaacaggacatatcgactaagcaaattctttttaggggcgccgccaccgctagagtgccttgttctgcagttaagagggcgtcaggtaagtagcttttcctgaaatgatctctttcatattggtcatgacattgcatcagtaagacagtactaaattatcacttcatttatgcagatgtggatggaactaaccgccattcccgaccagctcagtcatctcaagaaactattcattgcaaacgtgccaatgaactgggatacattctggattctccacctacttgctgccgcacctgccttggagtcgctccatgttcattttgacaacaactcagagaaggcgggtgccacaggatcaccagatgtgcaagtggaacaccatcagcgctactatcacctgaaagaactcgtggtcatcggcttcggcggggcggcgtggcagacaggctttgtgaagcagatcatccaggcatcgccgatcctggagcgcgtccgcctgctggacgggcacgtcgtggaggacgaagatcgggagctcgtcggcctggacattgtgcgccgccgccgggagtggcacgagtgcgagagatcggaggtgctcgacgaactgacggacgggatcagttcgccgcatctcgagatagttctggaatgactttcggcagaagtgttgctgtgccggcggtggccttccgttctgtagggcttgcagctgtatgccatggcctaatgattatgtgttatgctggctctcaagatagatcaacatgtgtttgtatcgggtatcttgcgctttacttttgctcgattatccaaaggacggatgtagctagctgttgagatgattgattccgtggtgctcatggtgtggcttgactaggcaaaattaccacttgcacgcgcctaaaagatattttcctttcctttctgatagaagcaaaaagatctgcggcatcccc

SEQ ID NO: 31237 - protein, 161 aa, Triticum aestivum
MQMWMELTAIPDQLSHLKKLFIANVPMNWDTFWILHLLAAAPALESLHVHFDNNSEKAGATGSPDVQVEHHQRYYHLKELVVIGFGGAAWQTGFVKQIIQASPILERVRLLDGHVVEDEDRELVGLDIVRRRREWHECERSEVLDELTDGISSPHLEIVLE

SEQ ID NO: 31238 - protein, 159 aa, Triticum aestivum
MWMELTAIPDQLSHLKKLFIANVPMNWDTFWILHLLAAAPALESLHVHFDNNSEKAGATGSPDVQVEHHQRYYHLKELVVIGFGGAAWQTGFVKQIIQASPILERVRLLDGHVVEDEDRELVGLDIVRRRREWHECERSEVLDELTDGISSPHLEIVLE

SEQ ID NO: 31239 - protein, 157 aa, Triticum aestivum
MELTAIPDQLSHLKKLFIANVPMNWDTFWILHLLAAAPALESLHVHFDNNSEKAGATGSPDVQVEHHQRYYHLKELVVIGFGGAAWQTGFVKQIIQASPILERVRLLDGHVVEDEDRELVGLDIVRRRREWHECERSEVLDELTDGISSPHLEIVLE

SEQ ID NO: 31240 - DNA, 1701 bp, Triticum aestivum
atataaaagcccctgtctccgtctccggttagcaggagagagagagagaggagagaggacgggtggaggccaagaacgcagcacgactgcacagcaccagctgccgaccgaccgcgggcggagctgaccccccgacccgatcagatccctcgccgcccgccccctcagatctccccgcgcgcgcccctcccagatccagctccgagcacttggattttcaacaaagaggtcctgccggcggtggtccgcgtctggaagctcgtcggctgctgcttcttgcttccagtgctctgtggcgaaggcgaccggcggagatggggctggctggggagaagttccagctggggacggtgggggcgctcagcctctccgtcgtctcctcggtctccattgtcatctgcaacaaggcgctcatgagcgccctcggcttcatcttcgccaccacgttgacaagctggcatctcttggtgacattctgttcactccatgtggcattatgcatgaagctctttgagcacaaaccttttgacgcgaggaccgtcatggggttcggagtgctcaacggcatctcgattgggcttctcaatctgagtctgggtttcaactctgttggtttctatcagatgacaaagctggccattattccctgcactgttatattggagactcttttcttcaggaagaagttcagtcgctacatccagctctcccttagtgtgctcctttttggtgttggagttgcaactgtgactgatctgcagctcaatgctatgggatctgtgctgtctttactggcaatcgtcacaacctgtattgctcaaattatgaccaatacaattcaaaagaagttcaaagtatcttcaactcagctgctgtaccaatcatgcccataccaagcattgaccctgttcattgttggtccattcctcgatgggtttctgactaacaaaaatgtctttgcttttgcatacacacctcaagttctgttcttcatcgtgctgtcgtgtctgatatcagtctcggtgaacttcagcactttccttgtgattgggaagacatctcctgtaacttaccaagtccttggccatctaaagacatgcttggttcttgccttcggctatgtcttgctgcatgatccgtttagctggagaaatatacttggaatcctgattgcagtggttgggatgggactatattcatacttctgcacccgtgaagctccaaagcccactgaagcctctccacaagtcactcaggtgaaagaaggtgaatcagaccctttgatcgcagactccttgaacgccgccgagaacggggccgctgcagccaccgacgagcctctgaaggtccccatgtggagctccaagtacgcacgggcatgaacgctcctgccccgacctctgaaggtgcccatgtggagctccaagcgctcgcgggcatgaacgccgcttcggaccttggttcatggtattatatacataattattcagtttagtaggcagatagtagggctggaaggaagccaggccagccctgagtgtaatgaacgttccttgttccatttttgggcctttttttctttccccccttttttttccttctgttttggcttaccatgcatgcctgtggtgctgttgtaaaagtggatctcacaccaaatgactccaaatggcagatctacctttgttgaagctaagatac

SEQ ID NO: 31241 - protein, 355 aa, Triticum aestivum
MGLAGEKFQLGTVGALSLSVVSSVSIVICNKALMSALGFIFATTLTSWHLLVTFCSLHVALCMKLFEHKPFDARTVMGFGVLNGISIGLLNLSLGFNSVGFYQMTKLAIIPCTVILETLFFRKKFSRYIQLSLSVLLFGVGVATVTDLQLNAMGSVLSLLAIVTTCIAQIMTNTIQKKFKVSSTQLLYQSCPYQALTLFIVGPFLDGFLTNKNVFAFAYTPQVLFFIVLSCLISVSVNFSTFLVIGKTSPVTYQVLGHLKTCLVLAFGYVLLHDPFSWRNILGILIAVVGMGLYSYFCTREAPKPTEASPQVTQVKEGESDPLIADSLNAAENGAAAATDEPLKVPMWSSKYARA

SEQ ID NO: 31242 - protein, 322 aa, Triticum aestivum
MSALGFIFATTLTSWHLLVTFCSLHVALCMKLFEHKPFDARTVMGFGVLNGISIGLLNLSLGFNSVGFYQMTKLAIIPCTVILETLFFRKKFSRYIQLSLSVLLFGVGVATVTDLQLNAMGSVLSLLAIVTTCIAQIMTNTIQKKFKVSSTQLLYQSCPYQALTLFIVGPFLDGFLTNKNVFAFAYTPQVLFFIVLSCLISVSVNFSTFLVIGKTSPVTYQVLGHLKTCLVLAFGYVLLHDPFSWRNILGILIAVVGMGLYSYFCTREAPKPTEASPQVTQVKEGESDPLIADSLNAAENGAAAATDEPLKVPMWSSKYARA

SEQ ID NO: 31243 - protein, 293 aa, Triticum aestivum
MKLFEHKPFDARTVMGFGVLNGISIGLLNLSLGFNSVGFYQMTKLAIIPCTVILETLFFRKKFSRYIQLSLSVLLFGVGVATVTDLQLNAMGSVLSLLAIVTTCIAQIMTNTIQKKFKVSSTQLLYQSCPYQALTLFIVGPFLDGFLTNKNVFAFAYTPQVLFFIVLSCLISVSVNFSTFLVIGKTSPVTYQVLGHLKTCLVLAFGYVLLHDPFSWRNILGILIAVVGMGLYSYFCTREAPKPTEASPQVTQVKEGESDPLIADSLNAAENGAAAATDEPLKVPMWSSKYARA

SEQ ID NO: 31244 - DNA, 1050 bp, Triticum aestivum
gaaaccattaacaatccccaccatacacacccgcgaggctcaatcatcgcaccactggatcggcaggcaccgcagcaatggcggcagcgaccggaggcggcggcagcagtgaggaggcgctgacgctgctggggttctggacgagcccgttcgcgctgcgggcgcggttcgcgctgaacctcaagggcatcccctacgagtacgtggaggaggacctgttcggcgagcggggcaagagcccgctcctcgtcgcctccaacccggcccacggcgggaaggtgcccgtgctcatccacggcggccgccccgtcgccgagtcgctggtcatcctggagtacatcgacgaggcgttcccggagcgcctcccgcgcctcctgcccccgcccgacgacccgcacggccgcgccgccgcccggttctgggcggcctacgtcgaccagaagctgctcccgacgtgggccccgctctacggcgggaggacggccgaggagcgggcgggcgcggcgagggaggtcgtcgccgtgctggaggcgttcgagggggagctcggggacaggggcttcttcggcggggacggcgtggggctggtggacgtggcgctcggcgggttcctcgggtggctgcgcgcgtcgcaggccatgtgcggcgtgcggaccatcgaccccgccaggacgccgcggctggcggcgtgggcggagcggttcggcgcgctggacggcgtgagggagatcgtgccggacgcggcgccgctggtggagtacaacctcatgaagcgggctcgcctaggcctgccgtatcttccgccgcatcagtcgcagtaaaaaaccgctagtaaattccaaggcgtgtagctggatccatcgcgcgcaaaggaactgaactgaatttgaatctgatcccttaagccggtggattctttagttattctactgcagtagagtaacaagtctgtgttcttgtttggaactctgattttctgcgatggaccgattcaagaaatgtagccacagaactgccttctccaatggaaagaaaaaaagtagtaccatc

SEQ ID NO: 31245 - protein, 247 aa, Triticum aestivum
MAAATGGGGSSEEALTLLGFWTSPFALRARFALNLKGIPYEYVEEDLFGERGKSPLLVASNPAHGGKVPVLIHGGRPVAESLVILEYIDEAFPERLPRLLPPPDDPHGRAAARFWAAYVDQKLLPTWAPLYGGRTAEERAGAAREVVAVLEAFEGELGDRGFFGGDGVGLVDVALGGFLGWLRASQAMCGVRTIDPARTPRLAAWAERFGALDGVREIVPDAAPLVEYNLMKRARLGLPYLPPHQSQ

SEQ ID NO: 31246 - DNA, 640 bp, Triticum aestivum
ctgggtgagctagtcagtagttctccatggcggcggttgcggcgagggcgggcgcggcggcccggcggctgtgccacgcggcggcggcgcagcccccgcgcctgaagaagctcgcgctgcacccgcccaaatcggtagaggttcaatttgcagatggcagtacattccatctgtcagctgagtttctcagagtctacagcccagcagctgacagcaagatcagatcaatagctggcgagaaggttatatttgggcgccgacatgttggaattatgtcagccgaatcaataggaaactatggagtccggatactgtttgatgatttgcacaagactgggatcttcacttgggattacttgcaccatctgggttctaacaaattcagtctgtcacgaaattatatcaaaactttgaggaaacacggtcttagtcgggatcctcagagaagaaaatgatggtaagtatttgtgtgtcttaagcatgtaggtacgacggaactcaaatagggtttgcctgccatgtggatggatggagcttctacatgtgcacacaaaatctcttaattcagataacttattacatagtgtcagaaactgtgtttccatttagaatatgataatattctttacactgagttcac

SEQ ID NO: 31247 - protein, 142 aa, Triticum aestivum
MAAVAARAGAAARRLCHAAAAQPPRLKKLALHPPKSVEVQFADGSTFHLSAEFLRVYSPAADSKIRSIAGEKVIFGRRHVGIMSAESIGNYGVRILFDDLHKTGIFTWDYLHHLGSNKFSLSRNYIKTLRKHGLSRDPQRRK

SEQ ID NO: 31248 - DNA, 856 bp, Triticum aestivum
aaagcaagtcccctttcgcagtggttggcctcccgacccctatcttctcccactaatccccccattcccctcgccgccgccgccgccgtcgcctgccaaagatgaatgtcgacaagctgaagaagatggccggtgccgtgcgcaccggcggcaagggcagcgtgcgcaggaagaagaaggcagtgcacaagaccacgacaaccgatgacaagaggctccagagcaccttgaaaagagtaggagtgaacaccattcctggtattgaagaggtcaatattttcaaggatgacgttgtcatccaatttcagaacccgaaagtgcaagcatcaattgccgcaaacacatgggtagtcagtggaacaccacagacgaaaaagctgcaagatttactgccgacaattatcaaccaactgggcccggataacttggacaacctgcggaggcttgctgagcagttccagaagcagatgcctggtggtgaggctggcggcgccagcatcggtgctgcccaggacgatgacgacgatgtcccagagctcgtcccaggagagaccttcgaagaggccgcggaggagaagaaggaacccgaggcgaagaaggaacctgagccggaggagaagaaagagtcgtcgtaatcttgtcacgccattcattgttgtgaagggttccttgttggttcagggttgattggcatcttattactgtatatgccagagacatggtcctgtgagaactctggcccatctttcatttctagcgctcctccggttggttttgtctcggccgtgggttctgtccgaaccgacggcggaactgagttttacgacaattatcgtttaccattccaaagtgtttg

SEQ ID NO: 31249 - protein, 177 aa, Triticum aestivum; identical to SEQ ID NO: 29163

SEQ ID NO: 31250 - protein, 169 aa, Triticum aestivum; identical to SEQ ID NO: 29164

SEQ ID NO: 31251 - DNA, 1122 bp, Triticum aestivum
gaaatccccggcttaaacccacgccttcccttcctccccccgcctccgactgcgtccaagaaacccaatcccattcccacctgctgcggctgctccgggatcgaggcgcgcggcggcgatggcgatcgagaagaaggggatgtcggcgtacgaggcggagcgggagaggacggtggaggagaacaagcgcaagatggaggcgctcaacctgcgccacctctccgccgccgtcgccacctacgcccccaagaccccctcccccatgaagcacaagaggcgcaggatcatcgaggcggcgacccccgtcccgtcgccgcccaggaggtcccgccggctcgcccacctccccgaggtcaagtacgccgacgcctgcgcggaggtgggagaagatagtgagagagcgggaaggtggtctcctagaagacgaagtggcagcatctacttagcaggaggtggaggtggaccaatttccatgaaagctaggatggaggcagcaagcaaagcagaggagttagaatcacaacttgaccctgaatttccatccttcatgaagcggatgctacattcacatgtggtgcgagggttctggttgggtctcccaagccatttctgtgacacgtacctgccaaagaatgactgcactatcactttggtggatgagaaagatgaagagttcgagtccaaataccttgcctacaagaaggggctaagtggtggctgggctggttttgctctggatcatgtgattcgggatggagactcgacggtctttcagctgatcaagcctacaaccttcaaggtgcatatcatccgagctgctgttggtgatgatgacaacgaggaaatggagtgagcacaccgtgcagcttcactgctaagaactaacctatcagtggtagatggactagttaggagttgggtatggtttaagctttatctatctggatcgctggtgcggttatgcattttgttggtatgtccaccagtggcttacaagatggcaagtaggatttggggcgtggtgtaggcttttgtgtatcaggattacccgcgcagctatgtactaatatgttcccatgtccaccaatactgataatgagatcagatggcaagtaatcagcc

SEQ ID NO: 31252 - protein, 244 aa, Triticum aestivum
MAIEKKGMSAYEAERERTVEENKRKMEALNLRHLSAAVATYAPKTPSPMKHKRRRIIEAATPVPSPPRRSRRLAHLPEVKYADACAEVGEDSERAGRWSPRRRSGSIYLAGGGGGPISMKARMEAASKAEELESQLDPEFPSFMKRMLHSHVVRGFWLGLPSHFCDTYLPKNDCTITLVDEKDEEFESKYLAYKKGLSGGWAGFALDHVIRDGDSTVFQLIKPTTFKVHIIRAAVGDDDNEEME

SEQ ID NO: 31253 - protein, 237 aa, Triticum aestivum
MSAYEAERERTVEENKRKMEALNLRHLSAAVATYAPKTPSPMKHKRRRIIEAATPVPSPPRRSRRLAHLPEVKYADACAEVGEDSERAGRWSPRRRSGSIYLAGGGGGPISMKARMEAASKAEELESQLDPEFPSFMKRMLHSHVVRGFWLGLPSHFCDTYLPKNDCTITLVDEKDEEFESKYLAYKKGLSGGWAGFALDHVIRDGDSTVFQLIKPTTFKVHIIRAAVGDDDNEEME

SEQ ID NO: 31254 - protein, 219 aa, Triticum aestivum
MEALNLRHLSAAVATYAPKTPSPMKHKRRRIIEAATPVPSPPRRSRRLAHLPEVKYADACAEVGEDSERAGRWSPRRRSGSIYLAGGGGGPISMKARMEAASKAEELESQLDPEFPSFMKRMLHSHVVRGFWLGLPSHFCDTYLPKNDCTITLVDEKDEEFESKYLAYKKGLSGGWAGFALDHVIRDGDSTVFQLIKPTTFKVHIIRAAVGDDDNEEME

SEQ ID NO: 31255 - DNA, 887 bp, Triticum aestivum
atattcaggtctgttcttatcctcatttccccctctcctccaaatcttcctcggcaagactcctcgaactgtccaacacacgcgcaatcctcaaaccctagctcctccgatccaaacacctcctggtccctcggtccatccgccatggcatcgcccgccggtgacagccacctcttcgccggcgtccacttcctcctcatcggtttcgactgcgtctccatgtcccagtaccggtcgaagttggtgcagagcggcggcaccgacgccatgcaatttggcggcggctggacccacatcgtcgtgcgcggccttgtcaacgttgacccggtctgcgcggtggcgcgggcgcaagggaataaggttgtcagcgagatgtgggtggatgatagcttggatcagggttgccgatgctgataaagttatttattggccagccagagatttgaagggaatacctggtagtggctcactgcagatttgcttgacggggtaccaaatgaaggaccgcaaagatataatgttaactgcttgccatttgtatcctcatatctcctagtcaaaactctgaaacatggcaacctttagttaattcttcaaacataacatatatagtgaagttttggtcacattgtgcagtgattttctttgacttttataatttccattctaaacctcccttttgccttcctaccattatggttgtttatcaattgcagaccaatttaagtgaaagtttatagagcacgtaacactgagcgcatgtgtttcagaagtgaatactgtcctctttccccttcgtcgggtcagctcagccccaaagaactgcatcccacttatgagtaactatagtaatgcacgcttaagtgaatggaaatgctacttcatct

SEQ ID NO: 31256 - protein, 184 aa, Triticum aestivum
YSGLFLSSFPPLLQIFLGKTPRTVQHTRNPQTLAPPIQTPPGPSVHPPWHRPPVTATSSPASTSSSSVSTASPCPSTGRSWCRAAAPTPCNLAAAGPTSSCAALSTLTRSARWRGRKGIRLSARCGWMIAWIRVADADKVIYWPARDLKGIPGSGSLQICLTGYQMKDRKDIMLTACHLYPHIS

SEQ ID NO: 31257 - protein, 137 aa, Triticum aestivum
IFRSVLILISPSPPNLPRQDSSNCPTHAQSSNPSSSDPNTSWSLGPSAMASPAGDSHLFAGVHFLLIGFDCVSMSQYRSKLVQSGGTDAMQFGGGWTHIVVRGLVNVDPVCAVARAQGNKVVSEMWVDDSLDQGCRC

SEQ ID NO: 31258 - protein, 89 aa, Triticum aestivum
MASPAGDSHLFAGVHFLLIGFDCVSMSQYRSKLVQSGGTDAMQFGGGWTHIVVRGLVNVDPVCAVARAQGNKVVSEMWVDDSLDQGCRC

SEQ ID NO: 31259 - DNA, 1475 bp, Triticum aestivum
attcttttgttgctgccaccgcaccgctggtcatcgatcacgacttgcgtggcgaccaaagcagcagccaccaacatctgtgcataaatgcacacacgtccgtacttgagttgcctctcagcagccagagaaatagagccctgtgctagagctattgccaggagaagagagctcagctcggtagtgatcatcggcgatatggcgacgaggaggaagacggcgtgcgtcaccggcggcagcgggtacatcgcgtcggcgctggtgaagatgctgctggagaagggatacgccgtcaagaccaccgtcagaaaccccgatgacgcggagaagaacgcgcatctcaaggccttggcagcgctcggctccttggaggtcttccgcgccgatctgaacgaggagggcagcttcgaccacgccgtcgccggctgcgactacgccttcctcgtcgccgctccggtgagcctcatgccagagaaccctgagaaagacgtgatcgagccggccgtccacgggaccctgaacgtgatgaagtcgtgcgtgagagcggggacggtgaagcgagtggtcctcacatcgtcggtggcgggggtgtccagccggccgctggaaggcgacggccatgtccttgacgaggaatcctggtccgacgtggagttcctcagatcaacaaagaccggtccctgggcgtactccgtctcgaaggtgcttgtggagaaggcggcgatggcgttcgcggaggacaagggcatcagcctggtcaccgtgtgcccggccgtcacggtgggcgaggcgccggcggcgaacgacctcaccagcgtcagcatcatcctctccctgctgtccggggatgatgcgtatgccggcgccctggagcacatcgagagggcgacgggctcgatcccgattctgcacatcgaggacctctgccgagcggagatgttcgtggccgaggaggaggccgcgtcggggcggtacatcgtctgcggcctcaaccccaccgccgtcgagattgcccgcttcttggctgccaactacccgcagtacaaggtcaatacagataggttcagagatctccctgagaagccgagagtctgcatttcgtcggcgaagctcgtcaaggaagggtttgagtacaagtacaagaacctggacggaatatatggcagcgtcgtcgagtatggaagggccttgggaatccttccctactaagaagtatgatcgatcttagaatcagacgatgcgcttggaagcaaaataagccttttagtctcctgaagtacacaaatgatgaaatgtgggtgttcagttcatatgaaaaatgtattataaaatgtactgtagtacttgtatggaaagtgatagttgtgtctgatgagagcatgctcagtcatggtgaaaaaagccatagtcgtgcacgtagataaaccgccattaaaatctcccccaacgcagaagaagccttcttgttttcctcc

SEQ ID NO: 31260 - protein, 373 aa, Triticum aestivum
MHTRPYLSCLSAAREIEPCARAIARRRELSSVVIIGDMATRRKTACVTGGSGYIASALVKMLLEKGYAVKTTVRNPDDAEKNAHLKALAALGSLEVFRADLNEEGSFDHAVAGCDYAFLVAAPVSLMPENPEKDVIEPAVHGTLNVMKSCVRAGTVKRVVLTSSVAGVSSRPLEGDGHVLDEESWSDVEFLRSTKTGPWAYSVSKVLVEKAAMAFAEDKGISLVTVCPAVTVGEAPAANDLTSVSIILSLLSGDDAYAGALEHIERATGSIPILHIEDLCRAEMFVAEEEAASGRYIVCGLNPTAVEIARFLAANYPQYKVNTDRFRDLPEKPRVCISSAKLVKEGFEYKYKNLDGIYGSVVEYGRALGILPY

SEQ ID NO: 31261 - protein, 336 aa, Triticum aestivum
MATRRKTACVTGGSGYIASALVKMLLEKGYAVKTTVRNPDDAEKNAHLKALAALGSLEVFRADLNEEGSFDHAVAGCDYAFLVAAPVSLMPENPEKDVIEPAVHGTLNVMKSCVRAGTVKRVVLTSSVAGVSSRPLEGDGHVLDEESWSDVEFLRSTKTGPWAYSVSKVLVEKAAMAFAEDKGISLVTVCPAVTVGEAPAANDLTSVSIILSLLSGDDAYAGALEHIERATGSIPILHIEDLCRAEMFVAEEEAASGRYIVCGLNPTAVEIARFLAANYPQYKVNTDRFRDLPEKPRVCISSAKLVKEGFEYKYKNLDGIYGSVVEYGRALGILPY

SEQ ID NO: 31262 - protein, 313 aa, Triticum aestivum
MLLEKGYAVKTTVRNPDDAEKNAHLKALAALGSLEVFRADLNEEGSFDHAVAGCDYAFLVAAPVSLMPENPEKDVIEPAVHGTLNVMKSCVRAGTVKRVVLTSSVAGVSSRPLEGDGHVLDEESWSDVEFLRSTKTGPWAYSVSKVLVEKAAMAFAEDKGISLVTVCPAVTVGEAPAANDLTSVSIILSLLSGDDAYAGALEHIERATGSIPILHIEDLCRAEMFVAEEEAASGRYIVCGLNPTAVEIARFLAANYPQYKVNTDRFRDLPEKPRVCISSAKLVKEGFEYKYKNLDGIYGSVVEYGRALGILPY

SEQ ID NO: 31263 - DNA, 1091 bp, Triticum aestivum
ttggctacacatctttataagtggccggcatgcactccacatagcagccacgactcagtagatggcggcatcggcggcccacgtcgcggccctggccgccatactcctcttcatcccttccctcctcgccactgtcgccgcgcagcagggcaaggccaaggccttctgcatcagccagttcgccatcgccagtcaggcttgctccatcctgccgcccagccccccggaggacgaccatcaccaccaccacgacgacgatgatgatgacgacgacgacgatgacgacgacgacgacgacgacgagcaccatggcggcgacggtgaccgccgcctccgtggacgccatggccacgcggcggtcatcaacatctcgtcccttggcctgatggcggcaaacaacgacagcagcgaagttcacgttgcaagaaacggcaccggtcaccatggcggcaaccacacccgccgcgggcgcgggcgcgggcgccttcgtgctactggacgcggccggcgtgtgcgtgtgcgcgacggtgatgatgacccggaccatgaccacgaccaccaggaggaccccgaccatgatgatgaccatgaggaggactccgaccccgacgacgcccatgacgacgaacctgatgacgatgacgacgacgacgacgacgaccacgagcacaatgacgacgaccacgagcaccaccacgacgaggagcttcgggcgtaccgcgactgctgccggtggctgcaggaggtgcagaaggactgtgtgtgcgaggcgctcctgcggctgcccccgttcctcgtgaaaccacagcacaagtacgtcgtccgggtggggcggacgtgccggatcgtctaccgctgcggcggcgtgtagccaactggccggttcacacgtttggttaactgcactcgttgtccctgcttcctctctacgattacgtgcctgttttgctcttcagtctacgtagatggataattaggtaggcagcacgtatggatcgggtgtaatttttctactaagtattgtcctcaaagtttttcgatgtgcttccattcggatagactaattgataataatactacatgttgtcccg

SEQ ID NO: 31264 - protein, 269 aa, Triticum aestivum
MAASAAHVAALAAILLFIPSLLATVAAQQGKAKAFCISQFAIASQACSILPPSPPEDDHHHHHDDDDDDDDDDDDDDDDDEHHGGDGDRRLRGRHGHAAVINISSLGLMAANNDSSEVHVARNGTGHHGGNHTRRGRGRGRLRATGRGRRVRVRDGDDDPDHDHDHQEDPDHDDDHEEDSDPDDAHDDEPDDDDDDDDDDHEHNDDDHEHHHDEELRAYRDCCRWLQEVQKDCVCEALLRLPPFLVKPQHKYVVRVGRTCRIVYRCGGV

SEQ ID NO: 31265 - protein, 161 aa, Triticum aestivum
MAANNDSSEVHVARNGTGHHGGNHTRRGRGRGRLRATGRGRRVRVRDGDDDPDHDHDHQEDPDHDDDHEEDSDPDDAHDDEPDDDDDDDDDDHEHNDDDHEHHHDEELRAYRDCCRWLQEVQKDCVCEALLRLPPFLVKPQHKYVVRVGRTCRIVYRCGGV

SEQ ID NO: 31266 - DNA, 761 bp, Triticum aestivum
aaaacatagctcctctcctcctgtgcgcgctcaccgctgcacagtatccacccataagagcatataggcgcagtgcaacaggatcatcagtacgggttgcactagcttattaggctagcggctagcgagggagtaggcaggcactgcgcaggagctgatccatggcgagcacggtggagtcgccgacgagctcgtgcgtgtcgtcggacacggaggaggaggccgcggcggtgacgaagccgatggtggtggtggggtgcccgcagtgcctcatgtacgtgatgctgtcgggggcggcggaggagcagcccaggtgcccccggtgcaagagccccgtgctgctgcacttcctccacggcgctgccgccgccgccgccgccagcaccaacaggcagcagcccagcaagagctagccagccaacatgctgctgcttggtcgctgcatgctgcttgctgatcagccgctagcttctcctgccatcgatctccaccatgttctaactcgtgtattctgctgcactatgtagctcttcttttttcccttttcgtcgacgatagtaatttccatgcgagtaactctcaagaagacaagaacgcaaatcttttacagcctggtgcaattggctcggttttactctcgcttagcagtggctgtccttctccaacaacctttagatgtatgcacgtgttctgcaccgtgaaggtcgatgtctgttttaatcccctccttaatttcggtttgaataagatgagatttcacg

SEQ ID NO: 31267 - protein, 83 aa, Triticum aestivum
MASTVESPTSSCVSSDTEEEAAAVTKPMVVVGCPQCLMYVMLSGAAEEQPRCPRCKSPVLLHFLHGAAAAAAASTNRQQPSKS

SEQ ID NO: 31268 - protein, 56 aa, Triticum aestivum
MVVVGCPQCLMYVMLSGAAEEQPRCPRCKSPVLLHFLHGAAAAAAASTNRQQPSKS

SEQ ID NO: 31269 - protein, 46 aa, Triticum aestivum
MYVMLSGAAEEQPRCPRCKSPVLLHFLHGAAAAAAASTNRQQPSKS

SEQ ID NO: 31270 - DNA, 569 bp, Triticum aestivum
aatgaatcttcatctccgatgttttctctcgaaaatggagcgcggatcgcaggagcaaggagctggtcgagtgtagtgaacaaacaatcaacgcggcacatttggaagttgtgagagctgtgaatggcaccggtcttgtcatactaatgagcaggagcaccggccacattactcttcatgccactctgagcagtcggttgctacttgagattgatttccatgttgaaggaaagggagaccagattgagttcctgtatatgcaagaagaaggggcattgtcgtggttgttgctgaaggtgttggtcaggagctgattaccgggactgatgacaagaacgaagagcaagatgagtatgtcaacatgttgttccttaacgttggccttcttctataaagttcacatgcaactctcctccatggttagaaaaaactaatttaaacgttttgtttctttgatggttactcatttctcttaccattgttgtatcaaaacaattttattttcgctgatggccgcttgggctcattttcgaagagaatgagatgtggaataaactactctaaaaaac

SEQ ID NO: 31271 - protein, 55 aa, Triticum aestivum
MSRSTGHITLHATLSSRLLLEIDFHVEGKGDQIEFLYMQEEGALSWLLLKVLVRS

SEQ ID NO: 31272 - protein, 37 aa, Triticum aestivum
NESSSPMFSLENGARIAGARSWSSVVNKQSTRHIWKL

SEQ ID NO: 31273 - protein, 35 aa, Triticum aestivum
MTRTKSKMSMSTCCSLTLAFFYKVHMQLSSMVRKN

SEQ ID NO: 31274 - DNA, 403 bp, Triticum aestivum
agcaaagccatggatctcaacataacagtgacgggtctggagagcggcatcaagagctccggctcgaagaagacggtgctgacatccgccgcggcgctcgacgagaactccttcgagcagccagaaaaggtggcgccggtgtcgagcccggtggccgacgccaagcagcaaatgggcgtgtcagtgagcccttactccctcacatcgttcgatctcctgctggagcccagcaaacactcaatcatatgaagaagaaactagctcgagtggaaggaaatcatagagatagttaccacgtatattgtagattgtactgtattattctctgtgcctggattgtatgtctgaaagaaacattacgtggccgtctctctgaagcttattacagcaaacattgtgctct

SEQ ID NO: 31275 - protein, 133 aa, Triticum aestivum
QSHGSQHNSDGSGERHQELRLEEDGADIRRGARRELLRAARKGGAGVEPGGRRQAANGRVSEPLLPHIVRSPAGAQQTLNHMKKKLARVEGNHRDSYHVYCRLYCIILCAWIVCLKETLRGRLSEAYYSKHCA

SEQ ID NO: 31276 - protein, 82 aa, Triticum aestivum
SKAMDLNITVTGLESGIKSSGSKKTVLTSAAALDENSFEQPEKVAPVSSPVADAKQQMGVSVSPYSLTSFDLLLEPSKHSII

SEQ ID NO: 31277 - protein, 79 aa, Triticum aestivum
MDLNITVTGLESGIKSSGSKKTVLTSAAALDENSFEQPEKVAPVSSPVADAKQQMGVSVSPYSLTSFDLLLEPSKHSII

SEQ ID NO: 31278 - DNA, 1667 bp, Triticum aestivum
ctcgcctctcacccccacacagagctgccaaaacattctgcaacaagcagagagagcgagacaaaacatgtcgtggactactcgtgtccctctcctcgtcggcgccacctccatctgcttcctctccgccgccgcggcgtccaactacacctcgttacgccccggccaccacctcctgacccagctctcgcaatggcgggagcactacctgtccgacgcttcctcgcacgccgccggcaccgggggcgtgcgccggcacaccgtcctcgcgtgggtcctggccttcctggccgcgtccgtgtcgagcgccggcggcgtcgggggcgggtcgctgttcctgcccatcctgaacctggtggcggggctgaccctgaagcgcgccaccacctactcctccttcatggtcaccggcggcgccgcgtcgaacgtgctctacaacctctggcgcgcgcggggccggccggcgctgatcgactacgacatcgcactgctgttccagccgtgcctgctcctgggcgtcagcgtcggggtggtgtgcaacgtcatgttcccggagtggctcatcacggcgctcttctcgctgttcctcgccttctgcaccgccaagacgtgccgcgccggggccaagatctggcggtccgagagcgccggcgcccccgccaccgccaccgccgcgcgtcacgaccacaaggagcccctgcttctcggcggcctcccgcagcccgtccaggacgacgggggccaagcagctcgcaatggcggctctggcgccggcgccggcgctgggttcccgtggaaggacgtggcggtgctcctggtggtgtggctctgcttcttcctgctccacgtcttcatcggagataagcacgggaagggagtgatcagcataaagccctgcggagtggcatactggcttgccaccgtgtcccaggtgcctttcgccgtggctttcacagcctatatcatatacgcaaagaggaagaagcaggttgcacatcaccacgaagatggcaaggcacattcttctgtgcacacgaagacggagaccttgccggcgctcgcgctcccgctggccgctttcgtgaccggatctctgagcggcctcttcggcatcggcggagggctgcttctcaaccctgtcctccttcagatcgggatacccccgcagacggcggcggcgacgtcttcgttcatggtgctgttctgcgcgtccatgtcgatggtccagttcatcctgctgggcatggacgggatcggggaggcctcggtctacgcggggatatgcttcgtcgcctcgatcgccggggtggtcttgatcgagcgggtcgtcaggaagtccgggcgggtgtcgatgatcgtcttcttggtcaccgccatcatggcgctcagcactgtgatcgtcacctgcttcggagccctagatgtctggacgcaatacactggcggagcgtacatggggttcaagctaccttgtacgtagtttacccatgcatatatgagagcatgggtgagaggtgcttagttactaattgcttcttctggcttggcgtttatgtcttttctgaagaaaggttttgttcgtggtgttgctatggctgtttatgggctatatataattttgtgtgaataaatatatgcttctggaatgaagcttacatggcactgcg

SEQ ID NO: 31279 - protein, 492 aa, Triticum aestivum
SPLTPTQSCQNILQQAERARQNMSWTTRVPLLVGATSICFLSAAAASNYTSLRPGHHLLTQLSQWREHYLSDASSHAAGTGGVRRHTVLAWVLAFLAASVSSAGGVGGGSLFLPILNLVAGLTLKRATTYSSFMVTGGAASNVLYNLWRARGRPALIDYDIALLFQPCLLLGVSVGVVCNVMFPEWLITALFSLFLAFCTAKTCRAGAKIWRSESAGAPATATAARHDHKEPLLLGGLPQPVQDDGGQAARNGGSGAGAGAGFPWKDVAVLLVVWLCFFLLHVFIGDKHGKGVISIKPCGVAYWLATVSQVPFAVAFTAYIIYAKRKKQVAHHHEDGKAHSSVHTKTETLPALALPLAAFVTGSLSGLFGIGGGLLLNPVLLQIGIPPQTAAATSSFMVLFCASMSMVQFILLGMDGIGEASVYAGICFVASIAGVVLIERVVRKSGRVSMIVFLVTAIMALSTVIVTCFGALDVWTQYTGGAYMGFKLPCT

SEQ ID NO: 31280 - protein, 470 aa, Triticum aestivum
MSWTTRVPLLVGATSICFLSAAAASNYTSLRPGHHLLTQLSQWREHYLSDASSHAAGTGGVRRHTVLAWVLAFLAASVSSAGGVGGGSLFLPILNLVAGLTLKRATTYSSFMVTGGAASNVLYNLWRARGRPALIDYDIALLFQPCLLLGVSVGVVCNVMFPEWLITALFSLFLAFCTAKTCRAGAKIWRSESAGAPATATAARHDHKEPLLLGGLPQPVQDDGGQAARNGGSGAGAGAGFPWKDVAVLLVVWLCFFLLHVFIGDKHGKGVISIKPCGVAYWLATVSQVPFAVAFTAYIIYAKRKKQVAHHHEDGKAHSSVHTKTETLPALALPLAAFVTGSLSGLFGIGGGLLLNPVLLQIGIPPQTAAATSSFMVLFCASMSMVQFILLGMDGIGEASVYAGICFVASIAGVVLIERVVRKSGRVSMIVFLVTAIMALSTVIVTCFGALDVWTQYTGGAYMGFKLPCT

SEQ ID NO: 31281 - protein, 359 aa, Triticum aestivum
MVTGGAASNVLYNLWRARGRPALIDYDIALLFQPCLLLGVSVGVVCNVMFPEWLITALFSLFLAFCTAKTCRAGAKIWRSESAGAPATATAARHDHKEPLLLGGLPQPVQDDGGQAARNGGSGAGAGAGFPWKDVAVLLVVWLCFFLLHVFIGDKHGKGVISIKPCGVAYWLATVSQVPFAVAFTAYIIYAKRKKQVAHHHEDGKAHSSVHTKTETLPALALPLAAFVTGSLSGLFGIGGGLLLNPVLLQIGIPPQTAAATSSFMVLFCASMSMVQFILLGMDGIGEASVYAGICFVASIAGVVLIERVVRKSGRVSMIVFLVTAIMALSTVIVTCFGALDVWTQYTGGAYMGFKLPCT

SEQ ID NO: 31282 - DNA, 954 bp, Triticum aestivum
agcattttgagaaaataaaattggacagagaaccatcaacccaaaaattgaggagaagcagcaggtgctccgcctctgccgccgccggtgacccgccgtagcagccgctcgccccgccgcccctgaccctcttcaatctactgttccattccaccccgacccaaaccaaacacacactaaacaccggcgccgacctctcctaggtttcgtcccatctcaccggagatggccggggcagcgtcgtcggtagcgcccgttctcgtcatctgcttgctttctcttgctctcttcctccacaggtgccggagctgtgaggctgtggagagagagaggacgttggcaatgatcaagccggatggtttgtctggcaactacaaggaaaaaatcaaggaggccatcttggggtctggatttgatatcatagaagaggcagttgtccatctggatgcagagagggcatcactcttctatgctgaacatgccgatagaagcttcttcaacagcctagtgaagtacatgacgagtggtccagtttgtgctatggttctggaaagccctgatgccatttcacgctggcgaaatttgatagggccaactgatgcaagaaaggctaaaacttcacaccctgacagcattagagcaatgtgcggcttggactctgagaaaaattgtgtgcatggttcagattcaccgcaatctgcagccagagagatttcgtttttcttcagagatgataaatctgaagcgctggaacatgacgagctgtagacaattggcatgtatcctcaaaaggcagataatttttgaagtttgatttgccccttccagctattagttgatgaaaatgtctgtacatcacatatgttgatctgacatcaaacttctccagttgatagcttcatcccttggttgccaaaggctgtgacggtgaaatcaccacagcgaaattttgtc

SEQ ID NO: 31283 - protein, 180 aa, Triticum aestivum
MAGAASSVAPVLVICLLSLALFLHRCRSCEAVERERTLAMIKPDGLSGNYKEKIKEAILGSGFDIIEEAVVHLDAERASLFYAEHADRSFFNSLVKYMTSGPVCAMVLESPDAISRWRNLIGPTDARKAKTSHPDSIRAMCGLDSEKNCVHGSDSPQSAAREISFFFRDDKSEALEHDEL

SEQ ID NO: 31284 - protein, 141 aa, Triticum aestivum
MIKPDGLSGNYKEKIKEAILGSGFDIIEEAVVHLDAERASLFYAEHADRSFFNSLVKYMTSGPVCAMVLESPDAISRWRNLIGPTDARKAKTSHPDSIRAMCGLDSEKNCVHGSDSPQSAAREISFFFRDDKSEALEHDEL

SEQ ID NO: 31285 - DNA, 748 bp, Triticum aestivum
acatcgattccttcctgccactccttcctcgcatgccccctgacttcctgcaccgagactgctaagctagctctgtaatctcgtcggcctctttctctgccccctcggccggcttgccacccgataggtcctgatgtcgggcaccgtctgctccatgtgcggcgacgtcggtttccaggacaagctcttcggctgtgcccgctgccgctgccgcttccagcactcctattgcacgaactactacggcgacgcggccccggccgacgcgggcgccggcgtctgcgactggtgcctcagcgacgaccccctcgtgaagaacaagcgcccttcggcgccgccggccatgcagcaccgcggtcacgcgactgggatgggctgcggcaaagtcaaggtgaccggcggcggcgagcaggagggcggccggagagtggccaaggcggccgtccgcaggtacaagctcctcaaagacgtcctgtgctagctagctggtgcatgcatggtcctgggtcaccgtactcgtttccttagatcgggacctcgtcatcatgtgtactaaaaaacgatgctgtttaattaggtagtcgatagtcgttgtacctagctagctggtggggttctgcttccatatcgatccttgcgtgcaaatgtctgcatgtcacaatgagatctacttccgcatgtaaatatgtactgctactctttatctctgtcatcaactgcgtgctgtcgtgtgtggtcaggacttttg

SEQ ID NO: 31286 - protein, 115 aa, Triticum aestivum
MSGTVCSMCGDVGFQDKLFGCARCRCRFQHSYCTNYYGDAAPADAGAGVCDWCLSDDPLVKNKRPSAPPAMQHRGHATGMGCGKVKVTGGGEQEGGRRVAKAAVRRYKLLKDVLC

SEQ ID NO: 31287 - protein, 108 aa, Triticum aestivum
MCGDVGFQDKLFGCARCRCRFQHSYCTNYYGDAAPADAGAGVCDWCLSDDPLVKNKRPSAPPAMQHRGHATGMGCGKVKVTGGGEQEGGRRVAKAAVRRYKLLKDVLC

SEQ ID NO: 31288 - DNA, 595 bp, Triticum aestivum
aatcacaatctcaaacctcaaaccctaaaaaaataaaaaagagctacgtagaaagagacagagagaagaatgggtcgccaaaacgttattgtagtttttggcctcgtgttcttggccgtccttggcctcgccgcagctgcctcctctccgtctccttcagcgtcaccttccaaagctccatctacttccacacctgaggttgaatctccagtgtccgaggacaccattggaaccaccgacgacgatgtagctgcttctcctggtgatgatgacgtagctgtggctggtcctctaggaagtgactcgtcctacggtagcaatggaccttcaggctctgccgattctgctgacagcggcgcggcggctcttggagtttctgcggtcgttgcgggtgttacatccatcgtcggttctttcttgtttttctgaggcgtgtattttcatgagaatatcatttttgagtaaagactatttatatatatggatattgtgatgatcatgttgtaatttgtttctccttggttatgagaaccgatgtccttgaaataagctgaaaataaaactttccttagcaatataaaataaagaattacgg

SEQ ID NO: 31289 - protein, 119 aa, Triticum aestivum
MGRQNVIVVFGLVFLAVLGLAAAASSPSPSASPSKAPSTSTPEVESPVSEDTIGTTDDDVAASPGDDDVAVAGPLGSDSSYGSNGPSGSADSADSGAAALGVSAVVAGVTSIVGSFLFF

SEQ ID NO: 31290 - protein, 64 aa, Triticum aestivum
SQSQTSNPKKIKKSYVERDREKNGSPKRYCSFWPRVLGRPWPRRSCLLSVSFSVTFQSSIYFHT

SEQ ID NO: 31291 - DNA, 1877 bp, Triticum aestivum
tccaattcgagatagaagcgcgggatcccctccccgcgcgccctattctgtgtggacagatccattgagaggcgcccttgattcctggctgttgtatcatggggttgctagctctgaagatgctcatgtctaggcggcgggatagcaagcatctttgcggccagattcaagcccgtaatagattggttacttcagtggttaaaagaaagatctcttcatgccaacacaataacaatcaaggttgcaagagagtggcattttcaggggcagaccttccagaggacatctggcgccatatacattccctactgccgctgcgagatgctgcccgtgttgcctgcgtatctcatgcatttttacgttcctggaaatgccatcccaacctctccttcactaggaaagcactgggcctgaatagaattccacgtcaaagtgatgtaattgcaagggatctcactatgaaagtcgaccacattctcaaaaaacactcaggcaaaggagttaagaaattcaggatcgaattacacatgccagttgatccctgctatcttaatagctggcttcagattgctgctgaactacgggttgaggaactcgccgttgttctaccttcaacctgcaatgcaaatgactacgatttcccttgtgcactttttgttgatgatgggtgtagaaacgcaatagagcatctctgccttggcggttgtgccttccatcccacagctggatttggttacttgagaaagctgcggctgttttgggtgcatattacggtggatgaattagaatgccttatttccaaatctccagctttggagcacttggcactcaagtattgctatacgatcacttacctgaagatacctagcctgctacagcatctcagctacctgatggtagctgcatgcgctaatctgcagacaatagagtgtaaagctccaaatctctccactttttacttcagtggtcgacaagttgaacttctgtttggatgttcagttcaagtgaagaccatggaaatgcgttgttctactcagtgtaacaccatttataatgcttgtgccaacctgccatccattgtgccaaatattgaaactctcagcatatcttctgttagtgaggtggtcaatataccaatcgtgcctgtaaaattcctccacctcaagtatctgtctatttctcttgaaggaaatggggctttttccccagactatgattacttttctctggtttctttgctggatgcttgtcctgtcttggaaactttcaacttgtttgtgtcacaggatcgcatgaaacacgattcggttcttggagacccgtcgtcacgtcttaggcagatgcctgaataccgccacgacaacattaagaatgtgaggattattgggttttgctctgcgaagagcatggtcgagctggcatgccatattctcgagaatgcaacatcactcgagtgccttactttggacacgatacgtgctttcagtattgacagacacattcacaaaactggtgaatgtggccacataggcaggcatatgatcagagaagcacgtaaggcgctcttggctgtcaaaagatatatcgtgggaatagttccctccacggtcaagttaaatgtcttgcagccttgcaagctatgccatgctttggctgcttagatgtggcaatatcataaatttgtaaattacattgttgactgaacactgttgcatgagttgccacttgcagcaggaatgtccaaacgggtcacttaaacaccagcgtagaagtatagggacaagcaattatggtatttgatatataaaagaagatatcaggaactatttagtattgtagctgttgatatattttcttataaaattcggtcaggattt

SEQ ID NO: 31292 - protein, 520 aa, Triticum aestivum
MGLLALKMLMSRRRDSKHLCGQIQARNRLVTSVVKRKISSCQHNNNQGCKRVAFSGADLPEDIWRHIHSLLPLRDAARVACVSHAFLRSWKCHPNLSFTRKALGLNRIPRQSDVIARDLTMKVDHILKKHSGKGVKKFRIELHMPVDPCYLNSWLQIAAELRVEELAVVLPSTCNANDYDFPCALFVDDGCRNAIEHLCLGGCAFHPTAGFGYLRKLRLFWVHITVDELECLISKSPALEHLALKYCYTITYLKIPSLLQHLSYLMVAACANLQTIECKAPNLSTFYFSGRQVELLFGCSVQVKTMEMRCSTQCNTIYNACANLPSIVPNIETLSISSVSEVVNIPIVPVKFLHLKYLSISLEGNGAFSPDYDYFSLVSLLDACPVLETFNLFVSQDRMKHDSVLGDPSSRLRQMPEYRHDNIKNVRIIGFCSAKSMVELACHILENATSLECLTLDTIRAFSIDRHIHKTGECGHIGRHMIREARKALLAVKRYIVGIVPSTVKLNVLQPCKLCHALAA

SEQ ID NO: 31293 - protein, 513 aa, Triticum aestivum
MLMSRRRDSKHLCGQIQARNRLVTSVVKRKISSCQHNNNQGCKRVAFSGADLPEDIWRHIHSLLPLRDAARVACVSHAFLRSWKCHPNLSFTRKALGLNRIPRQSDVIARDLTMKVDHILKKHSGKGVKKFRIELHMPVDPCYLNSWLQIAAELRVEELAVVLPSTCNANDYDFPCALFVDDGCRNAIEHLCLGGCAFHPTAGFGYLRKLRLFWVHITVDELECLISKSPALEHLALKYCYTITYLKIPSLLQHLSYLMVAACANLQTIECKAPNLSTFYFSGRQVELLFGCSVQVKTMEMRCSTQCNTIYNACANLPSIVPNIETLSISSVSEVVNIPIVPVKFLHLKYLSISLEGNGAFSPDYDYFSLVSLLDACPVLETFNLFVSQDRMKHDSVLGDPSSRLRQMPEYRHDNIKNVRIIGFCSAKSMVELACHILENATSLECLTLDTIRAFSIDRHIHKTGECGHIGRHMIREARKALLAVKRYIVGIVPSTVKLNVLQPCKLCHALAA

SEQ ID NO: 31294 - protein, 511 aa, Triticum aestivum
MSRRRDSKHLCGQIQARNRLVTSVVKRKISSCQHNNNQGCKRVAFSGADLPEDIWRHIHSLLPLRDAARVACVSHAFLRSWKCHPNLSFTRKALGLNRIPRQSDVIARDLTMKVDHILKKHSGKGVKKFRIELHMPVDPCYLNSWLQIAAELRVEELAVVLPSTCNANDYDFPCALFVDDGCRNAIEHLCLGGCAFHPTAGFGYLRKLRLFWVHITVDELECLISKSPALEHLALKYCYTITYLKIPSLLQHLSYLMVAACANLQTIECKAPNLSTFYFSGRQVELLFGCSVQVKTMEMRCSTQCNTIYNACANLPSIVPNIETLSISSVSEVVNIPIVPVKFLHLKYLSISLEGNGAFSPDYDYFSLVSLLDACPVLETFNLFVSQDRMKHDSVLGDPSSRLRQMPEYRHDNIKNVRIIGFCSAKSMVELACHILENATSLECLTLDTIRAFSIDRHIHKTGECGHIGRHMIREARKALLAVKRYIVGIVPSTVKLNVLQPCKLCHALAA

SEQ ID NO: 31295 - DNA, 1297 bp, Triticum aestivum
attaatttctttcctccagtcttctctgacctccctctcccccccaccctgcgcaagtgcacagtgggtcagtgccgcggcgagctccctcccccagcctcggcctccccgcccgatctggtcgccccccgcccgcggacgcgccccccgccaaaccctagggcctcgccgcgccgccgcgcgaaggggcgcctcgctgcgccgctcgcccgcgatggaccccgccccgcagctcaaggccgagccctggcgcccgccgccccgcgccggcgcggccggcgggcgcgcggcgggggaggcctcctccgccgtcacgggccagagcagcggcagccgcccgcggaggaggcagcgggagcctcccgcgtccgaggacgactcggcctccgccaggcctgtctccacctccggcggcggcggcggcggccaggatttgactgatgcagaagcaaagcgtttcaaggcaaataaatccagtgatgataatggtagtgtcagaaaagatgctgaagctgattcaagaaatgctagtaaggctgttgaccaaaatcccccgccaccaaagcaagatttcatccatgtgagggcaagaaggggtcaagcaactgacagccatagccttgcagaaagggcacggcgtgagaaaataaccgagcggatgaaaattctccaagatcttgtccctggatgtaataaggttattgggaaagcatcagtccttgatgagataatcaattatgtccaagctttggaacgccaaattgagttcctgtccatgaagctcgaggcggttaacgcccatgcccatgctcacaacggagttgaaacatttccaactaaagacttcgctgcgccggcatacaacacagctccagggttaacatttgacccgcaaacaccaagggagtacgcccagggctcgccggctgcagaatggcttcacatgcagattggtggcacctacgaaagagtgacgtgagcagaacaaaagtccagggtggcgcccaacaaagcgtgccatgaatcctcggccaagcaacccccactttcataccgtagatcatttttttttgcgccaccatctcgttccaaatgcggttttattcatagtttttggagctgtaattgccggtagagacgtcagacatgtatttagagagaaccgccgagcacggtgcctttttgttttgaccttcggattcaggactgttcctcatgtattcgcaaccttcatgtattccatggatttctgtagctggtaatcattcttaagatgaaaggaagcgacttttttttt

SEQ ID NO: 31296 - protein, 325 aa, Triticum aestivum
LISFLQSSLTSLSPPPCASAQWVSAAASSLPQPRPPRPIWSPPARGRAPRQTLGPRRAAARRGASLRRSPAMDPAPQLKAEPWRPPPRAGAAGGRAAGEASSAVTGQSSGSRPRRRQREPPASEDDSASARPVSTSGGGGGGQDLTDAEAKRFKANKSSDDNGSVRKDAEADSRNASKAVDQNPPPPKQDFIHVRARRGQATDSHSLAERARREKITERMKILQDLVPGCNKVIGKASVLDEIINYVQALERQIEFLSMKLEAVNAHAHAHNGVETFPTKDFAAPAYNTAPGLTFDPQTPREYAQGSPAAEWLHMQIGGTYERVT

SEQ ID NO: 31297 - protein, 254 aa, Triticum aestivum
MDPAPQLKAEPWRPPPRAGAAGGRAAGEASSAVTGQSSGSRPRRRQREPPASEDDSASARPVSTSGGGGGGQDLTDAEAKRFKANKSSDDNGSVRKDAEADSRNASKAVDQNPPPPKQDFIHVRARRGQATDSHSLAERARREKITERMKILQDLVPGCNKVIGKASVLDEIINYVQALERQIEFLSMKLEAVNAHAHAHNGVETFPTKDFAAPAYNTAPGLTFDPQTPREYAQGSPAAEWLHMQIGGTYERVT

SEQ ID NO: 31298 - DNA, 857 bp, Triticum aestivum
ctcccggtgcgctcctttgtgattggttgctgctgctcgggatcaatgggtactcctactccataccaccatctgtctccaagaaccatcgtcaccaagatcatcagcatgaagcggcaggagccagagccgccgccgccgcccaagatcatcctgcagccacggcaccggaccagccccgcgatgtggtgcgctgccatcgtctgcttcgccttcagcgtcctcctcatcctcgccggcctggtgatcctcgtcgtcttcctgacggtgaagccaaggacgccgtccttcgacgtcgcccacgcagccctcaacagcgtctacatcggctcgcccccgccctacttcaacggcgacatgacgctgacggccaacatctccaaccccaaccgcaagatcggcgtcgtgatccagtccggcgccgtcgagctcttctttcggggcaggctggtgtcggcccaggcgctgccgtcgtttgcgcagcggcgggggcagttcacagtcctcagcgtccacatgctgtctagccaggtcgtgctaccgccggaggtggccgtggagctgctgaaccagatgaagagcaacaagatcctcttcaccatcagagggaccttcaaggtccgggaaaggttctggtcttggcactacacctaccggatgactgccatttgtgacctggagctcaccgcgcctccctctggatttctcgtacataggagatgcacaacatcaacgtgattggtacctggatgctcttttcatcttcttttgttgcatcaaattttcaaggatgtatagcagtacgaaactattttggatgtattttttttatgtaaagtaaaacccaagtaaaccac

SEQ ID NO: 31299 - protein, 245 aa, Triticum aestivum
LPVRSFVIGCCCSGSMGTPTPYHHLSPRTIVTKIISMKRQEPEPPPPPKIILQPRHRTSPAMWCAAIVCFAFSVLLILAGLVILVVFLTVKPRTPSFDVAHAALNSVYIGSPPPYFNGDMTLTANISNPNRKIGVVIQSGAVELFFRGRLVSAQALPSFAQRRGQFTVLSVHMLSSQVVLPPEVAVELLNQMKSNKILFTIRGTFKVRERFWSWHYTYRMTAICDLELTAPPSGFLVHRRCTTST

SEQ ID NO: 31300 - protein, 230 aa, Triticum aestivum
MGTPTPYHHLSPRTIVTKIISMKRQEPEPPPPPKIILQPRHRTSPAMWCAAIVCFAFSVLLILAGLVILVVFLTVKPRTPSFDVAHAALNSVYIGSPPPYFNGDMTLTANISNPNRKIGVVIQSGAVELFFRGRLVSAQALPSFAQRRGQFTVLSVHMLSSQVVLPPEVAVELLNQMKSNKILFTIRGTFKVRERFWSWHYTYRMTAICDLELTAPPSGFLVHRRCTTST

SEQ ID NO: 31301 - protein, 209 aa, Triticum aestivum
MKRQEPEPPPPPKIILQPRHRTSPAMWCAAIVCFAFSVLLILAGLVILVVFLTVKPRTPSFDVAHAALNSVYIGSPPPYFNGDMTLTANISNPNRKIGVVIQSGAVELFFRGRLVSAQALPSFAQRRGQFTVLSVHMLSSQVVLPPEVAVELLNQMKSNKILFTIRGTFKVRERFWSWHYTYRMTAICDLELTAPPSGFLVHRRCTTST

SEQ ID NO: 31302 - DNA, 1125 bp, Triticum aestivum
atcttttgtcctcctcctccgttgcgcagttggctcgcttgcttgcttgctgtaggtgagtgctgctggagacgggagccgggccgaggcggatcggggagaaggtgggaggcgggcgggtggtagatccggcgggcgtggctcgcgagaaggttggtgcgaggttggtggaggaggggagagaaggaggggatggagcggaaggcggtggtggtgtgcgcgctcgtcggcttcctcggcgtcctctccgccgcgctaggcttcgccgccgagggcacccgcgtcaaggtttcagatgtgcaaaccgactcttctccaggtgaatgcatatacccaagaagccctgcgttaggccttgggttgatgtctgcagttgcccttatggtcgcacaggctattataaatacagttgctggttgcatctgttgtaagaggcatccggttccctcagacactaactggagtgtggctctgatctcattcatcgtatcttgggtcactttcataatcgcgttccttctcctgctgaccggagccgcgctgaacgaccaaaggggccaggagaacatgtacttcggcagcttctgctacgtcgtcaagccgggggtcttctccggaggggcggtgctctccctcgcgagcgtggccctggccatagtctactacgtggccctgacgtcgtcgaaagccccgccgagctggggcccacagcagaaccagggcatctccatgggccagcccgtgatcccgcagcagagcagcgagccggtgttcgtccatgaggacacctacaaccggcaacgtttcccatgagtgatcacagccatattcaagccagccatttcgagggtcgcccatgaggacacttgcaaccggcagcagttcccgtgatcgcagtcgtagtacctaagccgtttctacggcccgcatgaacgctatgttggcgagtttggtttgtatagccctgcaggttagaacaatagcagcagtttggttaccgttattattagctaggttcatcagtcttctctttttctttgtttgagacttgagaaaggcggcggcatgcctgtttcgtcggtatggatatttgaattttaaatgaactgggtaatgttgaggttg

SEQ ID NO: 31303 - protein, 206 aa, Triticum aestivum
MERKAVVVCALVGFLGVLSAALGFAAEGTRVKVSDVQTDSSPGECIYPRSPALGLGLMSAVALMVAQAIINTVAGCICCKRHPVPSDTNWSVALISFIVSWVTFIIAFLLLLTGAALNDQRGQENMYFGSFCYVVKPGVFSGGAVLSLASVALAIVYYVALTSSKAPPSWGPQQNQGISMGQPVIPQQSSEPVFVHEDTYNRQRFP

SEQ ID NO: 31304 - protein, 149 aa, Triticum aestivum
MSAVALMVAQAIINTVAGCICCKRHPVPSDTNWSVALISFIVSWVTFIIAFLLLLTGAALNDQRGQENMYFGSFCYVVKPGVFSGGAVLSLASVALAIVYYVALTSSKAPPSWGPQQNQGISMGQPVIPQQSSEPVFVHEDTYNRQRFP

SEQ ID NO: 31305 - protein, 143 aa, Triticum aestivum
MVAQAIINTVAGCICCKRHPVPSDTNWSVALISFIVSWVTFIIAFLLLLTGAALNDQRGQENMYFGSFCYVVKPGVFSGGAVLSLASVALAIVYYVALTSSKAPPSWGPQQNQGISMGQPVIPQQSSEPVFVHEDTYNRQRFP

SEQ ID NO: 31306 - DNA, 684 bp, Triticum aestivum
ttttcccaagtttaccgagcggattatctccataacaccactgataggggtcatcctcaccaccttgctttgtgctagccctattgggcaagtcgcagaagtgttgaaaactcaaggtgctcaacttattctccctgttgctctgctgcatgctgttgcattcgctcttggctattggatctcgaaatggtcttctttcggggaatcaacttctagaaccatctcaattgagtgtgggatgcagagttctgcgcttggatttttacttgcccaaaagcacttcacaaaccctcttgttgctgttccttctgctgtcagtgttgtgtgcatggcgctcggaggcagtgctcttgcagtattctggagaaacagaggccttccagcagatgacaaggacgatttcaaggaatgaatgaagcaaaaacaatcctaggctccagcttctagtcgttccatgttttagttgagcgtggttacgtcagagaattttttatattcccatattttaggtatgtaaaacacaaaacaggataaggacgtttgtttattctagataattgattattggtaggaaggacccttgttaatgatttaggcaaggctttgcaattaagtttggtgtgtaatgtatttttcatcttctaaataaataagctgcttctcagacaaagcagtaattcgttt

SEQ ID NO: 31307 - protein, 136 aa, Triticum aestivum
FPKFTERIISITPLIGVILTTLLCASPIGQVAEVLKTQGAQLILPVALLHAVAFALGYWISKWSSFGESTSRTISIECGMQSSALGFLLAQKHFTNPLVAVPSAVSVVCMALGGSALAVFWRNRGLPADDKDDFKE

SEQ ID NO: 31308 - protein, 88 aa, Triticum aestivum
MLLHSLLAIGSRNGLLSGNQLLEPSQLSVGCRVLRLDFYLPKSTSQTLLLLFLLLSVLCAWRSEAVLLQYSGETEAFQQMTRTISRNE

SEQ ID NO: 31309 - protein, 57 aa, Triticum aestivum
MQSSALGFLLAQKHFTNPLVAVPSAVSVVCMALGGSALAVFWRNRGLPADDKDDFKE

SEQ ID NO: 31310 - DNA, 965 bp, Triticum aestivum
aacctctactaaattatcaattttctcagaatcctctcatgtctcgtctcttcatctctcatatctggtcatctgcaatcttcttttctatgggataaacagaagatgaagaacatcaggagacggagagaagagagaagaggcgaagtcggagctctgtagtgatggagatagcggctatgactgtgatgggaacttaaattgatgtatcagcatgaaagcggtcttttcgattttagacggactgaaagctctccgttgctgcttgtaattgacaaaagagatgacccggtacggttaccccattgcttaatcagtggacatatcaggcaatggtgcacgaactcataggacttgaggataataaagttgacgtgagagccattcgaagtctttcaaaagatcagcaagttgaggtggttttatcatcagaacaagatgcattcttcaaatctaacatgtatgaaaattttggggatatcggaatgaacatcagcaggtggccaagagtaacaaaaatatccagacagtagaggacatggccagatttgttgacagctaccctgagcacaaaaaaatgcaaggcaacgtgtcaaagcatgtaaccctggttactgaaatgagcaagctagttgaagcaaggaaactgatgctggtttcacaaacagagcaggacttggcttgcaatggtggctcgtggaattaaggtctgtatctgagattatacctctcgaggaacttcgtatatctcccaatatatgtcatgttgctgacttgttgaaaaaaaaaattcaggggttgagaatgtatacactcaactgcagctaggggtttttttagattttgtttttaaacctggtttgtatgtaaactggtttagtttgtaaaccgaaattttttgtaatctggtttaatttataaaccgattgtgaaccaaaattttaatataaaccaaaatcatttat

SEQ ID NO: 31311 - protein, 66 aa, Triticum aestivum
MVHELIGLEDNKVDVRAIRSLSKDQQVEVVLSSEQDAFFKSNMYENFGDIGMNISRWPRVTKISRQ

SEQ ID NO: 31312 - protein, 55 aa, Triticum aestivum
MARFVDSYPEHKKMQGNVSKHVTLVTEMSKLVEARKLMLVSQTEQDLACNGGSWN

SEQ ID NO: 31313 - protein, 48 aa, Triticum aestivum
MYQHESGLFDFRRTESSPLLLVIDKRDDPVRLPHCLISGHIRQWCTNS

SEQ ID NO: 31314 - DNA, 892 bp, Triticum aestivum
aatcaaaaaaaaaaatcaaccacttcatcatcatcatcgtctcagatttcgaaaaatggcagcgaagatctcccagcttgcgtgtttctcctccaccaaccgccaattccacttccagaaccgatcgtttccaagccttaggttccgtcccgagtcttttgtagttagaagcgttgttgatgggaacagctcggaaacaccagcttctctgagctatgcagctgaggtttcgaaacctttcgttgagaaaacatctacagtggatgaaactactacgggtaaagaggttatcacagagtcggtagaggaacatgttgccacaacacagcctaaaagagcagcgaagattcatgacttctgttttggcattccttatggtggtctggttatgagtggaggattgcttggatttgcgttttcacgaaatcttacaagtttaagtactggggttctctatggtggtggccttctagctcttagtacgttgagcatgaagatttggcgacagggaaagtctagtttcccttatattctaggtcaagcagtgctttcagctgtcgtcttctggaagaacttcacatcttactctatgactaagaagctgtttcctgccgggctatttgctgtcgtcagtgctgccatgttgtgtttctattcgtacgtggtgctctctggaggaaacccacctccaaagaaacttaaaccatctgctactactagtccttcatactgaagaaacttcacataggttagattcaaagatgaagatcttctcttttggtggctcttgtgcgttgcattcctggtgtaattttatacttttgacttttgaggcaacaactgtgacctgttctttccaatgtcgtaattgaaagttttgtttaatggtgac

SEQ ID NO: 31315 - protein, 243 aa, Triticum aestivum
IKKKNQPLHHHHRLRFRKMAAKISQLACFSSTNRQFHFQNRSFPSLRFRPESFVVRSVVDGNSSETPASLSYAAEVSKPFVEKTSTVDETTTGKEVITESVEEHVATTQPKRAAKIHDFCFGIPYGGLVMSGGLLGFAFSRNLTSLSTGVLYGGGLLALSTLSMKIWRQGKSSFPYILGQAVLSAVVFWKNFTSYSMTKKLFPAGLFAVVSAAMLCFYSYVVLSGGNPPPKKLKPSATTSPSY

SEQ ID NO: 31316 - protein, 225 aa, Triticum aestivum
MAAKISQLACFSSTNRQFHFQNRSFPSLRFRPESFVVRSVVDGNSSETPASLSYAAEVSKPFVEKTSTVDETTTGKEVITESVEEHVATTQPKRAAKIHDFCFGIPYGGLVMSGGLLGFAFSRNLTSLSTGVLYGGGLLALSTLSMKIWRQGKSSFPYILGQAVLSAVVFWKNFTSYSMTKKLFPAGLFAVVSAAMLCFYSYVVLSGGNPPPKKLKPSATTSPSY

SEQ ID NO: 31317 - DNA, 1679 bp, Triticum aestivum
attggatttctcgtgcaaatgcaaaacagagacggggacgagctggtcgtgtgaggcctgggttgtgtttctgcctttatactcaccatcgttttgaaaaactgatgcggccatttcaggtgcctgagatgctgcggatgccattgactgagctgtgtttgcaaataaaatcacttcatctgggtgacataaaatcattcctactaaaggctgtagagcccccaaaagaagaagctatctcctctgcaattgacttgttatttaaggttggagcctttgaagtacatgaagagttatcacctcttggctatcatttagcaaaactacctgttgatgttttgattggcaagatgatgctctatggggctatctttggctgcttatcaccaattctttctgttgctgcttttctgagttataaatcccctttcatctctccaaaagatgagaagcaaaatgtagagaaagcaaaggctgcattgttgaatgaaaatcttgatgggtctacttctataatagataacaaacaatcagatcatttgttaatggttattgcatacaacaagtggtcccgcatactgcaagagcatggagctagatctgctcatcagttttgccgttcattctacttgaacagtacagtgatgtacatgatcagggacatgcgtctacagtatggctcattgttagcagacattggacttgtggatcttcctaaagataatctgaatcaaatgaatgggaatagaaaaagcaatcttgagagttggtttgccaatatatctcttccgttcaacttatatgctggctacacctcagttatcaagtcggtcataagtgcaggtctataccctaatgttgcagcaactctggagggtgttgatccaggagctttgggtggcagaaagccatctgatgttctgtttggtaaggatcgtcctcgatggtatgatggaaggcgagaagttcatatacacccatcgtctgtgaatcacagcttgaagtcagtgcaatacccatttctggtgttccttgaaaaggttgagactagtaaggtgtttctacgtgataccagtgtcatttccccctactcactccttctgtttggtggttcaatggtaatccaacaccaggctggagtcgttattatagacggatggctaaggttaactgctgctgcacagactgctgttttattcaagcaacttcgcattacacttgatgctgttctgaaagaattgacaagaaagccggagatggcaacttttgttgacaacgaagtggtcagatccatcattcatttgctgttggaagaagaaaaggcccaacaagcatgaattgtggtcaatggattactgtacagataatggtggaactgtggcggaattaacttgagaacttgtcctcagatcagccgctggcctttttggagcacatgagctttctgtaccgggccttcatgctacatgatgaatgctatcaagtagcgaaggttgattctcagggctcgcctgcggtcttttactgtgttggtgactgacgatggagaagaagtttcagagtgaccagatttcattggcttgacttctttacagaacaaaagtgtatgatttactcatatcacaatgcctatatgctacggtgaaagataattgcattgaaatgaaatactctcttac

SEQ ID NO: 31318 - protein, 444 aa, Triticum aestivum
WISRANAKQRRGRAGRVRPGLCFCLYTHHRFEKLMRPFQVPEMLRMPLTELCLQIKSLHLGDIKSFLLKAVEPPKEEAISSAIDLLFKVGAFEVHEELSPLGYHLAKLPVDVLIGKMMLYGAIFGCLSPILSVAAFLSYKSPFISPKDEKQNVEKAKAALLNENLDGSTSIIDNKQSDHLLMVIAYNKWSRILQEHGARSAHQFCRSFYLNSTVMYMIRDMRLQYGSLLADIGLVDLPKDNLNQMNGNRKSNLESWFANISLPFNLYAGYTSVIKSVISAGLYPNVAATLEGVDPGALGGRKPSDVLFGKDRPRWYDGRREVHIHPSSVNHSLKSVQYPFLVFLEKVETSKVFLRDTSVISPYSLLLFGGSMVIQHQAGVVIIDGWLRLTAAAQTAVLFKQLRITLDAVLKELTRKPEMATFVDNEVVRSIIHLLLEEEKAQQA

SEQ ID NO: 31319 - protein, 410 aa, Triticum aestivum
MRPFQVPEMLRMPLTELCLQIKSLHLGDIKSFLLKAVEPPKEEAISSAIDLLFKVGAFEVHEELSPLGYHLAKLPVDVLIGKMMLYGAIFGCLSPILSVAAFLSYKSPFISPKDEKQNVEKAKAALLNENLDGSTSIIDNKQSDHLLMVIAYNKWSRILQEHGARSAHQFCRSFYLNSTVMYMIRDMRLQYGSLLADIGLVDLPKDNLNQMNGNRKSNLESWFANISLPFNLYAGYTSVIKSVISAGLYPNVAATLEGVDPGALGGRKPSDVLFGKDRPRWYDGRREVHIHPSSVNHSLKSVQYPFLVFLEKVETSKVFLRDTSVISPYSLLLFGGSMVIQHQAGVVIIDGWLRLTAAAQTAVLFKQLRITLDAVLKELTRKPEMATFVDNEVVRSIIHLLLEEEKAQQA

SEQ ID NO: 31320 - protein, 402 aa, Triticum aestivum
MLRMPLTELCLQIKSLHLGDIKSFLLKAVEPPKEEAISSAIDLLFKVGAFEVHEELSPLGYHLAKLPVDVLIGKMMLYGAIFGCLSPILSVAAFLSYKSPFISPKDEKQNVEKAKAALLNENLDGSTSIIDNKQSDHLLMVIAYNKWSRILQEHGARSAHQFCRSFYLNSTVMYMIRDMRLQYGSLLADIGLVDLPKDNLNQMNGNRKSNLESWFANISLPFNLYAGYTSVIKSVISAGLYPNVAATLEGVDPGALGGRKPSDVLFGKDRPRWYDGRREVHIHPSSVNHSLKSVQYPFLVFLEKVETSKVFLRDTSVISPYSLLLFGGSMVIQHQAGVVIIDGWLRLTAAAQTAVLFKQLRITLDAVLKELTRKPEMATFVDNEVVRSIIHLLLEEEKAQQA

SEQ ID NO: 31321 - DNA, 740 bp, Triticum aestivum
cattggatctgaaagcatggaggaaatcgatatagcatacaaggaagctgcaggcggcttctcatccacaaggcctgttatagaaatgacaattccttcagtcttagataagaccatctctccaccaggtcagcatgttattaatctgtttgttcagtacacaccctacaaactgtcagaaggcagttggcaggatccggctgttagaaaatcatttgctgagagatgcttttccttgatcgatgagtatgcaccgcactttagctcatcagtgataggctatgacatgctgactccacctgatcttgaaagggagtttggcctaacagggggcaacatctttcatggcgcgatgggcttggattccctcttcctgatgaggcctgctaagggatggtcagattacagaacccctgtgaaggggctgtacctctgcggcagcggtgcgcacccaggcggcggggtgatgggtgccccgggccgcaatgctgctgccgtggttttggatgatctcaaggcaagatagatgcaattaatggaagatggaaatggcagctgacactagggtagcattttcaagcacaaggctgcaaaagcagcaccagtgtgtaatctcttgtacggaaatgcaaaccttgtcgttaagccatctggtagagaccattttgtcatgcatacttacatgataaaaaagatgagacatgagaagcattttctgaatgaattgttgcagctgttcc

SEQ ID NO: 31322 - protein, 174 aa, Triticum aestivum
IGSESMEEIDIAYKEAAGGFSSTRPVIEMTIPSVLDKTISPPGQHVINLFVQYTPYKLSEGSWQDPAVRKSFAERCFSLIDEYAPHFSSSVIGYDMLTPPDLEREFGLTGGNIFHGAMGLDSLFLMRPAKGWSDYRTPVKGLYLCGSGAHPGGGVMGAPGRNAAAVVLDDLKAR

SEQ ID NO: 31323 - protein, 169 aa, Triticum aestivum
MEEIDIAYKEAAGGFSSTRPVIEMTIPSVLDKTISPPGQHVINLFVQYTPYKLSEGSWQDPAVRKSFAERCFSLIDEYAPHFSSSVIGYDMLTPPDLEREFGLTGGNIFHGAMGLDSLFLMRPAKGWSDYRTPVKGLYLCGSGAHPGGGVMGAPGRNAAAVVLDDLKAR

SEQ ID NO: 31324 - protein, 146 aa, Triticum aestivum
MTIPSVLDKTISPPGQHVINLFVQYTPYKLSEGSWQDPAVRKSFAERCFSLIDEYAPHFSSSVIGYDMLTPPDLEREFGLTGGNIFHGAMGLDSLFLMRPAKGWSDYRTPVKGLYLCGSGAHPGGGVMGAPGRNAAAVVLDDLKAR

SEQ ID NO: 31325 - DNA, 711 bp, Triticum aestivum
agttcatctacagacaaaggcattccaacctcccactagcagaagaatttctccagttccagaaacacaagaaactaccatgacgagtgccaagacacttgctcggctggccaagaagtggcagagggtggcggctatgggaaggaagaggctcacctggtcgccatcaacgtccaaagaagaagccggagagtcgtgcagcacgccgtgctcgacagcggccggcaagggccactgcgtcgtgtacactgccgatggtgtaaggttcgaggtgcctcttacgttcctcggaacgaccatcttcagcgagctcttgaggatatcccaagaggagtttggcttcacaggtgttgacggtggcagaatcactctgccctgcgacgcatcggtgatggagtatgccatgtgcttgctcaggagaagcgcctccacagagatggaggccgcgttcctcaacaccatggtgatgccatgccactatcatgtggcgccacatctgggagttggccagcgattcggtgtatgcagctcctgattaccatctgcagagatacaggaaaatagaacaaggaaaacagtttatgtgtagcattttgatcttgctagcaaagaagcaatcaaggaagatggacctagtaagagatattgttctttcaatgtatgcatatactttgttccgaagataaatgatcgatcgcagttttttaaaat

SEQ ID NO: 31326 - protein, 177 aa, Triticum aestivum
VHLQTKAFQPPTSRRISPVPETQETTMTSAKTLARLAKKWQRVAAMGRKRLTWSPSTSKEEAGESCSTPCSTAAGKGHCVVYTADGVRFEVPLTFLGTTIFSELLRISQEEFGFTGVDGGRITLPCDASVMEYAMCLLRRSASTEMEAAFLNTMVMPCHYHVAPHLGVGQRFGVCSS

SEQ ID NO: 31327 - protein, 151 aa, Triticum aestivum
MTSAKTLARLAKKWQRVAAMGRKRLTWSPSTSKEEAGESCSTPCSTAAGKGHCVVYTADGVRFEVPLTFLGTTIFSELLRISQEEFGFTGVDGGRITLPCDASVMEYAMCLLRRSASTEMEAAFLNTMVMPCHYHVAPHLGVGQRFGVCSS

SEQ ID NO: 31328 - protein, 132 aa, Triticum aestivum
MGRKRLTWSPSTSKEEAGESCSTPCSTAAGKGHCVVYTADGVRFEVPLTFLGTTIFSELLRISQEEFGFTGVDGGRITLPCDASVMEYAMCLLRRSASTEMEAAFLNTMVMPCHYHVAPHLGVGQRFGVCSS

SEQ ID NO: 31329 - DNA, 548 bp, Triticum aestivum
ataataagagttttaatattattgtattgtagtagtagccatggggactttcaatcactatgtgattgttaagttcaaagatggtgtggcagttgatgatctcattcaagggttggagaagatggtctttgggattgaccatgtcaagtcctttgaatggggaaaggacattgaaagtcatgatatgctaagacaaggtttcactcatgctttcttgatgacattcaatgggaaagaggagttcaacgcatttcagactcacccaaatcatcttgagttctcgggagtgttttcacctgctattgagaagattgtggtgctggatttcccatctaacctcgtcaaagcaccagcatgatcctcaacttattcaagcaaataaacttttccatctttaaaagtgtatgcatgtgtgtgcatctgctatttgtagtctgttatggttgttcctagctagttcctacaatctcttatgcaatttcaaacttgataataagttcttcttttttcctaattaatggaaatttctagcattattggtatttgtc

SEQ ID NO: 31330 - protein, 105 aa, Triticum aestivum
MGTFNHYVIVKFKDGVAVDDLIQGLEKMVFGIDHVKSFEWGKDIESHDMLRQGFTHAFLMTFNGKEEFNAFQTHPNHLEFSGVFSPAIEKIVVLDFPSNLVKAPA

SEQ ID NO: 31331 - protein, 78 aa, Triticum aestivum
MVFGIDHVKSFEWGKDIESHDMLRQGFTHAFLMTFNGKEEFNAFQTHPNHLEFSGVFSPAIEKIVVLDFPSNLVKAPA

SEQ ID NO: 31332 - protein, 57 aa, Triticum aestivum
MLRQGFTHAFLMTFNGKEEFNAFQTHPNHLEFSGVFSPAIEKIVVLDFPSNLVKAPA

SEQ ID NO: 31333 - DNA, 1096 bp, Triticum aestivum
aacacaaagtcttgcttcagtctgcgcctagtcctagcaggtcgcgaatttcgccggttctattgtttctctaattatcttcgagcagatcactagcaggcaccgacggatttggagcagctctgatctttagcggccatggtcaagaaaggaatccagtatgtcgtggtggatgccttcacggcccagccgttcaagggcaacccggcggcggtgtgcttcctggaggacgacgcggccgcccccgcgggggacgggcggtggatgcagtccgtcgccgtcgagttcaacctctcccagacggccttcttctcccgtgactcgtcctgcgcagccgacgccaccacgccgcggttccacctccgctggttcacccccgtcaccgaggtcgcgctctgcggccacgcaacgctggccaccgcccacttcctcttcacgtctgtcctcgcggagcgccatggcgtggttgagttcgcgaccaagtccggggtcctgaccgccaagaaggttcctgcaccggaggctgaggagcaggggaagctgttcattgagctggacttccccatgagtgattatgtgggttgcgatcccgccgacgagctgccgtccatcccggagacgctcaacggcgcgcccgtcgtcagtgttcacaaatcagtggccaccaacgacttcattgttgaactttcatcaggaaaagaggtcgccgatgtccttcctaacatcgaagaaataagaaagtgtgccggcagaggtgtgattgttacagcaccggcgcctgctggatcgggttatgacttcttcacacgcttcttctgcccaaaatttgggattgatgaggatcccgtatgtggcagtgcacactgtgttttggcaccctactggggtggaaagctggggaagcaaaaactgatagcgtttcaggtatctccaaggagtggggcactatacctggagctggatgttgcgaatcagcgagtgcggattcagggagaagctgttactgtcatggctgggacactcttcgcttagctagcatattgaccatccattgacttgctctatgaacttgggagaaataaatatatttgctgcc

SEQ ID NO: 31334 - protein, 297 aa, Triticum aestivum
MVKKGIQYVVVDAFTAQPFKGNPAAVCFLEDDAAAPAGDGRWMQSVAVEFNLSQTAFFSRDSSCAADATTPRFHLRWFTPVTEVALCGHATLATAHFLFTSVLAERHGVVEFATKSGVLTAKKVPAPEAEEQGKLFIELDFPMSDYVGCDPADELPSIPETLNGAPVVSVHKSVATNDFIVELSSGKEVADVLPNIEEIRKCAGRGVIVTAPAPAGSGYDFFTRFFCPKFGIDEDPVCGSAHCVLAPYWGGKLGKQKLIAFQVSPRSGALYLELDVANQRVRIQGEAVTVMAGTLFA

SEQ ID NO: 31335 - protein, 255 aa, Triticum aestivum
MQSVAVEFNLSQTAFFSRDSSCAADATTPRFHLRWFTPVTEVALCGHATLATAHFLFTSVLAERHGVVEFATKSGVLTAKKVPAPEAEEQGKLFIELDFPMSDYVGCDPADELPSIPETLNGAPVVSVHKSVATNDFIVELSSGKEVADVLPNIEEIRKCAGRGVIVTAPAPAGSGYDFFTRFFCPKFGIDEDPVCGSAHCVLAPYWGGKLGKQKLIAFQVSPRSGALYLELDVANQRVRIQGEAVTVMAGTLFA

SEQ ID NO: 31336 - protein, 155 aa, Triticum aestivum
MSDYVGCDPADELPSIPETLNGAPVVSVHKSVATNDFIVELSSGKEVADVLPNIEEIRKCAGRGVIVTAPAPAGSGYDFFTRFFCPKFGIDEDPVCGSAHCVLAPYWGGKLGKQKLIAFQVSPRSGALYLELDVANQRVRIQGEAVTVMAGTLFA

SEQ ID NO: 31337 - DNA, 866 bp, Triticum aestivum
atagatctctacttagcttctccgcgatacaagcccatttaaattcacatccaaccggatcgaggatttagggttcgcgaaaaaaatggcgcaacaacaatcgttgatctacagcttcgtcgctcgcgggacggtgatcctcgccgagttcactgatttcaaaggcaacttcacctccgtcgctgcacagtgcctccagaagctcccctcttccaacaacaagttcacctacacctgcgacggccacaccttcagttacctcgtcgaagatggattcacgtactgtgttgttgcggttgattctgctgggaggcagattccgatggcgtttttggagagagtgaaagaggattttagcaagagatatggtggtgggaaggctgctactgctcaggctaacagcttcaataaagagtttggctctaagctgaaagagcacatgcagtattgtatggatcaccctgatgagattagcaagcttgctaaggtgaaggctcaagtctctgaagttaaaggtgttatgatggaaaacatcgagaaggttcttgaccgtggtgagaaaattgagcttctggtggacaaaaccgagaaccttcgctctcaggcacaagacttcagaacaacggggacacagatgagaagaaagatgtggcttcagaacatgaagattaaactcatagttctcgccatcatcgtcgcactgattctcatcatcgtgctctcagtttgccatggcttcaagtgttaaagagccccatcaaagttaaaaaaactctcttgaaatctttttctcactcggtcttcgtaatctatatataatagcaaaccatttttattaatctgatgatgtcatcattttttataag

SEQ ID NO: 31338 - protein, 220 aa, Triticum aestivum
MAQQQSLIYSFVARGTVILAEFTDFKGNFTSVAAQCLQKLPSSNNKFTYTCDGHTFSYLVEDGFTYCVVAVDSAGRQIPMAFLERVKEDFSKRYGGGKAATAQANSFNKEFGSKLKEHMQYCMDHPDEISKLAKVKAQVSEVKGVMMENIEKVLDRGEKIELLVDKTENLRSQAQDFRTTGTQMRRKMWLQNMKIKLIVLAIIVALILIIVLSVCHGFKC

SEQ ID NO: 31339 - protein, 141 aa, Triticum aestivum
MAFLERVKEDFSKRYGGGKAATAQANSFNKEFGSKLKEHMQYCMDHPDEISKLAKVKAQVSEVKGVMMENIEKVLDRGEKIELLVDKTENLRSQAQDFRTTGTQMRRKMWLQNMKIKLIVLAIIVALILIIVLSVCHGFKC

SEQ ID NO: 31340 - DNA, 1110 bp, Triticum aestivum
tatattttgttgtccctcaacatggacaaacaaacatcatggtgtacattggagtctgttctcttctaggatctctcaccgttatgagtgtaaaggctctcggaattgcattgaagttaacattctcaggagtgaaccaattattctatcctcagacctgggcttttgctctaattgttgctacctgcgtaagcacccagataaactatctgaacaaggcactggacacctttaatacagcagttgtttcaccaatatattacgtgatgtttacctcgctaacaattatagccagtgtgataatgttcaaggattgggatcggcaaaatccaacccagattgtcacggaaatgtgtggttttgtgaccatcctttctggaacatttctccttcacaagacgaaggacatgaatgacagtactgggccgactttgtctacacgacgctcaaagcatgctagtcagactgcatttgccatcgaggttcttccactgaaatatcaagattgtgtggatgacgagaccttgccattatcacttcccaaggctgataatcactacctaatgcaagagcttcctcttagatacaaagacttgaatatcgcctgatggacattcctttgcccacatgtgctaggaacctcttagcaaagtttgccgtgcacagtttcaggcaggattggttgatgaggaactgaacttggaggttttatctcagctttgctgttggatagaatgaggttatggaaattacaagttgatagtattatccttgacaatttcaccttttataaggagaaacgagggatggtgtcaaacatgtggtcagtcaagggatggttactcgggaatacctaccagttctggaaaacaggatgaagtgtacttacatacagtggcatcatttattatactttttttcttttcatttttagacagtcaagcagttatgctgcaatttgggcttatctgatttctaggaagatgttatataggaaaaacaactcattttttttcttgtacctatatcataaattgctgcccatttaggtgccaattgttatctgtgtaattatcaattcatattttttggtagacaatcggcgagcct

SEQ ID NO: 31341 - protein, 201 aa, Triticum aestivum
YFVVPQHGQTNIMVYIGVCSLLGSLTVMSVKALGIALKLTFSGVNQLFYPQTWAFALIVATCVSTQINYLNKALDTFNTAVVSPIYYVMFTSLTIIASVIMFKDWDRQNPTQIVTEMCGFVTILSGTFLLHKTKDMNDSTGPTLSTRRSKHASQTAFAIEVLPLKYQDCVDDETLPLSLPKADNHYLMQELPLRYKDLNIA

SEQ ID NO: 31342 - protein, 189 aa, Triticum aestivum
MVYIGVCSLLGSLTVMSVKALGIALKLTFSGVNQLFYPQTWAFALIVATCVSTQINYLNKALDTFNTAVVSPIYYVMFTSLTIIASVIMFKDWDRQNPTQIVTEMCGFVTILSGTFLLHKTKDMNDSTGPTLSTRRSKHASQTAFAIEVLPLKYQDCVDDETLPLSLPKADNHYLMQELPLRYKDLNIA

SEQ ID NO: 31343 - protein, 174 aa, Triticum aestivum
MSVKALGIALKLTFSGVNQLFYPQTWAFALIVATCVSTQINYLNKALDTFNTAVVSPIYYVMFTSLTIIASVIMFKDWDRQNPTQIVTEMCGFVTILSGTFLLHKTKDMNDSTGPTLSTRRSKHASQTAFAIEVLPLKYQDCVDDETLPLSLPKADNHYLMQELPLRYKDLNIA

SEQ ID NO: 31344 - DNA, 687 bp, Triticum aestivum
aaaaggataacacacacaaaaaaatcaagactctcactaagataaaccaagaatcttcatcatggcttcagtaacctcagctaccgtcgcaatcccatccttcaccggcctaaaatccacaatctccaaaccctccgccgtcgtcagactccccaccacaacatcacggaacctcaccgtgaaggcatctctcaaggacttcggagtcgcggctgttgcagctgcagcttccatcgctttggctggaaacgccatggccatcgatgttctcttgggatcaggagatggagcgttggctttcgttcccaacgagttcacaatagccaaaggagagaagattgtgttcaagaacaatgctggattcccacacaacgttgtgttcgatgaggacgagatcccaagcggtgtcgacgcgagcaagatctccatggacgagcaagatctgctcaacgctgctggagagacgtacgaggttgctttgactgagcctgggacctacagcttctactgtgcgcctcatcagggtgctggtatggtcggtaaagtcaccgttaactaataaaattgtgagtgtagaagtgaaagagtgtctctgattcatgtagaggcttttctttcagtcttacttacataaggtgttttgtacttctaaagagtgttggaatcaaatggacattgatttgttat

SEQ ID NO: 31345 - protein, 165 aa, Triticum aestivum
MASVTSATVAIPSFTGLKSTISKPSAVVRLPTTTSRNLTVKASLKDFGVAAVAAAASIALAGNAMAIDVLLGSGDGALAFVPNEFTIAKGEKIVFKNNAGFPHNVVFDEDEIPSGVDASKISMDEQDLLNAAGETYEVALTEPGTYSFYCAPHQGAGMVGKVTVN

SEQ ID NO: 31346 - protein, 101 aa, Triticum aestivum
MAIDVLLGSGDGALAFVPNEFTIAKGEKIVFKNNAGFPHNVVFDEDEIPSGVDASKISMDEQDLLNAAGETYEVALTEPGTYSFYCAPHQGAGMVGKVTVN

SEQ ID NO: 31347 - DNA, 1237 bp, Triticum aestivum
gtattctctctttgtgtttacttgctcttaaaaattatctcacctgctgtgttgttatcagcagtatatctacctacctgtatacagccatacacatcaccagaggtttttcactgttgttgctgcacctgaatctgcaatgggtaggtccccagggccaaggagggggagtgccctgcttctgcctctgtttctcacctgcttcttctcaggggcaacgaggcgggcggagtcggcccgggagttcacgctcatcaaccagtgcaagacggaggtgtggccggcggtgacgccgggcgagagcttcgggggcggcgggtatgcgctccgtgcaggcgagtcggtggtgttcaccgcccccgtggggtggtcgggccgcgtgtggggccgcaccggctgcacctttgactcggccggcaacggcacgtgcgagacgggcgggtgcggcacgtcgctgcagtgcgaatcggcgtcgggggccgctccggcgacgctggcggagttcacgctggcggcgactgactactacgacgtgagcctggtggacggcttcaacctccccgtggtggtgaccccgaccccgacgagcgccaactggacaggctgcgccccggcggggtgcgacggtgacctgcgccggggctgcccgtcggagctggccgtgaagggcgacggggggaaggtggtggcttgccggagcgcgtgcgacgtgttcgggaccgaccagtactgctgccgtggtcagtatgccaacccggtggcctgccagccgaccttctactcgaagaagttcaaggcggcatgcccggccgcctacagctacgcctacgacgacccctcctccatcttcacccgcgcccagtcgcccgactacaccatcaccttctgctccagcaacatgaagcaatcggtgtgttcgtaccgcgacagccggcttgtctgcagcggctccggcaggagcacctcctctggtctaatgctgctgctgctgctctccagcttcgtggcattgcaatttgcaaccccagtgtgactgattggttgattaaggcctaatcatccaagagcaagctgacctgaccctcttcttgatatagttctttttggatttgttttctactatgagaaacagagagtaggtgattcatggatcaaatttctgcactgtcagacagtcagtactcagtaccatttgaatgagagttatacagagatagcataagtgaatgtttcgttc

SEQ ID NO: 31348 - protein, 297 aa, Triticum aestivum
MGRSPGPRRGSALLLPLFLTCFFSGATRRAESAREFTLINQCKTEVWPAVTPGESFGGGGYALRAGESVVFTAPVGWSGRVWGRTGCTFDSAGNGTCETGGCGTSLQCESASGAAPATLAEFTLAATDYYDVSLVDGFNLPVVVTPTPTSANWTGCAPAGCDGDLRRGCPSELAVKGDGGKVVACRSACDVFGTDQYCCRGQYANPVACQPTFYSKKFKAACPAAYSYAYDDPSSIFTRAQSPDYTITFCSSNMKQSVCSYRDSRLVCSGSGRSTSSGLMLLLLLSSFVALQFATPV

SEQ ID NO: 31349 - DNA, 553 bp, Triticum aestivum
ccaaacagtcgcctccctccctccctccgtcgccatgtaccgcgccgccgccagcctcgcctccaaggcccggctagccgggagcagtgcccgacaggtcgggagcaggctcgcctggagcaggaactatgccgccaaggacatcaggttcggcgtcgaggcccgggccatgatgctcaagggggtcgaagacctggctgatgcggtcaagttgactatgggtcccaaggtgtgacctacatccgtgcgttatccatgtgcagagttcgtggtgcgagtgtctgaattgctttagagattgtaagattgtggctgctcgcgcccgcaaaccatgttgctatcacatctattccttttccactagtagacaaatgctagactagtggttggctaatatgttagcagtatatgtgcatcataggtctgccctaagtgtagtaagtaatacgaactgttgaggatgttacgtgtattgcagatgaaatttagttgtaaattaccataaaataattttctgataccttatagtagtaaaattatgtatattttggcg

SEQ ID NO: 31350 - protein, 77 aa, Triticum aestivum
QTVASLPPSVAMYRAAASLASKARLAGSSARQVGSRLAWSRNYAAKDIRFGVEARAMMLKGVEDLADAVKLTMGPKV

SEQ ID NO: 31351 - protein, 66 aa, Triticum aestivum
MYRAAASLASKARLAGSSARQVGSRLAWSRNYAAKDIRFGVEARAMMLKGVEDLADAVKLTMGPKV

SEQ ID NO: 31352 - protein, 66 aa, Triticum aestivum
PNSRLPPSLRRHVPRRRQPRLQGPASREQCPTGREQARLEQELCRQGHQVRRRGPGHDAQGGRRPG

SEQ ID NO: 31353 - DNA, 937 bp, Triticum aestivum
caattcaattggatatttctatggttctactccggaaaatcatagtagctataagagttcaaagctgagctcatctcctcatggaattcctactgggagctcacctattggatcagtacctaaatctttcccaccgtttcagcaccctagccatcaacttctagagaaaaataaattccagcaacaaaggtacaataagttcaagaataaatgcgttgctgaacgtaagaagttaggaatcggtttgagcgaggaaatgaattcgctctatcgtttttggtcatactatctgagagataatttcaatgaagatatgtacaagcattttaagaactttgcagtagatgatgcagcagcaaattacagatatggacttgagtgtctcttcagattttatagttatggtttggaaaaaaacttccaacggaatgtatatgaagattttgagcaactgacgcttgagttctaccacaagggcgatctttatggacttgaaaaatactgggcatttcatcatttccgaaaacaggatagcagccccatcaataagcatgcagagttggagaggctcctcagggaggagttccgaaccatcgaggacttcaaggcacggcgtgcggcagataaagaaaccggtggtagtggcagcaagagtgcggtggcggcaagccatagcaaggctgtggctaagtaggtcctacctgggcatgaaattttggtggtgatcctacgaaggagaaagtagcaacgtttttgtttggtgtaaactaaggatttgagtagactcgtccctgtgcagattttgctctcccctgccgatacttcgctgtccaggaaatttttctcttttttttttacatcagcttcatggtgccattgtgggatttgtacatagagataaaataattgcctttattaaatagccaaactatagagt

SEQ ID NO: 31354 - protein, 230 aa, Triticum aestivum
NSIGYFYGSTPENHSSYKSSKLSSSPHGIPTGSSPIGSVPKSFPPFQHPSHQLLEKNKFQQQRYNKFKNKCVAERKKLGIGLSEEMNSLYRFWSYYLRDNFNEDMYKHFKNFAVDDAAANYRYGLECLFRFYSYGLEKNFQRNVYEDFEQLTLEFYHKGDLYGLEKYWAFHHFRKQDSSPINKHAELERLLREEFRTIEDFKARRAADKETGGSGSKSAVAASHSKAVAK

SEQ ID NO: 31355 - protein, 145 aa, Triticum aestivum
MNSLYRFWSYYLRDNFNEDMYKHFKNFAVDDAAANYRYGLECLFRFYSYGLEKNFQRNVYEDFEQLTLEFYHKGDLYGLEKYWAFHHFRKQDSSPINKHAELERLLREEFRTIEDFKARRAADKETGGSGSKSAVAASHSKAVAK

SEQ ID NO: 31356 - protein, 126 aa, Triticum aestivum
MYKHFKNFAVDDAAANYRYGLECLFRFYSYGLEKNFQRNVYEDFEQLTLEFYHKGDLYGLEKYWAFHHFRKQDSSPINKHAELERLLREEFRTIEDFKARRAADKETGGSGSKSAVAASHSKAVAK

SEQ ID NO: 31357 - DNA, 687 bp, Triticum aestivum
attcgagacatctccccatgttataaatgccgtcatggaggctattgaggggatgcgagttgctctaggtgcagctgtggttctgaattattgcctccaaggccttttccatccagcaaggaaagtacgtgaagtatattggaagatctataactcgctgtatattggtgcacaagatgcacttgttgcttcttatcccgcactaggcgatgatggagacaatatcttcagccgtccagagctagccatgtttgtgtgatcaatatttacatatcctgctttgtgaagacttcacattttgaggagtatcctatgtccaggttatttctttccaagtgtgatgccgaagagtcttcttttctggatctgcgaccgggcgacgtaagggcagagcagcatgttaatttcgtcgcagctgataatatgtgaaatcaagtcgttagtagtgaagacaataaaatcacagtagcaccaatatcatcttatttatcatgtatatttggttatgatggccagcctctgctgtcaaaactctgttttagcgatgttttgtaacgctgtaaaccatcaagctctgtactatgtgtgctgtggcatgactatgtctagaatacttgcctagcttgcgttgttttgcacctttttgtgttaaacgtggactggtgttcagtttgattgaaccatagc

SEQ ID NO: 31358 - protein, 85 aa, Triticum aestivum
FETSPHVINAVMEAIEGMRVALGAAVVLNYCLQGLFHPARKVREVYWKIYNSLYIGAQDALVASYPALGDDGDNIFSRPELAMFV

SEQ ID NO: 31359 - protein, 74 aa, Triticum aestivum
MEAIEGMRVALGAAVVLNYCLQGLFHPARKVREVYWKIYNSLYIGAQDALVASYPALGDDGDNIFSRPELAMFV

SEQ ID NO: 31360 - protein, 68 aa, Triticum aestivum
MRVALGAAVVLNYCLQGLFHPARKVREVYWKIYNSLYIGAQDALVASYPALGDDGDNIFSRPELAMFV

SEQ ID NO: 31361 - DNA, 954 bp, Triticum aestivum
cccagttcatcgcgatctaagttctaaaataaataaaaagctcatcgcgatctccgtccaactcctcccccaaatcacactcgccggagtgctccgccgtgtaatctagtcccccccttcccaatccctcctgattcgagcgcgcggacgggaggattgcttcgatgcaccggcgtcggcgcgagcggtcgggcaggcggtggccggagctttgcgccggcggccgcctgagatggggaggaagatggaggccaggcgtcggcgtgtgccccttcttcccgcgcggtgcaccagcgatggccggaagggggtgggtggagcgggaggacggcggccagtcggaccatcatgagcatgatcacacccatgaccctggtgtttcctccgtaagcattttttgcgaaggggagatggatctctaaaagtaaaaagtgctgacatatgccggatgaagggactactctctatccagtggaatgtctcaatgctttgcctttcagatttgcacagatgggagaacaaattgctatgtgttctgctccgctctcgttatggaccacttccatgttatccatctgcaatgagtgtatatgacactttacatggatctcccaacagattgaatgtgccgcgcatgaacgagatcgtgcccatcagcagaaacctcaaccgggaagagcgggagccgggcttccaggattgcctgctgaaggaataggccagagacaccaagtttctctctctgcttctcctttttcgcggggtggatctccagctccatgattttgagctttgcggctgcatccagaacttgttcttcaaatgcttaggctcaactgtgcttgaactgacatgaagcgtacgcgaggtgtatgtatatcgacctggccgtttcattgttggaacctggccgtcgtgccgtccactgctgttctcatatgagtcaacaacttc

SEQ ID NO: 31362 - protein, 89 aa, Triticum aestivum
MKGLLSIQWNVSMLCLSDLHRWENKLLCVLLRSRYGPLPCYPSAMSVYDTLHGSPNRLNVPRMNEIVPISRNLNREEREPGFQDCLLKE

SEQ ID NO: 31363 - protein, 85 aa, Triticum aestivum
MHRRRRERSGRRWPELCAGGRLRWGGRWRPGVGVCPFFPRGAPAMAGRGWVEREDGGQSDHHEHDHTHDPGVSSVSIFCEGEMDL

SEQ ID NO: 31364 - protein, 77 aa, Triticum aestivum
MLCLSDLHRWENKLLCVLLRSRYGPLPCYPSAMSVYDTLHGSPNRLNVPRMNEIVPISRNLNREEREPGFQDCLLKE

SEQ ID NO: 31365 - DNA, 630 bp, Triticum aestivum
aaaggtcatcaattcccaagaggcaatagactctgttcaggttcagtccttgcaagcagtgagcagctcccaattggaattgcaacagcagcctttgacggcattcgcttgtccaaatgggaagaacctgatggagccaaaggatgttggctaatgtacaaggtgcatggtggccaaacttgcgagttggagtcatatgatttgatgtcagctaatgatgctcctgagagggatccaatggactgggtccttgaagggagcacagaccaaggttctacctggaatactattgatgctcggagttctgtaatcttcggcagccgtttctgtaggaaatcatttactgttgacaagagatacaaagcaaatgtacttcggtttcggtttctacgtgggagagaatctagtgccaatccaaggtttcaaataggatccatcgatttctacggggaaacacacatggcctgatcgcaggtgttaatttgtgtgtacaaaacccaacaaaaccttgttgaatcatgcacctatcatggccagtactacatgcaaccaataattgtactgattatcttggatgattgtaaattccggttctactctggaagaggttcctttcctttcaaaaaaaac

SEQ ID NO: 31366 - protein, 155 aa, Triticum aestivum
KGHQFPRGNRLCSGSVLASSEQLPIGIATAAFDGIRLSKWEEPDGAKGCWLMYKVHGGQTCELESYDLMSANDAPERDPMDWVLEGSTDQGSTWNTIDARSSVIFGSRFCRKSFTVDKRYKANVLRFRFLRGRESSANPRFQIGSIDFYGETHMA

SEQ ID NO: 31367 - protein, 104 aa, Triticum aestivum
MYKVHGGQTCELESYDLMSANDAPERDPMDWVLEGSTDQGSTWNTIDARSSVIFGSRFCRKSFTVDKRYKANVLRFRFLRGRESSANPRFQIGSIDFYGETHMA

SEQ ID NO: 31368 - protein, 87 aa, Triticum aestivum
MSANDAPERDPMDWVLEGSTDQGSTWNTIDARSSVIFGSRFCRKSFTVDKRYKANVLRFRFLRGRESSANPRFQIGSIDFYGETHMA

SEQ ID NO: 31369 - DNA, 562 bp, Triticum aestivum
caaaatatttgtaggttcgtcgtgggtaatattgagccgatcattcctggagttctgcatattgggatgggacaaccttcctcgcacgctgctcatgtacttcaccaatttcctgtcgtcctcggagggatacttccacacggtgatctgcaactcaaagtactaccagaacaccaccatcaacaatgatctccgtttcatggcgtgggacaacccccctcggacgcaccctctcaacctgacagccgagtacttcgacgcaatggcgaacagcgggctgccatttgcgcactctttcacgcgtgacgatccggtcctggatatgattgacactgagctgttgaggcgagcgcccgaccgcttcacaccaggtggatggtgcctgggtagcccggtgggtggcaaagacccctgtgcctttttcggaaggtcgtttgttctcaggccgattaaaggttcggggaagctagagaagttgttgttgaaacttttggaacctgacaacttcaggcctaaacagtgtatataacgctcctgttacatttagccagttttttttagc

SEQ ID NO: 31370 - protein, 175 aa, Triticum aestivum
KIFVGSSWVILSRSFLEFCILGWDNLPRTLLMYFTNFLSSSEGYFHTVICNSKYYQNTTINNDLRFMAWDNPPRTHPLNLTAEYFDAMANSGLPFAHSFTRDDPVLDMIDTELLRRAPDRFTPGGWCLGSPVGGKDPCAFFGRSFVLRPIKGSGKLEKLLLKLLEPDNFRPKQCI

SEQ ID NO: 31371 - protein, 144 aa, Triticum aestivum
MYFTNFLSSSEGYFHTVICNSKYYQNTTINNDLRFMAWDNPPRTHPLNLTAEYFDAMANSGLPFAHSFTRDDPVLDMIDTELLRRAPDRFTPGGWCLGSPVGGKDPCAFFGRSFVLRPIKGSGKLEKLLLKLLEPDNFRPKQCI

SEQ ID NO: 31372 - protein, 109 aa, Triticum aestivum
MAWDNPPRTHPLNLTAEYFDAMANSGLPFAHSFTRDDPVLDMIDTELLRRAPDRFTPGGWCLGSPVGGKDPCAFFGRSFVLRPIKGSGKLEKLLLKLLEPDNFRPKQCI

SEQ ID NO: 31373 - DNA, 1134 bp, Triticum aestivum
acatgctatagtccacaggtccgggcagtccagttttccctccattcccccgcggagaaaaaaaaggggaaccgcgggatttcgccggagatgtcgtcggcggccacgaagctcgccaccgcggccgacgctacctcgacggaggcccaaaccctcgtcttggacatgcgcaaggcgctcagctccatgaagtccctcgccgtggagtacgagagggccggcaagcccgacaaggtgaagcagctggaggacgcggtgcaggagctggtggcctcgtacgaggactgcgcgtacctcgccgaggcggtgaagaaggtgcccggggcgtaccagccgtccgaccaggcgactgatttcagaaagctgatcgatgcggaggttgagaaagtcaaggggacctcgcgatcgtcgggacacaaggaccagctcatacggcagttcaaagaggctgtttgggatgttcaccatgcaggtcaaccgatgcctggtgatgaacaagaggaacttgttatgactagcacccagaacaacatcctaaatacagtatgcccattgactatgaagcctatagtcgacttggaaaatcctgttcgctgcatcgattgcaggcacatctatgacaaggatccaatcctgaggtacatccggacgaacaaagctccgaattgccccattgcaggctgcccggcggtcctgcaaccggcgaagatcgtctgcgacaccttccttcgtatggagatcgaggagctgcgggcgtcgggcccggccgctccgaacgcctctgagatagaggatatctcggaccacgacgaggacgaggacgaggatccgatggacgaagacgatgacgagtgatacgcgtctggagaaaccaaccttggtggattcttggtattttgtagggatgatgataggtgttggtactctgttttcaggtcgcactggtatgtcgtcgtgtgtggaatcgggggatgtggctcccctggcaattagcttaaccaacgtaacaagcttagctatgaggatatttattcttgttctgccctgcttttcatcagtctgcagtgctcgttcgtttgtctgattggtgatgatttggtgagactgaatgaccccaatctaaaaatatttcac

SEQ ID NO: 31374 - protein, 284 aa, Triticum aestivum
TCYSPQVRAVQFSLHSPAEKKKGNRGISPEMSSAATKLATAADATSTEAQTLVLDMRKALSSMKSLAVEYERAGKPDKVKQLEDAVQELVASYEDCAYLAEAVKKVPGAYQPSDQATDFRKLIDAEVEKVKGTSRSSGHKDQLIRQFKEAVWDVHHAGQPMPGDEQEELVMTSTQNNILNTVCPLTMKPIVDLENPVRCIDCRHIYDKDPILRYIRTNKAPNCPIAGCPAVLQPAKIVCDTFLRMEIEELRASGPAAPNASEIEDISDHDEDEDEDPMDEDDDE

SEQ ID NO: 31375 - protein, 254 aa, Triticum aestivum
MSSAATKLATAADATSTEAQTLVLDMRKALSSMKSLAVEYERAGKPDKVKQLEDAVQELVASYEDCAYLAEAVKKVPGAYQPSDQATDFRKLIDAEVEKVKGTSRSSGHKDQLIRQFKEAVWDVHHAGQPMPGDEQEELVMTSTQNNILNTVCPLTMKPIVDLENPVRCIDCRHIYDKDPILRYIRTNKAPNCPIAGCPAVLQPAKIVCDTFLRMEIEELRASGPAAPNASEIEDISDHDEDEDEDPMDEDDDE

SEQ ID NO: 31376 - protein, 229 aa, Triticum aestivum
MRKALSSMKSLAVEYERAGKPDKVKQLEDAVQELVASYEDCAYLAEAVKKVPGAYQPSDQATDFRKLIDAEVEKVKGTSRSSGHKDQLIRQFKEAVWDVHHAGQPMPGDEQEELVMTSTQNNILNTVCPLTMKPIVDLENPVRCIDCRHIYDKDPILRYIRTNKAPNCPIAGCPAVLQPAKIVCDTFLRMEIEELRASGPAAPNASEIEDISDHDEDEDEDPMDEDDDE

SEQ ID NO: 31377 - DNA, 1629 bp, Triticum aestivum
cctaagtacctctcccgcacctctcctccttcccgtcggcaccgccgccatctttgctaggtcttcctccagatccaactcacagcttccatgcccataggtaccgccgcaaccaccatgcccaccgttgcctcctggatcctcctccatgtccatgccaccgtccgccaacctcccaaaaacgcctccgccgtcgcccactcgagcaataacgagaaaatatatgcttcccttctccgccagcgcccgccggttccctccaatctgtacgtgtactgcgcagacggcacattcggagagaccccccgcgtgctgtcaatggtggacgacatcatcctcttccacgcatacatcggtcctgcgttcccctcccccaagccatggaagggggacttcttcatataccggtctgactccaatcgacggtctctggagcgtctaccgcacccccaaggtatgatcggaagggacgatccattcggcatctttccccgagagggcgacagctacacaatcgcggcgctgttacccagcatatcctctatgtacgattttgaactccacctcttcgactcggagactcggatttggagcaggaagaatctgactgttgggtcgcgacaggaaaggttcaaggttgatatccccatcaacataagtcagatcttacaccataacacatccactgtgatcactcttggaggctccatgtgctgggttgatctttggcgtggtatattgttctgtgacatgctctccgagaaacatgcactcacaggtgttccactgccactgccattgatctactattctggtgatagaagcaagatcctaggacctgcgaagtgtcaccgtagcattgcttttcttgatggatgcaccaggctcgttgaggtgaattctgatgtcagtattgccgaaggaactgaatttggttgtggccgaactgaagactggacgattaccacatggtacaacaataatgtgcataataattcttatgatgattggcatccggacatcacactaaaagcttccaacatcatcctgggcaaccactccgtgaagctgccgttaggcttgcagtacctttttttctgacccaactatttgcatgaacaatagggatggctatattgtttacctgactgccagggagaagtatatgcattctaagtcatggattattgctattgatttgaaaaagcgcaaggtgcaaagtgtggttctgtctggtcctgtacctccgccaatgccgcgcattgacactaactactgcacttgtagtatctccaagtactgtaccagcacttcaacagtatcaggtggtacttaagatgctgagcagtcgtgtggcagtaaattcaatgtacgatgtctacaagttcctggtggctgagattgaggaatgcatgtgtttatcacttactacattccaaacaatatattgttctcctggtcctgcttgacatcatatatctatcctaattagctatatcctatgtagtgaactggttaattattattggcagtgaactgattacttgttcttgttggacattatgtatcttgaacattttgtactagcatgtttatggtttaatttttttgttcggtctgcttggcttt

SEQ ID NO: 31378 - protein, 336 aa, Triticum aestivum
MPIGTAATTMPTVASWILLHVHATVRQPPKNASAVAHSSNNEKIYASLLRQRPPVPSNLYVYCADGTFGETPRVLSMVDDIILFHAYIGPAFPSPKPWKGDFFIYRSDSNRRSLERLPHPQGMIGRDDPFGIFPREGDSYTIAALLPSISSMYDFELHLFDSETRIWSRKNLTVGSRQERFKVDIPINISQILHHNTSTVITLGGSMCWVDLWRGILFCDMLSEKHALTGVPLPLPLIYYSGDRSKILGPAKCHRSIAFLDGCTRLVEVNSDVSIAEGTEFGCGRTEDWTITTWYNNNVHNNSYDDWHPDITLKASNIILGNHSVKLPLGLQYLFF

SEQ ID NO: 31379 - protein, 327 aa, Triticum aestivum
MPTVASWILLHVHATVRQPPKNASAVAHSSNNEKIYASLLRQRPPVPSNLYVYCADGTFGETPRVLSMVDDIILFHAYIGPAFPSPKPWKGDFFIYRSDSNRRSLERLPHPQGMIGRDDPFGIFPREGDSYTIAALLPSISSMYDFELHLFDSETRIWSRKNLTVGSRQERFKVDIPINISQILHHNTSTVITLGGSMCWVDLWRGILFCDMLSEKHALTGVPLPLPLIYYSGDRSKILGPAKCHRSIAFLDGCTRLVEVNSDVSIAEGTEFGCGRTEDWTITTWYNNNVHNNSYDDWHPDITLKASNIILGNHSVKLPLGLQYLFF

SEQ ID NO: 31380 - protein, 260 aa, Triticum aestivum
MVDDIILFHAYIGPAFPSPKPWKGDFFIYRSDSNRRSLERLPHPQGMIGRDDPFGIFPREGDSYTIAALLPSISSMYDFELHLFDSETRIWSRKNLTVGSRQERFKVDIPINISQILHHNTSTVITLGGSMCWVDLWRGILFCDMLSEKHALTGVPLPLPLIYYSGDRSKILGPAKCHRSIAFLDGCTRLVEVNSDVSIAEGTEFGCGRTEDWTITTWYNNNVHNNSYDDWHPDITLKASNIILGNHSVKLPLGLQYLFF

SEQ ID NO: 31381 - DNA, 1638 bp, Triticum aestivum
cccgatccgcctttcacggcgcgccaccctcgtcggttcactggagcacttcccactgccgcccggccgcgtggagatctgagcaggaagcccgcgccgcagcttatataacggcgcctcctcctccacattctcagcgcccatcacacccccgcagagccggaagccacacacacacgccttcctccttcctctgctcgcatctcggatcggggagaaggaggatctgaggctttcggcagggccggggacgatggcgccgctgctcaaggacgagctggacatcgtcatcccgacgatccggaacctggacttcctcgagatgtggaggcccttcttccagccgtaccacctcatcatcgtgcaggacggcgaccccacgaggaccgtcatggtgcccgagggcttcgactacgagctctacaaccgcaacgacatcaaccgcatcctcggccccaaggcctcctgcatctccttcaaggactccgcctgccgctgcttcggctacatggtctccaagaagaagtacgtctacaccatcgacgacgactgcttcgtggccaaggacccgacggggaaggacattgacgcgctggccaagcacatccagaacctgctctgcccctccacgccgctcttcttcaacaccctgtacgacccctaccaggagggcgccgacttcgtgcgcggctacccgttcagcctccgggagggcgtgcccaccgccgtgtcgcacggcctctggctcaacatccccgactacgacgcccccacgcagctggtcaagccgcgggagcgcaacggcaggtacgtcgacgccgtcatgaccatccccaagggctccctcttccccatgtgcggcatgaacctcgccttcgaccgcgagctcatcggcccggccatgtacttcggcctcatgggcgacggccagcccatcggacgctacgacgacatgtgggccggctggtgcgtcaaggtgatctgcgaccaccttgggctgggcgtcaagacggggctgccctacatctggcacagcaaggccagcaacccgttcgtgaacctgaagaaggagtacaagggcatcttctggcaggaggacatcatccccttcttccaggccgcgaagctgaccaaggaatgcgacaccgtgcagaagtgctacatctcgctctcgcagcaggtcaaggagaagctcggcaagatcgacccctacttcgtcaagctcgccgatgccatggtcacctggatcgaggcctgggacatgctcaactccaaggactccaaggaggccgatgccaacggcaagctcaaggggaggtagatcgagatcgagggagagaaccttttttgcactagcatactgagcaggcggtgaggcggcatataccggtttcttcagttcgtaggttcagtgcgtgcatcaggtattcaggttcaggctgttgtgtactacaaaacattagctgccgttctatcttacgtttacgttgagggtcgcgttaatttcccccttctttaatttcattattaagagatgatgtcgttttctcaagggtttagtactacggttatacttgtggctgctaatgtttccgtgtaatcttgtgtacactgaaatgtgagaataaaaagttgttc

SEQ ID NO: 31382 - protein, 355 aa, Triticum aestivum
MAPLLKDELDIVIPTIRNLDFLEMWRPFFQPYHLIIVQDGDPTRTVMVPEGFDYELYNRNDINRILGPKASCISFKDSACRCFGYMVSKKKYVYTIDDDCFVAKDPTGKDIDALAKHIQNLLCPSTPLFFNTLYDPYQEGADFVRGYPFSLREGVPTAVSHGLWLNIPDYDAPTQLVKPRERNGRYVDAVMTIPKGSLFPMCGMNLAFDRELIGPAMYFGLMGDGQPIGRYDDMWAGWCVKVICDHLGLGVKTGLPYIWHSKASNPFVNLKKEYKGIFWQEDIIPFFQAAKLTKECDTVQKCYISLSQQVKEKLGKIDPYFVKLADAMVTWIEAWDMLNSKDSKEADANGKLKGR

SEQ ID NO: 31383 - protein, 332 aa, Triticum aestivum
MWRPFFQPYHLIIVQDGDPTRTVMVPEGFDYELYNRNDINRILGPKASCISFKDSACRCFGYMVSKKKYVYTIDDDCFVAKDPTGKDIDALAKHIQNLLCPSTPLFFNTLYDPYQEGADFVRGYPFSLREGVPTAVSHGLWLNIPDYDAPTQLVKPRERNGRYVDAVMTIPKGSLFPMCGMNLAFDRELIGPAMYFGLMGDGQPIGRYDDMWAGWCVKVICDHLGLGVKTGLPYIWHSKASNPFVNLKKEYKGIFWQEDIIPFFQAAKLTKECDTVQKCYISLSQQVKEKLGKIDPYFVKLADAMVTWIEAWDMLNSKDSKEADANGKLKGR

SEQ ID NO: 31384 - protein, 309 aa, Triticum aestivum
MVPEGFDYELYNRNDINRILGPKASCISFKDSACRCFGYMVSKKKYVYTIDDDCFVAKDPTGKDIDALAKHIQNLLCPSTPLFFNTLYDPYQEGADFVRGYPFSLREGVPTAVSHGLWLNIPDYDAPTQLVKPRERNGRYVDAVMTIPKGSLFPMCGMNLAFDRELIGPAMYFGLMGDGQPIGRYDDMWAGWCVKVICDHLGLGVKTGLPYIWHSKASNPFVNLKKEYKGIFWQEDIIPFFQAAKLTKECDTVQKCYISLSQQVKEKLGKIDPYFVKLADAMVTWIEAWDMLNSKDSKEADANGKLKGR

SEQ ID NO: 31385 - DNA, 884 bp, Triticum aestivum
catgtcaggatttactgctcgttggaaatactactttatatggtcagtctcagaagctgcaattattatatctggcctgggtttcactggttggtctgattcttctcccccaaaagccaaatgggatcgtgctataaatgttgatattctgggcgtcgagctagctggaagtgcagctcaattgccacttaagtggaatattcaagtgagcacatggctaagatactatgtgtatgagaggttaattcagaaagggaagaagcctgttttccttcagttgttgggtacacagacagtcagtgctatctggcatggactgtatccaggatatatgtttttctttgttcagtcggcgttgatgataaatggttcaaaagtcatatacagatggcaacaagctgtgagcaattcaggcctccgcactatcctgtccttactaaattgtgcatacaccatgatggtgcttaactactcatgcattggcttccaggtactgagcttccaggagaccttagcatcctacaagagtgtgtattatgtcggcacaatcgttcctattctatgcgtcttgctgggctatgtcatcaagcccgcgagacctgtgaagccgaaggctcgcaaggcagaatgaggaacagagcgaattgatctttacatagatgagttacgaagcttcaatgatgattatgtcaagatagttttcagtttacttccatctttgtgaaacaatatcaaaatttagcaaaaaggataatgtggtggctccattgtaattgaccaatcattaaaaacctgttgtttcgtcgggctgatcacccatttgttttaccacacatgcaacacatgattcttggccctaagctgtatgttattcatttaccttc

SEQ ID NO: 31386 - protein, 209 aa, Triticum aestivum
MSGFTARWKYYFIWSVSEAAIIISGLGFTGWSDSSPPKAKWDRAINVDILGVELAGSAAQLPLKWNIQVSTWLRYYVYERLIQKGKKPVFLQLLGTQTVSAIWHGLYPGYMFFFVQSALMINGSKVIYRWQQAVSNSGLRTILSLLNCAYTMMVLNYSCIGFQVLSFQETLASYKSVYYVGTIVPILCVLLGYVIKPARPVKPKARKAE

SEQ ID NO: 31387 - DNA, 2010 bp, Triticum aestivum
aacttttttcccctcgtcgtccccacttttttttctcccactccgcccccgattctccccaatcccctctcgccgccgccaggaggcagcaccggaatcgcggcgaccgaagatcccctccgacccacgccaaggaatcccgccgatccgctcgcgcctcccggatggccctgcaccagcaccacgcggggtcggcgtccgggtcggcgtcggcgtccagctccagttcggggctgcacctgcccgcctcgcccttcggggacaccacccacaccaagctcttcgtcgggggcctcgcctgggagaccaccagcgagaggctccgccgcttctacgagcgcttcggggacatcctcgaggccgtcgtcatcaccgaccgccactccggccgctccaaaggatacggcttcgtgacgttccgcgatgccgaggcggccaccaaggcctgcgaggaaccgtcgccggtcatcgatggcaggcgggccaactgtaacctggcgtcgctaggtcgcgcccagccttccacacccctcgggcggccacgatcagctggctcctactttggtgttcctgtcccaaggggcatttatgtaggtggttatggtcagcaccgaccccttccgcttgggtactaccagtaccagggatttccggttccacaatacagttactccgcatatggcaccgactacatctatccacagggtacattaaacccatatgttggtcagcaatatgttccagtttacggtgtctcagctgcagcaaatactgctaaccaaccatttagccaattgagcccatccatttctggtgggggcaacggctatccgatgatgcatggttacagtatgccaggaaatcaatttgtgcatctcactgggtcaaacttaattaattcatccccaacaaatcgtcccaccattcaggctccctttttagtagcagcaccggttccctcccatccacacttagttgtaccagcccactcacctcagtttacacaagctagtggttcagactaaagagcaagctgaactatgcacccaacaatttataccttgaggtaactttagtttgcagcaggactaaaagaacagtgctgctgtatttgcagcacttgttcttacctggaaaaaaatcatccttgtattcataaggttgtccttatcatggttgacatatgtacctggagatcatgaactgtcccgatggatggggcggtatcgcaagagcgacggctgctcttatcagtttggcttggttaaaatcctgtcctggtgggggactgtgatcgtcgatgtctagatacagcattattgattctgtatctgacaagtcatggatatatggtggatgctggaatggagtccagcaccctgtaagtttgactaatccaaggggattagtcatgatggcactcttaagaatcagggatgagtcacgatttgatggcactgagatgagtatccatctgaagagtcgccaagttagtgtgctttagtgtcgcaaagtttgagtcttgcacaagcaaaagtcagtgtcatgatctatcactctggtttggcactaggcctattgatagccacattatggatttacaatgctccgcttgaccgtaagcaggatgttcagtttgcccaaagggtggccggagatggtcctgcgtctgtaccaatttccccttagagcttctctgcgttattacacaattattgatcagatcaaggtgcattttgatccgtgttacagttggtgtcggttcaagaaccactgttgttttgtaatatgtcccagaagttctaatttagattcatgatgccctgagcttggtagctccaagatcggagtcttgttgtacttgaataataataaatccatctgctctgagtccagtgattgggtgcctgtcataatggattttcatgaacttggtggcatgaaaagatgtactgttggtacaattgagctgtgtgttaactcaagaaaaatagtttgtgaacaatgttc

SEQ ID NO: 31388 - protein, 340 aa, Triticum aestivum
LFSPRRPHFFFSHSAPDSPQSPLAAARRQHRNRGDRRSPPTHAKESRRSARASRMALHQHHAGSASGSASASSSSSGLHLPASPFGDTTHTKLFVGGLAWETTSERLRRFYERFGDILEAVVITDRHSGRSKGYGFVTFRDAEAATKACEEPSPVIDGRRANCNLASLGRAQPSTPLGRPRSAGSYFGVPVPRGIYVGGYGQHRPLPLGYYQYQGFPVPQYSYSAYGTDYIYPQGTLNPYVGQQYVPVYGVSAAANTANQPFSQLSPSISGGGNGYPMMHGYSMPGNQFVHLTGSNLINSSPTNRPTIQAPFLVAAPVPSHPHLVVPAHSPQFTQASGSD

SEQ ID NO: 31389 - protein, 286 aa, Triticum aestivum
MALHQHHAGSASGSASASSSSSGLHLPASPFGDTTHTKLFVGGLAWETTSERLRRFYERFGDILEAVVITDRHSGRSKGYGFVTFRDAEAATKACEEPSPVIDGRRANCNLASLGRAQPSTPLGRPRSAGSYFGVPVPRGIYVGGYGQHRPLPLGYYQYQGFPVPQYSYSAYGTDYIYPQGTLNPYVGQQYVPVYGVSAAANTANQPFSQLSPSISGGGNGYPMMHGYSMPGNQFVHLTGSNLINSSPTNRPTIQAPFLVAAPVPSHPHLVVPAHSPQFTQASGSD

SEQ ID NO: 31390 - DNA, 1326 bp, Triticum aestivum
tcttcgccacccgctccccgctccagaccgccgccgccgccgccgccgtgcgccatggtgaggctcaacgccgacctgatatggaagagcccgcacttcttcaacgccatcaaggagcgcgagctcgacctccgaggcaacaagatcgccatcatcgagaacatcggcgccaccgaggaccagtttgacactattgacttgtcggacaacgagattgtcaagcttgagaacttccctttcatgaatcgccttggcactctgttaatcaacaacaacagaattacacgtatcaatcccaaccttggtgagtttttacccaagatgcatactttggtgctgacgaacaatcgccttacaagtcttgcggagattgaccccctggcctctcttccaaagctgcaatttctcagcttactggataataccgtaactaagcaaccagattaccggttatatgtgatccacaaactgaagcatctgcgtttgctggacttcaagaaagtgaaacaacaggagagagctgacgcagcacaaaagttccactcaaaggaggcagaggaggcggcaaagaaggttgctgccaaagcttataccccagtagtgatggatgctcaaggtaccacaaaagaccagggccctaaagtagtcgctccaacgcctgcacaaatcacagctatcaaggctgctatcattaactcgcagacgcttgacgaagttacaaggcttgagaaggcattgagcactggccaagttcctgctgagtttgcgctccccaagcctgacaccaacatggctgaggcgtcagaggaagctgaagctgagaagatggagacagatggccaggaccaggaggaggatggggctgatgagcagaagcaagcagatgaaagcaccccgattcaggaggattgatgtcatgcatacacctgaatctgcctgttctcgtggggggatgaaaccatgtgcggcgactcggcgatctcgtgggggaattctcgactcggcgatctagtgtcagtatattgattgatgtatcctgtggatgctaacaacgcttttcagtacatggtactgttgtccgagtcgaggaaggtttacgcccaggggacctagatgtgttggatgttttagaagacgatgcgttgcgcgctgaatgaatgttgctgagactctactcccgcggtgtgtcgacaacgccgacttgcttgggctccattgttgttaaatttgctacgctacctattgatagatggtttttcttggaatttggatcttgctggggttgtaattcatcaggagaggatgtatctccatcagatttttggt

SEQ ID NO: 31391 - protein, 303 aa, Triticum aestivum
SSPPAPRSRPPPPPPPCAMVRLNADLIWKSPHFFNAIKERELDLRGNKIAIIENIGATEDQFDTIDLSDNEIVKLENFPFMNRLGTLLINNNRITRINPNLGEFLPKMHTLVLTNNRLTSLAEIDPLASLPKLQFLSLLDNTVTKQPDYRLYVIHKLKHLRLLDFKKVKQQERADAAQKFHSKEAEEAAKKVAAKAYTPVVMDAQGTTKDQGPKVVAPTPAQITAIKAAIINSQTLDEVTRLEKALSTGQVPAEFALPKPDTNMAEASEEAEAEKMETDGQDQEEDGADEQKQADESTPIQED

SEQ ID NO: 31392 - protein, 285 aa, Triticum aestivum
MVRLNADLIWKSPHFFNAIKERELDLRGNKIAIIENIGATEDQFDTIDLSDNEIVKLENFPFMNRLGTLLINNNRITRINPNLGEFLPKMHTLVLTNNRLTSLAEIDPLASLPKLQFLSLLDNTVTKQPDYRLYVIHKLKHLRLLDFKKVKQQERADAAQKFHSKEAEEAAKKVAAKAYTPVVMDAQGTTKDQGPKVVAPTPAQITAIKAAIINSQTLDEVTRLEKALSTGQVPAEFALPKPDTNMAEASEEAEAEKMETDGQDQEEDGADEQKQADESTPIQED

SEQ ID NO: 31393 - protein, 223 aa, Triticum aestivum
MNRLGTLLINNNRITRINPNLGEFLPKMHTLVLTNNRLTSLAEIDPLASLPKLQFLSLLDNTVTKQPDYRLYVIHKLKHLRLLDFKKVKQQERADAAQKFHSKEAEEAAKKVAAKAYTPVVMDAQGTTKDQGPKVVAPTPAQITAIKAAIINSQTLDEVTRLEKALSTGQVPAEFALPKPDTNMAEASEEAEAEKMETDGQDQEEDGADEQKQADESTPIQED

SEQ ID NO: 31394 - DNA, 1493 bp, Triticum aestivum
ctcggcgctcgctttcttccgtcgcgccgccgctccccagtctcccctcggaggcaacaccacctctcccagcgccgccggccttaatccagagttccaacccggcgcatcccccccacacccgcccgcccaaaatcccacaatggcagcatccagggctcaatatcgatgatgccgtcgaggtgcacagcagagacggcgcgggccacggtcgcgttcgagatcgccggctacagcctgctcaagggcttcggtagaggcaaatgcctccgttctccggcattctccatcggcggctacgaatggtgcatccactacttccccgacggaagcaaaagcgaggcaggcgaaggatacgtctccgtcttcctcgtcctcttaaccaagaacgccgaggtgagggcgatcttcaacttgatgcttgtggagccggttggggggaaatcgattgtggtgtgctccttcaaagagccactagtgttcgaccctaaaaggatatcttggggcaaaacaaagttcatgaagaccaccactgaagtagagtcgctctacctgcgaaatgattgtctcgtgatcgagtgcgaagtcagtgttatcaaggaaacactcgaggtccacgtcccgccgtcccgccttttggataatcttgcaaaattactagagggcaagaaaggagcagacgtgactttcaaggtgcaaggggaggttttttctgctcataaggttttgcttgcgacgcaatcagcagtcttcgacgcggagttctacgggccgatgggggacaaaggggcgcaagacataactattgatgacatgcagcctgctgttttcaagtcatttcttcacttcatctacacggattcaatgccttccatggacgagctcgaggatgatgacaaaagagaaatggttaagcacttgtggctgcagataagtatgccatggaaaggatgaagatgatatgtgaaggcatgctatgcaagagtcttgatgttgagaatgtggcgaccatattagctctagctgagcagcacaattgcagcaatctcaaagatgcttgcattgaatttatgctctcttcgaatagaatgaatgatgtgatcgcaagccaagggtatgtacaactcaagagatcttcgcctgatatcattgtagatgtgttggagagagcagctaagtcccgcaaaatttagtacgccaatctggtatgagctactgcttatccttccgttccgattgatctttggaggcaaatgtcttatgttgggttggagaaggcaactaagtcatgctaaatttgtagtatagtgcccatcctgggttagcttctatctagttacttttgctaaatagtgaccttagatgaggttgccatgcctttgtgtttccagagatcttttggggtaagcagtttgttgtataaaatgtatgtctacaagtgtattggttgtcccgtctgatataagtatatatgaatctatggttgctcactc

SEQ ID NO: 31395 - protein, 261 aa, Triticum aestivum
MMPSRCTAETARATVAFEIAGYSLLKGFGRGKCLRSPAFSIGGYEWCIHYFPDGSKSEAGEGYVSVFLVLLTKNAEVRAIFNLMLVEPVGGKSIVVCSFKEPLVFDPKRISWGKTKFMKTTTEVESLYLRNDCLVIECEVSVIKETLEVHVPPSRLLDNLAKLLEGKKGADVTFKVQGEVFSAHKVLLATQSAVFDAEFYGPMGDKGAQDITIDDMQPAVFKSFLHFIYTDSMPSMDELEDDDKREMVKHLWLQISMPWKG

SEQ ID NO: 31396 - protein, 260 aa, Triticum aestivum
MPSRCTAETARATVAFEIAGYSLLKGFGRGKCLRSPAFSIGGYEWCIHYFPDGSKSEAGEGYVSVFLVLLTKNAEVRAIFNLMLVEPVGGKSIVVCSFKEPLVFDPKRISWGKTKFMKTTTEVESLYLRNDCLVIECEVSVIKETLEVHVPPSRLLDNLAKLLEGKKGADVTFKVQGEVFSAHKVLLATQSAVFDAEFYGPMGDKGAQDITIDDMQPAVFKSFLHFIYTDSMPSMDELEDDDKREMVKHLWLQISMPWKG

SEQ ID NO: 31397 - protein, 178 aa, Triticum aestivum
MLVEPVGGKSIVVCSFKEPLVFDPKRISWGKTKFMKTTTEVESLYLRNDCLVIECEVSVIKETLEVHVPPSRLLDNLAKLLEGKKGADVTFKVQGEVFSAHKVLLATQSAVFDAEFYGPMGDKGAQDITIDDMQPAVFKSFLHFIYTDSMPSMDELEDDDKREMVKHLWLQISMPWKG

SEQ ID NO: 31398 - DNA, 545 bp, Triticum aestivum
ctattgcagcaaattctccagcatcagttggtactgcaggatatggctatgtagctaataaccatggtacaggagggccagcaattggacagccacctgcacctgccactaatagtaaaacgtctgctactcaaccagctacgagtgaggtctatctggtgtgggatgatgaagcaatgtcaatggaggaaagaaggttggcgctgcccatgtaccaggtgcatgacgaaactagccagatgagctcggttgatgcagcgttcgatcgaagaatatcagatattacattttctagacaattgacataaacaagctgcgcctggtgttcagtaaacagcttgatgcgattcaccaacgggctcacccgtgcatccatgggagggacgccgtgcaatcggtggtcctggatcccccctgttgttgatctacttagttagtgactggagctaccgcagtggaaagattgtgttggtctgacttggagattttgattcaacatcgtttgtcctgtcttttcgtaccgagagtggaaacctgttagacct

SEQ ID NO: 31399 - protein, 101 aa, Triticum aestivum
IAANSPASVGTAGYGYVANNHGTGGPAIGQPPAPATNSKTSATQPATSEVYLVWDDEAMSMEERRLALPMYQVHDETSQMSSVDAAFDRRISDITFSRQLT

SEQ ID NO: 31400 - protein, 59 aa, Triticum aestivum
MVQEGQQLDSHLHLPLIVKRLLLNQLRVRSIWCGMMKQCQWRKEGWRCPCTRCMTKLAR

SEQ ID NO: 31401 - protein, 43 aa, Triticum aestivum
MSMEERRLALPMYQVHDETSQMSSVDAAFDRRISDITFSRQLT

SEQ ID NO: 31402 - DNA, 604 bp, Triticum aestivum
gagagatgagcgggaacgaggttgagaaggccaaggctgccgccggcggcggcgtaggggagtacgggacgttccatggtccgcccagctacccgcccccgcgcccgcccgtcgggcacccgcagcccgccccgccgcccggcctccacggccatcgcgagcccaactcgcgccaccgcggcggctaccaggccgggaacgctcaagatcacgaagcaggtgcgcgtggacatagacctgaccgccttccatgctgcggtattggcatgggctggtttctattcataatcggtttctttcttggtgccatcccctggtatgtcggagcatttctgttgtggtattctagagtggattacagggagaaaccaggatatgtggcatgcacaatagcggctgtccttgctacaattgccgtcatcatcggggcaaccgctggagctcacgtttattgatgtcagtctacattgtgtcactgtacatattgtacatttcatggatgaagaaagatgtcatgtcgcgtcttctgcactgtatttgattattaactttgaaatattcaatgtatgacgaggagaaccaagtccttgttatggtcacaaat

SEQ ID NO: 31403 - protein, 150 aa, Triticum aestivum
EMSGNEVEKAKAAAGGGVGEYGTFHGPPSYPPPRPPVGHPQPAPPPGLHGHREPNSRHRGGYQAGNAQDHEAGARGHRPDRLPCCGIGMGWFLFIIGFFLGAIPWYVGAFLLWYSRVDYREKPGYVACTIAAVLATIAVIIGATAGAHVY

SEQ ID NO: 31404 - protein, 149 aa, Triticum aestivum
MSGNEVEKAKAAAGGGVGEYGTFHGPPSYPPPRPPVGHPQPAPPPGLHGHREPNSRHRGGYQAGNAQDHEAGARGHRPDRLPCCGIGMGWFLFIIGFFLGAIPWYVGAFLLWYSRVDYREKPGYVACTIAAVLATIAVIIGATAGAHVY

SEQ ID NO: 31405 - DNA, 974 bp, Triticum aestivum
cccacactttcccatccccttgcgccgattcacggcagctgcgtctcccctctgcgccgggccccgcctcagcacccgtgacgcgcccctggccccgctaccgccgaaaacaaaaacccgccgccggcgggccagcgcgcactccatcatcagcatcccacctcttccgctcggagcgcggcatctgcccgagcaagcgatcccgcgagatgtcggcagatgctgctgcggcggcgagcgtgggcaagctggtgctcgacactggctggctcgccgcgcgctccaccgaggtggccctcaccggcgtcgagctcaccaccacccacccgccggacgcctccgtcgccgccccgtggatgcacgccgccgtccccggaaccgtgctggggacccttctaaaaaacaagttgatccctgatcccttctacgggctgaacaacgaggcaatcatcgacatcgccgattccgggagggagtactacacgttctggttcttcaccaccttccagtgtgctccggcaggaaaccggcacgtgagtttaaacttccgtggagtaaactactcagcagaagtatacataaatgggcacaaagagatacttccaaaaggaatgttccgaaggcacacccttgatattactgaagttcttcatcctgagggcagcaatctgcttgctgtcctcgttcatcctcctgatcatcctggtacgattcctcctcagggaggtcaaggcggtgatcatgagattggaaaagatgttgctacgcaatatgttgaaggatgggattggatgtgcccgataagggatagaaacacgggaatctgggatgaagtttcgatctgcataactggggctgtgaacataaccgatccccatctggtttcaacttttcatgacgattttaagagatcgtatctacattgtacacttcagttggagaacaaaagttcatggctcgcagattgtagttta

SEQ ID NO: 31406 - protein, 324 aa, Triticum aestivum
HTFPSPCADSRQLRLPSAPGPASAPVTRPWPRYRRKQKPAAGGPARTPSSASHLFRSERGICPSKRSREMSADAAAAASVGKLVLDTGWLAARSTEVALTGVELTTTHPPDASVAAPWMHAAVPGTVLGTLLKNKLIPDPFYGLNNEAIIDIADSGREYYTFWFFTTFQCAPAGNRHVSLNFRGVNYSAEVYINGHKEILPKGMFRRHTLDITEVLHPEGSNLLAVLVHPPDHPGTIPPQGGQGGDHEIGKDVATQYVEGWDWMCPIRDRNTGIWDEVSICITGAVNITDPHLVSTFHDDFKRSYLHCTLQLENKSSWLADCSL

SEQ ID NO: 31407 - protein, 255 aa, Triticum aestivum
MSADAAAAASVGKLVLDTGWLAARSTEVALTGVELTTTHPPDASVAAPWMHAAVPGTVLGTLLKNKLIPDPFYGLNNEAIIDIADSGREYYTFWFFTTFQCAPAGNRHVSLNFRGVNYSAEVYINGHKEILPKGMFRRHTLDITEVLHPEGSNLLAVLVHPPDHPGTIPPQGGQGGDHEIGKDVATQYVEGWDWMCPIRDRNTGIWDEVSICITGAVNITDPHLVSTFHDDFKRSYLHCTLQLENKSSWLADCSL

SEQ ID NO: 31408 - protein, 206 aa, Triticum aestivum
MHAAVPGTVLGTLLKNKLIPDPFYGLNNEAIIDIADSGREYYTFWFFTTFQCAPAGNRHVSLNFRGVNYSAEVYINGHKEILPKGMFRRHTLDITEVLHPEGSNLLAVLVHPPDHPGTIPPQGGQGGDHEIGKDVATQYVEGWDWMCPIRDRNTGIWDEVSICITGAVNITDPHLVSTFHDDFKRSYLHCTLQLENKSSWLADCSL

SEQ ID NO: 31409 - DNA, 976 bp, Triticum aestivum
ccaccactcactgagaggcacccagcagcagcagccggctaggccaccgtacgtacggactccgatccggagcagcaggcatggcatccaccatcatggccgccgcctcccgcgccgtcgtcgccaagacgccgttcctcagcggccagggccgcgccgcaggcgccagccccctgcgcgacatcgccgccgcggccaacggcagaatcaccatgggcaacgacttgtggtacggcccggaccgcgtcaagtacctggggcccttctccgcgcagacgccgtcctacctgaacggcgagttcccgggcgactacggctgggacaccgccgggctttccgccgacccggaggcgttcgctaggaacagggcgctggaggtgatccacgggcggtgggcgatgctcggcgctcttgggtgcgtcttccccgaggtgctccagaagtgggtgggcgtcgagttcaaggagcccgtctggttcaaggccggctcgcagatcttctccgagggtggcctcgactaccttgggaaccccaacctcgtccacgcgcagagcatccttgccgtgctgggcttccaggtccttctcatgggcctggtcgaagggttccgcatcaatggtctcgacggtgtcggcgagggcaacgacctctaccccggcggccagtacttcgacccgctcggccttgccgacgaccctgtcaccttcgctgagctcaaggtgaaggagatcaagaatggccgtctcgccatgttctccatgtttgggttcttcgtccaagctatcgtcaccggcaagggcccattggagaacctgttcgaccacctcgacgaccctgtcgccaacaatgcatgggttttcgccaccaagtttgcgcctggatcttaggctggccgacgttgccattgtaaagtgtaaactactcccatgtgtgtgtgtgtgtgtgcaaatagcaacgaatggtcgatgtgatctcg

SEQ ID NO: 31410 - protein, 268 aa, Triticum aestivum
MASTIMAAASRAVVAKTPFLSGQGRAAGASPLRDIAAAANGRITMGNDLWYGPDRVKYLGPFSAQTPSYLNGEFPGDYGWDTAGLSADPEAFARNRALEVIHGRWAMLGALGCVFPEVLQKWVGVEFKEPVWFKAGSQIFSEGGLDYLGNPNLVHAQSILAVLGFQVLLMGLVEGFRINGLDGVGEGNDLYPGGQYFDPLGLADDPVTFAELKVKEIKNGRLAMFSMFGFFVQAIVTGKGPLENLFDHLDDPVANNAWVFATKFAPGS

SEQ ID NO: 31411 - protein, 263 aa, Triticum aestivum
MAAASRAVVAKTPFLSGQGRAAGASPLRDIAAAANGRITMGNDLWYGPDRVKYLGPFSAQTPSYLNGEFPGDYGWDTAGLSADPEAFARNRALEVIHGRWAMLGALGCVFPEVLQKWVGVEFKEPVWFKAGSQIFSEGGLDYLGNPNLVHAQSILAVLGFQVLLMGLVEGFRINGLDGVGEGNDLYPGGQYFDPLGLADDPVTFAELKVKEIKNGRLAMFSMFGFFVQAIVTGKGPLENLFDHLDDPVANNAWVFATKFAPGS

SEQ ID NO: 31412 - protein, 224 aa, Triticum aestivum
MGNDLWYGPDRVKYLGPFSAQTPSYLNGEFPGDYGWDTAGLSADPEAFARNRALEVIHGRWAMLGALGCVFPEVLQKWVGVEFKEPVWFKAGSQIFSEGGLDYLGNPNLVHAQSILAVLGFQVLLMGLVEGFRINGLDGVGEGNDLYPGGQYFDPLGLADDPVTFAELKVKEIKNGRLAMFSMFGFFVQAIVTGKGPLENLFDHLDDPVANNAWVFATKFAPGS

SEQ ID NO: 31413 - DNA, 1976 bp, Triticum aestivum
ctctctccacaccacaagccgccgccgaccgctcgctgggaggggaatagaaatcgtgtatcgtagggttgcgcaaaccgccgccaagaggggagccaagtccagcgccgctgcctcgtcctcgtcggcgtcgtcggcggccgataaggccgccaatggcatagcggcccttaacttatccgatcggacatgtaccggggtcctggcttcgcatccgctctcccgtgatatccacattgagtccctttcattaacatttcatggacatgaccttattgtggattcagaattggagcttaactacgggaggcggtatggtttgctcggcttaaatggttgtgggaaatctacccttctcaccgcaataggctgcagggaactccccattcctgaacacatggacatacatcatcttacgcgtgagattgaggcttctgacatgtctgcgctgcaagctgttatctgttgtgatgaagaaagagtgaagttggaaaaggaagctgaaattctggctgcacaggatgatggtggcggtgaagctttggatcttgtatatgagcggttagaagcaatggatgcatcaactgctgaaaagcgtgctgctgagatattgtttggtctaggttttgacaagcaaatgcaagcaaagccaacacgagatttttctgggggttggcgtatgaggattgcattggcaagggcgctgttcatgaacccgaccatccttttgcttgatgagccaaccaaccatcttgatctcgaggcttgtgtctggctggaagagaaattaaagaattttgagcgtatacttgttgttatctcgcattcccaagattttctaaatggagtgtgcactaacatcatccacatgcagaacaagaccctcaagttatatactggaaattatgaccagtatgttcaaactcgctctgagcttgaagagaatcaaatgaagcagtacaaatgggaacaggaacagatagctaatatgaaggagtacattgcccgatttggtcatggatctgcgaagcttgctcgtcaggctcagagcaaagagaagactcttgcaaagatggagcgtggtggtcttgctgagaaggttgtcaatgacaggattcttgttttccgctttacagatgttggcaaactcccaccaccagtgctgcagtttgctgatgtgacatttggttacactccggataatctcatctacaagaaccttgacttcggtgttgaccttgactcgagagttgcactggtcggtcccaatggggcaggtaagagcacacttctgaagctcatgacaggtgacctatctccgttggatggcatggtcagacgccacaaccacctacgcattgcacaattccatcaacatctcactgagaagctggacctggacatgccggccctgcagtacatgatgagggagtaccctgggaatgaagaggagaagatgagagctgcgattggcaagtttggcctgtcaggaaaggcacaggtgatgccaatgaaaaacctgtctgatgggcagaaggcccgtgtcatttttgcttggctagcatttaggcagccacagatgctgttgcttgatgagccgacaaatcatcttgacattgagaccattgactcacttgctgaggcactgaaggaatgggacggggggttggtcctggtgagccatgacttcaggctgatcaatcaggttgctcaagagatctgggtctgtgagaaccaggcggtgactaggtgggaaggcgatatcatggatttcaagcaacacttgaagaaaagggctggtctctagatttcctgtcttttccttctcggctctttggagatctagacaacccaaagtttttgcctgtatcagaaaagtttccatcatttagcgtgacaagtatgagtattattgtatcacttaaaacatatcttctccacactattttataaccagacgatccgtgtttaattcc

SEQ ID NO: 31414 - protein, 601 aa, Triticum aestivum
SLHTTSRRRPLAGRGIEIVYRRVAQTAAKRGAKSSAAASSSSASSAADKAANGIAALNLSDRTCTGVLASHPLSRDIHIESLSLTFHGHDLIVDSELELNYGRRYGLLGLNGCGKSTLLTAIGCRELPIPEHMDIHHLTREIEASDMSALQAVICCDEERVKLEKEAEILAAQDDGGGEALDLVYERLEAMDASTAEKRAAEILFGLGFDKQMQAKPTRDFSGGWRMRIALARALFMNPTILLLDEPTNHLDLEACVWLEEKLKNFERILVVISHSQDFLNGVCTNIIHMQNKTLKLYTGNYDQYVQTRSELEENQMKQYKWEQEQIANMKEYIARFGHGSAKLARQAQSKEKTLAKMERGGLAEKVVNDRILVFRFTDVGKLPPPVLQFADVTFGYTPDNLIYKNLDFGVDLDSRVALVGPNGAGKSTLLKLMTGDLSPLDGMVRRHNHLRIAQFHQHLTEKLDLDMPALQYMMREYPGNEEEKMRAAIGKFGLSGKAQVMPMKNLSDGQKARVIFAWLAFRQPQMLLLDEPTNHLDIETIDSLAEALKEWDGGLVLVSHDFRLINQVAQEIWVCENQAVTRWEGDIMDFKQHLKKRAGL

SEQ ID NO: 31415 - protein, 469 aa, Triticum aestivum
MDIHHLTREIEASDMSALQAVICCDEERVKLEKEAEILAAQDDGGGEALDLVYERLEAMDASTAEKRAAEILFGLGFDKQMQAKPTRDFSGGWRMRIALARALFMNPTILLLDEPTNHLDLEACVWLEEKLKNFERILVVISHSQDFLNGVCTNIIHMQNKTLKLYTGNYDQYVQTRSELEENQMKQYKWEQEQIANMKEYIARFGHGSAKLARQAQSKEKTLAKMERGGLAEKVVNDRILVFRFTDVGKLPPPVLQFADVTFGYTPDNLIYKNLDFGVDLDSRVALVGPNGAGKSTLLKLMTGDLSPLDGMVRRHNHLRIAQFHQHLTEKLDLDMPALQYMMREYPGNEEEKMRAAIGKFGLSGKAQVMPMKNLSDGQKARVIFAWLAFRQPQMLLLDEPTNHLDIETIDSLAEALKEWDGGLVLVSHDFRLINQVAQEIWVCENQAVTRWEGDIMDFKQHLKKRAGL

SEQ ID NO: 31416 - protein, 455 aa, Triticum aestivum
MSALQAVICCDEERVKLEKEAEILAAQDDGGGEALDLVYERLEAMDASTAEKRAAEILFGLGFDKQMQAKPTRDFSGGWRMRIALARALFMNPTILLLDEPTNHLDLEACVWLEEKLKNFERILVVISHSQDFLNGVCTNIIHMQNKTLKLYTGNYDQYVQTRSELEENQMKQYKWEQEQIANMKEYIARFGHGSAKLARQAQSKEKTLAKMERGGLAEKVVNDRILVFRFTDVGKLPPPVLQFADVTFGYTPDNLIYKNLDFGVDLDSRVALVGPNGAGKSTLLKLMTGDLSPLDGMVRRHNHLRIAQFHQHLTEKLDLDMPALQYMMREYPGNEEEKMRAAIGKFGLSGKAQVMPMKNLSDGQKARVIFAWLAFRQPQMLLLDEPTNHLDIETIDSLAEALKEWDGGLVLVSHDFRLINQVAQEIWVCENQAVTRWEGDIMDFKQHLKKRAGL

SEQ ID NO: 31417 - DNA, 829 bp, Triticum aestivum
ataacttcaagacacttcactaaataatctataataaaatgaagatgataattcacatttttttcatcctctccctagtttcatcaacctcttttgcctctgttcaagacttctgtgtagctgatccaaagggtcctcaaagcccatcaggatactcttgcaagaaccctgaccaagtcaccgaaaatgactttgcattctccggcctcgccaaagctggaaacacttcgaacctcattaaagccgcagtgacgccagcctttgcccctgctttcgcaggcaccaatggtcttggagtctcaatggctcgtcttgacttagccggtggtggtgtcattcctcttcacacacatcctggtgcgtctgaggttcttgtagtcatacaaggaaccatctgcgccgggtttatttcctctgctaacaaagtttacttgaagactctccagagaggtgattctatggtgtttcctcaaggacttcttcattttcagcttaactctgggaaaggccctgctttggcttttgttgccttcggaagctcatccccaggacttcagattctaccttttgctctgtttgctaatgatttgccttcagagctcgttgaagccaccacctttcttagtgatgaagaagttaagaagcttaagggtgtgcttggaggaactgattaagcttatctttcgttttttttctaagttttgtgtgtgtgtttatgcgctttttattcaagttcgtttagcattttattgcgtgtaattgttctaagtgtttcattttcattgtctctaaggcttaaattttaattaagtaataagcattgcattgc

SEQ ID NO: 31418 - protein, 211 aa, Triticum aestivum
MKMIIHIFFILSLVSSTSFASVQDFCVADPKGPQSPSGYSCKNPDQVTENDFAFSGLAKAGNTSNLIKAAVTPAFAPAFAGTNGLGVSMARLDLAGGGVIPLHTHPGASEVLVVIQGTICAGFISSANKVYLKTLQRGDSMVFPQGLLHFQLNSGKGPALAFVAFGSSSPGLQILPFALFANDLPSELVEATTFLSDEEVKKLKGVLGGTD

SEQ ID NO: 31419 - protein, 209 aa, Triticum aestivum
MIIHIFFILSLVSSTSFASVQDFCVADPKGPQSPSGYSCKNPDQVTENDFAFSGLAKAGNTSNLIKAAVTPAFAPAFAGTNGLGVSMARLDLAGGGVIPLHTHPGASEVLVVIQGTICAGFISSANKVYLKTLQRGDSMVFPQGLLHFQLNSGKGPALAFVAFGSSSPGLQILPFALFANDLPSELVEATTFLSDEEVKKLKGVLGGTD

SEQ ID NO: 31420 - protein, 123 aa, Triticum aestivum
MARLDLAGGGVIPLHTHPGASEVLVVIQGTICAGFISSANKVYLKTLQRGDSMVFPQGLLHFQLNSGKGPALAFVAFGSSSPGLQILPFALFANDLPSELVEATTFLSDEEVKKLKGVLGGTD

SEQ ID NO: 31421 - DNA, 926 bp, Triticum aestivum
ccgtgtctccctccctccctccctctccaccgcccccctagtctgacaccgccaaaatcccaccgcgccacgctgatggcttcgccgccgacgggacccgcggcgccggcgggcttggagagcatggaggggctcgccctcgacatcatcatcgccaaggccggcgcgcgccccgcggccgcgctcgcctgcgccagcacgcacctgcgcgccgccgtggccgaggacgccgtctggcgcagcttctgcgcccgagacctcggcctcgacgcgcccctcgaccccgaggaccgcccgctcccctccttcaaggtacgtgcatctgctgtctttgtgccagaacatcctcgtcgggggcatttgggcacacatctgtacagctattccatccgcctgtcagttcctgaggcatgcatgctaggtggggtttacttttcttcctgccagcttcactcacgccactggatcatccgatgtaaagacacggttgtttcggatatgcatggggaaggtgttattggggagcaccctttacttttaccagggcaggacgagtttgtctatgagagctgcacgccgctgaatggcagtagtggatctgtggagggctcttttacatttgtgcctgggaggttgacccagccagaaggaaaaccattcgacgtcacggtggctccgttccctctggaagtacccgactacatcttctgagcatagtatgtgcacctaataacagtgtagtatcttggtagaaacaccgaacatatctctagtactctgtctgctgtagcaaagttgctctgcctggagttgatcttgtcgatgtaatgttaactaaaggacgcaaatggttgtcgtgcgccgaccttcttccggttcctggctgtggccctaaaggaatctgtagcaggtggagcttgtttgtt

SEQ ID NO: 31422 - protein, 236 aa, Triticum aestivum
PCLPPSLPLHRPPSLTPPKSHRATLMASPPTGPAAPAGLESMEGLALDIIIAKAGARPAAALACASTHLRAAVAEDAVWRSFCARDLGLDAPLDPEDRPLPSFKVRASAVFVPEHPRRGHLGTHLYSYSIRLSVPEACMLGGVYFSSCQLHSRHWIIRCKDTVVSDMHGEGVIGEHPLLLPGQDEFVYESCTPLNGSSGSVEGSFTFVPGRLTQPEGKPFDVTVAPFPLEVPDYIF

SEQ ID NO: 31423 - protein, 211 aa, Triticum aestivum
MASPPTGPAAPAGLESMEGLALDIIIAKAGARPAAALACASTHLRAAVAEDAVWRSFCARDLGLDAPLDPEDRPLPSFKVRASAVFVPEHPRRGHLGTHLYSYSIRLSVPEACMLGGVYFSSCQLHSRHWIIRCKDTVVSDMHGEGVIGEHPLLLPGQDEFVYESCTPLNGSSGSVEGSFTFVPGRLTQPEGKPFDVTVAPFPLEVPDYIF

SEQ ID NO: 31424 - protein, 195 aa, Triticum aestivum
MEGLALDIIIAKAGARPAAALACASTHLRAAVAEDAVWRSFCARDLGLDAPLDPEDRPLPSFKVRASAVFVPEHPRRGHLGTHLYSYSIRLSVPEACMLGGVYFSSCQLHSRHWIIRCKDTVVSDMHGEGVIGEHPLLLPGQDEFVYESCTPLNGSSGSVEGSFTFVPGRLTQPEGKPFDVTVAPFPLEVPDYIF

SEQ ID NO: 31425 - DNA, 1282 bp, Triticum aestivum
aactggtggggggcggtggcaagtgcaaccgtgcgtgcgctcctgtatccatctgtctgccgggactcatcgtctcctccttccccaatcgccattgtcggtggtgcaagcaagcgcgccgaggcgtgtgggagggacatggcggggcgctacgatggcggcaaccctttcgaggaggaggaggacgtgaaccctttctcggaacaaacgcgaggcaaagctggcgggcagtccaactatggcggcggcggcgcgttctacatgccgaatcccagaaacgttgccccctcctcgaattcgcggctttcgccccttcccccggaacctgcagatttcagtgccacagtggatatccctcttgagtcgtcaaaggacctgaagaaaagagaaaaggagctgcaagcgagggaagcagagttgaacaagagggagaaggaattgaaaagaagggaggaagctgcagcacgagctggtattgtcatcgaggagaaaaactggcctccttttctgccactcatccaccatgacattgccaatgagataccgactcatcttcaaagaatgcaatacttcgcatttgcgtcatttcttggtttggttttctgtctcttctggaatgtcgtagcagttacttcagcctggatcaagggggaaggtgtgaaaatctggttgctagcaataatctacttcatctctggggttcctggtgcgtatgtgttatggtatcgccctctttataatgctatgaggactgacagtgcgttgaagtttggattgtttttcttgctctacttgtttcacatcattttcgtcgtatttgctgccgtggctcctcctgctgtctttgagggcaagtctttggcaggaattttaccggcgattgatcttatcagcgtgaatgctctagttgggatcttctacttcattggatttggattatttgccctggagtcattgctgagcatctgggttatccagcaagtgtacatgtacttccgaggaagtggaaaggccgcagagatgaagcgtgatgcgacgaggggcgctatgagagcggcattttgattgccacatatctcagatgatgataggtctcaagattaattccatggattagatggcacggtaaagaaaaatatatgtagcaatgtaaacatatatttttctttatcgccggtaagaaaagtggacaagtcctacaatgtcacttcatcatagcagtatgataacacggcgatcataacaaaaacttacaggttcatcggaaagtttgacaaaaggc

SEQ ID NO: 31426 - protein, 354 aa, Triticum aestivum
NWWGAVASATVRALLYPSVCRDSSSPPSPIAIVGGASKRAEACGRDMAGRYDGGNPFEEEEDVNPFSEQTRGKAGGQSNYGGGGAFYMPNPRNVAPSSNSRLSPLPPEPADFSATVDIPLESSKDLKKREKELQAREAELNKREKELKRREEAAARAGIVIEEKNWPPFLPLIHHDIANEIPTHLQRMQYFAFASFLGLVFCLFWNVVAVTSAWIKGEGVKIWLLAIIYFISGVPGAYVLWYRPLYNAMRTDSALKFGLFFLLYLFHIIFVVFAAVAPPAVFEGKSLAGILPAIDLISVNALVGIFYFIGFGLFALESLLSIWVIQQVYMYFRGSGKAAEMKRDATRGAMRAAF

SEQ ID NO: 31427 - protein, 308 aa, Triticum aestivum
MAGRYDGGNPFEEEEDVNPFSEQTRGKAGGQSNYGGGGAFYMPNPRNVAPSSNSRLSPLPPEPADFSATVDIPLESSKDLKKREKELQAREAELNKREKELKRREEAAARAGIVIEEKNWPPFLPLIHHDIANEIPTHLQRMQYFAFASFLGLVFCLFWNVVAVTSAWIKGEGVKIWLLAIIYFISGVPGAYVLWYRPLYNAMRTDSALKFGLFFLLYLFHIIFVVFAAVAPPAVFEGKSLAGILPAIDLISVNALVGIFYFIGFGLFALESLLSIWVIQQVYMYFRGSGKAAEMKRDATRGAMRAAF

SEQ ID NO: 31428 - protein, 267 aa, Triticum aestivum
MPNPRNVAPSSNSRLSPLPPEPADFSATVDIPLESSKDLKKREKELQAREAELNKREKELKRREEAAARAGIVIEEKNWPPFLPLIHHDIANEIPTHLQRMQYFAFASFLGLVFCLFWNVVAVTSAWIKGEGVKIWLLAIIYFISGVPGAYVLWYRPLYNAMRTDSALKFGLFFLLYLFHIIFVVFAAVAPPAVFEGKSLAGILPAIDLISVNALVGIFYFIGFGLFALESLLSIWVIQQVYMYFRGSGKAAEMKRDATRGAMRAAF

SEQ ID NO: 31429 - DNA, 1308 bp, Triticum aestivum
cccaaatcccccgaatttgacccgtttctccgccgattcgcgtcaccccccctttctgctcgggtcggtgagtggtctcaacccccggagggatggggtacctgagcaccgtcatcggccaccccacggacggatcgccggtcagcggcggcggcctcagccagaatggtaagtttagctatggttatgcgagctccctgggtaaaagggcttccatggaagacttctatgagacaagaattgaaagtgtcgatgggcagcttattggtttattcggagtttttgatggtcatggtggtgctaaagtagctgagtatgtcaaacacaacctcttcagccatcttcttaggcatccaaagttcatgagcgacacaaaagtggctatagatgattcttataaaagtaccgacagtgagttcttggaatctgacagtactcaaaaccagtgtgggtcaacagcatcaactgctgtacttgttggtaatcgtctctttgtcgcaaatgttggagactccagggctatcatatgcagggcaggaaatgctgtacctgtttcgaaagatcacaagcctgatcagacagatgagcggcaacgtattgaagaagctggaggttttgttatgtgggcaggaacatggcgtgttggtggtgtacttgctgtttctcgcgcttttggtgacaagctcttaaagcagtatgtagttgtggatccagagatccgggaggaaatcgttgacgagtccctggagtttctcatccttgcaagcgatgggctgtgggatgtggtctctaacgaggaggctgtcgatatgacccggtcaatacaagacccagaggaagctgctaagaggctcttgcaggaggcctacaagcgggagagcagtgacaacataacctgcgtcgtcgtgcgcttctttcacgggcaagggagtagtgggcctgcttaaagcaggtgcgaagagttactctcaacttctcaagtcgacgttgtactgtgatgacacgcgtacatgccttgattgattcttaaggtttaaacgaagagaaactggaagtaggaaaagtgtactctgatatgagaacaaaagtttaggaacgaagtgtgccctaggccttagatttaacaataaatttgctggtgatgaactgatgaccgttcatcgtggtttagttgtggatggtgttgggtctgatgagtgtgttgtatcttgttgtggattgccaaaccatgtgtgagtgtgatgtaagcgattattgttgtactgaaattgagcaatgacaagtataattgagttgttggatggatct

SEQ ID NO: 31430 - protein, 284 aa, Triticum aestivum
MGYLSTVIGHPTDGSPVSGGGLSQNGKFSYGYASSLGKRASMEDFYETRIESVDGQLIGLFGVFDGHGGAKVAEYVKHNLFSHLLRHPKFMSDTKVAIDDSYKSTDSEFLESDSTQNQCGSTASTAVLVGNRLFVANVGDSRAIICRAGNAVPVSKDHKPDQTDERQRIEEAGGFVMWAGTWRVGGVLAVSRAFGDKLLKQYVVVDPEIREEIVDESLEFLILASDGLWDVVSNEEAVDMTRSIQDPEEAAKRLLQEAYKRESSDNITCVVVRFFHGQGSSGPA

SEQ ID NO: 31431 - protein, 243 aa, Triticum aestivum
MEDFYETRIESVDGQLIGLFGVFDGHGGAKVAEYVKHNLFSHLLRHPKFMSDTKVAIDDSYKSTDSEFLESDSTQNQCGSTASTAVLVGNRLFVANVGDSRAIICRAGNAVPVSKDHKPDQTDERQRIEEAGGFVMWAGTWRVGGVLAVSRAFGDKLLKQYVVVDPEIREEIVDESLEFLILASDGLWDVVSNEEAVDMTRSIQDPEEAAKRLLQEAYKRESSDNITCVVVRFFHGQGSSGPA

SEQ ID NO: 31432 - protein, 194 aa, Triticum aestivum
MSDTKVAIDDSYKSTDSEFLESDSTQNQCGSTASTAVLVGNRLFVANVGDSRAIICRAGNAVPVSKDHKPDQTDERQRIEEAGGFVMWAGTWRVGGVLAVSRAFGDKLLKQYVVVDPEIREEIVDESLEFLILASDGLWDVVSNEEAVDMTRSIQDPEEAAKRLLQEAYKRESSDNITCVVVRFFHGQGSSGPA

SEQ ID NO: 31433 - DNA, 797 bp, Triticum aestivum
actcacacacacacaaccagtaccagatccacaagccagcagaaaggaagaagatgatgagcaccaaggccctcaccctcggcgcggtcgtcgtcctcgccatcgccatggcgggcgcgcacgccgagcagtgcggccacgcggccgacggcatggagtgcccaaacaacctctgctgcagcgcgtgggggtactgcggcatggacgccaactactgcggcgacggctgccagagcggcgcctgctacgagcccaaacgctgcggcgcccaggccgaggggaacgcggtgacgtgccccaacaaccactgctgcagcggcaacgggtactgcggctacggccaggagtactgcggcgacggctgccagaacgggccatgccgcgccaacatcaagtgcagcgccgacaagccgtgcctgagcaacttctgctgcagcaagtacggatactgcgggctcggcgtcgagttctgcggccagggctgccagagcggcgcctgccatgacgccgttggcgccgccgccctgccgctcagctccatagtgcaggggtgatcttgaactgcgcatggctacaagtattgcgacgggatcaggtgaggagatgagttgtggcaatgtcgatcgttgccacgtcttcttcaccggctagtttgcgttttcctcgtctttacaatcgttcccatcatgcatgcacgcatgcatgattagcgttcgggaaccacaaataatgcgtgtggcgccatgcgccgtctttgtaacctttgtaatccaataaatctgaatctcgttgcaatc

SEQ ID NO: 31434 - protein, 183 aa, Triticum aestivum
SHTHNQYQIHKPAERKKMMSTKALTLGAVVVLAIAMAGAHAEQCGHAADGMECPNNLCCSAWGYCGMDANYCGDGCQSGACYEPKRCGAQAEGNAVTCPNNHCCSGNGYCGYGQEYCGDGCQNGPCRANIKCSADKPCLSNFCCSKYGYCGLGVEFCGQGCQSGACHDAVGAAALPLSSIVQG

SEQ ID NO: 31435 - protein, 167 aa, Triticum aestivum
LTHTQPVPDPQASRKEEDDEHQGPHPRRGRRPRHRHGGRARRAVRPRGRRHGVPKQPLLQRVGVLRHGRQLLRRRLPERRLLRAQTLRRPGRGERGDVPQQPLLQRQRVLRLRPGVLRRRLPERAMPRQHQVQRRQAVPEQLLLQQVRILRARRRVLRPGLPERRLP

SEQ ID NO: 31436 - protein, 166 aa, Triticum aestivum
MMSTKALTLGAVVVLAIAMAGAHAEQCGHAADGMECPNNLCCSAWGYCGMDANYCGDGCQSGACYEPKRCGAQAEGNAVTCPNNHCCSGNGYCGYGQEYCGDGCQNGPCRANIKCSADKPCLSNFCCSKYGYCGLGVEFCGQGCQSGACHDAVGAAALPLSSIVQG

SEQ ID NO: 31437 - DNA, 1262 bp, Triticum aestivum
atcaacaaaccaacccaaccagcaatagccaccccaatccatccagctcctccaagctcagtgtccgagctcagctcagctacccacacttcactcagtagcagctaccggtagcgagaaagaaagatcgatagtgcgacgtgcgcgatgacgacggtggcgataggcattctggccatggcgtgcctcgtggcggtggcgcggggcggcaacttcttccaggactccgagatgacctggggggacggccgcggcaaggtcgtcgacggcggccgcgggctcgacctcacgctcgacaagacctccggctccggcttccagtccaagaccgagtacctcttcggcaagatcgacatgcagatcaagctcgtccccggcaactccgccggcaccgtcaccaccttctacctgtcgtcgcaggggacggcgcacgacgagatcgacttcgagttcctgggcaacgtcaccggcgagccctacacgctgcacaccaacgtgttcgcgaaagggcaggggcagcgggagcagcagttccgcctctggttcgaccccaccaaggccttccacacctactccatcatctggaacccgcagcacgtcatattcgcggtggacggcacggcgatcagggacttcaagaaccacgaggcgcgcggcgtgtcgttccccaagagccagccgatgcggctgtacgcgagcctgtggaacgccgacgactgggccacgcagggcggccgggtcaagaccgactggagcaaggcgccgttcgtcgcctccttccgcaacttcaacgccgacgcctgcgtcatgtcgggcggcgcgcagcgctgccccgccggcacaatggaggcctctgcggccggcggcagcggcagctggtggaaccaggagctcagcggcatgggctaccgccgcatgcggtgggtgcagaggaagttcatgatctacaactactgcaccgaccccaagcgggtggcgcagggcgtgcctgccgagtgcaagctccgctgatgagatcctcccgcagcttacaagaacaacaacgcatgaacccgtcatctgagatgtgttttgtttcggctttcgatccgtgagaacgaaggaaggaaggaagtgcgcgcatcagagctctgtcggatggtgtaaatgtagtaccgtagtatgcatatcgcattctttcatttgtttcgttgtcacacgggtcgttccatgtacttatgcaagttctataattagctagttccttttagccttgaaaatcc

SEQ ID NO: 31438 - protein, 287 aa, Triticum aestivum
MTTVAIGILAMACLVAVARGGNFFQDSEMTWGDGRGKVVDGGRGLDLTLDKTSGSGFQSKTEYLFGKIDMQIKLVPGNSAGTVTTFYLSSQGTAHDEIDFEFLGNVTGEPYTLHTNVFAKGQGQREQQFRLWFDPTKAFHTYSIIWNPQHVIFAVDGTAIRDFKNHEARGVSFPKSQPMRLYASLWNADDWATQGGRVKTDWSKAPFVASFRNFNADACVMSGGAQRCPAGTMEASAAGGSGSWWNQELSGMGYRRMRWVQRKFMIYNYCTDPKRVAQGVPAECKLR

SEQ ID NO: 31439 - protein, 277 aa, Triticum aestivum
MACLVAVARGGNFFQDSEMTWGDGRGKVVDGGRGLDLTLDKTSGSGFQSKTEYLFGKIDMQIKLVPGNSAGTVTTFYLSSQGTAHDEIDFEFLGNVTGEPYTLHTNVFAKGQGQREQQFRLWFDPTKAFHTYSIIWNPQHVIFAVDGTAIRDFKNHEARGVSFPKSQPMRLYASLWNADDWATQGGRVKTDWSKAPFVASFRNFNADACVMSGGAQRCPAGTMEASAAGGSGSWWNQELSGMGYRRMRWVQRKFMIYNYCTDPKRVAQGVPAECKLR

SEQ ID NO: 31440 - protein, 259 aa, Triticum aestivum
MTWGDGRGKVVDGGRGLDLTLDKTSGSGFQSKTEYLFGKIDMQIKLVPGNSAGTVTTFYLSSQGTAHDEIDFEFLGNVTGEPYTLHTNVFAKGQGQREQQFRLWFDPTKAFHTYSIIWNPQHVIFAVDGTAIRDFKNHEARGVSFPKSQPMRLYASLWNADDWATQGGRVKTDWSKAPFVASFRNFNADACVMSGGAQRCPAGTMEASAAGGSGSWWNQELSGMGYRRMRWVQRKFMIYNYCTDPKRVAQGVPAECKLR

SEQ ID NO: 31441 - DNA, 1266 bp, Triticum aestivum
cactccacatcccactccaaagctttgcttggctctcccgtacctgacctctccttccatcgaggcaatcccagtgctcctcctcccctctatcgtccatggactgctctagttccaaagagacgccaccgcacaaggcgtggtggaccggcgagacggtggcggtggtgacgggggccaaccgtggcattgggcacgcgctggccgcgcgcctggcggagcaggggctgtccgtggtgctcacggcgcgggacgaggcccgcggggaggccgccgccgccgagctccgcgccaggggtctcccgtccgtgcggttccgccgcctcgacgtcaccgactccgcctctgtcgccgccttcgcctcctggatccgcgacgatgtcggcggcctcgacattctggtgaacaatgccggggtatcgttcaacgagatcgacaccaactcggtggagcatgctgagacggtcctcaagaccaacttttacggagccaagatgctcatcgaggcgctcctgccccttttccgtcgatcctctgggaccagccggatcctgaacctcagctcccagcttggccttctcaataaggtgagggacccgtcgttgaggagcatgctgctggacgagggcaggctgacggagcagcaggtcgaggccatggcgtcgcggttcctggcgcaggtgaaggacgggacgtggcaggaccacgggtggccggccgtgtggacggactacgcggtctccaagctggccctcaacgcctactcccgcctcctcgccgcgcggctgcggggggccgtagctgtcaactgcttctgccccgggttcacgcggacagacatgacgcgggggtggggcaagcgcaccgccgaggaggccggccgcgtcgccgcggggctcgcgctgctgccccccgccgacctccccacaggcaagttcttcaagtggtccacgccgcagctctactccaagctctgacgacgacaccgcgcgctgcatggcggagctgtgcgtagctgcacgcttacgatttggcaagaaaaagatggccgtttgtcccaaaatgcaactccatctcctcaccaagcttgatgcctccgaactatcacgcccgtacagttctcgaagattcgtgctcgtcttttgacaggatagcctatcaccctccactttgtagaacagagcatgtagaaacaaaaaagctctcctcccttcctgctgtaacagagcatgtaccacaaataattcttaattgtgtttacaaagt

SEQ ID NO: 31442 - protein, 292 aa, Triticum aestivum
MDCSSSKETPPHKAWWTGETVAVVTGANRGIGHALAARLAEQGLSVVLTARDEARGEAAAAELRARGLPSVRFRRLDVTDSASVAAFASWIRDDVGGLDILVNNAGVSFNEIDTNSVEHAETVLKTNFYGAKMLIEALLPLFRRSSGTSRILNLSSQLGLLNKVRDPSLRSMLLDEGRLTEQQVEAMASRFLAQVKDGTWQDHGWPAVWTDYAVSKLALNAYSRLLAARLRGAVAVNCFCPGFTRTDMTRGWGKRTAEEAGRVAAGLALLPPADLPTGKFFKWSTPQLYSKL

SEQ ID NO: 31443 - protein, 160 aa, Triticum aestivum
MLIEALLPLFRRSSGTSRILNLSSQLGLLNKVRDPSLRSMLLDEGRLTEQQVEAMASRFLAQVKDGTWQDHGWPAVWTDYAVSKLALNAYSRLLAARLRGAVAVNCFCPGFTRTDMTRGWGKRTAEEAGRVAAGLALLPPADLPTGKFFKWSTPQLYSKL

SEQ ID NO: 31444 - DNA, 820 bp, Triticum aestivum
ttccccatctcaggcacacaagccctaaacccgtgcatggcattccccgcctctcgccgtctctccgccgccgccgctccgaaactctcctccctcttcacgcccggacccactcctaagcctcgcccgctgccgccggagtccggcgatgatcctaggcggcggaagccgaggccgagatcaaggcacccgtggggggaggatgcggcagcgcttctccggcggcttcacgaggggcgatacctgccgggaccctacctcccggatgcgccgcatgtagtatcccccgacgctgtcaaggccgccgccgagcggttcggcaacgatcaccaggtcgtcgccaaatggttgtcgggaagtgacttgaagaaggtagcattgtttggctgcccatctgttgagcgaagaacagtttttgcatcaaaaagattacgagctttcttcaacttgccagaagagaaagtatgcagctcttgcaagataagaagttcatgccagtttattaaccaggaggtgcctaggtatgataaagtgatcttgtcagatactatgaggatccttgctttgtttgtactggatgcatatcctgagccactacaggttactgctgaagtaaaagctagtgtccgcaaacttctcaaggacaccataaatctaagcatttaagtgctttgaggataattcgtaatcagtggaggtactatgtacatgtcaggtagatttaggttcattttcccactcttaattttcttttgtgcctcaagcattgtaacatgacctgaagcaactaatagagtgatggccacatttatttgatgtt

SEQ ID NO: 31445 - protein, 221 aa, Triticum aestivum
FPISGTQALNPCMAFPASRRLSAAAAPKLSSLFTPGPTPKPRPLPPESGDDPRRRKPRPRSRHPWGEDAAALLRRLHEGRYLPGPYLPDAPHVVSPDAVKAAAERFGNDHQVVAKWLSGSDLKKVALFGCPSVERRTVFASKRLRAFFNLPEEKVCSSCKIRSSCQFINQEVPRYDKVILSDTMRILALFVLDAYPEPLQVTAEVKASVRKLLKDTINLSI

SEQ ID NO: 31446 - protein, 209 aa, Triticum aestivum
MAFPASRRLSAAAAPKLSSLFTPGPTPKPRPLPPESGDDPRRRKPRPRSRHPWGEDAAALLRRLHEGRYLPGPYLPDAPHVVSPDAVKAAAERFGNDHQVVAKWLSGSDLKKVALFGCPSVERRTVFASKRLRAFFNLPEEKVCSSCKIRSSCQFINQEVPRYDKVILSDTMRILALFVLDAYPEPLQVTAEVKASVRKLLKDTINLSI

SEQ ID NO: 31447 - DNA, 983 bp, Triticum aestivum
agtcgctcgcgcgggcaatccaaacctttccctattcttgcaaggtctcggaaacggaaaggcccctgctccgctgcgcgtttgcgagtttgggaagaatccttgcctgccggagggggggaaacgggcgagatggggcgagggcgcagcgagataaagaggatcgacaaccccacgcagcgccagtccaccttctacaagcgcagggacggcctcttcaagaaggcccgggagctcgccgtcctctgcgacgccgacctcctcctcctcctcttctccgcctccggcaagctctaccagtacctcgcgcccaccgtcccctctgtcaaggagttcgtcgagaggtacgaggcttcgacgcacaccaaagtttggtccgacatccgccaggagaggcgccgcgagctggagaaggtggccaagatgtgcgacctcttggagaaggaactgaggttcatgacggtggacgacggggagcggtacacggtgccgtcgctggcggcgctggagcacaacctggaggcggccatgcacaaggtgcgctccgagaaggaccgcaagatcggcggcgagatgagctacctcgagaacatgatcagggggaaacaagcggagcgctacggtctgtgtgacaagctcgctcatgctcagagcctcaaggtcgttgaaggtggatccacctcgctgaacaacggcctggacctcaaacttggattcaactaggaacgggtgaaagcttctggccgtggggttctgctctagtgttgcttttgagctcgagtgttgtgtcaggttgaaatattctgcaatttccttcgaagggattgtatgaacttgtaagagaccactgtcttatgagatgtttggcttaggctggactgggctgtgcgttgtacctccaataggtggaatgtgataccagtccagtattgcaataatgtagttaacggtcaccttatgctctagttcatgcgttctttgac

SEQ ID NO: 31448 - protein, 240 aa, Triticum aestivum; identical to SEQ ID NO: 30690

SEQ ID NO: 31449 - protein, 209 aa, Triticum aestivum; identical to SEQ ID NO: 30691

SEQ ID NO: 31450 - protein, 196 aa, Triticum aestivum; identical to SEQ ID NO: 30692

SEQ ID NO: 31451 - DNA, 1824 bp, Triticum aestivum
ctcccaaacccgacactccaacccctaccgagaggtgcacgaggaggccgcccaccaccaccaccaccaccacccaccatggccatggcgacggcgctccgcaagctctccgcccgcggccagcccctctcccgcctcacgccgctctactccatggcgtctctgccggcgacggaggagagatccgcagtcacctggcccaagcagttgaacgcgccgctggaggaggtcgaccccgagattgccgacatcatcgagctcgagaaggcccgccaatggaaggggctggagctcatcccgtcggagaacttcacctccctctcggtgatgcaggcggtgggatccgtcatgaccaacaagtacagcgaggggtaccccggcgcgagatactacggtggaaacgaatacattgatatggccgagacgctgtgccagaaacgtgctttggaggctttcaatttggacccagagaagtggggagtgaatgtgcaacctctatcgggttcacctgccaacttccatgtatacactgctctgctgaagccacatgatagaattatggctctggatcttcctcacggtggacatctttcccatggttaccagactgacacaaagaaaatctcagcagtttcaatattctttgagacaatgccttacagactggatgaaagcactggcttgattgattatggccagttggagaaaagtgccgttctttttaggccaaagttgattgttgctggtgctagtgcatatgcccgcctttatgattataaccgcatgcggaagatctgtgacaagcagaaggcagttcttctcgcagacatggcacatatcagtgggctagttgctgctggtgtcattccgtctccttttgagtatgcagatgtggtgactaccactacccacaagtctctccgtggtccacgtggagccatgatctttttccggaagggggtgaaagaaataaacaaacaagggaaggaggttaagtatgattttgaggacaaaatcaatgctgctgtcttcccaggtctgcaaggtggaccccataaccatactattactggcctggccgttgcgcttaagcaggcaactactcaggagtacagagcttatcaagagcaagttatgagtaactctgctagatttgctgagagcttgacttcaaaaggttacgacattgtctctggtgggactgataaccatttagttttggtgaacctcaagaaaaagggaatagatggttcacgtgtggagaaggttttagaaaatgtgcatattgcagcaaacaagaacacggttcctggtgatgtttcagctatggtacccggaggcatcaggatgggaacccccgcacttacatcaagaggatttgttgaggaggacttcgccaaggttgctgacttcttcgattcggcagtgaacttggccttgaaggttaaagctgcagcagcaggtaccaaactgaaggactttgttgccacattgcaatccgacagcaacatccaagctgaaattgcaaagcttcgccacgatgtggaggaatatgcgaaacaattcccaacaattggattcgagaaggagaccatgaagtacaagaactaagaactgctatgtttcaacagcaaggaagcaaacaagaagcacagtttgaggacaagtcatgtaaacaatagatccacgatgaagcgccaccttatgtaaaagtaatccaatcattttacagaatatgggaactttgtcgatagtttcttattgcaggcacatactgtaagatgcttcgctgatatgctatatgaaccgccatccttcttggac

SEQ ID NO: 31452 - protein, 536 aa, Triticum aestivum
LPNPTLQPLPRGARGGRPPPPPPPPTMAMATALRKLSARGQPLSRLTPLYSMASLPATEERSAVTWPKQLNAPLEEVDPEIADIIELEKARQWKGLELIPSENFTSLSVMQAVGSVMTNKYSEGYPGARYYGGNEYIDMAETLCQKRALEAFNLDPEKWGVNVQPLSGSPANFHVYTALLKPHDRIMALDLPHGGHLSHGYQTDTKKISAVSIFFETMPYRLDESTGLIDYGQLEKSAVLFRPKLIVAGASAYARLYDYNRMRKICDKQKAVLLADMAHISGLVAAGVIPSPFEYADVVTTTTHKSLRGPRGAMIFFRKGVKEINKQGKEVKYDFEDKINAAVFPGLQGGPHNHTITGLAVALKQATTQEYRAYQEQVMSNSARFAESLTSKGYDIVSGGTDNHLVLVNLKKKGIDGSRVEKVLENVHIAANKNTVPGDVSAMVPGGIRMGTPALTSRGFVEEDFAKVADFFDSAVNLALKVKAAAAGTKLKDFVATLQSDSNIQAEIAKLRHDVEEYAKQFPTIGFEKETMKYKN

SEQ ID NO: 31453 - protein, 510 aa, Triticum aestivum
MAMATALRKLSARGQPLSRLTPLYSMASLPATEERSAVTWPKQLNAPLEEVDPEIADIIELEKARQWKGLELIPSENFTSLSVMQAVGSVMTNKYSEGYPGARYYGGNEYIDMAETLCQKRALEAFNLDPEKWGVNVQPLSGSPANFHVYTALLKPHDRIMALDLPHGGHLSHGYQTDTKKISAVSIFFETMPYRLDESTGLIDYGQLEKSAVLFRPKLIVAGASAYARLYDYNRMRKICDKQKAVLLADMAHISGLVAAGVIPSPFEYADVVTTTTHKSLRGPRGAMIFFRKGVKEINKQGKEVKYDFEDKINAAVFPGLQGGPHNHTITGLAVALKQATTQEYRAYQEQVMSNSARFAESLTSKGYDIVSGGTDNHLVLVNLKKKGIDGSRVEKVLENVHIAANKNTVPGDVSAMVPGGIRMGTPALTSRGFVEEDFAKVADFFDSAVNLALKVKAAAAGTKLKDFVATLQSDSNIQAEIAKLRHDVEEYAKQFPTIGFEKETMKYKN

SEQ ID NO: 31454 - protein, 508 aa, Triticum aestivum
MATALRKLSARGQPLSRLTPLYSMASLPATEERSAVTWPKQLNAPLEEVDPEIADIIELEKARQWKGLELIPSENFTSLSVMQAVGSVMTNKYSEGYPGARYYGGNEYIDMAETLCQKRALEAFNLDPEKWGVNVQPLSGSPANFHVYTALLKPHDRIMALDLPHGGHLSHGYQTDTKKISAVSIFFETMPYRLDESTGLIDYGQLEKSAVLFRPKLIVAGASAYARLYDYNRMRKICDKQKAVLLADMAHISGLVAAGVIPSPFEYADVVTTTTHKSLRGPRGAMIFFRKGVKEINKQGKEVKYDFEDKINAAVFPGLQGGPHNHTITGLAVALKQATTQEYRAYQEQVMSNSARFAESLTSKGYDIVSGGTDNHLVLVNLKKKGIDGSRVEKVLENVHIAANKNTVPGDVSAMVPGGIRMGTPALTSRGFVEEDFAKVADFFDSAVNLALKVKAAAAGTKLKDFVATLQSDSNIQAEIAKLRHDVEEYAKQFPTIGFEKETMKYKN

SEQ ID NO: 31455 - DNA, 1482 bp, Triticum aestivum
gagagagagatgaaggtctgtaccctcgcttaaacactctcgcctacccggctcgaccccccctcccatcttctccttcgccaagaacaccaccgcagccaccacgatcgatctcgtgctcgtgcgcggtgcgctggagcggcggctggggtgggcggtggccgccatgatcccgtgaaggaggaggggaggggatagataggtggctgtgtgacaaaggggccggatcgatgtacaagaaccagctgcaggagctggcgcagaggagctgcttcagcctgccgtcgtacgtgtgcacgcgggaggggcccgaccatgcgccccgcttcaaggccaccgtcaccttcaacggcgagaccttccacgggcccacctgctgcaccacgctccgccaggccgagcacgccgccgccgaggtcgcgctcgcccgcctctccacccgcgggccatccacctacctcaccgccagagtcctcgacgagaccggggtgtacaagaacctgctgcaggagacagcgcaccgggcggggctgaagctgccggcctacaccaccgtgcgctccggcccgggccactcgccggtcttcgcctccagcgtggagctcgctggcctcagcttcgccggcgacgccgccaggaccaagaagcaggcggagaagaacgctgccatgaccgcctggtccgcccttaagcagatgccggaggcgcgcaaggagcccggcaacggctgtgtcggcgaggagcaggagcactggtcgtagccagagtgctcgccgccctgaagcagcgctgcgatgtcaatgcggcgtcgcccttaccgaagcagcactgcctcgccggctcttcttcgtcctctgctccgaacccgtcgctctacagccaccaatggctgcctctgagctcccatgctgcacagcccaggacgcgccacgtgcagccgcagccggccggccccaggatactgcctccgctgcacatgctgcagcgaccggcgccgtccacctcccgtcacggcggcgagctggagcggcagaggaggatcgatgcggccgagctggtgcagatgctggagagggccatggtgacgaacagagaagaggcaatgccgtcggcgccgtgctactacccgcacgtcccggcgtaccaccacgccggcgcggcgccaagatacttcgccgcgggcggattccactcgccggcgatggcagtgagcgtgcggtcggtgatcccgatgtgctccgcgccgccttcgccgccgcagccggccgcggccaccaaggatgaccatgatgatgaccggaacgacccggcagcacctgcagagcactaggcggcgaggcgtgagctcgcggctgccaggttttgaagatcaagaagacgaggaaagattccgaggttcagtagctatatgatgagatcagtctggttgtagaagggaattttgatcgcaagttcctctgtctaagcttgtgtaagtgaccg

SEQ ID NO: 31456 - protein, 176 aa, Triticum aestivum
MYKNQLQELAQRSCFSLPSYVCTREGPDHAPRFKATVTFNGETFHGPTCCTTLRQAEHAAAEVALARLSTRGPSTYLTARVLDETGVYKNLLQETAHRAGLKLPAYTTVRSGPGHSPVFASSVELAGLSFAGDAARTKKQAEKNAAMTAWSALKQMPEARKEPGNGCVGEEQEHWS

SEQ ID NO: 31457 - protein, 132 aa, Triticum aestivum
MAASELPCCTAQDAPRAAAAGRPQDTASAAHAAATGAVHLPSRRRAGAAEEDRCGRAGADAGEGHGDEQRRGNAVGAVLLPARPGVPPRRRGAKILRRGRIPLAGDGSERAVGDPDVLRAAFAAAAGRGHQG

SEQ ID NO: 31458 - protein, 117 aa, Triticum aestivum
MLQRPAPSTSRHGGELERQRRIDAAELVQMLERAMVTNREEAMPSAPCYYPHVPAYHHAGAAPRYFAAGGFHSPAMAVSVRSVIPMCSAPPSPPQPAAATKDDHDDDRNDPAAPAEH

SEQ ID NO: 31459 - DNA, 1960 bp, Triticum aestivum
  misc_feature (848)..(848): n is a, c, g, or t
ataccaagtgaggaagaaaaacgacaccaaattatacgagcatctccatctcctctcccctcgcgcaaagggaggagggagaggccatccactccacggcgccgatcgatcggagcagcggagaggacggcgcgcgcgtcggcgatgcggaagggcccgtcgcggtcggggtcggcgcggcaccagcagttccgcgcccgtgccaagacccgcgtcgacgacctccaggacatgttctccggcctccagtacgcccgcaaggaggcccgctccaccgacgccgtcctcctcgaggcccagctccaccagatgctccgcgagtggcgcgccgagctcagcgtcccgtcccccgcctcctccctccaggcagggaacaacaaccgggacccgtcggatccgccgtccgagacaccgcggccgccgcagctggcgccggccgaggaggaggacgacgccaccagcaagctcgtcgagcagaagccccggccgtccgctaatcagactcacaagcacccgcggggagaccaggacatgaagccggagccgcgcgaggaagcgatcgcgcatccagtgacggtggcgcagcagccgccgtcgctgggtccgggagtcatcaccactccagctagtgccgggttccacgatcagatgtactatgtgaaccaggagcttagtgttgaggattttctttacgacgatgattacaagataaaccttcctgggtccaatccagaaatcctcaataaccttgaagggattggtcatcaagaatatctgcagttcaatttgccacaagagttgccccctaatgcatatcttgatatgaacaactatgggcagaatgctgnagatggtttcctccacatgtcagacttgctcacaacaatgtctccagcacctgcttcatttctgaggccaaagtgcgctctctgggactgccctcgtcctgctcaaggatctgaaagctggcaagattactgcagcatgtaccatgctgaattggccgtgaaggaagagggccctccaggcacaatgcctgtgatccgcccgagaggtattgatctaaaagatggccctttgtttgctgctcttagtgcgaaaatccaaggaaagcatgtcggtgttcctgtctgtgaaggggctgcaactacgaagtccccttggaatgcacctgaacttttcgacctttacatctttgaaggtgaatctatgagagaatggcttttctttgacaaaccaagaagggcattcgacagtggaaaccggaagcaaaggtcactgccagattacaacggccgtggctggcatgaatcaaggaagcaggtgatgaaagactttgggggtctaaagaggtcatactacatggatccacagccatccagcagctacgaatggcacctctatgagtacgagatcaatgaccgcgacgcttttgccttataccggctcgaattcaagtcttcggaagcaaagaagagtgctaagtcaaaattcacttgcagtccactgattgaaatccagcagcaaatggtcaggctgagcgcagacggtcacgtggagaacaagcggactgcccgtgtgcggacacaggatgtcagcacaaacatctacccggttcagaacaacacggctcaggccagtgctccggacgcttaccaggcagcgtcgcaggtggaccagatgacgtttttgaacggcagtgttgtttatgggcctcatctcccatatggctactcgaccgaaggaggtgacttctattggaactcaaatgacggggcttgataaaaccatcttcgacttgtggcatattttcggcttcaagttctaaccgtatcagctgtaattaaggggtctactttattggcaatggcctccataatttctattgggaatggcctccgtgattctaactgtaatggttgggccaaatttaaatttacaggaaacgtctctttgaggc

SEQ ID NO: 31460 - protein, 593 aa, Triticum aestivum
  misc_feature (283)..(283): Xaa can be any naturally occurring amino acid
IPSEEEKRHQIIRASPSPLPSRKGRRERPSTPRRRSIGAAERTARASAMRKGPSRSGSARHQQFRARAKTRVDDLQDMFSGLQYARKEARSTDAVLLEAQLHQMLREWRAELSVPSPASSLQAGNNNRDPSDPPSETPRPPQLAPAEEEDDATSKLVEQKPRPSANQTHKHPRGDQDMKPEPREEAIAHPVTVAQQPPSLGPGVITTPASAGFHDQMYYVNQELSVEDFLYDDDYKINLPGSNPEILNNLEGIGHQEYLQFNLPQELPPNAYLDMNNYGQNAXDGFLHMSDLLTTMSPAPASFLRPKCALWDCPRPAQGSESWQDYCSMYHAELAVKEEGPPGTMPVIRPRGIDLKDGPLFAALSAKIQGKHVGVPVCEGAATTKSPWNAPELFDLYIFEGESMREWLFFDKPRRAFDSGNRKQRSLPDYNGRGWHESRKQVMKDFGGLKRSYYMDPQPSSSYEWHLYEYEINDRDAFALYRLEFKSSEAKKSAKSKFTCSPLIEIQQQMVRLSADGHVENKRTARVRTQDVSTNIYPVQNNTAQASAPDAYQAASQVDQMTFLNGSVVYGPHLPYGYSTEGGDFYWNSNDGA

SEQ ID NO: 31461 - protein, 545 aa, Triticum aestivum
  misc_feature (235)..(235): Xaa can be any naturally occurring amino acid
MRKGPSRSGSARHQQFRARAKTRVDDLQDMFSGLQYARKEARSTDAVLLEAQLHQMLREWRAELSVPSPASSLQAGNNNRDPSDPPSETPRPPQLAPAEEEDDATSKLVEQKPRPSANQTHKHPRGDQDMKPEPREEAIAHPVTVAQQPPSLGPGVITTPASAGFHDQMYYVNQELSVEDFLYDDDYKINLPGSNPEILNNLEGIGHQEYLQFNLPQELPPNAYLDMNNYGQNAXDGFLHMSDLLTTMSPAPASFLRPKCALWDCPRPAQGSESWQDYCSMYHAELAVKEEGPPGTMPVIRPRGIDLKDGPLFAALSAKIQGKHVGVPVCEGAATTKSPWNAPELFDLYIFEGESMREWLFFDKPRRAFDSGNRKQRSLPDYNGRGWHESRKQVMKDFGGLKRSYYMDPQPSSSYEWHLYEYEINDRDAFALYRLEFKSSEAKKSAKSKFTCSPLIEIQQQMVRLSADGHVENKRTARVRTQDVSTNIYPVQNNTAQASAPDAYQAASQVDQMTFLNGSVVYGPHLPYGYSTEGGDFYWNSNDGA

SEQ ID NO: 31462 - protein, 516 aa, Triticum aestivum
  misc_feature (206)..(206): Xaa can be any naturally occurring amino acid
MFSGLQYARKEARSTDAVLLEAQLHQMLREWRAELSVPSPASSLQAGNNNRDPSDPPSETPRPPQLAPAEEEDDATSKLVEQKPRPSANQTHKHPRGDQDMKPEPREEAIAHPVTVAQQPPSLGPGVITTPASAGFHDQMYYVNQELSVEDFLYDDDYKINLPGSNPEILNNLEGIGHQEYLQFNLPQELPPNAYLDMNNYGQNAXDGFLHMSDLLTTMSPAPASFLRPKCALWDCPRPAQGSESWQDYCSMYHAELAVKEEGPPGTMPVIRPRGIDLKDGPLFAALSAKIQGKHVGVPVCEGAATTKSPWNAPELFDLYIFEGESMREWLFFDKPRRAFDSGNRKQRSLPDYNGRGWHESRKQVMKDFGGLKRSYYMDPQPSSSYEWHLYEYEINDRDAFALYRLEFKSSEAKKSAKSKFTCSPLIEIQQQMVRLSADGHVENKRTARVRTQDVSTNIYPVQNNTAQASAPDAYQAASQVDQMTFLNGSVVYGPHLPYGYSTEGGDFYWNSNDGA

SEQ ID NO: 31463 - DNA, 2296 bp, Triticum aestivum
ctcccttcgcctccgagaagctcggtctcacctcacgcaccaccaacgcggcggcgttctcccctccaccgtgccgaccgaccccgagcggcgccgcggctgacccagcgcgatgtggcgccatgcagcggcccggcggtcggcgcagatccggcggctcctttccacgtccgccccctcggcgggcgccgtgcgcggcccctgcatcgtgcacaagcgcggcaccgacatcctccacgacccctggtacaacaaggacacggcgttccccctcacggagcgggaccgcctcggcctccggggcctgctcccgccgcgggtcatgtcgttcgagcagcagtacgagcgcttcataaactcgtaccattcgctggagcacaacacgcagggggagcccgattccgtggtctcgctggccaagtggaggatccttaacaggctgcacgaccggaacgagacgttgtactacagggtgctaattgacaatatcaaggatttcgcgcccataatatacacccctactgtcggcttggtctgcgaaaactacagcgggctgttcaggcgtccccgcgggatgtacttcagtgcaaaggataaaggggagatgatgtcgatgatttacaactggccagcagagaaggttgacatgatagttgtgactgacgggagtcgcattctaggtttaggtgatcttggagttcaaggcataggtatacctattggtaaacttgatgtttatgttgcagctgctggtatcaacccacagaaggttctcccaataatgcttgatgtgggaacaaataatgaagaactccttgaagacaagctatatttaggattgaggcaacctaggttggaaggagaggaatacttagctgttgtagatgagttcatggaagctgttcatgcacgctggccgaaagcaattgtgcagtttgaagacttccaaatgaaatgggcatttgaaactcttcagaggtatcggagccgattttgcatgttcaatgatgacgtgcaggggacagcaggagttgctctagctggtctacttggagctgttagagcacaaggtcgaccgctcgcagattttactaagcagaagatagttgtggtgggagctggaagtgctgggataggtgtgcttaacatggctaaacatgcaatgttaaggatgccagggacccataaaattggagaactgggtgaaggacacaatcaattctgggttctggacaaagatggccttattaccaaaagtagaaaagatctggatccagctgttgctcgttttgctagaggttatggtcctgaagaggtcgaagatctccatgagggggctagtcttgttgaagtggtcaagaaagtgaagcctcatgtccttttaggactatctggagttggcgggatatttaacgaggaggttctcaaggctatgaaagaatctgactccccctgccctgcaatttttgcaatgtccaacccaactactaaagctgaatgtacgcctgaagatgtattcaagcatgttggagaaaatgcagtatttgccagtggaagccctttcagcaatgttactttaagcaatggtagaaaaggctatgctaatcaagcaaacaacatgtatctgtttcctgggattggtttaggagcccttctgtcaggtgctcggcatatttcggatggcatgctccatgctgcagctgagtgccttgcttcatacatcacagatgatgcgattcgaaaaggaatcctctttccttcaatttcaagtatcaggcacatcaccgcacgtgtcggcgctgcagtcgcccgtgctgccgttgatgaagatctggccgagggatgctctgacttggatcctcgggacctcaggagcatgtcagagtcggatacggtggattacgtggctcggaagatgtggtaccctgtttacagcccactcgtcaacgacaaatagtgttcgacgaagcacacccgaagagacgtatcaggcacatacatttgttctgatcagtgaatacttcgctatttcggtttagctgctctacttgggagtatttcagcagatactgctgccacgtctactggctatattgttgcctcatttgtttacgttgacaggttcatcaaacattgctcaattttgggacccgttgagctacagttatgtcccatgtggtaggacttgaataaatgtcagatgttggcagtctgtctcctgcatcgtcgttgttggcgtatgtctcttgcatcgccaggtaatacgagattgcaaaccgattttgtgttccaaaac

SEQ ID NO: 31464 - protein, 614 aa, Triticum aestivum
MWRHAAARRSAQIRRLLSTSAPSAGAVRGPCIVHKRGTDILHDPWYNKDTAFPLTERDRLGLRGLLPPRVMSFEQQYERFINSYHSLEHNTQGEPDSVVSLAKWRILNRLHDRNETLYYRVLIDNIKDFAPIIYTPTVGLVCENYSGLFRRPRGMYFSAKDKGEMMSMIYNWPAEKVDMIVVTDGSRILGLGDLGVQGIGIPIGKLDVYVAAAGINPQKVLPIMLDVGTNNEELLEDKLYLGLRQPRLEGEEYLAVVDEFMEAVHARWPKAIVQFEDFQMKWAFETLQRYRSRFCMFNDDVQGTAGVALAGLLGAVRAQGRPLADFTKQKIVVVGAGSAGIGVLNMAKHAMLRMPGTHKIGELGEGHNQFWVLDKDGLITKSRKDLDPAVARFARGYGPEEVEDLHEGASLVEVVKKVKPHVLLGLSGVGGIFNEEVLKAMKESDSPCPAIFAMSNPTTKAECTPEDVFKHVGENAVFASGSPFSNVTLSNGRKGYANQANNMYLFPGIGLGALLSGARHISDGMLHAAAECLASYITDDAIRKGILFPSISSIRHITARVGAAVARAAVDEDLAEGCSDLDPRDLRSMSESDTVDYVARKMWYPVYSPLVNDK

SEQ ID NO: 31465 - protein, 544 aa, Triticum aestivum
MSFEQQYERFINSYHSLEHNTQGEPDSVVSLAKWRILNRLHDRNETLYYRVLIDNIKDFAPIIYTPTVGLVCENYSGLFRRPRGMYFSAKDKGEMMSMIYNWPAEKVDMIVVTDGSRILGLGDLGVQGIGIPIGKLDVYVAAAGINPQKVLPIMLDVGTNNEELLEDKLYLGLRQPRLEGEEYLAVVDEFMEAVHARWPKAIVQFEDFQMKWAFETLQRYRSRFCMFNDDVQGTAGVALAGLLGAVRAQGRPLADFTKQKIVVVGAGSAGIGVLNMAKHAMLRMPGTHKIGELGEGHNQFWVLDKDGLITKSRKDLDPAVARFARGYGPEEVEDLHEGASLVEVVKKVKPHVLLGLSGVGGIFNEEVLKAMKESDSPCPAIFAMSNPTTKAECTPEDVFKHVGENAVFASGSPFSNVTLSNGRKGYANQANNMYLFPGIGLGALLSGARHISDGMLHAAAECLASYITDDAIRKGILFPSISSIRHITARVGAAVARAAVDEDLAEGCSDLDPRDLRSMSESDTVDYVARKMWYPVYSPLVNDK

SEQ ID NO: 31466 - protein, 460 aa, Triticum aestivum
MYFSAKDKGEMMSMIYNWPAEKVDMIVVTDGSRILGLGDLGVQGIGIPIGKLDVYVAAAGINPQKVLPIMLDVGTNNEELLEDKLYLGLRQPRLEGEEYLAVVDEFMEAVHARWPKAIVQFEDFQMKWAFETLQRYRSRFCMFNDDVQGTAGVALAGLLGAVRAQGRPLADFTKQKIVVVGAGSAGIGVLNMAKHAMLRMPGTHKIGELGEGHNQFWVLDKDGLITKSRKDLDPAVARFARGYGPEEVEDLHEGASLVEVVKKVKPHVLLGLSGVGGIFNEEVLKAMKESDSPCPAIFAMSNPTTKAECTPEDVFKHVGENAVFASGSPFSNVTLSNGRKGYANQANNMYLFPGIGLGALLSGARHISDGMLHAAAECLASYITDDAIRKGILFPSISSIRHITARVGAAVARAAVDEDLAEGCSDLDPRDLRSMSESDTVDYVARKMWYPVYSPLVNDK

SEQ ID NO: 31467 - DNA, 1583 bp, Triticum aestivum
caaaccctcgcaaaccccgtgctcactcaccaatcaccatggcgtccctcctgcgccgccgccacccccacccctccgccgtctccgcccacctcctccgccgcctctccgcgctcccggacgtcgatccttcgccagcctccggccccgcccgcgcggcggcccgcgcctccatcatcgatctccagctcgccgtccgcgcggagaccgacccggaccgcgtccactccctcgtcgcctccgcgctctccagccccgactaccaccgtctccacacctcgcgcgacctcttctccctcgccgcctcccgcctcgaccgcctccaccgccccgacctcgccgcctccctcctcgaccagctcctcgcctccgccccggtctcccccggcctcctcgcgcgcgccatctccctcttcccgggcccgaacgacgccgtccgtgccttctcctcctccgcccccgccgcccgctccgatgtctccctctccgccctcctctccgcgcttctacgcgcgggccgcatcgacgacctcaagtcaaccttcaaatccgctgagtcctctctcggcgtcgcccctggctgcgcctcccacaacgtgctcctccacgctctggtcaagagctctgagctcccggccgcccgcaagctgctcaacgaaatggccaagaagaagtttaagcatcgcccgcccccggacatcatatcttacaatactctcctcgctgggttctccgagcaggacgatgccgaggagtttgagaagctgctcaaggaaatcaatgagaacaagctggagcctaatgtcgtcacgtacaattgccggatgcgttggtttgcaaggaagggggaaaccttcaagggcgaggagctgctcgatgtgatggagtcaaaaggcgtgctgcccaattacgttacttacaatgcgcttgtgcagggctactgcaaggaggggaatgtcggggccgccatgcgagtattcaagaggatgaaggtgatgaagaggcgggaggggaggagtgacttgggagtgtcggtgcactcgcagacgtatgtcctgctgtgtaagagtttggtagagaagggaaggcttgatgatgccctgtggctttgtaacagctgctttgcaatgaaggcagcgccatcatttgaggctgtcaagggtttagtcgaggggttggtcaagggagggaggtctgcagaggcgaagggtgttgttgccaagatgaactttcttgtgaaaggggatgctaaagttgcttgggagaagattgctggtgaattatctcttgaagagggatcaccaagttcagatccatgatttgttggaggcatgcaagtcagttctgatttattcaagtgttttggcctttgaataacgttgatgaacaagaagggcattcacatgggttctagtattgtcttcatgggcctatctttcaaggtccaatagttagatcagagtgtaatgtctctataaggcagaatggtcagtgccatttcataatcccttttctgtaagagcttcttctattttgttgccttttggtaatacttaaaaagatattgcatttgttgaagtgct

SEQ ID NO: 31468 - protein, 438 aa, Triticum aestivum
NPRKPRAHSPITMASLLRRRHPHPSAVSAHLLRRLSALPDVDPSPASGPARAAARASIIDLQLAVRAETDPDRVHSLVASALSSPDYHRLHTSRDLFSLAASRLDRLHRPDLAASLLDQLLASAPVSPGLLARAISLFPGPNDAVRAFSSSAPAARSDVSLSALLSALLRAGRIDDLKSTFKSAESSLGVAPGCASHNVLLHALVKSSELPAARKLLNEMAKKKFKHRPPPDIISYNTLLAGFSEQDDAEEFEKLLKEINENKLEPNVVTYNCRMRWFARKGETFKGEELLDVMESKGVLPNYVTYNALVQGYCKEGNVGAAMRVFKRMKVMKRREGRSDLGVSVHSQTYVLLCKSLVEKGRLDDALWLCNSCFAMKAAPSFEAVKGLVEGLVKGGRSAEAKGVVAKMNFLVKGDAKVAWEKIAGELSLEEGSPSSDP

SEQ ID NO: 31469 - protein, 426 aa, Triticum aestivum
MASLLRRRHPHPSAVSAHLLRRLSALPDVDPSPASGPARAAARASIIDLQLAVRAETDPDRVHSLVASALSSPDYHRLHTSRDLFSLAASRLDRLHRPDLAASLLDQLLASAPVSPGLLARAISLFPGPNDAVRAFSSSAPAARSDVSLSALLSALLRAGRIDDLKSTFKSAESSLGVAPGCASHNVLLHALVKSSELPAARKLLNEMAKKKFKHRPPPDIISYNTLLAGFSEQDDAEEFEKLLKEINENKLEPNVVTYNCRMRWFARKGETFKGEELLDVMESKGVLPNYVTYNALVQGYCKEGNVGAAMRVFKRMKVMKRREGRSDLGVSVHSQTYVLLCKSLVEKGRLDDALWLCNSCFAMKAAPSFEAVKGLVEGLVKGGRSAEAKGVVAKMNFLVKGDAKVAWEKIAGELSLEEGSPSSDP

SEQ ID NO: 31470 - protein, 293 aa, Triticum aestivum
QTLANPVLTHQSPWRPSCAAATPTPPPSPPTSSAASPRSRTSILRQPPAPPARRPAPPSSISSSPSARRPTRTASTPSSPPRSPAPTTTVSTPRATSSPSPPPASTASTAPTSPPPSSTSSSPPPRSPPASSRAPSPSSRARTTPSVPSPPPPPPPAPMSPSPPSSPRFYARAASTTSSQPSNPLSPLSASPLAAPPTTCSSTLWSRALSSRPPASCSTKWPRRSLSIARPRTSYLTILSSLGSPSRTMPRSLRSCSRKSMRTSWSLMSSRTIAGCVGLQGRGKPSRARSCSM

SEQ ID NO: 31471 - DNA, 1414 bp, Triticum aestivum
aaaaaaatttcgattcgcacactgtgcagccaaaagccgagagagagctcgagctcagctccccactccccccatccccccgaggccccaaccctaagcccctcgccgggccccaatgtcgaggccggcggccgcggccgcagcggcgctgctggttatcctcgcggcggcgggcggcgcggcggcgaagaccacgatcgagccctgctccagcgccgactcgtgcgcggcgctgctcggctactcgctctacgccgacatgaaggtctccgaggtggcggcgctcttcggcgcggacccggcggcgctgctggcggccaacgcgctcgacttcgcctcccccggcgccgccaaccggatcctccccgcggggctcctcctccgcgtccccacccgctgcgcctgcgccgacggcgtccgcaagtccgtctccgtccgctacaccgcgcgccccgccgatacgctcgccaccgtcgccgacgtcgtcttcgcgggcctcgcctccgccgaccagatccgcagcgccaacgggctcgccgaggccgacccggacgcgctgctcgacgccggccagattctcgtcgtccccttcccctgcgtctgcctcaactccaccgacaacaacctccccgccgtctacctctcctatctcgtgcgggtcggggacaccgtgcaatccatcgccgccacccacgccaccactgtcacggatctcagcaatgtgaatgccatggggagccccgtcgtggcacccggcgacatccttgcagttccattatcagcatgtgcgtctacatttcctaactttgcttcggactatggattgcttgtggcaaacgggacctatgcactaactgctggtaactgtgtagaatgcagctgtgggccaggggatctcaatctgtactgcactccagcttcattaggaacgtcatgttcaagtatgcagtgctccaatagcagtctaatgcttggtaatgtgactacccagcccaccagcggtggctgcggtgtctcgtcttgcaactatgctggcttcgttaacggaagcattaccacatcgctgtcctcgggtcttcaacctacatgccctggaccgcatcaagttcctccactcatggagccgtccaccgcggcaatccacgactcgtaccttgctccatcaccttcgccaggacctggggaggcaggtggtgctgttcccggctcgtctgaccctggagcgtcctcccattctcttgctggaagcctctcgccctcggtgcataaactgcatcaaatgatcctcattctttctctagtcttctacctgcatatgtgaattcttctgtaggaatattattggatgtatttgtatcggacggggccctcatttgggcccggtggaacctcgacggcaaggttttctggctcc

SEQ ID NO: 31472 - protein, 401 aa, Triticum aestivum
MSRPAAAAAAALLVILAAAGGAAAKTTIEPCSSADSCAALLGYSLYADMKVSEVAALFGADPAALLAANALDFASPGAANRILPAGLLLRVPTRCACADGVRKSVSVRYTARPADTLATVADVVFAGLASADQIRSANGLAEADPDALLDAGQILVVPFPCVCLNSTDNNLPAVYLSYLVRVGDTVQSIAATHATTVTDLSNVNAMGSPVVAPGDILAVPLSACASTFPNFASDYGLLVANGTYALTAGNCVECSCGPGDLNLYCTPASLGTSCSSMQCSNSSLMLGNVTTQPTSGGCGVSSCNYAGFVNGSITTSLSSGLQPTCPGPHQVPPLMEPSTAAIHDSYLAPSPSPGPGEAGGAVPGSSDPGASSHSLAGSLSPSVHKLHQMILILSLVFYLHM

SEQ ID NO: 31473 - protein, 353 aa, Triticum aestivum
MKVSEVAALFGADPAALLAANALDFASPGAANRILPAGLLLRVPTRCACADGVRKSVSVRYTARPADTLATVADVVFAGLASADQIRSANGLAEADPDALLDAGQILVVPFPCVCLNSTDNNLPAVYLSYLVRVGDTVQSIAATHATTVTDLSNVNAMGSPVVAPGDILAVPLSACASTFPNFASDYGLLVANGTYALTAGNCVECSCGPGDLNLYCTPASLGTSCSSMQCSNSSLMLGNVTTQPTSGGCGVSSCNYAGFVNGSITTSLSSGLQPTCPGPHQVPPLMEPSTAAIHDSYLAPSPSPGPGEAGGAVPGSSDPGASSHSLAGSLSPSVHKLHQMILILSLVFYLHM

SEQ ID NO: 31474 - protein, 267 aa, Triticum aestivum
KKISIRTLCSQKPRESSSSAPHSPHPPEAPTLSPSPGPNVEAGGRGRSGAAGYPRGGGRRGGEDHDRALLQRRLVRGAARLLALRRHEGLRGGGALRRGPGGAAGGQRARLRLPRRRQPDPPRGAPPPRPHPLRLRRRRPQVRLRPLHRAPRRYARHRRRRRLRGPRLRRPDPQRQRARRGRPGRAARRRPDSRRPLPLRLPQLHRQQPPRRLPLLSRAGRGHRAIHRRHPRHHCHGSQQCECHGEPRRGTRRHPCSSIISMCVYIS

SEQ ID NO: 31475 - DNA, 1392 bp, Triticum aestivum
cacactcagaacactagctactgtcctgccattctgctccgcgcttatcttcctcagcttcccaagtctgcctaagcatcaaacgctagcacgtccaagccgagaagttccaagcatgtggaagtttcttgcagcaacggcgctgccgatcctggtctcgctgctcgccgtgcgcgcgcgcggcgtcgacgactacacggcgttcgtgtacgccgggtgctcgcaggcgcgctacgacgccggcacccagtacgccgcggacgtcgacaccgtgctctcgaccctcaccgacaccgcggcctccaccccctacgccaactacacccccccgtccggcgccgccacgggcctagtcggcctctaccagtgccgctccgacctcccggccgccgtctgcggcgtctgcgtgaaggcgtccgcctccaagctctcctccctctgcaactcggccgccggcggcgcggtgcagctgcgcgcgtgcttcgtccgctacggcaacgactcgttcctcgggaagccggacaacacggtgctgttcaagaagtgcggcggcgagagcggggacgccggcgtcgcggcgctgcgcgacgcggcgctcggagcgctccaggccgcgtcgtcccccgcggccggcggctcgtaccgcgcaggcgcggccgggtacgtgcaggccatgtcgcagtgcgtgggggacctcggcgccaaggcctgcaccgactgcgtctccgtcgccgcctcgcagctcaaggccggctgcggcgacgcctccgccggggaggtctacctcggcaagtgctacgcgcgcttctggtccaatgccggcaccggcaccggcgggaccacccccggaggaggcaacgtcatcggcggcggtaacgccggccccatcggtgacggcggcaatggcatcgctggcggaggcaatggcatcgccggcggcggcaccgtcggcgtcccgggcgcaggcagcggatacggatacgggttcgtgccgcgtccgtacggcgacgtccaagatggttccgggaagaccctcgccatcatcatcggcatcgtggcggcggcggccatcatcatcatcttcctctccttcgtccgaagagcccgcgccgccaatggcaaaagctaagctaagggttgcagcagggatggtcgccactcgccactattagctcagatttggatcggtcggtggcttttggcttcggcgttgctttagtatctctccttttatcttttatggtctcttttgccgtgccagaaaaacaaagggaggccatgccgccactgtgccgaagtagggaactgaagattccagctgcatgctactagccactaaggaaaatattactacgcaagaataagaagatatatatttgttgaagtgaccac

SEQ ID NO: 31476 - protein, 375 aa, Triticum aestivum
TLRTLATVLPFCSALIFLSFPSLPKHQTLARPSREVPSMWKFLAATALPILVSLLAVRARGVDDYTAFVYAGCSQARYDAGTQYAADVDTVLSTLTDTAASTPYANYTPPSGAATGLVGLYQCRSDLPAAVCGVCVKASASKLSSLCNSAAGGAVQLRACFVRYGNDSFLGKPDNTVLFKKCGGESGDAGVAALRDAALGALQAASSPAAGGSYRAGAAGYVQAMSQCVGDLGAKACTDCVSVAASQLKAGCGDASAGEVYLGKCYARFWSNAGTGTGGTTPGGGNVIGGGNAGPIGDGGNGIAGGGNGIAGGGTVGVPGAGSGYGYGFVPRPYGDVQDGSGKTLAIIIGIVAAAAIIIIFLSFVRRARAANGKS

SEQ ID NO: 31477 - protein, 337 aa, Triticum aestivum
MWKFLAATALPILVSLLAVRARGVDDYTAFVYAGCSQARYDAGTQYAADVDTVLSTLTDTAASTPYANYTPPSGAATGLVGLYQCRSDLPAAVCGVCVKASASKLSSLCNSAAGGAVQLRACFVRYGNDSFLGKPDNTVLFKKCGGESGDAGVAALRDAALGALQAASSPAAGGSYRAGAAGYVQAMSQCVGDLGAKACTDCVSVAASQLKAGCGDASAGEVYLGKCYARFWSNAGTGTGGTTPGGGNVIGGGNAGPIGDGGNGIAGGGNGIAGGGTVGVPGAGSGYGYGFVPRPYGDVQDGSGKTLAIIIGIVAAAAIIIIFLSFVRRARAANGKS

SEQ ID NO: 31478 - DNA, 1193 bp, Triticum aestivum
ctcccatcaccggtttcgaaatccatccatccaaaccagcggaagaagaagaaaagaaaaagagaaaaatccacgcgaaagggcgagcgcaggacagggacgaacaaccttgcgtgcgaggcgaggccgctccgattcgacagacgcaggcgcagcgcagggatggacgccttctactcgacctcgtcggcggcggccagcggatggggctacgactccctcaagaacttccgcgagatctcccccgccgtgcagtcccacctcaagctcgtttacctgaccctatgctttgccctggcctcatctgccgtgggtgcttacctgcacattgccctgaacattggcgggatgctgacaatgctcgcgtgtatcggaaccatcgcctggatgttctcggtgccagtctatgaggagaggaagaggtttgggctgctgatgggtgcagccctcctggaaggggcttcagttggacctctgattgagcttgccatagactttgacccaagcatcctcgtgacagggtttgtcggaaccgccatcgccttcgggtgcttctctggcgccgccatcatcgccaagcgcagggagtacctgtacctcggcggcctgctctcctctggcctgtcgatcctgctctggctgcagtttgccacgtccatctttggccactcctctggcagcttcatgtttgaggtttactttggcctgttgatcttcctggggtacatggtgtacgacacgcaggagatcatcgagagggcgcaccacggtgacatggactacatcaagcacgcgctcaccctcttcaccgacttcgtcgccgtcctcgtccgcatcctcatcatcatgctcaagaacgcaggcgacaagtcggaggacaagaagaagaggaagaggaggtcctgaacgtgtcctctgcacatcgtagataccatcaccaccgcgctactggtaccaccaccactgctaagtacttgtaggaattaagctggcgcagtaacttggcgccgtgccacccttgttaattcgcgctcgtgtgaacattgtgtgagtttgatgctgctgatgaagcatttgcagatgctgtctgcgttccggatctcttgtgttcctgttaccgtcacgataatagaaacctgagacgatttggtttggtttacgaagaacatggctatgcttgtttgtgattgaag

SEQ ID NO: 31479 - protein, 301 aa, Triticum aestivum
LPSPVSKSIHPNQRKKKKRKREKSTRKGERRTGTNNLACEARPLRFDRRRRSAGMDAFYSTSSAAASGWGYDSLKNFREISPAVQSHLKLVYLTLCFALASSAVGAYLHIALNIGGMLTMLACIGTIAWMFSVPVYEERKRFGLLMGAALLEGASVGPLIELAIDFDPSILVTGFVGTAIAFGCFSGAAIIAKRREYLYLGGLLSSGLSILLWLQFATSIFGHSSGSFMFEVYFGLLIFLGYMVYDTQEIIERAHHGDMDYIKHALTLFTDFVAVLVRILIIMLKNAGDKSEDKKKRKRRS

SEQ ID NO: 31480 - protein, 247 aa, Triticum aestivum
MDAFYSTSSAAASGWGYDSLKNFREISPAVQSHLKLVYLTLCFALASSAVGAYLHIALNIGGMLTMLACIGTIAWMFSVPVYEERKRFGLLMGAALLEGASVGPLIELAIDFDPSILVTGFVGTAIAFGCFSGAAIIAKRREYLYLGGLLSSGLSILLWLQFATSIFGHSSGSFMFEVYFGLLIFLGYMVYDTQEIIERAHHGDMDYIKHALTLFTDFVAVLVRILIIMLKNAGDKSEDKKKRKRRS

SEQ ID NO: 31481 - protein, 185 aa, Triticum aestivum
MLTMLACIGTIAWMFSVPVYEERKRFGLLMGAALLEGASVGPLIELAIDFDPSILVTGFVGTAIAFGCFSGAAIIAKRREYLYLGGLLSSGLSILLWLQFATSIFGHSSGSFMFEVYFGLLIFLGYMVYDTQEIIERAHHGDMDYIKHALTLFTDFVAVLVRILIIMLKNAGDKSEDKKKRKRRS

SEQ ID NO: 31482 - DNA, 1300 bp, Triticum aestivum
ccacccagccttcctcctctccacaccgcaggctccagggaaagggaagacctcgcctcgccttgctgccgccgaagccaccagcggagggagcatgaaggtctccgtcgtgtcccggagcggccgcgaggtcgtcaagggcggcatcgagctcaaggactcggccaaggtcgcggatctgcaggaggccatccacgccaagactaagaagtattatcctgccaggcaacggctcaccctccctgcacaacctggaaaatctggaaagccagttgtcctcaatcaaaaggccagcctatcggaatactgcgagaaaggttccggttccctgacagtggtcttcaaagatttgggcccacaggtctactacagcacgctcttcttctgggaatacgtcggccctcttatcatgtaccccatcttctattacctgcctgtctacaaatactttggatatgagggagagcgggtcatccaccctgtccagacctatgccatgtactacttctgcttccactacttcaagaggatcatggagaccttcttcgtccaccgcttcagccacgcaacttcccccgtgtcaaacgtcttcaggaactgcgcctactactggacctttggagcctacattgcctactactgcaaccacccgctttacacccccgtgagtgacctgcagatgaagattgggttcggcatcggggtcgtgtgccagatcgcaaacttctactgccacatcctgctgaggaacctcaggagcccgaccggcagcggcggctaccagatcccacggggtttcctgttcaacattgtgacatgcgcaaactacaccaccgagatctaccaatggctggggttcaacatcgccacacagaccgtggcgggctacgtcttcctcgctgtggccgctgctatcatgaccaactgggcgctcggaaagcacagccgcctgaggaagctcttcgacggtaaggacgggcggcccaagtacccccgccgatgggtgattcttcctccattcctgtgaagaagtcacggtgctcgcaaggcctgcatctggagattcaacatttattctgttccagcgttccaaagttaaaagccatcagtcgatttcactcaaacattcctactaatcgtgccttgtaccagctgtcaaacctcaattatgtagtccaaatgttcttatccaaaggatgtattttcttactccatattgttgaaaaactttctctggggtttatttacgccacaccgcgacgtgttgtcatagtcaagtccaacactaagatgattcatc

SEQ ID NO: 31483 - protein, 341 aa, Triticum aestivum
HPAFLLSTPQAPGKGKTSPRLAAAEATSGGSMKVSVVSRSGREVVKGGIELKDSAKVADLQEAIHAKTKKYYPARQRLTLPAQPGKSGKPVVLNQKASLSEYCEKGSGSLTVVFKDLGPQVYYSTLFFWEYVGPLIMYPIFYYLPVYKYFGYEGERVIHPVQTYAMYYFCFHYFKRIMETFFVHRFSHATSPVSNVFRNCAYYWTFGAYIAYYCNHPLYTPVSDLQMKIGFGIGVVCQIANFYCHILLRNLRSPTGSGGYQIPRGFLFNIVTCANYTTEIYQWLGFNIATQTVAGYVFLAVAAAIMTNWALGKHSRLRKLFDGKDGRPKYPRRWVILPPFL

SEQ ID NO: 31484 - protein, 310 aa, Triticum aestivum
MKVSVVSRSGREVVKGGIELKDSAKVADLQEAIHAKTKKYYPARQRLTLPAQPGKSGKPVVLNQKASLSEYCEKGSGSLTVVFKDLGPQVYYSTLFFWEYVGPLIMYPIFYYLPVYKYFGYEGERVIHPVQTYAMYYFCFHYFKRIMETFFVHRFSHATSPVSNVFRNCAYYWTFGAYIAYYCNHPLYTPVSDLQMKIGFGIGVVCQIANFYCHILLRNLRSPTGSGGYQIPRGFLFNIVTCANYTTEIYQWLGFNIATQTVAGYVFLAVAAAIMTNWALGKHSRLRKLFDGKDGRPKYPRRWVILPPFL

SEQ ID NO: 31485 - protein, 205 aa, Triticum aestivum
MYPIFYYLPVYKYFGYEGERVIHPVQTYAMYYFCFHYFKRIMETFFVHRFSHATSPVSNVFRNCAYYWTFGAYIAYYCNHPLYTPVSDLQMKIGFGIGVVCQIANFYCHILLRNLRSPTGSGGYQIPRGFLFNIVTCANYTTEIYQWLGFNIATQTVAGYVFLAVAAAIMTNWALGKHSRLRKLFDGKDGRPKYPRRWVILPPFL

SEQ ID NO: 31486 - DNA, 751 bp, Triticum aestivum
aaaacccttttcccctcttcttcttctactactactccccccaccccacccagcctaccgtcgcagaagcacacgcgcagacagattggaaccggagagctcgatctgatagcagaagctttcgaatcccttttggcggaaggaatggcggaggagaaggggacgctgcaggcgatgaggggctgggtcgtggaccacaagctgcgggccgtagggacgctgtggctcacggggatcgcgggatccatcgcctacaactggtccaggcccggcatgaagaccagcgtcaagctcatccacgccaggcttcatgctcaggccctcaccctggctgccttgggttgttctgcgctggtggagtactatgatcaccagtcaggctcagggtcaaaagttcacgactatgcgaagcagttccttccgtcggacagaaacgccaaaaaggactctgtgtagaagaggcagcaaattatgatataggcttccattagctgatatggaattcgttgatgttactttctgagcaaaaacaatctggcatttcaaatgccgttatccaagttccgcaggcttcctgttctctgtataagctactgaaccagcatctagatgcagccgtatgcaaatccgtggtgatggaaatatgtacttatgtactttcctgaaccgtgcatgaatgtaatgaatgaaatgtttctctatgaagtaaaccaaccagacgagttggtatgcagaagcttctgctcatgac

SEQ ID NO: 31487 - protein, 151 aa, Triticum aestivum
KTLFPSSSSTTTPPTPPSLPSQKHTRRQIGTGELDLIAEAFESLLAEGMAEEKGTLQAMRGWVVDHKLRAVGTLWLTGIAGSIAYNWSRPGMKTSVKLIHARLHAQALTLAALGCSALVEYYDHQSGSGSKVHDYAKQFLPSDRNAKKDSV

SEQ ID NO: 31488 - protein, 121 aa, Triticum aestivum
NPFPLFFFYYYSPHPTQPTVAEAHAQTDWNRRARSDSRSFRIPFGGRNGGGEGDAAGDEGLGRGPQAAGRRDAVAHGDRGIHRLQLVQARHEDQRQAHPRQASCSGPHPGCLGLFCAGGVL

SEQ ID NO: 31489 - protein, 103 aa, Triticum aestivum
MAEEKGTLQAMRGWVVDHKLRAVGTLWLTGIAGSIAYNWSRPGMKTSVKLIHARLHAQALTLAALGCSALVEYYDHQSGSGSKVHDYAKQFLPSDRNAKKDSV

SEQ ID NO: 31490 - DNA, 1450 bp, Triticum aestivum
ctttatccaccccatccaaatccccgattcctccaaccctcccagaccgcaatggccgccgccgccgccgccgccgccgagccctcctccgccgacagccgccgctacgtcgtgggctacgcgctcgcgcccaagaagcagaacagcttcatcaagccctcgctcatctcccgcgcggcggcgcgcggcgtggacctcgtccccgtcgacgacgcgcggcccctcgccgaccagggccccttcgacctcgtcatccacaagctctacggccacgactggcgcgcccagctccaggccttctccgcccgctacccctccgtccccgtcgtcgacccgccccacgccatcgaccgcctccacaaccgcatctccatgctccaggtcgtctccgagctcgacgtcccgctcaccgacgccgcctccgcctccgctgacggcgaaggccaccgccacaccttcggcatccccagccaggtcgtcgtctacgacgccgccgcgctcgccgactcgggcctcctcgccgcgctccgcttcccgctcatcgccaagcccctcgtcgccgacggcagcgccaagtcgcacaagatgtccctcgtctaccaccgagaggggctccgcaagctccgcccgccgctcgtcctgcaggagttcgtcaaccacggcggcgtcatattcaaggtttacgtcgtcggcggccacgtcacctgcgtcaagcgccgcagcctaccggacgtctccaaggagatcctcgaggacgccgccgccgagggcaccatctccttctcgcaggtatccaatctccccaatcagcgcacggccgaggagtactacgaggacatgcggctcgaggacgccgtcatgccgcccactgatttcgtcaacgagatcgcaggcgggctccgccgtgccctgggcctgcagctcttcaacttcgacatgatccgggatgttcgtgccgggaaccggtatctcgtcattgacatcaactacttccccggttacgcgaagatgcccggctacgagattgtccttactgatttcttctgggatatggttcacaaggacgacgtggccctcaaggaggaggagcagcagagcaatcatgctgttgtgaaatgagatggatttgctcggcatagcttgctcgcaaacctgcaattctttcatgtctgggggaaatgtgaggtggcaggatggttacaagactcgaggggaataacgagcaaccaattaggatggggagatggggattaacaggttctggatttacttgggtttcaaccagccgcaagcggaggacctgcaatgtaaatcctctctccttgctcctgtcataccggttgtttaggtatctttctgttcttcgtaatttgcttcacccagtttagttagaacaaaagtgggggaacagaagccaagttctgaagaagatatatttgttctggaaaac

SEQ ID NO: 31491 - protein, 372 aa, Triticum aestivum
LYPPHPNPRFLQPSQTAMAAAAAAAAEPSSADSRRYVVGYALAPKKQNSFIKPSLISRAAARGVDLVPVDDARPLADQGPFDLVIHKLYGHDWRAQLQAFSARYPSVPVVDPPHAIDRLHNRISMLQVVSELDVPLTDAASASADGEGHRHTFGIPSQVVVYDAAALADSGLLAALRFPLIAKPLVADGSAKSHKMSLVYHREGLRKLRPPLVLQEFVNHGGVIFKVYVVGGHVTCVKRRSLPDVSKEILEDAAAEGTISFSQVSNLPNQRTAEEYYEDMRLEDAVMPPTDFVNEIAGGLRRALGLQLFNFDMIRDVRAGNRYLVIDINYFPGYAKMPGYEIVLTDFFWDMVHKDDVALKEEEQQSNHAVVK

SEQ ID NO: 31492 - protein, 355 aa, Triticum aestivum
MAAAAAAAAEPSSADSRRYVVGYALAPKKQNSFIKPSLISRAAARGVDLVPVDDARPLADQGPFDLVIHKLYGHDWRAQLQAFSARYPSVPVVDPPHAIDRLHNRISMLQVVSELDVPLTDAASASADGEGHRHTFGIPSQVVVYDAAALADSGLLAALRFPLIAKPLVADGSAKSHKMSLVYHREGLRKLRPPLVLQEFVNHGGVIFKVYVVGGHVTCVKRRSLPDVSKEILEDAAAEGTISFSQVSNLPNQRTAEEYYEDMRLEDAVMPPTDFVNEIAGGLRRALGLQLFNFDMIRDVRAGNRYLVIDINYFPGYAKMPGYEIVLTDFFWDMVHKDDVALKEEEQQSNHAVVK

SEQ ID NO: 31493 - protein, 312 aa, Triticum aestivum
FIHPIQIPDSSNPPRPQWPPPPPPPPSPPPPTAAATSWATRSRPRSRTASSSPRSSPARRRAAWTSSPSTTRGPSPTRAPSTSSSTSSTATTGAPSSRPSPPATPPSPSSTRPTPSTASTTASPCSRSSPSSTSRSPTPPPPPLTAKATATPSASPARSSSTTPPRSPTRASSPRSASRSSPSPSSPTAAPSRTRCPSSTTERGSASSARRSSCRSSSTTAASYSRFTSSAATSPASSAAAYRTSPRRSSRTPPPRAPSPSRRYPISPISARPRSTTRTCGSRTPSCRPLISSTRSQAGSAVPWACSSSTST

SEQ ID NO: 31494 - DNA, 719 bp, Triticum aestivum
ctaacaaacccctcacccctcgtcgccgaaacccttcctcgcccccgcccccgcccccgccgccaaacacccatcgccatgcggccaccgagaggtggcggaggtttccgcggacgcggcggcgaccaaggtggccgcttcggtggaggcggccgcggcaggggccgcttcggtggaggcggcggcgggttccgcgacgagggccctccagccgaggtcgtcgaggtgtcgacgttcctgcacgcctgcgagggggacgcggtaacgaagctgacgaacgagaaagtgccctacttcaacgcgcccatatacctccagaacaagacccagatcggcaaagtcgacgagatcttcggccccatcaacgaatcatatttctcggtcaagatgttcgagggagtcattgcaacatcttacaacgaaggtgacaagttcttcattgaccccatgaagctgctgcccctctcacgcttcctgccgcagccaaagggctcgactccaagaggtggtggtcgcggtggaagaggtggtggtcgcggtggatttggtggccgtggtggattccgtggaagaggtgcaccaaggggtcgtggacctcccaggggtggagggcgtggtttcagaggacgaggcagattctaggatgtagttttaagtttgctgttttttgaaacatgatgctctacattatctcttcagctggaaacattatgctaagt

SEQ ID NO: 31495 - protein, 213 aa, Triticum aestivum
LTNPSPLVAETLPRPRPRPRRQTPIAMRPPRGGGGFRGRGGDQGGRFGGGGRGRGRFGGGGGGFRDEGPPAEVVEVSTFLHACEGDAVTKLTNEKVPYFNAPIYLQNKTQIGKVDEIFGPINESYFSVKMFEGVIATSYNEGDKFFIDPMKLLPLSRFLPQPKGSTPRGGGRGGRGGGRGGFGGRGGFRGRGAPRGRGPPRGGGRGFRGRGRF

SEQ ID NO: 31496 - protein, 187 aa, Triticum aestivum
MRPPRGGGGFRGRGGDQGGRFGGGGRGRGRFGGGGGGFRDEGPPAEVVEVSTFLHACEGDAVTKLTNEKVPYFNAPIYLQNKTQIGKVDEIFGPINESYFSVKMFEGVIATSYNEGDKFFIDPMKLLPLSRFLPQPKGSTPRGGGRGGRGGGRGGFGGRGGFRGRGAPRGRGPPRGGGRGFRGRGRF

SEQ ID NO: 31497 - protein, 141 aa, Triticum aestivum
NKPLTPRRRNPSSPPPPPPPPNTHRHAATERWRRFPRTRRRPRWPLRWRRPRQGPLRWRRRRVPRRGPSSRGRRGVDVPARLRGGRGNEADERESALLQRAHIPPEQDPDRQSRRDLRPHQRIIFLGQDVRGSHCNILQRR

SEQ ID NO: 31498 - DNA, 1762 bp, Triticum aestivum
attttgtcctgtctccctatattcccagtgtctcgctgctcgttcccatatatgcacgcacctcgcgcgtggtcaccgtgtgaagtgcctctgccagagtgccggctaccaaccccgttgccccccggaagtggaacctaggataccgcggcagccgtcgatttcatggcgccggaagaagcaagcacggccaccaccggtggcccgcgccgccgccgcgtgctagtcttccctatcccgtaccagggccacatcaaccccatgttccagctcgccggcctcctccaagaccgcggctttgccgtcaccgtcttccacacccacttcaacgcccccgacccgtcccgccaccccgcctacggcttcgtccccgtccccgacggcttgccggcgggcagccccggcacggtggcggcgaccgtcgagcacatcttcgccatcaacggctcctgcgaggcgccgttccgggagcgcctggccgccctgctggaggctcctggcggcagggacgaggtcgcgtgcctggtcgcggacgcgcacctgctgaccctcatggacgtggcgcggcagcaaggcgtgccgacgctggcgctgcgcaccggcagcgccgcctgcttccgcaacttcatggccaccccgatgctctgcgacaagggctaccttccggtgagcgcggagtcgcagctggacgcgccggtgagggagctgccgccgtaccgcgtccgggacctgatggccgtcaccagcagccgccacgagcacgatctggtgtgcaagctgctggcccgggccgtcgaggcagtgagcacctcggctggattcatactcaacaccttcgacgcgctggaggccgacgacctggcggcgacccggcgggacctcgccggcgtgccggtgttcgaggtcggcccgctccacaagatctccccggcgtcgtccagcagcctcctgccgcaggaccgctcctgcctggactggctggacgcgcaagccccggcgtccgtgctgtacatcagcttcggcagcctggcgagcatgagcggcgaggacctggccgaggcggcgtggggcgtcgccaacagcaggcagccgttcctgtgggcgctccggccgggcctcgcccgcggcgccgccctgcccgacgggttcggcgcggagaccgaaggccgtggactggtcgtgggctgggcgccgcaggaggaggtgctggcgcacggcgccgtgggcgggttctggacgcacggcgggtggaactcggcgctggagggcgcgtgcgggggcgtgccgatgctctgccggccctgcttcggcgaccagatgggcaacgcgaggtacgtggagcacgtgtggcgcgcgggcatcgcgctggacggcggcgtgctcgagcggggagcggtggagcgggccgtccggaggctcatgcggagcgaggagggggaggagatgagggggcgagcccgggagctcgggagcagagcggcggaggccatcgccgagggtgggtcgtctcgccacagtgtcgacaagctggtgaaccacatcatgtcgctgtggaagtgagttccgagtactgccagtagaccgatgcttgcattttgtcctctttaaaatgtttggatcttttcatgactatataagacttcattgaaatcaccggcacaaaaccatggaagttttatttgttgatcaagtgtcctcaaaagcttccatgttttatcccttttttccaacgcaggctcaccatatatgcccgtgaatctcc

SEQ ID NO: 31499 - protein, 464 aa, Triticum aestivum
MAPEEASTATTGGPRRRRVLVFPIPYQGHINPMFQLAGLLQDRGFAVTVFHTHFNAPDPSRHPAYGFVPVPDGLPAGSPGTVAATVEHIFAINGSCEAPFRERLAALLEAPGGRDEVACLVADAHLLTLMDVARQQGVPTLALRTGSAACFRNFMATPMLCDKGYLPVSAESQLDAPVRELPPYRVRDLMAVTSSRHEHDLVCKLLARAVEAVSTSAGFILNTFDALEADDLAATRRDLAGVPVFEVGPLHKISPASSSSLLPQDRSCLDWLDAQAPASVLYISFGSLASMSGEDLAEAAWGVANSRQPFLWALRPGLARGAALPDGFGAETEGRGLVVGWAPQEEVLAHGAVGGFWTHGGWNSALEGACGGVPMLCRPCFGDQMGNARYVEHVWRAGIALDGGVLERGAVERAVRRLMRSEEGEEMRGRARELGSRAAEAIAEGGSSRHSVDKLVNHIMSLWK

SEQ ID NO: 31500 - protein, 432 aa, Triticum aestivum
MFQLAGLLQDRGFAVTVFHTHFNAPDPSRHPAYGFVPVPDGLPAGSPGTVAATVEHIFAINGSCEAPFRERLAALLEAPGGRDEVACLVADAHLLTLMDVARQQGVPTLALRTGSAACFRNFMATPMLCDKGYLPVSAESQLDAPVRELPPYRVRDLMAVTSSRHEHDLVCKLLARAVEAVSTSAGFILNTFDALEADDLAATRRDLAGVPVFEVGPLHKISPASSSSLLPQDRSCLDWLDAQAPASVLYISFGSLASMSGEDLAEAAWGVANSRQPFLWALRPGLARGAALPDGFGAETEGRGLVVGWAPQEEVLAHGAVGGFWTHGGWNSALEGACGGVPMLCRPCFGDQMGNARYVEHVWRAGIALDGGVLERGAVERAVRRLMRSEEGEEMRGRARELGSRAAEAIAEGGSSRHSVDKLVNHIMSLWK

SEQ ID NO: 31501 - protein, 335 aa, Triticum aestivum
MDVARQQGVPTLALRTGSAACFRNFMATPMLCDKGYLPVSAESQLDAPVRELPPYRVRDLMAVTSSRHEHDLVCKLLARAVEAVSTSAGFILNTFDALEADDLAATRRDLAGVPVFEVGPLHKISPASSSSLLPQDRSCLDWLDAQAPASVLYISFGSLASMSGEDLAEAAWGVANSRQPFLWALRPGLARGAALPDGFGAETEGRGLVVGWAPQEEVLAHGAVGGFWTHGGWNSALEGACGGVPMLCRPCFGDQMGNARYVEHVWRAGIALDGGVLERGAVERAVRRLMRSEEGEEMRGRARELGSRAAEAIAEGGSSRHSVDKLVNHIMSLWK

SEQ ID NO: 31502 - DNA, 2457 bp, Triticum aestivum
accagtttcctcccacgctgcagcaacccccgccgcggcaaagagccccagatcccgcacatctgatctcaccgagatccaccctgccccccggcggccatggccgtgccgtccgccgcgcccaccccgcgctcccctcgcccggactcatcggcggccgccgacgcttccgccgacgccgccccgtccctggacttcggcgacccggcctccctcgcggcgctccgcggcctcaccgacgccggcgccgccacccgcctgctccacgagtgcgtcgcctaccagcgcgccctcgacgcccgcctcgacgcgctcctcgcccgccgccccgacctcgaccgcgccgccgcctccctgctccgctccgccccgccgctcctctcgctcgccgcctccgacgccgccgcgctcagggagtcctcctcctccaccgccgccctcgccgaggcgctctcctcccgcgtccgccacctcgacgcggcccactcgcgcgccgagtccgccctggcccgcgccgaggcggccctcgaccgctcccgcgcgctcgacgccgcgcgccgcgccctcgccgccgacgacctcgcggccgccgccaccgccgcgcacgagttcctggccatcgacgcgcggttccccaccgacgacgacctccgccgcgacctgctcgacatcaagcgccgcctcgagggcctcgcgcggcggaggctctccgccgcggtcgacgcccaggaccaccccgccgtgctgcgcctcgtgcgcctcttccccctcctcgacctcgcgcccgagggcctccaggtctacgtcgcctacctcaagaaggtcgtcgccctccgcgcccgggcagacttcgagcacctcacggacctaatctctgcaacccagcctacctcggagcgccctgatttcgttggctgcctcacccgtctcttcaaggatattgtgctcgctgttgaggagaatgaggcggtgcttcgtgagctacggggtgaggatggtgtcgcctacgccatcatcgagctgcaggaggaatgcgactcgaggggcacccagatcctccgccgctatgccgattaccggaagcttgcccgtctttcgtcggatataaactcctataccaagaaccttctatctgttatgggttcagtggccaacgctgcaggtggtagtgaagggcccgaccccagggaggttgagatttatcttgaggaaattcttgcgttgacacaacttggtgaagactataccgagtttatggtgaacaagatccgtggactgagggatgtcaagcctgaactcggtccgcaagcaatgaaagccttccgtaatggtagctttaataaaatggaaaaggatttgactgggtattatgtgatcttggaggagttcttcatggtggagaacataaggaaggccatccagattgatgagccagtgcctgatggtctcacgacctcaatggtcgacgatgtgttctttctactgcagagctgctgccggcgggcagctttcactgcaagcatcaactcactacttgctgtgcttggtggggcaacaagcctactaagcaatgagttccaggaggcactacagtggagaatgagggagccaaacttgggcgcaaagctcttcttaggtggtgttggagttcagaagaccggggaggagattgcaactgcgctgaacaacatggatgtgagctcagaatatgtcctgaagctccgccatgaggtcgaggagctctgtgcagagattttccatgctcctgctgaccgagagaagatcaagtcctgtttatcggagctaggtgaaatcaacgcttcctacaagaagatcctttattctgggctggagcatttggtggcatctattgcaccccgcattcgtcctgtccttgacacggttaccactgtcagctacgagctggatgatgccgaatacggggaaaatgaggtgaatgacccatgggtgcagaagcttctccttgcagttgacactaacgttacatggctccagccaatgatgacatcgaacaactacgattcctttgtccacctggtcatcgacttcattgtcaagaggctcgaggttatcatgatgcagaagaggttcagccagctcggtggcttgcagctcgacaaggaggttcggtccctgatcaaccatttctcagagatgtcacagaggccggtccgagacaagttctcgaggctttcccagatgtcaaccatcctgaactttgagcgtgtatctgagatactggatttctggggtgacaatgctgggcatctgacgtggctgttgacacctgcagaggtgaggagggtcttagggcttaggatcgacttcaggcctgaagcaatttctgctttgagactctaacttgtgcatttaaaatacacacttgtcactatagttcttttgtatgtgattatatcatgaaatatttcctggttc

SEQ ID NO: 31503 - protein, 760 aa, Triticum aestivum
MAVPSAAPTPRSPRPDSSAAADASADAAPSLDFGDPASLAALRGLTDAGAATRLLHECVAYQRALDARLDALLARRPDLDRAAASLLRSAPPLLSLAASDAAALRESSSSTAALAEALSSRVRHLDAAHSRAESALARAEAALDRSRALDAARRALAADDLAAAATAAHEFLAIDARFPTDDDLRRDLLDIKRRLEGLARRRLSAAVDAQDHPAVLRLVRLFPLLDLAPEGLQVYVAYLKKVVALRARADFEHLTDLISATQPTSERPDFVGCLTRLFKDIVLAVEENEAVLRELRGEDGVAYAIIELQEECDSRGTQILRRYADYRKLARLSSDINSYTKNLLSVMGSVANAAGGSEGPDPREVEIYLEEILALTQLGEDYTEFMVNKIRGLRDVKPELGPQAMKAFRNGSFNKMEKDLTGYYVILEEFFMVENIRKAIQIDEPVPDGLTTSMVDDVFFLLQSCCRRAAFTASINSLLAVLGGATSLLSNEFQEALQWRMREPNLGAKLFLGGVGVQKTGEEIATALNNMDVSSEYVLKLRHEVEELCAEIFHAPADREKIKSCLSELGEINASYKKILYSGLEHLVASIAPRIRPVLDTVTTVSYELDDAEYGENEVNDPWVQKLLLAVDTNVTWLQPMMTSNNYDSFVHLVIDFIVKRLEVIMMQKRFSQLGGLQLDKEVRSLINHFSEMSQRPVRDKFSRLSQMSTILNFERVSEILDFWGDNAGHLTWLLTPAEVRRVLGLRIDFRPEAISALRL

SEQ ID NO: 31504 - protein, 414 aa, Triticum aestivum
MGSVANAAGGSEGPDPREVEIYLEEILALTQLGEDYTEFMVNKIRGLRDVKPELGPQAMKAFRNGSFNKMEKDLTGYYVILEEFFMVENIRKAIQIDEPVPDGLTTSMVDDVFFLLQSCCRRAAFTASINSLLAVLGGATSLLSNEFQEALQWRMREPNLGAKLFLGGVGVQKTGEEIATALNNMDVSSEYVLKLRHEVEELCAEIFHAPADREKIKSCLSELGEINASYKKILYSGLEHLVASIAPRIRPVLDTVTTVSYELDDAEYGENEVNDPWVQKLLLAVDTNVTWLQPMMTSNNYDSFVHLVIDFIVKRLEVIMMQKRFSQLGGLQLDKEVRSLINHFSEMSQRPVRDKFSRLSQMSTILNFERVSEILDFWGDNAGHLTWLLTPAEVRRVLGLRIDFRPEAISALRL

SEQ ID NO: 31505 - DNA, 604 bp, Triticum aestivum
gttcgccgtcgcgacctcagttccccacccgcaaccgctggatagctcgcgaatctgctcctcgtcgccgtccccgatccgtccgtcgtctccccgtacggcccccgatggcgaggttccggttccactggctggaggccatgctgccgctgggcatcatcggcggcttcctctgcatcatgggcaacggccagtactacatccacagggccgcgcacggcaggccgaagcacatcgggaacgacatgtgggacgtcgccatggagcgccgtgacaagaagctcgtcgacaagcccgccgccaactaggatatggatcaacaattgagctttcttggatgttgacgaagctctttcagaagctcagaaatactgctgtgtagtttccttgtatcaatgggaaactggggcttctgtttttgtttttggtttcccaacgtcggatgaataatgtgtacctaaagttaatcaaacaaaatgtggttcccttgcaaattatttaccctttcccaccttgattgatcgtgaacaatgtgtggtgtttgctgtatctattatggatttttatatggatatacttaatctacctgttcatgagatcaaat

SEQ ID NO: 31506 - protein, 101 aa, Triticum aestivum
SPSRPQFPTRNRWIARESAPRRRPRSVRRLPVRPPMARFRFHWLEAMLPLGIIGGFLCIMGNGQYYIHRAAHGRPKHIGNDMWDVAMERRDKKLVDKPAAN

SEQ ID NO: 31507 - protein, 90 aa, Triticum aestivum
FAVATSVPHPQPLDSSRICSSSPSPIRPSSPRTAPDGEVPVPLAGGHAAAGHHRRLPLHHGQRPVLHPQGRARQAEAHRERHVGRRHGAP

SEQ ID NO: 31508 - protein, 66 aa, Triticum aestivum
MARFRFHWLEAMLPLGIIGGFLCIMGNGQYYIHRAAHGRPKHIGNDMWDVAMERRDKKLVDKPAAN

SEQ ID NO: 31509 - DNA, 1052 bp, Triticum aestivum
ctgtctctccctgctctctgtttctccgctcctcccagatccgcgcgtgcgttcctgttcacgttcctttccggcggcgtcgtcgtcttcctccagattcgactcgacgatttcccaagcgataatggcggaggaggggcacaaggtggtgctcaacgtgtacgacctcagcaacggcctggcgcgccagctctccacctccttcctcggcaagcccatcgaggccatatggcacacgggcgtggtggtgtacggcaacgagtacttcttcgggggcgggatccaggcggcgccggcgggggccacgcagtacggccgccccgtgcgggtcgtcgacctgggcgtcacccacctcccccgcgaggtcttcgaggactacctccgcgacatcgcgccgcgctacaccgccgccacctacagcctgctcacccacaactgcaacaactttagcaacgaggtcgcgcagttcctcgtcggcgccgggatccccgactacatcctcaacctgcccaacgaggtcatgtccagccccatgggcgccatgatcatgcccatgatccagaacctcgaggccacgctcaggaacaacgccgcgccccagaccacccagttcgtgcccacgccggcctctgtctccgtgccgcagccggtggcttcggccgacaaaacccctagttctacagcagctgccgctgctagtgcggcacctgttggctcttcttccaagaaagaagaagagaagaagatcgagaagcagactccagagaaagccgccgcggcagctccggctatggctgaccctctcgggagcatgagggggaaggtgcaggaggaggtgatgagggagtttgcggcgctcatggccagtgggacactgcgggcgagcgaggccgcggcgctggccatgcgccgggtcatggagcgccacggtgacggcgccagtatgcaggcctagtggcctgaaactattttacacacgttcgatctttgatgcaattgcaaactgatgcttacttgtattgcagcatgaaactcaattttatttgtctgac

SEQ ID NO: 31510 - protein, 317 aa, Triticum aestivum
CLSLLSVSPLLPDPRVRSCSRSFPAASSSSSRFDSTISQAIMAEEGHKVVLNVYDLSNGLARQLSTSFLGKPIEAIWHTGVVVYGNEYFFGGGIQAAPAGATQYGRPVRVVDLGVTHLPREVFEDYLRDIAPRYTAATYSLLTHNCNNFSNEVAQFLVGAGIPDYILNLPNEVMSSPMGAMIMPMIQNLEATLRNNAAPQTTQFVPTPASVSVPQPVASADKTPSSTAAAAASAAPVGSSSKKEEEKKIEKQTPEKAAAAAPAMADPLGSMRGKVQEEVMREFAALMASGTLRASEAAALAMRRVMERHGDGASMQA

SEQ ID NO: 31511 - protein, 276 aa, Triticum aestivum
MAEEGHKVVLNVYDLSNGLARQLSTSFLGKPIEAIWHTGVVVYGNEYFFGGGIQAAPAGATQYGRPVRVVDLGVTHLPREVFEDYLRDIAPRYTAATYSLLTHNCNNFSNEVAQFLVGAGIPDYILNLPNEVMSSPMGAMIMPMIQNLEATLRNNAAPQTTQFVPTPASVSVPQPVASADKTPSSTAAAAASAAPVGSSSKKEEEKKIEKQTPEKAAAAAPAMADPLGSMRGKVQEEVMREFAALMASGTLRASEAAALAMRRVMERHGDGASMQA

SEQ ID NO: 31512 - DNA, 770 bp, Triticum aestivum
gtccactcctcccaagttccaagaatcctcctcgctttccccgacgcacacaaagctaggaccatggcgccagccggaggacgcactacccatctcctcctgctcgccctcctcctgtccttcgtcctctcctcctccgcggacgggagctacccggagcgccccggccagggcgccgggggattcttcagcggcataccgtggttccgcggcggccagccaggtggcgcccgaggtgctggaggcatgggcgctgggttcggtggcgggtggggcgccggcggcgttgggccagggggcggtttcgcccggcgcggggtggtgcagccgtcggtggtctgcgccgagcagggtccctgctaccagcagcggctcacatgcccgtccaagtgcttcagctcgtacagctaccatgggaaaaatggcggaggaggtggtggcggcggtgggtgcagcttcgactgcaccagctgcaaggcccactgctgatcgatccaaccaaccaacctacggcgggggagatgggggactggagatggatcgctgcgcactcacatacacatccaggacgagacggccatgaactgatgaattaagcccattagttgtacttgtagcagcaggagtatcctattccctatgcatgatgtgagagcatagggtacgtgtgtgtatctatgaataaaaatggatgtaataaactgagcgatggttttgaggctttgagcgtgcatatggtgttgaccatgttatagtaactgtttgtgatg

SEQ ID NO: 31513 - protein, 193 aa, Triticum aestivum
STPPKFQESSSLSPTHTKLGPWRQPEDALPISSCSPSSCPSSSPPPRTGATRSAPARAPGDSSAAYRGSAAASQVAPEVLEAWALGSVAGGAPAALGQGAVSPGAGWCSRRWSAPSRVPATSSGSHARPSASARTATMGKMAEEVVAAVGAASTAPAARPTADRSNQPTYGGGDGGLEMDRCALTYTSRTRRP

SEQ ID NO: 31514 - protein, 162 aa, Triticum aestivum
VHSSQVPRILLAFPDAHKARTMAPAGGRTTHLLLLALLLSFVLSSSADGSYPERPGQGAGGFFSGIPWFRGGQPGGARGAGGMGAGFGGGWGAGGVGPGGGFARRGVVQPSVVCAEQGPCYQQRLTCPSKCFSSYSYHGKNGGGGGGGGGCSFDCTSCKAHC

SEQ ID NO: 31515 - protein, 141 aa, Triticum aestivum
MAPAGGRTTHLLLLALLLSFVLSSSADGSYPERPGQGAGGFFSGIPWFRGGQPGGARGAGGMGAGFGGGWGAGGVGPGGGFARRGVVQPSVVCAEQGPCYQQRLTCPSKCFSSYSYHGKNGGGGGGGGGCSFDCTSCKAHC

SEQ ID NO: 31516 - DNA, 1012 bp, Triticum aestivum
aaccccagtccgctcaacaccatgatggacccttcctcttcctccaccgcctccgctccggctgcctccacccacagcagcgatagcggggggcccgccgccgccctgtcggcagcggtggccacggcatcccggcggtttcagcacctgctggaccggtcaactccgcacgtgggccgccgttggctgggcctcgctggggtagtgttggtgtacgcgctgcgcgcgtggttcgtcggcggctactacatcgtgacctatgccctcggcatctacctcctcaacctcctcatcgccttcctgtcgcctcaggtcgaccccgagctcgccgaggtgctcggcgaggggcccgcgctccccacgcgctcctcggacgagttccgtccgttcgtccgccgcctgcctgagttcaagttctggtattctatagttaaagcattctgcattgcttttggcatgacattcttcagtgtgttcgatgtgccagtgttttggcctatccttcttttctattgggtggtgttgtttactgtcacaatgaagcgtcagatccttcatatggtgaaatacagatatgttccgttcacctttgggaaacagcgttataatgggaaaagggcagcttctgcagatgatctcacacttcccaaggattaagtatatgggaatttggaatggtgaaatggtgaaatgcttttgttagttatgaaaacgtaagagagaaattgcttatagtggctgcaccctacgggtagctcctcacaaagatgtgaacgttgcaatgctaacatcaagcattatgacctcactgaaccctgatatcttcacagtgctgagaataggccttggtggcctaacctggatttccgtattcccatggtgtttccccgtagtggagcacggagctaaatgactgtacacatttgttgctccgtatttcattgtatgtcatatataatgtggagaagatggcccagaatcctgtatacttccgtcaaatgctttattcaac

SEQ ID NO: 31517 - protein, 218 aa, Triticum aestivum
NPSPLNTMMDPSSSSTASAPAASTHSSDSGGPAAALSAAVATASRRFQHLLDRSTPHVGRRWLGLAGVVLVYALRAWFVGGYYIVTYALGIYLLNLLIAFLSPQVDPELAEVLGEGPALPTRSSDEFRPFVRRLPEFKFWYSIVKAFCIAFGMTFFSVFDVPVFWPILLFYWVVLFTVTMKRQILHMVKYRYVPFTFGKQRYNGKRAASADDLTLPKD

SEQ ID NO: 31518 - protein, 211 aa, Triticum aestivum
MMDPSSSSTASAPAASTHSSDSGGPAAALSAAVATASRRFQHLLDRSTPHVGRRWLGLAGVVLVYALRAWFVGGYYIVTYALGIYLLNLLIAFLSPQVDPELAEVLGEGPALPTRSSDEFRPFVRRLPEFKFWYSIVKAFCIAFGMTFFSVFDVPVFWPILLFYWVVLFTVTMKRQILHMVKYRYVPFTFGKQRYNGKRAASADDLTLPKD

SEQ ID NO: 31519 - protein, 210 aa, Triticum aestivum
MDPSSSSTASAPAASTHSSDSGGPAAALSAAVATASRRFQHLLDRSTPHVGRRWLGLAGVVLVYALRAWFVGGYYIVTYALGIYLLNLLIAFLSPQVDPELAEVLGEGPALPTRSSDEFRPFVRRLPEFKFWYSIVKAFCIAFGMTFFSVFDVPVFWPILLFYWVVLFTVTMKRQILHMVKYRYVPFTFGKQRYNGKRAASADDLTLPKD

SEQ ID NO: 31520 - DNA, 804 bp, Triticum aestivum
atatctatcacttcccggagttcttcgtttggccacgctgatcaattgagatcaagaccatggcaaactgtaagaagtggcttctgctcgttgtgggcctcacggccatgatttcctcgtcggaggcgtacgtcttctacgccggcggccgcgacggctgggtcgtcgaccccgccgagagctacaaccactgggccgagcgcaaccggtttcagatcaacgacaccatcgtgtttgcgcgcggcgagggcgagggcgcggactcggtgctgctggtgaccgagccggacttcgacgcgtgcaacacgcgtagccctgtccgccggctagaggacgccggtggtcgcccggagttccggttcgaccggtcgggtgccttcttcttcatcagcggcgacgaggaccggtgccagaagggcaagaagttgtacgtcgtcgtgatggcgcctcggtcccaggagtgggagctcgcaccggcgcccggatcgccgccgctctgggcctcggcaccagagcacgcggaggccccggacatgagccctggcaacgaaaccttgttcacatcgtttggggctgtgagcgaaactccggccggatctcctcatggatggaacccgaataggcgataaacctggactagagacttgagtgtttaggcaggccatggccgacacccccgttgggcttccgcttgaaggttgccgagtacatgtcgtgtaaacggcggtaagtggtgagagcgtgtgtgaagaagtacccccctgcagggttaacatcatttattcaaataaccgtgtccgcggg

SEQ ID NO: 31521 - protein, 189 aa, Triticum aestivum
MANCKKWLLLVVGLTAMISSSEAYVFYAGGRDGWVVDPAESYNHWAERNRFQINDTIVFARGEGEGADSVLLVTEPDFDACNTRSPVRRLEDAGGRPEFRFDRSGAFFFISGDEDRCQKGKKLYVVVMAPRSQEWELAPAPGSPPLWASAPEHAEAPDMSPGNETLFTSFGAVSETPAGSPHGWNPNRR

SEQ ID NO: 31522 - protein, 173 aa, Triticum aestivum
MISSSEAYVFYAGGRDGWVVDPAESYNHWAERNRFQINDTIVFARGEGEGADSVLLVTEPDFDACNTRSPVRRLEDAGGRPEFRFDRSGAFFFISGDEDRCQKGKKLYVVVMAPRSQEWELAPAPGSPPLWASAPEHAEAPDMSPGNETLFTSFGAVSETPAGSPHGWNPNRR

SEQ ID NO: 31523 - DNA, 1222 bp, Triticum aestivum
atacttttcagagttgtggcatcgaacacattgtggaaggccttacaccgcagacgccccgcgccgcgtcaagaacacagaggacaaagcacggtctgggagagccagagcaacagcagcggcgaggctccagccatggcggtgagcaacaacatcacggcgtgcgtgacactgatggcgctcatctgcgcggtccccgtcatcgcctcgggggtgtggttcgcgtcggcgcagggggaggagtgcgcgcggctggcgcgctggcccgtggccatcctgggtggcctcatcctgctggcggcgctggcgggcttcgtcggcgcctactggaaccgccgccgcctcctcgccttctacctcttcgccatggcggcgctcatcgccctcctcatcgcgctcctcgtcttcgccttcgcggtcacccgcggctccggcgcctacccggtgctcggccgcgagtacgacgagtaccgcctcgacggcttctccatgtggctgcgcgggtacgtcgaccccgcccggtgggaggggatcaggtcctgcctcgccgtctctgacacctgcaagaagctcgcccgacaggccggctacgtcactgccgaccagttctaccagtcccgcctcacgccgctccagtcgggctgctgcaagcccctgtcggtgtgcgggttcgggtacgtgagcccgacggtgtggacaaacccggcgcggcccgcgtcggacccggactgcggcctgtggagcaacgacccggcgcagctgtgctacgagtgcgagtcgtgccgcgcgggcctcctggcggcgctgcggagccagtggcacaaggccaacatcgcgctcgtcgtcgccaccgtctcgctcgtcttcctctacctcatcggctgcagtgcctacaagaacgcgcacgccgaggccatctaccaccgctacaagtggtgattcccatttcccatcccatcccatcactgagaaccaaccgccatcgccagtttgcccatgtaatagactagtatgtttgcttcatactgtactgtattattattagtagcttggtaactggtagtaagctagtaggggaagatgggaacttcagattcatggtttgcccatgcatgtatcgtgaagaattttagcgagatgcatgcgctcttggtgttgatgtgaatgttgtttgtaatatgcagtagagatgttcttcagatttatggttaagaattttagt

SEQ ID NO: 31524 - protein, 312 aa, Triticum aestivum
ILFRVVASNTLWKALHRRRPAPRQEHRGQSTVWESQSNSSGEAPAMAVSNNITACVTLMALICAVPVIASGVWFASAQGEECARLARWPVAILGGLILLAALAGFVGAYWNRRRLLAFYLFAMAALIALLIALLVFAFAVTRGSGAYPVLGREYDEYRLDGFSMWLRGYVDPARWEGIRSCLAVSDTCKKLARQAGYVTADQFYQSRLTPLQSGCCKPLSVCGFGYVSPTVWTNPARPASDPDCGLWSNDPAQLCYECESCRAGLLAALRSQWHKANIALVVATVSLVFLYLIGCSAYKNAHAEAIYHRYKW

SEQ ID NO: 31525 - protein, 267 aa, Triticum aestivum
MAVSNNITACVTLMALICAVPVIASGVWFASAQGEECARLARWPVAILGGLILLAALAGFVGAYWNRRRLLAFYLFAMAALIALLIALLVFAFAVTRGSGAYPVLGREYDEYRLDGFSMWLRGYVDPARWEGIRSCLAVSDTCKKLARQAGYVTADQFYQSRLTPLQSGCCKPLSVCGFGYVSPTVWTNPARPASDPDCGLWSNDPAQLCYECESCRAGLLAALRSQWHKANIALVVATVSLVFLYLIGCSAYKNAHAEAIYHRYKW

SEQ ID NO: 31526 - protein, 254 aa, Triticum aestivum
MALICAVPVIASGVWFASAQGEECARLARWPVAILGGLILLAALAGFVGAYWNRRRLLAFYLFAMAALIALLIALLVFAFAVTRGSGAYPVLGREYDEYRLDGFSMWLRGYVDPARWEGIRSCLAVSDTCKKLARQAGYVTADQFYQSRLTPLQSGCCKPLSVCGFGYVSPTVWTNPARPASDPDCGLWSNDPAQLCYECESCRAGLLAALRSQWHKANIALVVATVSLVFLYLIGCSAYKNAHAEAIYHRYKW

SEQ ID NO: 31527 - DNA, 706 bp, Triticum aestivum
ccatcgctactccctacactgtgtctgctgtgctaggctagctcattcactgcgcgcggccgacctcgcctcggtatctccatcctcctccatacgccacaccttcgtggaaggggaaggctccgagccgtgtgagagacgatgaagaaggggggtctgctgcggtgcgtgtcgacgggggcgtgcagggtggcgccgggggccgtggcggagatggccatctcgccgacggcgtcggggaaggtgccggcggggcacgtgccggtggaggtgggcgcggagggggaggagacggagcgcttcctcgtgccggccgagctgctgggccgccctcccatcgccgagctgctccgccgggccgcgcaggagtacggctacgcgcgacgcggcccgctccgcatcccctgccccgtcgccgccttccgccgtctcctcagcgcgctcgccggcggggacaggggccacacgcccgtctactacgccgtcgtcgtctgaatctcatcgacgagcgagcgacctcgtagtcgctatagcttaattttagcgtgatcttgttccgtttcttgaggggtggtggccggtgcagggttgtgtgcatgtgtttgtgctgttcggtggttgtgtgcttgccttctcgatcgagggctgaggcttctagctagactccgtttgggactcgttcttcttcagttcttggtacttttcc

SEQ ID NO: 31528 - protein, 117 aa, Triticum aestivum
MKKGGLLRCVSTGACRVAPGAVAEMAISPTASGKVPAGHVPVEVGAEGEETERFLVPAELLGRPPIAELLRRAAQEYGYARRGPLRIPCPVAAFRRLLSALAGGDRGHTPVYYAVVV

SEQ ID NO: 31529 - protein, 93 aa, Triticum aestivum
MAISPTASGKVPAGHVPVEVGAEGEETERFLVPAELLGRPPIAELLRRAAQEYGYARRGPLRIPCPVAAFRRLLSALAGGDRGHTPVYYAVVV

SEQ ID NO: 31530 - DNA, 608 bp, Triticum aestivum
tatactgtccggcctgcagctaccaacaaaccaacctggtacgcaccacggaccaaatcttttcttatccccagcccaccagcgccatgccgtcgccgcccatggtgcgcgtggtgtcgtcgtcgacggtgaagccgccgccgcggccgagggagcgcatcccgctcacctcctgggacgcctccatgctctcctccaactacatccagaaaggcctcctcttccacaggcccacctcatgctccccggtcaacgtcgccgaccacctcgccgcggcactcggcgacgcgctcgtccactactaccccatcgccggccgctttgctacagagcaacacagggacgagcacaccggcgccgtcgtcggctgctcggtccacgtcgattgcgccggccagggcgtggaggtcgtgcacgccgtggccgacggggtgaccatggcggacgtgctcccgcgcgacgccgacgtgccgcgcggcgtgctggcgcagttcttccagctcaccgacgccgtcaactacggcgggcaggagcagcccctgttcgccgtccaggtcaccgacctcgccgacggggtggtcgtcgtcttctcctacaaccacccgctc

SEQ ID NO: 31531 - protein, 202 aa, Triticum aestivum
YCPACSYQQTNLVRTTDQIFSYPQPTSAMPSPPMVRVVSSSTVKPPPRPRERIPLTSWDASMLSSNYIQKGLLFHRPTSCSPVNVADHLAAALGDALVHYYPIAGRFATEQHRDEHTGAVVGCSVHVDCAGQGVEVVHAVADGVTMADVLPRDADVPRGVLAQFFQLTDAVNYGGQEQPLFAVQVTDLADGVVVVFSYNHPL

SEQ ID NO: 31532 - protein, 202 aa, Triticum aestivum
ILSGLQLPTNQPGTHHGPNLFLSPAHQRHAVAAHGARGVVVDGEAAAAAEGAHPAHLLGRLHALLQLHPERPPLPQAHLMLPGQRRRPPRRGTRRRARPLLPHRRPLCYRATQGRAHRRRRRLLGPRRLRRPGRGGRARRGRRGDHGGRAPARRRRAARRAGAVLPAHRRRQLRRAGAAPVRRPGHRPRRRGGRRLLLQPPA

SEQ ID NO: 31533 - protein, 174 aa, Triticum aestivum
MPSPPMVRVVSSSTVKPPPRPRERIPLTSWDASMLSSNYIQKGLLFHRPTSCSPVNVADHLAAALGDALVHYYPIAGRFATEQHRDEHTGAVVGCSVHVDCAGQGVEVVHAVADGVTMADVLPRDADVPRGVLAQFFQLTDAVNYGGQEQPLFAVQVTDLADGVVVVFSYNHPL

SEQ ID NO: 31534 - DNA, 1298 bp, Triticum aestivum
agaaaggaagaaaaagaggggaagcaaagcacaaacgcggccgtcgcagcagcagcagagaggagcagcagacacccaaccgcagccgtacgccgcagatccgccgccgcgcacgctagggtttcgcgccgaggagagagggggggcgatggacgtggtgaaggcggcgcagctctcggggcggacgctggagaaggtggtggtccacccgctggtgctgctcagcatcgtcgaccactacaaccgcgtcgcccgcgacaccaggaagcgcgtcgtcggcgtgctcctcggcacctcctcccgcggcgtcgtcgacgtcaccaactcctacgccgtgccgtttgaggaggatgacaaggacccgaggatctggttcctcgaccataattaccacgagtctatgttctccatgttcaagaggatcaacgccaaggagcatgttgttggctggtacagcactggtccaaaactaaaggagaacgacttggatgttcatgcattgtttaccaactatgttcctaatcctgtcctggtgattattgatgttcaacccaaggagttgggaatacccaccaaagcatattatgctgtagaagaggttaaagagaatgctactcagaaaagtcagaaggtgttcgtccacgtgccatcagaaattgcggcccatgaagtcgaggaaattggagttgagcaccttctgagggatgtgaaagacacaacaataagcacacttgccacagaggtcagcagcaagcttgcagccctgaagggactcgatgcgaggcttacggagatccggggttatctagatcttgtaattgaagggaagctcccactgaaccatgagattctgtaccacttgcaggatgtgtttaatctgctccccaatctcaacgtaaatgagctcattaaagcctttgcagtgaaaacaaatgatatgatgctggtcatatacctgtcttccttatccggagtgtcattgctctccacaatttgatcaacaacaagatgctaaacaaggaacatgagaaggccgaggatttgaagccagccgccgtacctactgcagcagggagctgaatgtccttgtttgcctcaagatggggatagcgatctatgacccagcattggggcaaagaaactgtgacatgttagcattgtctcatttgtaccaagtgtcttgaccttcaatttacactttgatgtttacttcatgtacgatgaggtcaacgacaaaaccttacattctgtgagctctaggtctttttgaggtttataatctagatcttatactgttc

SEQ ID NO: 31535 - protein, 331 aa, Triticum aestivum
ERKKKRGSKAQTRPSQQQQRGAADTQPQPYAADPPPRTLGFRAEERGGAMDVVKAAQLSGRTLEKVVVHPLVLLSIVDHYNRVARDTRKRVVGVLLGTSSRGVVDVTNSYAVPFEEDDKDPRIWFLDHNYHESMFSMFKRINAKEHVVGWYSTGPKLKENDLDVHALFTNYVPNPVLVIIDVQPKELGIPTKAYYAVEEVKENATQKSQKVFVHVPSEIAAHEVEEIGVEHLLRDVKDTTISTLATEVSSKLAALKGLDARLTEIRGYLDLVIEGKLPLNHEILYHLQDVFNLLPNLNVNELIKAFAVKTNDMMLVIYLSSLSGVSLLSTI

SEQ ID NO: 31536 - protein, 282 aa, Triticum aestivum
MDVVKAAQLSGRTLEKVVVHPLVLLSIVDHYNRVARDTRKRVVGVLLGTSSRGVVDVTNSYAVPFEEDDKDPRIWFLDHNYHESMFSMFKRINAKEHVVGWYSTGPKLKENDLDVHALFTNYVPNPVLVIIDVQPKELGIPTKAYYAVEEVKENATQKSQKVFVHVPSEIAAHEVEEIGVEHLLRDVKDTTISTLATEVSSKLAALKGLDARLTEIRGYLDLVIEGKLPLNHEILYHLQDVFNLLPNLNVNELIKAFAVKTNDMMLVIYLSSLSGVSLLSTI

SEQ ID NO: 31537 - protein, 198 aa, Triticum aestivum
MFSMFKRINAKEHVVGWYSTGPKLKENDLDVHALFTNYVPNPVLVIIDVQPKELGIPTKAYYAVEEVKENATQKSQKVFVHVPSEIAAHEVEEIGVEHLLRDVKDTTISTLATEVSSKLAALKGLDARLTEIRGYLDLVIEGKLPLNHEILYHLQDVFNLLPNLNVNELIKAFAVKTNDMMLVIYLSSLSGVSLLSTI

SEQ ID NO: 31538 - DNA, 955 bp, Triticum aestivum
aaccaatcaactgaccaaccaccacgagccaagagccaacccacaccactctgtgtctgtactcagcgcgagctcacgggctccacaatgcctcgctccggcgctctccccctcctcgccgcgctggtcctcgccttggcggccgcggcggcggcgtcggcctcgaactcgaagggcgctccggcggccaccgacttcatccgcaagtcgtgccgcgagacgcagtacccgtcggtgtgcatgcagagcctgtcgtcgtacggcaaaccgccgccgcgcagcccgcaggagctggcgcgcgcggcgctgtcggtgagcgcggaccgcgcgcggtcggcgtcggcgtacgtggggcggatctgcgggccgggcctccgcagcggcagcggcgccaaggcgaagagcagccccgcgcgcgactgcctggagaacatggcggacagcgtgggccacctgcgcgacgcggccaaggagctggacgggagcctgggccgggccgggtcgccggcgttcaggtggcacctgagcaacgtgcagacctggtgcagcgcggcgctcaccgacgagaacacctgcctcgacgggctctcccgcggcgtggacgccggcacgcgcgccgccatccggagcaaggtcgtggaggtcgcccaggtcaccagcaacgccctggcgctcgtcaacaaggtcgggtccgggcactagcccggcccgtcccaggcccatccccactcgtttcgccttgctacgtactactacgcgcgtacgcatggcagctcgaatcctggtgctctataatcttgggtcatgtactactgtattccagtttcgatgtgttcttgctgtgctgtaaaatgtacttagctaagacaatcaattaagagtgtaattaatgataaggtggcgaaactaagccaaagtgtgtgttctcttgctagctatagcttttgattaacat

SEQ ID NO: 31539 - protein, 233 aa, Triticum aestivum
NQSTDQPPRAKSQPTPLCVCTQRELTGSTMPRSGALPLLAALVLALAAAAAASASNSKGAPAATDFIRKSCRETQYPSVCMQSLSSYGKPPPRSPQELARAALSVSADRARSASAYVGRICGPGLRSGSGAKAKSSPARDCLENMADSVGHLRDAAKELDGSLGRAGSPAFRWHLSNVQTWCSAALTDENTCLDGLSRGVDAGTRAAIRSKVVEVAQVTSNALALVNKVGSGH

SEQ ID NO: 31540 - protein, 204 aa, Triticum aestivum
MPRSGALPLLAALVLALAAAAAASASNSKGAPAATDFIRKSCRETQYPSVCMQSLSSYGKPPPRSPQELARAALSVSADRARSASAYVGRICGPGLRSGSGAKAKSSPARDCLENMADSVGHLRDAAKELDGSLGRAGSPAFRWHLSNVQTWCSAALTDENTCLDGLSRGVDAGTRAAIRSKVVEVAQVTSNALALVNKVGSGH

SEQ ID NO: 31541 - protein, 153 aa, Triticum aestivum
MQSLSSYGKPPPRSPQELARAALSVSADRARSASAYVGRICGPGLRSGSGAKAKSSPARDCLENMADSVGHLRDAAKELDGSLGRAGSPAFRWHLSNVQTWCSAALTDENTCLDGLSRGVDAGTRAAIRSKVVEVAQVTSNALALVNKVGSGH

SEQ ID NO: 31542 - DNA, 895 bp, Triticum aestivum
cggaaagtgcttagcaagctagctgcgaggactgagctaagctcagatcggcggcggagagctagggttcaggcgagattaactaatggcctcagtcgcagctcggcggaggcaggagctggcggcggagggccagcggcacctcgaggagacgatcgcctccgctttccagatcctttcctccatgaacgacgagctctgcaaccccgcgctctggtcctcctccgccgcagccaccgccgcttccgccgcctcccagcatccccaccaccaaaacgcagctcccccgccaccccactccgccgactccgacgctgatgccatggggggagccgcggggggctctggcggttcgctcgacgaggcgaggcaccggtacaagatcgccgtggcggctttgcgcgcgtccattgccgcggtgtcgccctctactcaggagatggggccaacagaatccaaaggtgatcaagccgagattgagagattggaagagcatgcatcttctttgagaaaggaaattgaaagcagaaacaaacagctgaaactcctcatcgatcaactccgtgatctaatatcagatatatcaatgtggcaaagcccttgctcagtgtgagttgttgctgctaatcaattcttacaagtcccaagggatctgacagttagatgggtgccaaggccaaactgcatacggtgctctctttaattggaaagtgaatgggatatgaccagatcactgttacaaaattgtgattcgtgctgtattgcccttaaggatttgagaaatgtaacgagtggcgttaaatgcagatttgctagtaaccgaaacacgtgtaaggtgcatattggacccaacatggctatggtcataacagggaatattcttctattttctctc

SEQ ID NO: 31543 - protein, 175 aa, Triticum aestivum
MASVAARRRQELAAEGQRHLEETIASAFQILSSMNDELCNPALWSSSAAATAASAASQHPHHQNAAPPPPHSADSDADAMGGAAGGSGGSLDEARHRYKIAVAALRASIAAVSPSTQEMGPTESKGDQAEIERLEEHASSLRKEIESRNKQLKLLIDQLRDLISDISMWQSPCSV

SEQ ID NO: 31544 - protein, 142 aa, Triticum aestivum
MNDELCNPALWSSSAAATAASAASQHPHHQNAAPPPPHSADSDADAMGGAAGGSGGSLDEARHRYKIAVAALRASIAAVSPSTQEMGPTESKGDQAEIERLEEHASSLRKEIESRNKQLKLLIDQLRDLISDISMWQSPCSV

SEQ ID NO: 31545 - protein, 105 aa, Triticum aestivum
RKVLSKLAARTELSSDRRRRARVQARLTNGLSRSSAEAGAGGGGPAAPRGDDRLRFPDPFLHERRALQPRALVLLRRSHRRFRRLPASPPPKRSSPATPLRRLRR

SEQ ID NO: 31546 - DNA, 736 bp, Triticum aestivum
acaaatcacaaatctgcaaactcgtgctccatagctccagcaacaggtgactccaccatgcgatacaccggcgccaagctgttcctgctcgtagtcacacccatcgtcgtccttaccaccaccgcactagaaccccaacacccccatggaggaggctgcatcccccatgaaagagcagccttgctctccttcaagcaagggatcaccaaagaccctaacaacgtcttcggctcgtggaaaggccaggattgctgccggtggagaggcgtcaggtgcagcagcaccaccggccatgtccgcaagcttcatcttcgcaacgacgcgtacatcggcatcaatgatgatgacaatattcacaagtacgggttatccggcgagatcagctgttctttgctcttcctggaccatttggagcacttggaccttagcataccagttggagacgccgactaattgttttccggaattcctatgctccttgaagagcttgaggtatctgaatctatctggaatatcttttcaaggtgaattacccccgcagcttggaaacctgtcgagtttgcaatatcttgacatacttgacaccaatttcggttgttgccgaatgtactcgaaagatttgtcgtggttaagacagttatcttcactacggtacctcggtatcccctcggtgaatctctccactgtcgttgactgggttcgcctggtaaacatgatcccttctttgaaaaaaaat

SEQ ID NO: 31547 - protein, 197 aa, Triticum aestivum
MEEAASPMKEQPCSPSSKGSPKTLTTSSARGKARIAAGGEASGAAAPPAMSASFIFATTRTSASMMMTIFTSTGYPARSAVLCSSWTIWSTWTLAYQLETPTNCFPEFLCSLKSLRYLNLSGISFQGELPPQLGNLSSLQYLDILDTNFGCCRMYSKDLSWLRQLSSLRYLGIPSVNLSTVVDWVRLVNMIPSLKKN

SEQ ID NO: 31548 - protein, 190 aa, Triticum aestivum
MKEQPCSPSSKGSPKTLTTSSARGKARIAAGGEASGAAAPPAMSASFIFATTRTSASMMMTIFTSTGYPARSAVLCSSWTIWSTWTLAYQLETPTNCFPEFLCSLKSLRYLNLSGISFQGELPPQLGNLSSLQYLDILDTNFGCCRMYSKDLSWLRQLSSLRYLGIPSVNLSTVVDWVRLVNMIPSLKKN

SEQ ID NO: 31549 - protein, 150 aa, Triticum aestivum
TNHKSANSCSIAPATGDSTMRYTGAKLFLLVVTPIVVLTTTALEPQHPHGGGCIPHERAALLSFKQGITKDPNNVFGSWKGQDCCRWRGVRCSSTTGHVRKLHLRNDAYIGINDDDNIHKYGLSGEISCSLLFLDHLEHLDLSIPVGDAD

SEQ ID NO: 31550 - protein, 131 aa, Triticum aestivum
MRYTGAKLFLLVVTPIVVLTTTALEPQHPHGGGCIPHERAALLSFKQGITKDPNNVFGSWKGQDCCRWRGVRCSSTTGHVRKLHLRNDAYIGINDDDNIHKYGLSGEISCSLLFLDHLEHLDLSIPVGDAD

SEQ ID NO: 31551 - DNA, 807 bp, Triticum aestivum
aaccaaacgcaatatcgccctgcccctccctcttcctcgtcgacgcgcaggccccagggaaattctccgttggagaaaagtcgcgtgccgtctctcgcccacagcccgttggcagcaatggcacaagagagctggaaggagtctgaggagactgtccaaacacctgaggcaccaatattgtgtgtaaacaactgcggcttcttcggtagcagcatgacaaacaacatgtgctccaagtgctacagggacttcattaaggccacgacaatggctgcccctgtagtggagaagaaggtgttctcagtggcatcatcttccagtgtgacattggagcaagcaaaggcagatgaagtaccagccgtggctgtagctgatagccaagcagcacaggagcctccaaagccgcccagcaacagatgcctttcatgccgcaagaagataggcttgaccggtttccagtgccggtgcgggggaacattctgctccatgcaccgctacgctgactcccacgaatgcactttcgactacaagaaggctggccgggagcagattgccaagcagaaccctgttgtgatagccaagaagatcaacaagatataattgataatgacaccgggttcatttgcttgctattcgtggtggtgctggattcgtctttacttgaatcagtaggtttcttctggtctggttgctagggtctcaattgtgtctatccttctccttcatggttcgcttctctccattaagaatgaaatgaaataatgtaaatatataatattatattgttttagctgttcgtttcgtatg

SEQ ID NO: 31552 - protein, 199 aa, Triticum aestivum
NQTQYRPAPPSSSSTRRPQGNSPLEKSRVPSLAHSPLAAMAQESWKESEETVQTPEAPILCVNNCGFFGSSMTNNMCSKCYRDFIKATTMAAPVVEKKVFSVASSSSVTLEQAKADEVPAVAVADSQAAQEPPKPPSNRCLSCRKKIGLTGFQCRCGGTFCSMHRYADSHECTFDYKKAGREQIAKQNPVVIAKKINKI

SEQ ID NO: 31553 - protein, 160 aa, Triticum aestivum
MAQESWKESEETVQTPEAPILCVNNCGFFGSSMTNNMCSKCYRDFIKATTMAAPVVEKKVFSVASSSSVTLEQAKADEVPAVAVADSQAAQEPPKPPSNRCLSCRKKIGLTGFQCRCGGTFCSMHRYADSHECTFDYKKAGREQIAKQNPVVIAKKINKI

SEQ ID NO: 31554 - protein, 128 aa, Triticum aestivum
MTNNMCSKCYRDFIKATTMAAPVVEKKVFSVASSSSVTLEQAKADEVPAVAVADSQAAQEPPKPPSNRCLSCRKKIGLTGFQCRCGGTFCSMHRYADSHECTFDYKKAGREQIAKQNPVVIAKKINKI

SEQ ID NO: 31555 - DNA, 1062 bp, Triticum aestivum
actctcgccaagccacacagccagccagcgcctccatctagcaccactcctccagcaatgacgtcgtccaggagagccctcatcctgctggcggtgctgctggcggcggtgccggcggcgctgagccagaagtcgacggccccggcgcccgaggcgcccgagacgccggacgcgcctgcggcggggacgccgcccaaggcgtccgcggcgccgaacgtgacggcggtgctggagaagaacgggcagtacaccaagttcatccggctgatggcgtcgacgcagcaggacacgcagctgaacgcgcaggccaacgactccgacacgggcttcacggtgttcgcccccaccgacaacgccttcaaaagcctcaagccgggcaccctcaactcgctctcgcagcaggaccaggtgacgctggtgcaggcccacatcatccccaccttctactccatggagtccttcgagaccgccagcaaccccgtccgcacccaggcctccggcaccgacgggccctgcaccgtcaacgtcaccgccaccagcaacagcgccgtcaacgtctccacggggatcgtccacaccaccgtcggcaccgcgctgcgcgccaccaggccgctcgccgtctactccgtcgacaaggtgctgctgcccatggacctcttcggccccaagcccccggcgtccgcgccgccggcccccggcaagaagccctcgtcggccaagggggcagccaaggcgccctcgggcgacgacgaggacgaggaagatgccccgcccgccggtgccgccaccgccgtcggcgccggatggaggagcctggtcgccgtggtggcagccgccaccgccgcgtgcctcttgtaagaagaagatcatggttcatgagaccgacagatcgatggagactagctgcgtgcgtgcatgttgtgcatggatttggatagcttacgagtagttcttggtggctgctgcttctcttctttcttttgttaaatgttcagttttgctgctctttttcttcttctcttgttattgaaccggcgagaaagtttgggctaaaatgtgacg

SEQ ID NO: 31556 - protein, 285 aa, Triticum aestivum
TLAKPHSQPAPPSSTTPPAMTSSRRALILLAVLLAAVPAALSQKSTAPAPEAPETPDAPAAGTPPKASAAPNVTAVLEKNGQYTKFIRLMASTQQDTQLNAQANDSDTGFTVFAPTDNAFKSLKPGTLNSLSQQDQVTLVQAHIIPTFYSMESFETASNPVRTQASGTDGPCTVNVTATSNSAVNVSTGIVHTTVGTALRATRPLAVYSVDKVLLPMDLFGPKPPASAPPAPGKKPSSAKGAAKAPSGDDEDEEDAPPAGAATAVGAGWRSLVAVVAAATAACLL

SEQ ID NO: 31557 - protein, 266 aa, Triticum aestivum
MTSSRRALILLAVLLAAVPAALSQKSTAPAPEAPETPDAPAAGTPPKASAAPNVTAVLEKNGQYTKFIRLMASTQQDTQLNAQANDSDTGFTVFAPTDNAFKSLKPGTLNSLSQQDQVTLVQAHIIPTFYSMESFETASNPVRTQASGTDGPCTVNVTATSNSAVNVSTGIVHTTVGTALRATRPLAVYSVDKVLLPMDLFGPKPPASAPPAPGKKPSSAKGAAKAPSGDDEDEEDAPPAGAATAVGAGWRSLVAVVAAATAACLL

SEQ ID NO: 31558 - protein, 196 aa, Triticum aestivum
MASTQQDTQLNAQANDSDTGFTVFAPTDNAFKSLKPGTLNSLSQQDQVTLVQAHIIPTFYSMESFETASNPVRTQASGTDGPCTVNVTATSNSAVNVSTGIVHTTVGTALRATRPLAVYSVDKVLLPMDLFGPKPPASAPPAPGKKPSSAKGAAKAPSGDDEDEEDAPPAGAATAVGAGWRSLVAVVAAATAACLL

SEQ ID NO: 31559 - DNA, 1134 bp, Triticum aestivum
accccaaacaccaaccaaaatccacccccaaactaggtcatccatgtctggcggcgggcaagcagcggtctcgttcctgacgaagctcgcaaaggtggctgccgggttgggcttgacggcatctgccgtctccacgtccctctacacggtggacggcggccaacgcgcggtcatcttcgaccgcttccagggcgttctcccggcggtcgtctcggagggcacccacttcctcgtcccctggctccagaagcccttcctcttcgacatccgcacgcgcccgcacagcttctcctccacctccggaaccaaggatctccagatggtcagcctcacgctccgcgtcctcgcccgccccgacgtggaacgccttcctgaaatcttcaccaacctcggcctcgactacgacgacaaggtgctcccctccatcggcaacgaggtgctcaaggccgtcgtcgcccagttcaacgcagaccagctcctcaccgaccgtccccacgtctctgccctcgtccgtgaagccctcgtccgccgcgccggcgagttcaacatcgtgctcgatgacgtcgccatcacccacctcgcctacgggcacgacttcgcccaggccgttgagaagaagcaggtcgcgcagcaggaggctgagcgctccaggttcctcgttgcgcgtgcagagcaggagaggcgtgctgctatcgttcgcgcggagggagagagcgagtccgcacggctcatctcagatgccaccgctcttgtaggcaatggcctgatcgagctcaggaggatcgaggctgccaaggagatagctggggtgattgcgcgctcacccaatgtttcctacatcccttctggcaacaacggccagatgctgcttgggctcagcactgcccggtgaatgaattgccacttatcttccagttggtcacagtactttcgtcacttcagatgcccaattatccttcacttgattacaatacttgaataacttcagatgcttcgacatagtagttatgattttatcgtagaatggagacttctattatggaggagtcattgaacaaatgttgtattttggttgccaacctatgctatatttgtgcttatgatgcgttcttgaattacatgaacctttttatc

SEQ ID NO: 31560 - protein, 296 aa, Triticum aestivum
PQTPTKIHPQTRSSMSGGGQAAVSFLTKLAKVAAGLGLTASAVSTSLYTVDGGQRAVIFDRFQGVLPAVVSEGTHFLVPWLQKPFLFDIRTRPHSFSSTSGTKDLQMVSLTLRVLARPDVERLPEIFTNLGLDYDDKVLPSIGNEVLKAVVAQFNADQLLTDRPHVSALVREALVRRAGEFNIVLDDVAITHLAYGHDFAQAVEKKQVAQQEAERSRFLVARAEQERRAAIVRAEGESESARLISDATALVGNGLIELRRIEAAKEIAGVIARSPNVSYIPSGNNGQMLLGLSTAR

SEQ ID NO: 31561 - protein, 282 aa, Triticum aestivum
MSGGGQAAVSFLTKLAKVAAGLGLTASAVSTSLYTVDGGQRAVIFDRFQGVLPAVVSEGTHFLVPWLQKPFLFDIRTRPHSFSSTSGTKDLQMVSLTLRVLARPDVERLPEIFTNLGLDYDDKVLPSIGNEVLKAVVAQFNADQLLTDRPHVSALVREALVRRAGEFNIVLDDVAITHLAYGHDFAQAVEKKQVAQQEAERSRFLVARAEQERRAAIVRAEGESESARLISDATALVGNGLIELRRIEAAKEIAGVIARSPNVSYIPSGNNGQMLLGLSTAR

SEQ ID NO: 31562 - protein, 190 aa, Triticum aestivum
MVSLTLRVLARPDVERLPEIFTNLGLDYDDKVLPSIGNEVLKAVVAQFNADQLLTDRPHVSALVREALVRRAGEFNIVLDDVAITHLAYGHDFAQAVEKKQVAQQEAERSRFLVARAEQERRAAIVRAEGESESARLISDATALVGNGLIELRRIEAAKEIAGVIARSPNVSYIPSGNNGQMLLGLSTAR

SEQ ID NO: 31563 - DNA, 697 bp, Triticum aestivum
agacacccgcaagtccgactcatcgctcaacgtcagtgccaacctgccgttcagcaagagcacgcacgcttgcacctttatgtaaagcaaaacccgacgccgtcaccagctttggtctcttctcttcccattgctcaaaatacctcggcagagagtattctcaactcccggctcagccttcccttcccttccctctcctgcctccgcccactccactcagtgctccagaagctcggatggcggcccagaaggtggtgctcagggtcccgaccatgaccgacgacaaggccaagcagaaggccatcgaagcggtcgcggatatctacggcattgattccatagttgcggatctgaaggacaataagatgatcatcataggcgagatggacactgtggcaatcgcaaagaaattaaagaaggttgggaagattgacattgtgtccgttggacctgcaaaggaagaaaagaaagaagagaagaaagaagaaaagaaagaggagaaaaaagaggaaaagaaagaagagaagaaagaggagaagaaagaggagaaaaaatgataaagcataccacaccatcccatggcctttctcctctgtgcacttctaatagctttgtctacggatctatgtttctaagagatatgactttgtaccattatatctaaagtacatattagtgatatttctttacagaagat

SEQ ID NO: 31564 - protein, 184 aa, Triticum aestivum
TPASPTHRSTSVPTCRSARARTLAPLCKAKPDAVTSFGLFSSHCSKYLGREYSQLPAQPSLPFPLLPPPTPLSAPEARMAAQKVVLRVPTMTDDKAKQKAIEAVADIYGIDSIVADLKDNKMIIIGEMDTVAIAKKLKKVGKIDIVSVGPAKEEKKEEKKEEKKEEKKEEKKEEKKEEKKEEKK

SEQ ID NO: 31565 - protein, 106 aa, Triticum aestivum
MAAQKVVLRVPTMTDDKAKQKAIEAVADIYGIDSIVADLKDNKMIIIGEMDTVAIAKKLKKVGKIDIVSVGPAKEEKKEEKKEEKKEEKKEEKKEEKKEEKKEEKK

SEQ ID NO: 31566 - protein, 94 aa, Triticum aestivum
MTDDKAKQKAIEAVADIYGIDSIVADLKDNKMIIIGEMDTVAIAKKLKKVGKIDIVSVGPAKEEKKEEKKEEKKEEKKEEKKEEKKEEKKEEKK

SEQ ID NO: 31567 - DNA, 1620 bp, Triticum aestivum
agaacatcctagtcgaaaactcatctcaccagaccgcaccaccccgcctccctcctcgtgccctccgccgccgccgcagcctctgcctcggcctcgaggcctccgcccgccacctccgcgcggccagggctcgagaggcgaccccggtctgcccgcccccgcttccggaacaccccgcccccgccgcaatgcagagcgcggcggccatcgggctcctccggccatgcgccgcgcggcccatcctcaagagccctagccccggggccgcccgcctcccggcctcccgcacggccctccgcctctccgccgccgcgccccgcgcgggcctcgtggcggcggcggggctcggccgcatcgggctcgtgccggcgtcgcctgagcaggagaagaggagcgactgcctcgtggccgccgcggccgcggggaaggcgtcggcgggcgaggaggccgtggaggaaagcggagcagcgctcgccaagacgctccagctcggcgtcttcttcgggctctggtacctcttcaacatctacttcaacatctacaacaagcaggtcctcaaggtttttccttatcccataaacatcacaacagttcagtttgctgttggaactacgatttccttgtttatgtgggccacgggtatccttaaaagaccaaagatttccggtgcacagcttcttgctatcctccctttggctattgtccataccatgggcaatcttttcaccaacatgagccttgggaaggttgcagtgtcatttacacatacaatcaaggccatggagcctttcttctcagttctactttctgcaatgttccttggcgagctgcctactccttgggttgttttgtctcttcttcctattgttggtggtgtggcattggcatctatttctgaagcttcttttaactgggctggatttttgagtgcaatggcttcaaatgtgaccttccagtcaaggaatgtcctcagcaagaagcttatgctgaagaaagaggcatctctggacaacatcaatctcttctcgattattacagtcatgtcattcttccttctagctcctgtaaccttgttgaccgaaggtgttaaggtcactcctacttatctgcagtctgctggtctgaacttacaacaagtgtacacaaggtctttgattgccgcattctgtttccatgcataccaacaggtgtcatacatgatcctcgcaagggtgtcaccagttacccattcggtaggtaactgcgtcaagcgtgtggtggtcattgttacatctgttctgttcttcaagactcctgtgtctccaatcaactctatcggaaccgcgatcgctcttgcgggagttttcctgtactcacaactgaagagacttcagcccaagcccaaggctgcttgattgcattctgttcgtcaggatcaatagagcgttgccactcttggaatcggtgctttagtttagccggacatattgggaagccttgttgagtaactagtaccgtgcaggatcatttgtaattcagtaatgagcattttgaccaggaaagttttgaaatctctttcaccgttctctacttggacgttctagttgccactttaataaaacctccgcagtttgattgtgc

SEQ ID NO: 31568 - protein, 463 aa, Triticum aestivum
NILVENSSHQTAPPRLPPRALRRRRSLCLGLEASARHLRAARAREATPVCPPPLPEHPAPAAMQSAAAIGLLRPCAARPILKSPSPGAARLPASRTALRLSAAAPRAGLVAAAGLGRIGLVPASPEQEKRSDCLVAAAAAGKASAGEEAVEESGAALAKTLQLGVFFGLWYLFNIYFNIYNKQVLKVFPYPINITTVQFAVGTTISLFMWATGILKRPKISGAQLLAILPLAIVHTMGNLFTNMSLGKVAVSFTHTIKAMEPFFSVLLSAMFLGELPTPWVVLSLLPIVGGVALASISEASFNWAGFLSAMASNVTFQSRNVLSKKLMLKKEASLDNINLFSIITVMSFFLLAPVTLLTEGVKVTPTYLQSAGLNLQQVYTRSLIAAFCFHAYQQVSYMILARVSPVTHSVGNCVKRVVVIVTSVLFFKTPVSPINSIGTAIALAGVFLYSQLKRLQPKPKAA

SEQ ID NO: 31569 - protein, 401 aa, Triticum aestivum
MQSAAAIGLLRPCAARPILKSPSPGAARLPASRTALRLSAAAPRAGLVAAAGLGRIGLVPASPEQEKRSDCLVAAAAAGKASAGEEAVEESGAALAKTLQLGVFFGLWYLFNIYFNIYNKQVLKVFPYPINITTVQFAVGTTISLFMWATGILKRPKISGAQLLAILPLAIVHTMGNLFTNMSLGKVAVSFTHTIKAMEPFFSVLLSAMFLGELPTPWVVLSLLPIVGGVALASISEASFNWAGFLSAMASNVTFQSRNVLSKKLMLKKEASLDNINLFSIITVMSFFLLAPVTLLTEGVKVTPTYLQSAGLNLQQVYTRSLIAAFCFHAYQQVSYMILARVSPVTHSVGNCVKRVVVIVTSVLFFKTPVSPINSIGTAIALAGVFLYSQLKRLQPKPKAA

SEQ ID NO: 31570 - protein, 255 aa, Triticum aestivum
MWATGILKRPKISGAQLLAILPLAIVHTMGNLFTNMSLGKVAVSFTHTIKAMEPFFSVLLSAMFLGELPTPWVVLSLLPIVGGVALASISEASFNWAGFLSAMASNVTFQSRNVLSKKLMLKKEASLDNINLFSIITVMSFFLLAPVTLLTEGVKVTPTYLQSAGLNLQQVYTRSLIAAFCFHAYQQVSYMILARVSPVTHSVGNCVKRVVVIVTSVLFFKTPVSPINSIGTAIALAGVFLYSQLKRLQPKPKAA

SEQ ID NO: 31571 - DNA, 1720 bp, Triticum aestivum
ctgaaaatttcacttgaccgccaagtcccaaagcacaagtggaacacgaaactttgatgtggcgggccgatgtgccccaagcaatgtcaaaggcgaaatggaaacggggggcgtataagttcgaaaaattctccatccccccttctctctctctctccctccgtcgttcgatccccgacgccatcgtgcgcatcgccggccaggacaaggcatacatacaggtacagcggcccctcgtagggacaagaagagacccacccagaggcagaggcccgcctcaaatgcgccgccggccgcgcgtcgccgcacgatgagccccgccgcgacggacgccggcggcgacctcttcgccgccaacctcaagggcgcgctcctcgccgtcgcctcctccaccttcgtcggggtcagcttcatcgtcaagaagaagggcctccgccgcgccggcgccgtcggctcccgggcaggtgtcggagggtatgggtacctctgggagccgctctggtgggtcgggatggtcaccatgcttgttggggagaccgccaatttcgtggcttacatgtttgcgccagccgtcctcgtcgctccgctgggagcactcagcatcattgtcagtgctgttctagcccatttcatgctgaatgagaagttgcagcgggtgggcgtcctgggctgtattctctgcattgttgggtcgacggtgatcatcctccacgctcctgaggagaggcccccggactcggtggagcagatttggcgcctggcaacgcaacctaccttcctttgctacgctgctctagcagtggctgtgtcattgcttcttatactatattgtgctccacggtatgggcagacgaacataatgatctatgttggtatttgctctgttgtcggatccctcacggtaatgagcatcaaggctgtgggcattgcgattaaacttaccattcagggcgaaaaccaggctgggtatttccagacgtggctgtttgtgacggtttcagctatatgcttagtcatccaattagtttacctgaacaaggcattggatactttcaatacggcgctggtttctcccatctattatgccatgttcacaaccctcactattttagcaagtgccataatgttcaaggattggtctgggcagagcgcaagcattattgcctccgagacttgtggatttctcacagttcttgccggtattattgtgctacattccaccaaagaacccgatcaaaatctgtccccagacctttatgcatctctcactgcacccctccctccaaagatatattggcacatccaaggaaacggcggcgacgtagggaagcaaaaagaggacgactcacttccctgcgatttcatcaccgtcgtgcgccaggactacttcgtctagaaaattctcaggacggcatatgcgtttcatatgtgccagccagcctcaagaccttcatgtggcgagggtggaccccagggcctgttaccgacggtacaaggccatcctggcctgaaaaaatgtgaaaattttgcagagacatcgtgttgtaccataccatgaccaaaccggttgcgtcggagctaggtgttgtacgattacctgtgtactgtagaaatcgcgccgtgtgaggaggatgttgttgtaggggggtttgtgagggatgttgtagatgttgttgcctgtctgatgtgaataccaaagcacacaacgctttctgttgcc

SEQ ID NO: 31572 - protein, 361 aa, Triticum aestivum
MSPAATDAGGDLFAANLKGALLAVASSTFVGVSFIVKKKGLRRAGAVGSRAGVGGYGYLWEPLWWVGMVTMLVGETANFVAYMFAPAVLVAPLGALSIIVSAVLAHFMLNEKLQRVGVLGCILCIVGSTVIILHAPEERPPDSVEQIWRLATQPTFLCYAALAVAVSLLLILYCAPRYGQTNIMIYVGICSVVGSLTVMSIKAVGIAIKLTIQGENQAGYFQTWLFVTVSAICLVIQLVYLNKALDTFNTALVSPIYYAMFTTLTILASAIMFKDWSGQSASIIASETCGFLTVLAGIIVLHSTKEPDQNLSPDLYASLTAPLPPKIYWHIQGNGGDVGKQKEDDSLPCDFITVVRQDYFV

SEQ ID NO: 31573 - protein, 294 aa, Triticum aestivum
MVTMLVGETANFVAYMFAPAVLVAPLGALSIIVSAVLAHFMLNEKLQRVGVLGCILCIVGSTVIILHAPEERPPDSVEQIWRLATQPTFLCYAALAVAVSLLLILYCAPRYGQTNIMIYVGICSVVGSLTVMSIKAVGIAIKLTIQGENQAGYFQTWLFVTVSAICLVIQLVYLNKALDTFNTALVSPIYYAMFTTLTILASAIMFKDWSGQSASIIASETCGFLTVLAGIIVLHSTKEPDQNLSPDLYASLTAPLPPKIYWHIQGNGGDVGKQKEDDSLPCDFITVVRQDYFV

SEQ ID NO: 31574 - protein, 291 aa, Triticum aestivum
MLVGETANFVAYMFAPAVLVAPLGALSIIVSAVLAHFMLNEKLQRVGVLGCILCIVGSTVIILHAPEERPPDSVEQIWRLATQPTFLCYAALAVAVSLLLILYCAPRYGQTNIMIYVGICSVVGSLTVMSIKAVGIAIKLTIQGENQAGYFQTWLFVTVSAICLVIQLVYLNKALDTFNTALVSPIYYAMFTTLTILASAIMFKDWSGQSASIIASETCGFLTVLAGIIVLHSTKEPDQNLSPDLYASLTAPLPPKIYWHIQGNGGDVGKQKEDDSLPCDFITVVRQDYFV

SEQ ID NO: 31575 - DNA, 3007 bp, Triticum aestivum
ctccaaaacaaaagccccgaagaaaccccaccaaactcctccatcctccgctcccatttccttcgtgccgtccgcctccgccgtctcgtctgccacccctcgccaccccctctcctccccaaggagcgcagccgcggagcccctcgcccccgtctcccatggcggcctctctcctccacgcagccgcctcctccccgctcgcgggcccctacccggccgcccgcgcggccttccgccccctcgcttcctccccattcctgcgcctcgcgcgctcctctcccgaccgccgtgcccgactggacttcccgctccgggcgctctcgggtggcgctcgcctctccaccggagtggccgccctccgtcctcgccgcttcgtcgccgccctcgcgggggaggaaccgatgagttcagaattgggtgatgacaaggaaaaggaaacggaaaagatcgaaatagagcctgaggaggcccaggaagtgtggagggaaatgctcaagcagttcaaggccgaggccatccgaatgcaggccctgacaacgcaggcatacgatgtctactccaagagggcgagggaggtgctgttagaggcctcagagaagctaaggatccaggcagataaagcacaaaaggacctgaccattatcgctgcagaggttggtgaggaggggcaggaatatctacagctggcagctaagaactccccagattcaatcaaggatatcaccgagacaatcaatgcagttggcaacctcaatgggccatcagagtataaggattatcatgtcggcatttcatttggtacctttcttactgtaggaggtttcctgaacttcatgctaactggaagtacatctgcaattcgctttggctttgttcttggctttgcactattggctctgggtatctcaagtttgagatcacaaagagcaggcggtcgtcagcctcgtcttctgctgaaagggcaagctgctattgcaagcgttatcttcttcaaggacttgtcagttttcttcaggtatgggtggtttccaaatgttttcgcggtccttctcagtggaatggtggcgaccttttacattcatcgcattgtgactggtggccacaaaggtcgcgcggagagcagttcagataactaatggttatacaacacacttggatgaatcatatgtccgcggaaacttgggttctgaagattgatggtgacccttcgccttaaggtttccttctttcatcagccttcaactcaggcacactctgtggtgtctctgaactcttaagtggttctatacagtgatacctggactcacaagacttgcctcgcatactcgcccctcacctttgttgctttcctcgtgtaatatagatgctgccccataagcagaataaggaatggcccttgaaggtctctagtatgtatcaatctgttcatcatttatgttgtttatttatgcaacgtagttgtaacacattgaatatccagtgaaatcccgaaaatcggtctgtcccaaaaaaaaaaaaaaaaagcttttttttttttttttttgatatctattccccccagatgtatgtatcagttcatgctacagatggagatggacagccgaatatgccgataaatatggcttacagtttcgacgagtcctacaattcagtagtgtagaaattatttctgaaccgaagaaaaccaggaaccattgcctggcctgcaatctcgagtagccgtcccaatcctcgatctgttctcagaccctcctccgtccgtcgcagctccagatttccttccccatggctccgatcaagatcggtatcaacggtttcggccggatcggcaggcttgtggccagggttgcgctccagagccccgatgtcgagctcgtcgccgtcaacgaccccttcatcaccaccgactacatgacctacatgttcaagtatgacactgtccacggacagtggaagcaccatgaagttaaggtgaaggactccaagacccttctcttcggtgagaaggaggttgctgtgtttggctgcaggaaccctgaggagatcccatgggctgctgctggtgctgagtacgttgttgagtccaccggtgttttcaccgacaaggacaaggctgcagctcacattaagggtggtgccaagaaggtcatcatttctgctcccagcaaggatgctcccatgtttgtctgtggtgtcaatgagaaggaatacaagtctgacatcgacattgtctccaacgctagctgcaccactaactgccttgctcctcttgctaaggttatcaatgacaggtttggcattgttgagggtttgatgaccacagttcatgccatgactgcaacccagaagactgttgatggtccttccagcaaggactggagaggtggaagggctgccagcttcaacatcattccaagcagcactggtgccgcaaaggctgttggcaaggtgctcccagagcttaacggaaagttgactggaatggccttccgtgttcccactgttgatgtttctgttgttgatctgactgttagacttgcgaagccagcaacctatgatcagattaaggctgctatcaaggaggagtctgagggaaacctcaagggcattttgggttacgttgatgaggaccttgtttccactgactttcagggtgacaacaggtccagcatcttcgatgccaaggccgggattgctctgaacgacaactttgtcaagcttgtctcctggtacgacaacgagtggggatacagcacccgcgtggtcgacctcatccgtcacatgcacagcaccaagtaaatgagaggcatgaagatacaggggagagtggtttgccccagaggagtgttcaaagcctcttcttctgagaataaatttttgtatggaattatgtcagctaaaaaccttttattggatgtatcctgatggttggtcacattttggtggtattatgtacttgcttgaactaaatcatgagtcattttcactcatcttctttggttatcat

SEQ ID NO: 31576 - protein, 377 aa, Triticum aestivum
PKQKPRRNPTKLLHPPLPFPSCRPPPPSRLPPLATPSPPQGAQPRSPSPPSPMAASLLHAAASSPLAGPYPAARAAFRPLASSPFLRLARSSPDRRARLDFPLRALSGGARLSTGVAALRPRRFVAALAGEEPMSSELGDDKEKETEKIEIEPEEAQEVWREMLKQFKAEAIRMQALTTQAYDVYSKRAREVLLEASEKLRIQADKAQKDLTIIAAEVGEEGQEYLQLAAKNSPDSIKDITETINAVGNLNGPSEYKDYHVGISFGTFLTVGGFLNFMLTGSTSAIRFGFVLGFALLALGISSLRSQRAGGRQPRLLLKGQAAIASVIFFKDLSVFFRYGWFPNVFAVLLSGMVATFYIHRIVTGGHKGRAESSSDN

SEQ ID NO: 31577 - protein, 337 aa, Triticum aestivum
MAPIKIGINGFGRIGRLVARVALQSPDVELVAVNDPFITTDYMTYMFKYDTVHGQWKHHEVKVKDSKTLLFGEKEVAVFGCRNPEEIPWAAAGAEYVVESTGVFTDKDKAAAHIKGGAKKVIISAPSKDAPMFVCGVNEKEYKSDIDIVSNASCTTNCLAPLAKVINDRFGIVEGLMTTVHAMTATQKTVDGPSSKDWRGGRAASFNIIPSSTGAAKAVGKVLPELNGKLTGMAFRVPTVDVSVVDLTVRLAKPATYDQIKAAIKEESEGNLKGILGYVDEDLVSTDFQGDNRSSIFDAKAGIALNDNFVKLVSWYDNEWGYSTRVVDLIRHMHSTK

SEQ ID NO: 31578 - protein, 325 aa, Triticum aestivum
MAASLLHAAASSPLAGPYPAARAAFRPLASSPFLRLARSSPDRRARLDFPLRALSGGARLSTGVAALRPRRFVAALAGEEPMSSELGDDKEKETEKIEIEPEEAQEVWREMLKQFKAEAIRMQALTTQAYDVYSKRAREVLLEASEKLRIQADKAQKDLTIIAAEVGEEGQEYLQLAAKNSPDSIKDITETINAVGNLNGPSEYKDYHVGISFGTFLTVGGFLNFMLTGSTSAIRFGFVLGFALLALGISSLRSQRAGGRQPRLLLKGQAAIASVIFFKDLSVFFRYGWFPNVFAVLLSGMVATFYIHRIVTGGHKGRAESSSDN

SEQ ID NO: 31579 - DNA, 1412 bp, Triticum aestivum
acgtaaggaagaagcaagaagcaggtagcagctagcataccacactcgatcgatcatacacatacaccatgccggccgcgcagcacatcgaacgagaccaagacctcgccatgagcagcgacgagttacttcaagctcagctggagctctaccaccacggcctcgccttcgtcaagtcactggcgctcaaggccgccacggacctgcgcatccccgacgccatccaccgccgcggcggcgccgccaccttgtccgagctggcctccgacaccgggatccaccccacgaagcgctccaacctccggcgggtcatgcgggtgctcaccaccaccggggtattctccattgtccaaggcaaaggcagcaacgaccacgccggtgatggcgctgcgtattacaagctcacgcgggtctcccggctccttgtcgagagatcaccgcacaacctgtccccgatggtgggcaccatcgtcaacacgttatgctggacctctctcctcaaaatgcccgagtggtttacccaaggccaagagggagagtcggcacagtcgcactcgctcgtccagctggccaacggctgcacgttctgggacaccaccaaggtcgatggcggcttgttcaacgacggcatggccgcggacagccgcatcgccatgaaggtcctgttgaaggagcacggcggagcgttcggggaagtgaaaagctcgctggtggacatcggcggcaaccatggcgccaccgcgtcggccgtggcgagagcgttcccgcacctcaagtgcagcgttctggacctcccacacgtcgtcgccgcggctcccgccagcgacattttgaccttcgtcgctggaaatatgttcgagtatgtcccacctgcggatgctgttctactcaagtggattttgcatgactggaaacacgaagattgcgtcaagataatgcgccggtgcaaggaagcgatcccagcgaaagaagccggaggaaaggtgataatcatcgacatggtggtgggatatccggtgactcagcccaaccattccaaagaggcgcaggttttgttagatatctacatgatgggctccgatggaatggagcgagaggaaaacgagtggagcttgattttctccgaagccgggttcagcgactacaagatcactccaaccaatgggattcgatcaattatcgaagtatacccttaaatgtacttacttccacttcggagatactatctccttccgtccgtacgtgtttattagtcttgcacgtgtaattgacttggtaaattagcagccaagatacacgtgcaagacttataaaccggaaaggaaggagtcgtcatttgatttgtaataaatctcaccaggaactctctgtattattgcatttaagttttactttttgtttatagattttac

SEQ ID NO: 31580 - protein, 375 aa, Triticum aestivum
MPAAQHIERDQDLAMSSDELLQAQLELYHHGLAFVKSLALKAATDLRIPDAIHRRGGAATLSELASDTGIHPTKRSNLRRVMRVLTTTGVFSIVQGKGSNDHAGDGAAYYKLTRVSRLLVERSPHNLSPMVGTIVNTLCWTSLLKMPEWFTQGQEGESAQSHSLVQLANGCTFWDTTKVDGGLFNDGMAADSRIAMKVLLKEHGGAFGEVKSSLVDIGGNHGATASAVARAFPHLKCSVLDLPHVVAAAPASDILTFVAGNMFEYVPPADAVLLKWILHDWKHEDCVKIMRRCKEAIPAKEAGGKVIIIDMVVGYPVTQPNHSKEAQVLLDIYMMGSDGMEREENEWSLIFSEAGFSDYKITPTNGIRSIIEVYP

SEQ ID NO: 31581 - protein, 361 aa, Triticum aestivum
MSSDELLQAQLELYHHGLAFVKSLALKAATDLRIPDAIHRRGGAATLSELASDTGIHPTKRSNLRRVMRVLTTTGVFSIVQGKGSNDHAGDGAAYYKLTRVSRLLVERSPHNLSPMVGTIVNTLCWTSLLKMPEWFTQGQEGESAQSHSLVQLANGCTFWDTTKVDGGLFNDGMAADSRIAMKVLLKEHGGAFGEVKSSLVDIGGNHGATASAVARAFPHLKCSVLDLPHVVAAAPASDILTFVAGNMFEYVPPADAVLLKWILHDWKHEDCVKIMRRCKEAIPAKEAGGKVIIIDMVVGYPVTQPNHSKEAQVLLDIYMMGSDGMEREENEWSLIFSEAGFSDYKITPTNGIRSIIEVYP

SEQ ID NO: 31582 - protein, 294 aa, Triticum aestivum
MRVLTTTGVFSIVQGKGSNDHAGDGAAYYKLTRVSRLLVERSPHNLSPMVGTIVNTLCWTSLLKMPEWFTQGQEGESAQSHSLVQLANGCTFWDTTKVDGGLFNDGMAADSRIAMKVLLKEHGGAFGEVKSSLVDIGGNHGATASAVARAFPHLKCSVLDLPHVVAAAPASDILTFVAGNMFEYVPPADAVLLKWILHDWKHEDCVKIMRRCKEAIPAKEAGGKVIIIDMVVGYPVTQPNHSKEAQVLLDIYMMGSDGMEREENEWSLIFSEAGFSDYKITPTNGIRSIIEVYP

SEQ ID NO: 31583 - DNA, 1675 bp, Triticum aestivum
accacatattttcgtggacgccttgagtgcatggttaccagcgttaccagtacggcgccagaagcccataacgctcgtctttcttcgacgacatggccgtctcgcctcttgcactcgtgctcctcctcctcgccttcgccgtgtctctcttgtacatcctccgtaggcccgcccctctgcgcagcggcagcgatggaggacggaggcatcttccgccgtcaccgcgcggcctcccgctgctcggccacctacatctcctcggctcgttgccgcaccgggccctgcggtccctggccgccgcacacggcccggtcctgctgctccggctcggccgcgtgcccgccgtggtcgtgtcctcgccggccgccgcggaggaggtgatgagggcccgcgacctggccttcgcgagccggccccggagcgccatggccgaccggctcctctacgggcgcgacgtagcgttcgcgccctacggcgagtactggcgccaggcgcgccgcgtgtgcgtggtccacctcctcagcccgctccgcatcctctccttccgcggcgtccggggaggaggaggccgccgcgctggtcgagcgcgtccgcggagcggcggcgggcggcgccgctgtggacctgtgtgagctcctcgtcgctacgccaacacggtggtctcgcgcgccgcgttcggggacgacagcgcgcgcggcctgtatgaggaaggcaacaaggaacgcgagctgaggaaggtgttcaacgacttccaggagctgctcggcacggcgcctctgggggagctcctgccgtggctggggtggttggacgccgtgagggggatggaggggaagatcagacggacgttcaaggcgctcgacggtgtgctcgagaaggtgatcggcgaccaccgccgccggcgtcaagccggccagcagacgggagatgacggcggcgatcacagggatttcgtggacgtgttgttggacgtgagcgatactgatgacgaagctggcatgcgtctcagcacgaccgaaatcaaggccatcattttggacatgttcgcggcgggcacggacacgacgagcacggcaatggagtgggccatggcggaggtcatcacgcacccagacagcatgcgtaagctccaggacgagctcagggcggccgtcggtggctccgggcacgtcatcaccgaggaccacatcgacaagctgcactacctcaaggcggtggtcaaggagacgctacgcctgcacccaccgatcccgctcctcgtgccccgagagccacaagacgacgccgagatactcggccaccacgtcccggcgggcacgcgggtggtcatcaacgcgtgggccgtcggccgggacccggcggcgtgggagcgcgccgaggagttcgtaccggagaggtttctcgacggcgcggtggactacaaggggcaggacttccagctgataccgttcggtgctgggcggcgggggtgccccggggtcggattcgccgcggcgaccgttgagatggcgctggcgagtttgatgtaccatttcgactgggagccggccggggcgtcgctggacatgcgcgaggtgaacgggctcgccgtgcatctcaagtccggcctgccgcttgtcgctaaactgcggtttcgttagataaacttgttgctatgcaagaagaacaataatcc

SEQ ID NO: 31584 - protein, 271 aa, Triticum aestivum
MEGKIRRTFKALDGVLEKVIGDHRRRRQAGQQTGDDGGDHRDFVDVLLDVSDTDDEAGMRLSTTEIKAIILDMFAAGTDTTSTAMEWAMAEVITHPDSMRKLQDELRAAVGGSGHVITEDHIDKLHYLKAVVKETLRLHPPIPLLVPREPQDDAEILGHHVPAGTRVVINAWAVGRDPAAWERAEEFVPERFLDGAVDYKGQDFQLIPFGAGRRGCPGVGFAAATVEMALASLMYHFDWEPAGASLDMREVNGLAVHLKSGLPLVAKLRFR

SEQ ID NO: 31585 - protein, 213 aa, Triticum aestivum
MRLSTTEIKAIILDMFAAGTDTTSTAMEWAMAEVITHPDSMRKLQDELRAAVGGSGHVITEDHIDKLHYLKAVVKETLRLHPPIPLLVPREPQDDAEILGHHVPAGTRVVINAWAVGRDPAAWERAEEFVPERFLDGAVDYKGQDFQLIPFGAGRRGCPGVGFAAATVEMALASLMYHFDWEPAGASLDMREVNGLAVHLKSGLPLVAKLRFR

SEQ ID NO: 31586 - protein, 199 aa, Triticum aestivum
MFAAGTDTTSTAMEWAMAEVITHPDSMRKLQDELRAAVGGSGHVITEDHIDKLHYLKAVVKETLRLHPPIPLLVPREPQDDAEILGHHVPAGTRVVINAWAVGRDPAAWERAEEFVPERFLDGAVDYKGQDFQLIPFGAGRRGCPGVGFAAATVEMALASLMYHFDWEPAGASLDMREVNGLAVHLKSGLPLVAKLRFR

SEQ ID NO: 31587 - DNA, 1422 bp, Triticum aestivum
aagaaaaaagcgcgcggccagagttaggaagaaaggttcgacagcgagcgagcgagcgagcgagagagataaggagagagggcgcgcgcggggatctccgtgccttggtcggcggtagagtcgtcggcgcgggggcgatggagagcgggccggcgggcacgatgggggggccgctgagtgacgtgccggcgatgctcgacggcgaccggtacgagctggtccgcagcatcgggtccggcaacttcggtgtcgcccgcctcatgcgcaaccgcgcctccggcgagctcgtcgctgtcaagtacatcgaccgcggcgagaagatcgatgagaacgtgcagagagagatcatcaaccacaggtcgctgcggcatcccaacatcatccgcttcaaggaggttattctgacgccgacgcatctcgccatcgtcatggagtacgcctccggcggggagctcttcgagcgcatctgcactgccggccgattcagcgtcgacgaggctcggttctttttccagcagctgatatctggagtcagctactgccactccatgtgtgccatcgtgacttaaagctcgagaacactctgctggatggaagcaccacccctcgcctcaagatatgcgactttggttattccaagtcatcggtgctacattctcaaccaaagtcaactgttggaactccggcatatattgcccctgaagttctgctcaagaaagaatacgatggcaagattgccgatgtgtggtcctgtggcgtaaccctttacgtgatgttggtcggcgcctaccctttcgaggatccagaaaatcccaagaatttcaaagtgacaattcagaaaatattaggtgttcagtactcgattccggactatattcacatacctatggactgccgaaaccttctctcaaggatctttgttgccaacccagctacgaggatcaccatacctgagataaagaaccacccatggttcctcaagaacctcccagctgacctcatggacggtcccacagtgagcaaccagtatgaggagcctgaccagccgatgcagaacatgaacgagatcatgcagataatggcagaggcgaccataccggcggccggcgccctcggaatcaataagttcctgcctgacggccttgacctcgacgacgacatggacgacctggactcggacctcgacatcgacatggacagcagcggggagatagtatacgccatgtagtaaacctgtgaatatctgtatgtgcagaagcggtatttgtggtcttccaccttgtttgcttcttgaacatacaccagattgagtgccattttgtgttaagaagaagagtgtagaaatgtacattgagaggattgtattcaggctactacttgagtctgaaattggtgttgctgctcattgatgtgttgtctaac

SEQ ID NO: 31588 - protein, 188 aa, Triticum aestivum
EKSARPELGRKVRQRASERAREIRREGARGDLRALVGGRVVGAGAMESGPAGTMGGPLSDVPAMLDGDRYELVRSIGSGNFGVARLMRNRASGELVAVKYIDRGEKIDENVQREIINHRSLRHPNIIRFKEVILTPTHLAIVMEYASGGELFERICTAGRFSVDEARFFFQQLISGVSYCHSMCAIVT

SEQ ID NO: 31589 - protein, 151 aa, Triticum aestivum
MLVGAYPFEDPENPKNFKVTIQKILGVQYSIPDYIHIPMDCRNLLSRIFVANPATRITIPEIKNHPWFLKNLPADLMDGPTVSNQYEEPDQPMQNMNEIMQIMAEATIPAAGALGINKFLPDGLDLDDDMDDLDSDLDIDMDSSGEIVYAM

SEQ ID NO: 31590 - protein, 143 aa, Triticum aestivum
MESGPAGTMGGPLSDVPAMLDGDRYELVRSIGSGNFGVARLMRNRASGELVAVKYIDRGEKIDENVQREIINHRSLRHPNIIRFKEVILTPTHLAIVMEYASGGELFERICTAGRFSVDEARFFFQQLISGVSYCHSMCAIVT

SEQ ID NO: 31591 - DNA, 1463 bp, Triticum aestivum
gaagccatctcgtacggactccatagctcccacctccaagcacgatcaccagcgagctcccgaaccccatggcaggcggcggcgggaaggtggcgtgcgcggcgtggatccggcgccgggaggacaaggccacccgcgtcttcgcggtgcacggccggccctccccgccggccctggaggttctcggcttcgactccgggagctgctcgctctccgaggagcccctggcgaggattgtgctcggggacgatccagacgacgcgccgctcgccgtcgcggtgcaccccaccggcgacgagctcgtgtgcaccacggccaaggggtgcaggctatttaaactgatttttgaagagttcaccgttcgctttattgaaagtaaagctccagcgatcgaatctgttggactgcagaaatgtgttgccttcagcacagatggtgctaaatttgctatcggtggtgaggatgggcatctaagaatatttcattggccaagcatgaaggtgctcttagatgaacccaacgctcataaatccttcagagacatggatatcagcttagattcagagtttttagtttcatcgtctactgatggcactgcaagaatttggaagataaatgagggggtaccattggtcaacttgactcgatcttcggacgagaagattgagtgttgccgcttttctagggatggcatgaaaccgttcctgttttgcacagttgcaaaaggtagcaaagctgtgactgttgtttggaacataagtgattggtctagaattgggtacaaaagactactgggaaaacctgcctccacactttcagttagcttggatgggaaatttctggctttaggaaaccaggatggtgatttttgtgttgtggatgtaaaggagatggagatttctcactggagcaagaaggtccatcttggttcccctatatgcggaattgaattttgtcctactgaaagagttgtaatctccacatcgccacagtggggagcagagctgacaagactgaatgtgcctgctgactggaaagaatggcaaatctggctcatactcttggcgctcttccttgcatcagccgtcctgttctacgtattctaccagaactccggttccttctggagcggaacgccccgacgggacgtcatcgacctaccaagccatgcagagttctgaacgagcctcctcggtctcgtgaaaaccaaaactcctggtgaaactgttcaccagtgtgattccctttcaagcaatccagcactgcagtgttatttatttcattcataccaagagctctttctttctttactagtgtagtcaatgttgtatcaatccagtggcgcgcctatctatctggcgacgtcagtatttatcggggggaacactgtaaaatgacactgtaaatgataatagttcgagaatgtcatcgagtgttaatgggacattcaagatcgccaactg

SEQ ID NO: 31592 - protein, 370 aa, Triticum aestivum
MAGGGGKVACAAWIRRREDKATRVFAVHGRPSPPALEVLGFDSGSCSLSEEPLARIVLGDDPDDAPLAVAVHPTGDELVCTTAKGCRLFKLIFEEFTVRFIESKAPAIESVGLQKCVAFSTDGAKFAIGGEDGHLRIFHWPSMKVLLDEPNAHKSFRDMDISLDSEFLVSSSTDGTARIWKINEGVPLVNLTRSSDEKIECCRFSRDGMKPFLFCTVAKGSKAVTVVWNISDWSRIGYKRLLGKPASTLSVSLDGKFLALGNQDGDFCVVDVKEMEISHWSKKVHLGSPICGIEFCPTERVVISTSPQWGAELTRLNVPADWKEWQIWLILLALFLASAVLFYVFYQNSGSFWSGTPRRDVIDLPSHAEF

SEQ ID NO: 31593 - protein, 228 aa, Triticum aestivum
MKVLLDEPNAHKSFRDMDISLDSEFLVSSSTDGTARIWKINEGVPLVNLTRSSDEKIECCRFSRDGMKPFLFCTVAKGSKAVTVVWNISDWSRIGYKRLLGKPASTLSVSLDGKFLALGNQDGDFCVVDVKEMEISHWSKKVHLGSPICGIEFCPTERVVISTSPQWGAELTRLNVPADWKEWQIWLILLALFLASAVLFYVFYQNSGSFWSGTPRRDVIDLPSHAEF

SEQ ID NO: 31594 - protein, 212 aa, Triticum aestivum
MDISLDSEFLVSSSTDGTARIWKINEGVPLVNLTRSSDEKIECCRFSRDGMKPFLFCTVAKGSKAVTVVWNISDWSRIGYKRLLGKPASTLSVSLDGKFLALGNQDGDFCVVDVKEMEISHWSKKVHLGSPICGIEFCPTERVVISTSPQWGAELTRLNVPADWKEWQIWLILLALFLASAVLFYVFYQNSGSFWSGTPRRDVIDLPSHAEF

SEQ ID NO: 31595 - DNA, 1350 bp, Triticum aestivum
gcaacccacacgcccctcccatcccctcttgtactactaggtacaagaagaagctgagctacagcaatggcgcccagagcagctgcggccgtggccgtcgtggccttggtctgcgcagtgcagtcgtccctctcaggggcagccgtcccgggtctgtcccctggcttctacaagacgacctgcccagggctggagcaaatcgtgaacgcccaagtgacggcgaccttcaacaaagaccaaggtgtcgctcccgccctcctgcgcgtcctcttccacgactgctttacgcagggctgcgacgcgtcggtgctcatcaaaggccgcggcaccgagcagatccccggcggagccaacgggactctccgccgcgtggctctggacctcatcgatcgcatccaccgcgaggcccaagctgcctgcggtcgggtggtctcatgcgccgacgttaccgtgctcgctacccgcgacgcgctgttcaaggccggcggtccccgtttcaacgtcgacctgggccggcttgactcgttcgccccggcgccagatagggttaaggacctgccctcgcccttcgacggcgcggacaggcacatcgaggccttcaaggcccgcaaactcagcgccgatgacctggtttccctctccggcgcgcacaccttcggtgtggcccactgcggggtcatcccaccccggggcacccattccatggatccccagctcgccaagcagctacaggagaaatgcaccaaacccacggcaacaaccacgcaagacctcgacgtcctcacgccgcacgtcttcgacaacaagtactacgtgggcctgacccagaagaaggggatgttcctgtccgaccagtcgctcatcgaccacccgctcaccaagaacctcgccctcgccttctccaagaaccagacagccttcttcatcgagttcggcaagtcgatgaccaagatgaccgagatgggtgtgatcaccagcaagctgcagggcgaggtccgggccgactgcaccgtcgcagggaagcccccccgcatcgaggccgccaccgccgccgaccaggggttcacggccgacatgtaagacatgttccatgcaacgtagcgttcctcagctaaccgtgtccgtgcgtatacgcacgcgaacgcgcggtggcttatgttggtgtgtgcgtcttgtgcttgtgctgcctagctagtactactcctagttagttaataatgagcggtcggttcacttgcttcctagcataggattgatcgaggttcctagttttgggacacccttgtaagatcttcgtcatgtctttttcagatttccaacatccgtaatgtcatattttcatttcaaggt

SEQ ID NO: 31596 - protein, 337 aa, Triticum aestivum
MAPRAAAAVAVVALVCAVQSSLSGAAVPGLSPGFYKTTCPGLEQIVNAQVTATFNKDQGVAPALLRVLFHDCFTQGCDASVLIKGRGTEQIPGGANGTLRRVALDLIDRIHREAQAACGRVVSCADVTVLATRDALFKAGGPRFNVDLGRLDSFAPAPDRVKDLPSPFDGADRHIEAFKARKLSADDLVSLSGAHTFGVAHCGVIPPRGTHSMDPQLAKQLQEKCTKPTATTTQDLDVLTPHVFDNKYYVGLTQKKGMFLSDQSLIDHPLTKNLALAFSKNQTAFFIEFGKSMTKMTEMGVITSKLQGEVRADCTVAGKPPRIEAATAADQGFTADM

SEQ ID NO: 31597 - protein, 172 aa, Triticum aestivum
NPHAPPIPSCTTRYKKKLSYSNGAQSSCGRGRRGLGLRSAVVPLRGSRPGSVPWLLQDDLPRAGANRERPSDGDLQQRPRCRSRPPARPLPRLLYAGLRRVGAHQRPRHRADPRRSQRDSPPRGSGPHRSHPPRGPSCLRSGGLMRRRYRARYPRRAVQGRRSPFQRRPGPA

SEQ ID NO: 31598 - DNA, 2293 bp, Triticum aestivum
cccctcccctcccgtgcttctctccaccccgcccccgcgccacagccgaaccctacacccgcgcgcgcgaggggccgccccgatctgcgagatgtggcgcagccgcgtgtcgcggggcctccgggaggccaaggccgccgccgccgccgcgtccaggcgcttctccaccacctcgtcctacacggtggtggatcacacctacgatgcggtcgtggttggcgctggaggcgcggggctcagggccgcgattgggctctcggagcatgggttcaacaccgcctgcatcaccaagctcttccccacgcggtcacataccgtggcagcgcagggaggtataaacgctgctcttggaaacatgagtgaagatgactggaggtggcatatgtatgatacagtcaagggaagtgattggctcggtgaccaagatgctatccagtatatgtgtagagaagcaccaaaggctgttatagagcttgagaactatggattaccattttccagaactgaagatggaaaaatttatcaacgcgcttttggaggccaaagcttagattttggaaaaggtggtcaggcctatcgatgtgcatgcgctgctgacagaacagggcatgctatgctacacacactttatgggcaggcgatgaagcacaatactcagttttttgttgaatattttgcgctggaccttatcatggacaaagaaggcacctgccagggggtaattgcactaaacatggaggatggtacccttcatcgtttccgttcaacaaatactattttagcaacaggaggttatggcagagcttacttctctgctacttcagctcacacatgtactggtgatggcaatgctatggttgcacgtgctgggttaccccttcaggatcttgagtttgtgcagttccatcctacaggcatttacggtgctggatgccttataactgaaggttcccggggcgaaggtggtattcttaggaacagcgaaggtgagaggttcatggaacgatatgcccctaccgctaaagatcttgcatctcgtgatgttgtttcaagatctatgactatggaaattagagaaggacgtggtgtaggaccaatgaaggaccatctctacctgcaccttaatcatcttcctccagaagttctgaaggaaaggcttcctggtatatctgagactgctgctatttttgctggtgttgatgtcaccaaagagcctattcctgttttgccgactgtgcattataatatgggcggtatcccgacaaattatcatgggcaggtggtggatatcaagggtgataacccagacacaattattcctggtctgatggctgctggggaggcagcttgtgcatctgttcatggtgcaaaccgtcttggtgcaaattcacttcttgacattgttgtatttgggagggcttgtgcaaatagggttgctgagatttccaagccaggagagacacagaaacctcttgaaaaagacgcaggggagaagaccattgcttggttggacaagctgagaaatgctaatggatcactgccaacttcgaagatccgcctcaacatgcaacgtattatgcaaaataatgctgcagttttccgcacacaggaaactctaacagaaggttgcgagctgattagtgaagcacagaaaagtttccacgatgtcaagctcagtgacagaagtctcatatggaattcggatttgatagagaccatagaattagaaaacctgctaataaatgcatgcataaccatgcattcagctgaggctcgccaagagagcagaggagctcatgctcgtgaagatttcaagacaagagatgacgacaagtggatgaagcactcgctagggtactgggaggatgaaaaggttagactagaatacaggccagttcacatgaacaccttggatgatgaagtcgagactttcccgccgaaggcacgtgtttactaatccggacaaggctgtcgacgtttcagttgtttgataagggtatagctcacagcgcggtgtcttccgagtagaaataaatttgcaggggccctccattctcccaaagcttcagaactgtaatataatcgggaatcgccaatatactttccctgaccagtgtaaacttgttgaaagcttctgatgattctattttggtcctgtatcacccctttggttggtaggaataaagacgcataccaagttttgaaggtgtttgaatctgtaaataacctttggcgtgagctgtgaacacaatggttcttttgtctattgtggcttctattaagctttaaactt

SEQ ID NO: 31599 - protein, 651 aa, Triticum aestivum
PSPPVLLSTPPPRHSRTLHPRARGAAPICEMWRSRVSRGLREAKAAAAAASRRFSTTSSYTVVDHTYDAVVVGAGGAGLRAAIGLSEHGFNTACITKLFPTRSHTVAAQGGINAALGNMSEDDWRWHMYDTVKGSDWLGDQDAIQYMCREAPKAVIELENYGLPFSRTEDGKIYQRAFGGQSLDFGKGGQAYRCACAADRTGHAMLHTLYGQAMKHNTQFFVEYFALDLIMDKEGTCQGVIALNMEDGTLHRFRSTNTILATGGYGRAYFSATSAHTCTGDGNAMVARAGLPLQDLEFVQFHPTGIYGAGCLITEGSRGEGGILRNSEGERFMERYAPTAKDLASRDVVSRSMTMEIREGRGVGPMKDHLYLHLNHLPPEVLKERLPGISETAAIFAGVDVTKEPIPVLPTVHYNMGGIPTNYHGQVVDIKGDNPDTIIPGLMAAGEAACASVHGANRLGANSLLDIVVFGRACANRVAEISKPGETQKPLEKDAGEKTIAWLDKLRNANGSLPTSKIRLNMQRIMQNNAAVFRTQETLTEGCELISEAQKSFHDVKLSDRSLIWNSDLIETIELENLLINACITMHSAEARQESRGAHAREDFKTRDDDKWMKHSLGYWEDEKVRLEYRPVHMNTLDDEVETFPPKARVY

SEQ ID NO: 31600 - protein, 621 aa, Triticum aestivum
MWRSRVSRGLREAKAAAAAASRRFSTTSSYTVVDHTYDAVVVGAGGAGLRAAIGLSEHGFNTACITKLFPTRSHTVAAQGGINAALGNMSEDDWRWHMYDTVKGSDWLGDQDAIQYMCREAPKAVIELENYGLPFSRTEDGKIYQRAFGGQSLDFGKGGQAYRCACAADRTGHAMLHTLYGQAMKHNTQFFVEYFALDLIMDKEGTCQGVIALNMEDGTLHRFRSTNTILATGGYGRAYFSATSAHTCTGDGNAMVARAGLPLQDLEFVQFHPTGIYGAGCLITEGSRGEGGILRNSEGERFMERYAPTAKDLASRDVVSRSMTMEIREGRGVGPMKDHLYLHLNHLPPEVLKERLPGISETAAIFAGVDVTKEPIPVLPTVHYNMGGIPTNYHGQVVDIKGDNPDTIIPGLMAAGEAACASVHGANRLGANSLLDIVVFGRACANRVAEISKPGETQKPLEKDAGEKTIAWLDKLRNANGSLPTSKIRLNMQRIMQNNAAVFRTQETLTEGCELISEAQKSFHDVKLSDRSLIWNSDLIETIELENLLINACITMHSAEARQESRGAHAREDFKTRDDDKWMKHSLGYWEDEKVRLEYRPVHMNTLDDEVETFPPKARVY

SEQ ID NO: 31601 - protein, 533 aa, Triticum aestivum
MSEDDWRWHMYDTVKGSDWLGDQDAIQYMCREAPKAVIELENYGLPFSRTEDGKIYQRAFGGQSLDFGKGGQAYRCACAADRTGHAMLHTLYGQAMKHNTQFFVEYFALDLIMDKEGTCQGVIALNMEDGTLHRFRSTNTILATGGYGRAYFSATSAHTCTGDGNAMVARAGLPLQDLEFVQFHPTGIYGAGCLITEGSRGEGGILRNSEGERFMERYAPTAKDLASRDVVSRSMTMEIREGRGVGPMKDHLYLHLNHLPPEVLKERLPGISETAAIFAGVDVTKEPIPVLPTVHYNMGGIPTNYHGQVVDIKGDNPDTIIPGLMAAGEAACASVHGANRLGANSLLDIVVFGRACANRVAEISKPGETQKPLEKDAGEKTIAWLDKLRNANGSLPTSKIRLNMQRIMQNNAAVFRTQETLTEGCELISEAQKSFHDVKLSDRSLIWNSDLIETIELENLLINACITMHSAEARQESRGAHAREDFKTRDDDKWMKHSLGYWEDEKVRLEYRPVHMNTLDDEVETFPPKARVY

SEQ ID NO: 31602 - DNA, 1347 bp, Triticum aestivum
gacaccgtgactgactcggccgtacggtatcgattcccgccggaaaaggaatcagcggcgagcgccatcgacggaagcaagtcattaggtatctagctagctcctttaagagagaaaaaaaaggagttatctagcttgctacttctaggcggaggttgagatggttcaggccggattggctcagccggccccgagcacgggggcgccggcgatggcggcagcggcggtgcacgtcgcgctcaagatcccctccggcggggggccgtatgcacgggccaagcactaccagctagtggagaaggacttggacgcttcgatcgcgtggttttggaaggcgatcgagacgggggacaaggtggacagcgcgctcaaggacatggcggtggtgatgaagcagcgcggttacctggacgacgccgtggacgccatccggtcgctgcgccacctctgcccggggaagcagtcgcaggagtccctggacaacatcctgctcgacctctacaaggccagcgggcgcaccaaggaggagatcgagctgctcaagcacaagctccgccggatctaccacggccaggccttccccgccggcaaggccaccaagcgcgcccgctcccacggccgcaagatccacgtctccgtccagcaggagacgtcccgggtgctgggcaacctcgcgtgggcctacatgcagcagcgcaacttcatggcggccgaggccgtgtaccgcaaggcgcagatggtggagcccgacgccaacaaggcctgcaacctcgcgctgtgcctcatggagcaggggcggctaggggacgccgagggggtgctcgccgacgtggtcgccggcgcgttccgcgacgggagggagagggagcacggcggcgggaaggtcgtgaggaaggcggaggagctgctggagcggatcagggcggagacgggcggcggcgagaaggaggccggggaggaggacggcgtcgaggccgacgagatggcggagctactggacatggtggccaggcagtgggccgcgccgtacaggaagagccaccggaggctgcccgtgttcgaggagatcacaccgttcggcagggagcagatggcttgctagctctagaagctcatgagaactcaatagaagctgtgagtgtgcagtagcttcaccagaatattgtgaagctcgtgagaactcaatagaagttgtgtgtgtgtgtgcagtactgcagtagcttgatcagaatggtgtgaagcgtacgtgttaatcaatgtgacatatgttctatgttggtgctcatgtatgtagatgtgttgcatgtgcagtgtacaagttctttttggcggtttcatgtgtacaac

SEQ ID NO: 31603 - protein, 313 aa, Triticum aestivum
MVQAGLAQPAPSTGAPAMAAAAVHVALKIPSGGGPYARAKHYQLVEKDLDASIAWFWKAIETGDKVDSALKDMAVVMKQRGYLDDAVDAIRSLRHLCPGKQSQESLDNILLDLYKASGRTKEEIELLKHKLRRIYHGQAFPAGKATKRARSHGRKIHVSVQQETSRVLGNLAWAYMQQRNFMAAEAVYRKAQMVEPDANKACNLALCLMEQGRLGDAEGVLADVVAGAFRDGREREHGGGKVVRKAEELLERIRAETGGGEKEAGEEDGVEADEMAELLDMVARQWAAPYRKSHRRLPVFEEITPFGREQMAC

SEQ ID NO: 31604 - protein, 296 aa, Triticum aestivum
MAAAAVHVALKIPSGGGPYARAKHYQLVEKDLDASIAWFWKAIETGDKVDSALKDMAVVMKQRGYLDDAVDAIRSLRHLCPGKQSQESLDNILLDLYKASGRTKEEIELLKHKLRRIYHGQAFPAGKATKRARSHGRKIHVSVQQETSRVLGNLAWAYMQQRNFMAAEAVYRKAQMVEPDANKACNLALCLMEQGRLGDAEGVLADVVAGAFRDGREREHGGGKVVRKAEELLERIRAETGGGEKEAGEEDGVEADEMAELLDMVARQWAAPYRKSHRRLPVFEEITPFGREQMAC

SEQ ID NO: 31605 - protein, 241 aa, Triticum aestivum
MAVVMKQRGYLDDAVDAIRSLRHLCPGKQSQESLDNILLDLYKASGRTKEEIELLKHKLRRIYHGQAFPAGKATKRARSHGRKIHVSVQQETSRVLGNLAWAYMQQRNFMAAEAVYRKAQMVEPDANKACNLALCLMEQGRLGDAEGVLADVVAGAFRDGREREHGGGKVVRKAEELLERIRAETGGGEKEAGEEDGVEADEMAELLDMVARQWAAPYRKSHRRLPVFEEITPFGREQMAC

SEQ ID NO: 31606 - DNA, 1597 bp, Triticum aestivum
acgcaagtgcaccgaacgacggtcgtcgtggcctgttcgggctcgcaaatccccacacgccactcctcctcgtccccgtagaaaaggacacgcgtagccttcgtccacggctccacgaggcagaggcagcagccgcggcactcgagcaagcaagcttttgtactctgctccagtcatccgtcgtctccctttccgccgagatgcagcgccggctcccggcgctcctccgccgcgcagcgggcgcggggcccgcgcgccggtggctctccgcctcgtcctccctcctcttcgacgacacccaggagcagttcaaggagagcgtgcaccggttcgcgcaggagcacatcgcgccgcacgccgccgccatcgacgcctccaaccacttccccaaggagaagaatctgtggaagctcatgggggacttcaacctgcacggcctcacctcgccagaggagtacggagggctcgggctcggttacatgtaccactgcatcgccatggaggagatcagcagggcgtccgggtcggtcggcctttcctacggtgcacactcaaatctctgcatcaaccagctggtccgtcatggcagccctgcccaaaaggaaaagtatttgccgaagcttatcagtggggagcatattggggcattggcgatgagtgaaccaaactctggctctgatgttgtcagtatgaagtgcaaagctgagaaagtagatggcggctatgtcattaacgggaacaagatgtggtgcacaaatggtccgtctgctcagacattggttgtttacgcgaaaacagatataactgctggatcgaaaggaataactgcattcataattgagaagggaatgcccgggttcagtactgcccagaagttggacaaacttggcatgcgaggaagtgacacatgtgagcttgtctttgagaactgctttgtgcctcaagagaatgttcttggtgaagaagggaaaggtgtttatgtcatgatgtctggtcttgatctggaaagacttgtattagctgggggccctattgggctcatgcaggcatgccttgatgttgttcttccttatgttcgacaaagggagcaatttggccgtccgattggtgaatttcagttcttacaggggaaaatggcagatatgtacacctccttgcaatcatcaagatcatttgtatactcagttgccagggactgtgataatggcaaagttgaccgtaaggattgtgcaggagtgatcctctttgctgctgaaagggcaacacaagttgcacttgaggcaatccagtgtcttggtggcaatggatacataaatgagtacccaactggccgtctcctgagagatgcaaaactgtttgagattggagctggcactagtgagatcagaagaatgataattggtcgtgaactgttcaaagaggactgagattattcttctggaagccagctatcagtgcatattctaacttgaggaggtgagcaggattagaccattagtgaactgtccctgatgttcaatgtttgatgatgttctatccaatccttctcatacttctgtacatgtccaacattcttgcaaataaagttcaatcttct

SEQ ID NO: 31607 - protein, 474 aa, Triticum aestivum
ASAPNDGRRGLFGLANPHTPLLLVPVEKDTRSLRPRLHEAEAAAAALEQASFCTLLQSSVVSLSAEMQRRLPALLRRAAGAGPARRWLSASSSLLFDDTQEQFKESVHRFAQEHIAPHAAAIDASNHFPKEKNLWKLMGDFNLHGLTSPEEYGGLGLGYMYHCIAMEEISRASGSVGLSYGAHSNLCINQLVRHGSPAQKEKYLPKLISGEHIGALAMSEPNSGSDVVSMKCKAEKVDGGYVINGNKMWCTNGPSAQTLVVYAKTDITAGSKGITAFIIEKGMPGFSTAQKLDKLGMRGSDTCELVFENCFVPQENVLGEEGKGVYVMMSGLDLERLVLAGGPIGLMQACLDVVLPYVRQREQFGRPIGEFQFLQGKMADMYTSLQSSRSFVYSVARDCDNGKVDRKDCAGVILFAAERATQVALEAIQCLGGNGYINEYPTGRLLRDAKLFEIGAGTSEIRRMIIGRELFKED

SEQ ID NO: 31608 - protein, 408 aa, Triticum aestivum
MQRRLPALLRRAAGAGPARRWLSASSSLLFDDTQEQFKESVHRFAQEHIAPHAAAIDASNHFPKEKNLWKLMGDFNLHGLTSPEEYGGLGLGYMYHCIAMEEISRASGSVGLSYGAHSNLCINQLVRHGSPAQKEKYLPKLISGEHIGALAMSEPNSGSDVVSMKCKAEKVDGGYVINGNKMWCTNGPSAQTLVVYAKTDITAGSKGITAFIIEKGMPGFSTAQKLDKLGMRGSDTCELVFENCFVPQENVLGEEGKGVYVMMSGLDLERLVLAGGPIGLMQACLDVVLPYVRQREQFGRPIGEFQFLQGKMADMYTSLQSSRSFVYSVARDCDNGKVDRKDCAGVILFAAERATQVALEAIQCLGGNGYINEYPTGRLLRDAKLFEIGAGTSEIRRMIIGRELFKED

SEQ ID NO: 31609 - protein, 337 aa, Triticum aestivum
MGDFNLHGLTSPEEYGGLGLGYMYHCIAMEEISRASGSVGLSYGAHSNLCINQLVRHGSPAQKEKYLPKLISGEHIGALAMSEPNSGSDVVSMKCKAEKVDGGYVINGNKMWCTNGPSAQTLVVYAKTDITAGSKGITAFIIEKGMPGFSTAQKLDKLGMRGSDTCELVFENCFVPQENVLGEEGKGVYVMMSGLDLERLVLAGGPIGLMQACLDVVLPYVRQREQFGRPIGEFQFLQGKMADMYTSLQSSRSFVYSVARDCDNGKVDRKDCAGVILFAAERATQVALEAIQCLGGNGYINEYPTGRLLRDAKLFEIGAGTSEIRRMIIGRELFKED

SEQ ID NO: 31610 - DNA, 1645 bp, Triticum aestivum
atagctctcattcatctcgtgagaaacacagtgtgatatggcgacgtcatggctcctcaggcatccttgtccactggctaggccatggaccagaacaaggaatgatataggtctccatgtgaccagcatcgcctactgctactggagatgcactaggaccagtggaggaggaagaatcatggcggatatgagtatgaacaccaccaactgcacggcagaacccgcccttctaccccaagctgatgctgccgaactagcagggggagccgaccatcctcctagacttagtaagagaagcgcgcgcactggccggggcgccgccgttgcggctaggcacgaggaggagggcactgacgacgaatggctcatgtacctggagccggcgaagctacaggtgttcgaccatctggagccttgggcggaggcgaatgtggtgccgctccttaagcccgccgaggtagcgtggcagccgacggacttgctgccggatctggcgtcgctgggcaccgacggcttccacgcggcgtgctccgacatcacagcgcgcgcggccggcctgcccgacgcgcacctcgtatgcctcgtggggaacatggtcacggaggaggcgctgccaacttaccagagcatacccaaccgcttcgaggccgtgcgcgacctcaccggctccagcggcactgcctgggcgcgctggatccgcggctggtctgccgaggagaaccggcacggcgacgtgcttaacaggtacctcttcctctccggccgcgtcgacatgcggcaggtcgagaggaccatccacaacctcatccagtccggcatggtcatgaacgctgcgcggagcccctaccacggcttcatctacgtcgccttccaggagcgtgccacctccatctctcacggcaacacagcccgtcgcgccaaggagtatggcgacgtggcgctcgcgcgcatatgcggtgccatcgcggctgacgagaagcggcacgagctggcctacacgcggatcgtggggaagctgttcgagatcgacccggacggcgccgtgcgcgcgctggcgtacatgatgcgccgccggatcgtcatgccggcgtccctcatgacagacggccgcgacggtgacctcttcgcgcactacgcggccgtggcgcagcaggccggcatttacaccgcctcggactaccgtagcattttggagcacctgataaagcagtggggggtgaaagagctggcagcggccgaactctccgacgacgggaggcgtgcgcgggactacgtgtgcgcgttgccccaaaagatccgcaggttggaggaaaaggctcacgagcgcagcggccagaaaacccagcctgcaacatcggccccgtttagctggatctttgataagcctgtcaacaacaccatggggtaatcaaattattgttgttatataccctaaatatcctttaaatcattatttctcgatcctatctttgagatgaagtattcttcatctctactttgctagtgtcggcgccagtaaaagtactttttttttctgatcgggttgaagctatgaggatggtattgtactactgtatttttgtaagttgttttatcacattctaaaaataaatacagggagagtgaaagttgtattcaaaaaaat

SEQ ID NO: 31611 - protein, 456 aa, Triticum aestivum
MATSWLLRHPCPLARPWTRTRNDIGLHVTSIAYCYWRCTRTSGGGRIMADMSMNTTNCTAEPALLPQADAAELAGGADHPPRLSKRSARTGRGAAVAARHEEEGTDDEWLMYLEPAKLQVFDHLEPWAEANVVPLLKPAEVAWQPTDLLPDLASLGTDGFHAACSDITARAAGLPDAHLVCLVGNMVTEEALPTYQSIPNRFEAVRDLTGSSGTAWARWIRGWSAEENRHGDVLNRYLFLSGRVDMRQVERTIHNLIQSGMVMNAARSPYHGFIYVAFQERATSISHGNTARRAKEYGDVALARICGAIAADEKRHELAYTRIVGKLFEIDPDGAVRALAYMMRRRIVMPASLMTDGRDGDLFAHYAAVAQQAGIYTASDYRSILEHLIKQWGVKELAAAELSDDGRRARDYVCALPQKIRRLEEKAHERSGQKTQPATSAPFSWIFDKPVNNTMG

SEQ ID NO: 31612 - protein, 409 aa, Triticum aestivum
MADMSMNTTNCTAEPALLPQADAAELAGGADHPPRLSKRSARTGRGAAVAARHEEEGTDDEWLMYLEPAKLQVFDHLEPWAEANVVPLLKPAEVAWQPTDLLPDLASLGTDGFHAACSDITARAAGLPDAHLVCLVGNMVTEEALPTYQSIPNRFEAVRDLTGSSGTAWARWIRGWSAEENRHGDVLNRYLFLSGRVDMRQVERTIHNLIQSGMVMNAARSPYHGFIYVAFQERATSISHGNTARRAKEYGDVALARICGAIAADEKRHELAYTRIVGKLFEIDPDGAVRALAYMMRRRIVMPASLMTDGRDGDLFAHYAAVAQQAGIYTASDYRSILEHLIKQWGVKELAAAELSDDGRRARDYVCALPQKIRRLEEKAHERSGQKTQPATSAPFSWIFDKPVNNTMG

SEQ ID NO: 31613 - protein, 406 aa, Triticum aestivum
MSMNTTNCTAEPALLPQADAAELAGGADHPPRLSKRSARTGRGAAVAARHEEEGTDDEWLMYLEPAKLQVFDHLEPWAEANVVPLLKPAEVAWQPTDLLPDLASLGTDGFHAACSDITARAAGLPDAHLVCLVGNMVTEEALPTYQSIPNRFEAVRDLTGSSGTAWARWIRGWSAEENRHGDVLNRYLFLSGRVDMRQVERTIHNLIQSGMVMNAARSPYHGFIYVAFQERATSISHGNTARRAKEYGDVALARICGAIAADEKRHELAYTRIVGKLFEIDPDGAVRALAYMMRRRIVMPASLMTDGRDGDLFAHYAAVAQQAGIYTASDYRSILEHLIKQWGVKELAAAELSDDGRRARDYVCALPQKIRRLEEKAHERSGQKTQPATSAPFSWIFDKPVNNTMG

SEQ ID NO: 31614 - DNA, 1122 bp, Triticum aestivum
ctcaaaaaccctagcctcctcctgctccctccttcctccatctccggcggcggcagcgacaaatttccgacaccatgaggccaccggcacgaggaggacgcggcgggaggggtttcggcggcaggagcgacggcggcggccgcgggggcaggggcttcggcggcaggagcgatggcggcggccgcgggggcaggggcggcaggggaggcaggacgcccaggggccgtggtggtcgtggcggcggtggaaggggaggggccggcatgaagggcggcagcaaggtggtcgtggtgccgcacaagcacgacggcgtcttcatcgccaaggccaaggaggacgcgctctgcaccaagaacatggtcgccggggagtccgtctacggcgagaagcgcgtctccgtccagaacgaggacggcaccaaggttgagtacagggtgtggaaccccttcaggtcaaagctggccgccgctgttcttggtggcgtcgacaacatctggattgctcctggtgctcgtgtgctgtatcttggtgctgcctctggaacgacagtgtctcatgtgtctgatattgttggaccgactgggttggtgtatgctgtggagttctcgcaccgcagtggcagggatcttgtcaacatggccaagaagaggaccaatgtgattcccatcatcgaggatgctaggcaccctgccaagtaccggatgttggtcggcatggttgatgttatcttctctgatgttgcacagcctgaccaggctaggatcttggcccttaatgcttcatacttcttgaagaatggtggtcactttgtcatttcaatcaaggccaactgtatcgactccacccaggcccctgaggccgtgtttgccgccgaagttgagaagctgaagcttgagcagttcaagccttcggagcaggtgaccctggagcccttcgagcgtgaccatgcctgcgttgtcggtggctacaggatgcctaagaagcccaaggcgacttgaaggaaatagttaatactttgttatgagggtctgtcgttaattagtactaggaacttaggtgttggtgataagcttagacaaagttggttctgtagctacttggtttatatcttggtgaatggct

SEQ ID NO: 31615 - protein, 307 aa, Triticum aestivum
MRPPARGGRGGRGFGGRSDGGGRGGRGFGGRSDGGGRGGRGGRGGRTPRGRGGRGGGGRGGAGMKGGSKVVVVPHKHDGVFIAKAKEDALCTKNMVAGESVYGEKRVSVQNEDGTKVEYRVWNPFRSKLAAAVLGGVDNIWIAPGARVLYLGAASGTTVSHVSDIVGPTGLVYAVEFSHRSGRDLVNMAKKRTNVIPIIEDARHPAKYRMLVGMVDVIFSDVAQPDQARILALNASYFLKNGGHFVISIKANCIDSTQAPEAVFAAEVEKLKLEQFKPSEQVTLEPFERDHACVVGGYRMPKKPKAT

SEQ ID NO: 31616 - protein, 244 aa, Triticum aestivum
MKGGSKVVVVPHKHDGVFIAKAKEDALCTKNMVAGESVYGEKRVSVQNEDGTKVEYRVWNPFRSKLAAAVLGGVDNIWIAPGARVLYLGAASGTTVSHVSDIVGPTGLVYAVEFSHRSGRDLVNMAKKRTNVIPIIEDARHPAKYRMLVGMVDVIFSDVAQPDQARILALNASYFLKNGGHFVISIKANCIDSTQAPEAVFAAEVEKLKLEQFKPSEQVTLEPFERDHACVVGGYRMPKKPKAT

SEQ ID NO: 31617 - protein, 213 aa, Triticum aestivum
MVAGESVYGEKRVSVQNEDGTKVEYRVWNPFRSKLAAAVLGGVDNIWIAPGARVLYLGAASGTTVSHVSDIVGPTGLVYAVEFSHRSGRDLVNMAKKRTNVIPIIEDARHPAKYRMLVGMVDVIFSDVAQPDQARILALNASYFLKNGGHFVISIKANCIDSTQAPEAVFAAEVEKLKLEQFKPSEQVTLEPFERDHACVVGGYRMPKKPKAT

SEQ ID NO: 31618 - DNA, 1875 bp, Triticum aestivum
aaaatccaaatctcatcgtcatccccccgcacccccaacccaacccctcccaccccacctccggcgaccggatcggcagggcgcgatggcgaacatcgacatggcggcggtgctggcggacatggaccgggacgcggcggcggacgcgcggacgccgcggaccaagctcgtgtgcacgctcggcccggcctcccgctccgtgcccatgctcgagaagctgctccgcgccgggatgaacgtcgcgcgcttcaacttctcccacggcacccacgagtaccacaaggagaccctcgacgccctccgccaggccatgcacaacaccggcatcctctgcgccgtcatgctcgacaccaagggacctgagattcgtactggatttttgaaggatggtaaaccaatcaaactgacaaagggtcaagaaatcactgtttccactgactacgatatcaagggcgacacgaacaccatctccatgagctacaagaaacttcctcaggatgtgaagcctgggcatgtcatactatgtgctgatggtaccatctccttgtctgttctgtcttgcgacccagcagctggaactgtcagatgtaggtgtgagaacactgcaatgcttggagagaggaagaattgtaatctgccaggaattgtcgtggaccttcctacgctgacggagaaggataaggaggacattttgggatggggtgtgcctaatgacattgacatgattgctttgtcatttgtccgcaaaggatcagatttggtgaccgtcaggcagcttcttggacagcatgcaaagcgcatcaagttaatgtcaaaggttgaaaaccaagagggcattgtaaactttgatgacattctgagggaaaccgatgcctttatggttgccagaggtgatcttggaatggagattccagttgagaagatattccttgcacagaaaatgatgatctacaagtgcaaccttgctggcaagcctgtggtcacagcgacccagatgcttgagtcaatgatcaagtccccgaggccaacccgtgccgaggctactgacgtcgcaaatgcggtgcttgatggaactgactgtgtcatgctcagtggtgaaagcgctgccggagcataccctgaggtggctgtgaagatcatggcgcgcatctgcgtggaggcggagtcttccctggacaacgacgccgtcttcaaggagatgatcaaggccgcgcccctcccgatgagcccgctggagtccctcgcgtcctcggccgtgcgaaccgccaacaaggccagggccactctgatcgtcgtcctgacccgtggcggcaccacggcgaagctggtggccaagtaccggcccagggtgccgatcctgtcggtggtcgtcccggtgctgacgaccgactcgttcgactggaccgtcagctccgagggccccgccaggcacagcctgatctacaggggcctgatcccgctcctcgccgagggctccgccaaggccaccgactcggagtcgacggaggagatcctccaggcggcgctcaagtcggccgtgaagaagcagctctgcaaggctggtgacgccgtcgtcgtcctgcaccgcatcggcgtcgcctccgtcatcaagatctgcaccgtcaagtgagcgccatcgccgggcgctcggcggcccttgctgccgtggcgaactctctgttcttgtggagacgaattgataatcgccgtaccgtccgttgcagtttgttgcatagatccgatccgagctggtaaattaggagggagaggactccgttaatatagagctcttttattattattaccgttggttgatatgatatgccccctgtagtatggtgtttggcaggtgtcatgcctgcacaaatttttctc

SEQ ID NO: 31619 - protein, 542 aa, Triticum aestivum
KSKSHRHPPAPPTQPLPPHLRRPDRQGAMANIDMAAVLADMDRDAAADARTPRTKLVCTLGPASRSVPMLEKLLRAGMNVARFNFSHGTHEYHKETLDALRQAMHNTGILCAVMLDTKGPEIRTGFLKDGKPIKLTKGQEITVSTDYDIKGDTNTISMSYKKLPQDVKPGHVILCADGTISLSVLSCDPAAGTVRCRCENTAMLGERKNCNLPGIVVDLPTLTEKDKEDILGWGVPNDIDMIALSFVRKGSDLVTVRQLLGQHAKRIKLMSKVENQEGIVNFDDILRETDAFMVARGDLGMEIPVEKIFLAQKMMIYKCNLAGKPVVTATQMLESMIKSPRPTRAEATDVANAVLDGTDCVMLSGESAAGAYPEVAVKIMARICVEAESSLDNDAVFKEMIKAAPLPMSPLESLASSAVRTANKARATLIVVLTRGGTTAKLVAKYRPRVPILSVVVPVLTTDSFDWTVSSEGPARHSLIYRGLIPLLAEGSAKATDSESTEEILQAALKSAVKKQLCKAGDAVVVLHRIGVASVIKICTVK

SEQ ID NO: 31620 - protein, 514 aa, Triticum aestivum
MANIDMAAVLADMDRDAAADARTPRTKLVCTLGPASRSVPMLEKLLRAGMNVARFNFSHGTHEYHKETLDALRQAMHNTGILCAVMLDTKGPEIRTGFLKDGKPIKLTKGQEITVSTDYDIKGDTNTISMSYKKLPQDVKPGHVILCADGTISLSVLSCDPAAGTVRCRCENTAMLGERKNCNLPGIVVDLPTLTEKDKEDILGWGVPNDIDMIALSFVRKGSDLVTVRQLLGQHAKRIKLMSKVENQEGIVNFDDILRETDAFMVARGDLGMEIPVEKIFLAQKMMIYKCNLAGKPVVTATQMLESMIKSPRPTRAEATDVANAVLDGTDCVMLSGESAAGAYPEVAVKIMARICVEAESSLDNDAVFKEMIKAAPLPMSPLESLASSAVRTANKARATLIVVLTRGGTTAKLVAKYRPRVPILSVVVPVLTTDSFDWTVSSEGPARHSLIYRGLIPLLAEGSAKATDSESTEEILQAALKSAVKKQLCKAGDAVVVLHRIGVASVIKICTVK

SEQ ID NO: 31621 - protein, 509 aa, Triticum aestivum
MAAVLADMDRDAAADARTPRTKLVCTLGPASRSVPMLEKLLRAGMNVARFNFSHGTHEYHKETLDALRQAMHNTGILCAVMLDTKGPEIRTGFLKDGKPIKLTKGQEITVSTDYDIKGDTNTISMSYKKLPQDVKPGHVILCADGTISLSVLSCDPAAGTVRCRCENTAMLGERKNCNLPGIVVDLPTLTEKDKEDILGWGVPNDIDMIALSFVRKGSDLVTVRQLLGQHAKRIKLMSKVENQEGIVNFDDILRETDAFMVARGDLGMEIPVEKIFLAQKMMIYKCNLAGKPVVTATQMLESMIKSPRPTRAEATDVANAVLDGTDCVMLSGESAAGAYPEVAVKIMARICVEAESSLDNDAVFKEMIKAAPLPMSPLESLASSAVRTANKARATLIVVLTRGGTTAKLVAKYRPRVPILSVVVPVLTTDSFDWTVSSEGPARHSLIYRGLIPLLAEGSAKATDSESTEEILQAALKSAVKKQLCKAGDAVVVLHRIGVASVIKICTVK

SEQ ID NO: 31622 - DNA, 1287 bp, Triticum aestivum
accgcggcccaacaatctcaccaaccggagcctagcaaactttcaacacgttggcccgctactcttctcctgtcctgtccaccagccgaaactcagagctccgagctccgcctctgactccacctccggccacggcgggcaccatggcgccaacggtggagatcaggaatctcaccttcacctacccgggaatcgacggcaagccgccgcccggagcaccgcccctcatcgaggacgtctgcttctccctcgaagccggtcagcgctgccttctcgtcggctccaacggcgcaggtaagacaacgatactgaagatactgggcgggaagcacatggtggatccgagcatggttggggtcctgggaaggtcggccttccacgacacggcgcttacctcctccggagacctctgctaccttggcggcgagtggaggcgcgatgttgcctttgccggctaccaggtgaatatacagatggacatttcggcagagaaaatgctatttggtgtcactggcgttgatcctcagagaagagatgagcttatcaagattttggatgttgaccttacctggcggatgcacaaggcatcagatggtcagaggagaagagtccagatttgcatgggacttctcaagccattcaaggttcttcttcttgatgagataacagttgatcttgatgtgttggcaagagcaaatctgttgacatatctaaagaaggaatgtgcggaacaaggtgcaacaattatctatgccacacatatcttcgatggcctggatgactggccaactcacattgtctatgttgctcatgggaagttgcaactagcgctgccattagaaaaggtgaaagaaatgagccagttatcgctcatgagaacagtagagcgctggctgaggaaagagagggacgaagacaggaggaagagaaaggagcggaaggagaaaggcctcccggcattcgacaaggtcattgaggggagcagagtagtgaacaacgggtgggcagcaggaaggctcacttcgacgatagccggggaagataacttttctttcagttcaaacagcgttcttcggtagtaatcccacactgcactttggttcttgagatgatgaataacagtcctatagcaccacactcgagggattttggcggtaacagcaacattcttgcacaaaaggaacagagaatttgacaaaccatgcacccctgctgcatgtatacgacaatgtactctgaatctatgatactgggcgtcgattattattgtttgattttttttctgcg

SEQ ID NO: 31623 - protein, 311 aa, Triticum aestivum
MAPTVEIRNLTFTYPGIDGKPPPGAPPLIEDVCFSLEAGQRCLLVGSNGAGKTTILKILGGKHMVDPSMVGVLGRSAFHDTALTSSGDLCYLGGEWRRDVAFAGYQVNIQMDISAEKMLFGVTGVDPQRRDELIKILDVDLTWRMHKASDGQRRRVQICMGLLKPFKVLLLDEITVDLDVLARANLLTYLKKECAEQGATIIYATHIFDGLDDWPTHIVYVAHGKLQLALPLEKVKEMSQLSLMRTVERWLRKERDEDRRKRKERKEKGLPAFDKVIEGSRVVNNGWAAGRLTSTIAGEDNFSFSSNSVLR

SEQ ID NO: 31624 - protein, 248 aa, Triticum aestivum
MVDPSMVGVLGRSAFHDTALTSSGDLCYLGGEWRRDVAFAGYQVNIQMDISAEKMLFGVTGVDPQRRDELIKILDVDLTWRMHKASDGQRRRVQICMGLLKPFKVLLLDEITVDLDVLARANLLTYLKKECAEQGATIIYATHIFDGLDDWPTHIVYVAHGKLQLALPLEKVKEMSQLSLMRTVERWLRKERDEDRRKRKERKEKGLPAFDKVIEGSRVVNNGWAAGRLTSTIAGEDNFSFSSNSVLR

SEQ ID NO: 31625 - protein, 243 aa, Triticum aestivum
MVGVLGRSAFHDTALTSSGDLCYLGGEWRRDVAFAGYQVNIQMDISAEKMLFGVTGVDPQRRDELIKILDVDLTWRMHKASDGQRRRVQICMGLLKPFKVLLLDEITVDLDVLARANLLTYLKKECAEQGATIIYATHIFDGLDDWPTHIVYVAHGKLQLALPLEKVKEMSQLSLMRTVERWLRKERDEDRRKRKERKEKGLPAFDKVIEGSRVVNNGWAAGRLTSTIAGEDNFSFSSNSVLR

SEQ ID NO: 31626 - DNA, 966 bp, Triticum aestivum
cacgaaaatcattttcgcaactctcggagcgcaccaccaccaacttcttctgcgcaaaaggagagaaatagagaaaccaccaccaaaccccaagagcgagctcggtgcgcgcgcgcgcgagagagagagagagagagagagagagagagagagagaaacagaggaggcggcgccgagcgagcgcgatcccctcctcctcccccgtcgcgtgatcatggccatggccgcctccagatcgctctgggcctcccgcgccgcctcctacctcaagatctccgccttccccagggccttctccaccgtgctgaaggatctgaagtatgctgaaacccatgaatgggtaaaggttgatggtgattccgcaaccgttgggattacagaccatgcccaggaccatttgggtgatgttgtatatgtggagctgccagaagttggcgcttctgtatctcagggaacaaactttggtgctgttgaaagtgtgaaggcaaccagtgacatcaactcgccggtgtctggagaggtcattgcagtgaatgacgaactactagagaaaccagcattggtcaatggagatccatatgagggcggctggatcatcaaggtcaaggtcagcgatgcaggtgagctcaactcactgatggacgacaagaagtactcaaaattctgcgaggaagaggacagcaagcattaagcatggtggattctgaaagagaatctgcgcttcgacactcataggtgtttgtcatgtgctgttgggcactttgtaccacctgctttctcagcccagaaaggatcaaaacatggaataaatggcatttgcctaccctacaagggcttgcgagatccgaaatctgtatatcactcgagttcctttttcttgttgccatggtttcatctctgatttaagctctgttctgattagttggtattcaaattctaaatgcatacgtactgatgatgctacac

SEQ ID NO: 31627 - protein, 229 aa, Triticum aestivum
TKIIFATLGAHHHQLLLRKRREIEKPPPNPKSELGARARERERERERERERETEEAAPSERDPLLLPRRVIMAMAASRSLWASRAASYLKISAFPRAFSTVLKDLKYAETHEWVKVDGDSATVGITDHAQDHLGDVVYVELPEVGASVSQGTNFGAVESVKATSDINSPVSGEVIAVNDELLEKPALVNGDPYEGGWIIKVKVSDAGELNSLMDDKKYSKFCEEEDSKH

SEQ ID NO: 31628 - protein, 158 aa, Triticum aestivum
MAMAASRSLWASRAASYLKISAFPRAFSTVLKDLKYAETHEWVKVDGDSATVGITDHAQDHLGDVVYVELPEVGASVSQGTNFGAVESVKATSDINSPVSGEVIAVNDELLEKPALVNGDPYEGGWIIKVKVSDAGELNSLMDDKKYSKFCEEEDSKH

SEQ ID NO: 31629 - protein, 156 aa, Triticum aestivum
MAASRSLWASRAASYLKISAFPRAFSTVLKDLKYAETHEWVKVDGDSATVGITDHAQDHLGDVVYVELPEVGASVSQGTNFGAVESVKATSDINSPVSGEVIAVNDELLEKPALVNGDPYEGGWIIKVKVSDAGELNSLMDDKKYSKFCEEEDSKH

SEQ ID NO: 31630 - DNA, 1753 bp, Triticum aestivum
cgaaatccgaattcccgaatcccccaggaaagccagcgaccccccctccctcctcccccgcaaccaccgtccaccggacccccggcgcccggcaccggcgaagcggcggcggcgaagatgagggagatcctgcacatccagggcgggcagtgcgggaaccagatcggggccaagttctgggaggtgatctgcgacgagcacgggatcgacgggacggggcggtacgcgggggactcggacctgcagctggagcggatcaacgtctactacaacgaggcgagcgggggacggttcgtgccccgcgccgtgctcatggacctcgagcccggcaccatggactcggtgcgctccggccccttcggccagatcttccgccccgacaacttcgtcttcggccagtccggcgccggcaacaactgggccaagggccactacaccgagggcgccgagctcatcgactccgtcctcgacgtcgtccgcaaggaggccgagaactgcgactgcctccagggattccaagtttgccattctttgggtggaggcactggatctgggatgggaacccttcttatttctaagattagggaggagtaccctgaccgaatgatgctgaccttctctgtcttcccgtcaccaaaggtctcagacaccgttgttgagccatacaatgctacactttccgttcaccaactcgttgagaacgctgatgagtgtatggtgcttgacaatgaagctttatacgacatatgcttccgcacgctaaagcttgccaccccttcctttggtgacctgaaccatcttatctctgctaccatgagcggtgtcacatgctgcctgaggttccctggacaactcaactctgatctccgcaagcttgctgttaatctcattccattcccacgtctccacttcttcatggttggcttcgcaccgctgacgtcgcgtgggtcacaaatgtaccgtgctctcaccgttcctgagctgactcagcaaatgtgggatgccaagaacatgatgtgcgccgcagacccccgccatggccgctacctcaccgcctccgcctgcttccgagggaagatgagcaccaaggaggtggacgagcagatgctcaacgtccagaacaagaactcgtcgtacttcgttgagtggatccccaacaacgtcaagtcaagcgtgtgcgacatgccgcccaggggcctgaagatggcgggcacctttgtcggcaactccacgtccatccaggagatgttccgcagggtgagcgagcagttcacggccatgttcaggaggaaggccttcttgcactggtacacgggcgagggcatggacgagatggagttcaccgaggccgagagcaacatgaacgacctcgtcgcagagtaccagcagtaccaggacgcgaccgctgaggaggagtacgacgaggaggaggaagaggagcgtgacgcgtagtagtggcgatcgcgctccgccagctatatgtcccccgcttcaggtctgtcgctgtgtccagtgagagtttgtggtttcctcctgtggcttggatgagtcgaggttgcgtcttgtactccgttttgtaatttgctacggctagtagtgcgttgcagtgtgtcttgttccgcatctatcctttggtcggtcggtcggtccatagctgacggtggcctgaactgtcgagtgctctccctgagctggtcgtcgtccccttgtaagttctgacaattattattgttagtcgttcgcttcagccccc

SEQ ID NO: 31631 - protein, 483 aa, Triticum aestivum
RNPNSRIPQESQRPPLPPPPQPPSTGPPAPGTGEAAAAKMREILHIQGGQCGNQIGAKFWEVICDEHGIDGTGRYAGDSDLQLERINVYYNEASGGRFVPRAVLMDLEPGTMDSVRSGPFGQIFRPDNFVFGQSGAGNNWAKGHYTEGAELIDSVLDVVRKEAENCDCLQGFQVCHSLGGGTGSGMGTLLISKIREEYPDRMMLTFSVFPSPKVSDTVVEPYNATLSVHQLVENADECMVLDNEALYDICFRTLKLATPSFGDLNHLISATMSGVTCCLRFPGQLNSDLRKLAVNLIPFPRLHFFMVGFAPLTSRGSQMYRALTVPELTQQMWDAKNMMCAADPRHGRYLTASACFRGKMSTKEVDEQMLNVQNKNSSYFVEWIPNNVKSSVCDMPPRGLKMAGTFVGNSTSIQEMFRRVSEQFTAMFRRKAFLHWYTGEGMDEMEFTEAESNMNDLVAEYQQYQDATAEEEYDEEEEEERDA

SEQ ID NO: 31632 - protein, 444 aa, Triticum aestivum
MREILHIQGGQCGNQIGAKFWEVICDEHGIDGTGRYAGDSDLQLERINVYYNEASGGRFVPRAVLMDLEPGTMDSVRSGPFGQIFRPDNFVFGQSGAGNNWAKGHYTEGAELIDSVLDVVRKEAENCDCLQGFQVCHSLGGGTGSGMGTLLISKIREEYPDRMMLTFSVFPSPKVSDTVVEPYNATLSVHQLVENADECMVLDNEALYDICFRTLKLATPSFGDLNHLISATMSGVTCCLRFPGQLNSDLRKLAVNLIPFPRLHFFMVGFAPLTSRGSQMYRALTVPELTQQMWDAKNMMCAADPRHGRYLTASACFRGKMSTKEVDEQMLNVQNKNSSYFVEWIPNNVKSSVCDMPPRGLKMAGTFVGNSTSIQEMFRRVSEQFTAMFRRKAFLHWYTGEGMDEMEFTEAESNMNDLVAEYQQYQDATAEEEYDEEEEEERDA

SEQ ID NO: 31633 - protein, 379 aa, Triticum aestivum
MDLEPGTMDSVRSGPFGQIFRPDNFVFGQSGAGNNWAKGHYTEGAELIDSVLDVVRKEAENCDCLQGFQVCHSLGGGTGSGMGTLLISKIREEYPDRMMLTFSVFPSPKVSDTVVEPYNATLSVHQLVENADECMVLDNEALYDICFRTLKLATPSFGDLNHLISATMSGVTCCLRFPGQLNSDLRKLAVNLIPFPRLHFFMVGFAPLTSRGSQMYRALTVPELTQQMWDAKNMMCAADPRHGRYLTASACFRGKMSTKEVDEQMLNVQNKNSSYFVEWIPNNVKSSVCDMPPRGLKMAGTFVGNSTSIQEMFRRVSEQFTAMFRRKAFLHWYTGEGMDEMEFTEAESNMNDLVAEYQQYQDATAEEEYDEEEEEERDA

SEQ ID NO: 31634 - DNA, 1510 bp, Triticum aestivum
acccaaactgctgctctttctccccggcccttgggacttgggagtgcgtgagagtgagggactcagcaaaaccctaattttcaccccaattcgccccttccaaaccctaaccctaatacgctcgatgttgtaatcccgccgcgtttgccatggctctagaggggcccgcggagcgacgggacgagggccagcagggagggatggcgaacgggaatggcgtggctccgccgccgtcgcgcatggccggccggccgttgggggcggctgcgtactctgacaggcggctgcgcctcaatccgaacacggagcacaagccgcaggactacaccgacgtgcgcggcgagtacgcgccagccgtgtacagcgccctggagcggcacctcccgcctagcctcctcgatgccgaccgtgatgtcaagctacacttcatgcgggacatactcgcgcgctattggccccatggcgagcgaaacaaggttcataggcacaaagaatacaggcagaagatagtccacctctataagccacttcatcaagaattatacagcatgcacccttcggctttcttcttaccaacattccttgaagcagtaagaaccaatacagaagaaagcattgcaagtataatgactgaaccaattcctggtgttttttcatttgctatgttacagcccaacttttgtgacatgctattggaggaggtagagaactttgaaaagtgggttcatgcaatgaaatttaagataatgaggccaaatacaatgaataaatatggtgctgtccttgatgattttggcctggaagctatgctgaatcagttcatggaggagttcatagctccaatttctaaagttttttaccctgaggttggtggaggaacattggactctcatcatgcttttgttgttgaatatgggaaagacagagatgttgaactaggtttccatgttgatgattctgaggtcacattaaatgtttgccttggcaagcaattctcaggcggtgaattatactttcgtggcattcgttgcgagaatcatgtgaactcagaaacacagcatgaggaaatgtatgattactctcatgttcctggacgagctgtacttcaccgtggccgtcatagacatggtgctagaccgacatcatcagggctcagaatgaatctgcttttgtggtgcagaagctccgtgttcagggagatgaagaaataccagatggatttttctagctggtgcggtgagtgccagcgtgaaaagacagagaggcagattcagtgcgtcaaagcgaccaagttggcatttcttaggggtgctggaggggcaatgatttaagtcatatttactgcatgtattttatgcaatcctgtattatattaaacatcctttgatcatttggaaacatctagtataattgttgtcaaatttccagctcgtatgtttgtcagtgtcattgcatcttatgtaaatctgaactttccttctgcattgccacataagccatggtttttact

SEQ ID NO: 31635 - protein, 393 aa, Triticum aestivum
MALEGPAERRDEGQQGGMANGNGVAPPPSRMAGRPLGAAAYSDRRLRLNPNTEHKPQDYTDVRGEYAPAVYSALERHLPPSLLDADRDVKLHFMRDILARYWPHGERNKVHRHKEYRQKIVHLYKPLHQELYSMHPSAFFLPTFLEAVRTNTEESIASIMTEPIPGVFSFAMLQPNFCDMLLEEVENFEKWVHAMKFKIMRPNTMNKYGAVLDDFGLEAMLNQFMEEFIAPISKVFYPEVGGGTLDSHHAFVVEYGKDRDVELGFHVDDSEVTLNVCLGKQFSGGELYFRGIRCENHVNSETQHEEMYDYSHVPGRAVLHRGRHRHGARPTSSGLRMNLLLWCRSSVFREMKKYQMDFSSWCGECQREKTERQIQCVKATKLAFLRGAGGAMI

SEQ ID NO: 31636 - protein, 376 aa, Triticum aestivum
MANGNGVAPPPSRMAGRPLGAAAYSDRRLRLNPNTEHKPQDYTDVRGEYAPAVYSALERHLPPSLLDADRDVKLHFMRDILARYWPHGERNKVHRHKEYRQKIVHLYKPLHQELYSMHPSAFFLPTFLEAVRTNTEESIASIMTEPIPGVFSFAMLQPNFCDMLLEEVENFEKWVHAMKFKIMRPNTMNKYGAVLDDFGLEAMLNQFMEEFIAPISKVFYPEVGGGTLDSHHAFVVEYGKDRDVELGFHVDDSEVTLNVCLGKQFSGGELYFRGIRCENHVNSETQHEEMYDYSHVPGRAVLHRGRHRHGARPTSSGLRMNLLLWCRSSVFREMKKYQMDFSSWCGECQREKTERQIQCVKATKLAFLRGAGGAMI

SEQ ID NO: 31637 - protein, 363 aa, Triticum aestivum
MAGRPLGAAAYSDRRLRLNPNTEHKPQDYTDVRGEYAPAVYSALERHLPPSLLDADRDVKLHFMRDILARYWPHGERNKVHRHKEYRQKIVHLYKPLHQELYSMHPSAFFLPTFLEAVRTNTEESIASIMTEPIPGVFSFAMLQPNFCDMLLEEVENFEKWVHAMKFKIMRPNTMNKYGAVLDDFGLEAMLNQFMEEFIAPISKVFYPEVGGGTLDSHHAFVVEYGKDRDVELGFHVDDSEVTLNVCLGKQFSGGELYFRGIRCENHVNSETQHEEMYDYSHVPGRAVLHRGRHRHGARPTSSGLRMNLLLWCRSSVFREMKKYQMDFSSWCGECQREKTERQIQCVKATKLAFLRGAGGAMI

SEQ ID NO: 31638 - DNA, 1438 bp, Triticum aestivum
ctacaaaacacacgccaccaccctattcctgcctctccactcctcccctctcccctcctcttctcttctctccactgcccaacttttgctatagacaagaaagaacctaagctaggtagctttcctccagagcagagcaatggccatgcatcctcttgcccaggggcacccgcaagcctggccatggggggtagccatgtacacgaacatacactaccaccaccagtacgagagagagcacctgttcgagaaatcctttacgcccagtgacgtgggcaagctcaacaggctggtgatccccaagcagcacgcggagaggtacttccccctcaacggcggagactcccccggtgacaaggacctgctcctgtctttcgaggacgaggccggcaagccgtggcggttccggtactcgtactggacgagcagccagagctacgttctcaccaagggctggagcaggtacgtcaaggagaagcagcttgacgccggagacatcgtgcacttcgagagggtgcgcggccttggcacaggcgaccggctcttcatccactgcaggcgccgtggcgagagcgcgccgccaccacctgtccgcgtacctccgcccgctctgaacgccggggagcagcagccttggagcccgatgtgctatagcacatcaggatcataccctaccagccctgccaactcccatgcctatcgccgctccgtggagcaagatcacagcgagatgctgcatgcaggtgactcgccgagagaggcagacccaagagcagcacggcatcggggccgccgtcgagacgtctacggctgtttggcgtcaacctcgactgcggtccggagccagaggcagaggcagcaacgccaatgtacggctacacccaccagagcccctacgctgcagcagtggccacggtgccaacttactggggcagttcataagatggtgaggtctgaagccatgctcgagtatcctaacaaccagcagtgaaactagtcactactcccaccagccagcctactagctatgctactctggactgagtgacaggcttgaattgaactctggaagaggaagtggaagtggaagatcccttgtttcccgggcaatcttccttccatccacagagtgccctttttttttcctgttttctttcttctggtcttccagagaccctattcgatcacagtacggggcccttagcaggtggcaggtttcaggaaacgtcaggttgaaaaggtgagggaagtgggagagatagagggatggtgacacacatgaaaaacaaaagggcatgcttagcaagcatgcatgtatgtatgtgtcatctgtatgtactgggtccaagaacaaaccatgaagttgatgtatcctctccagcctcctcaagaaacaaagtcatatcccccatgggccatggccatggagattttgtcc

SEQ ID NO: 31639 - protein, 283 aa, Triticum aestivum
MAMHPLAQGHPQAWPWGVAMYTNIHYHHQYEREHLFEKSFTPSDVGKLNRLVIPKQHAERYFPLNGGDSPGDKDLLLSFEDEAGKPWRFRYSYWTSSQSYVLTKGWSRYVKEKQLDAGDIVHFERVRGLGTGDRLFIHCRRRGESAPPPPVRVPPPALNAGEQQPWSPMCYSTSGSYPTSPANSHAYRRSVEQDHSEMLHAGDSPREADPRAARHRGRRRDVYGCLASTSTAVRSQRQRQQRQCTATPTRAPTLQQWPRCQLTGAVHKMVRSEAMLEYPNNQQ

SEQ ID NO: 31640 - protein, 281 aa, Triticum aestivum
MHPLAQGHPQAWPWGVAMYTNIHYHHQYEREHLFEKSFTPSDVGKLNRLVIPKQHAERYFPLNGGDSPGDKDLLLSFEDEAGKPWRFRYSYWTSSQSYVLTKGWSRYVKEKQLDAGDIVHFERVRGLGTGDRLFIHCRRRGESAPPPPVRVPPPALNAGEQQPWSPMCYSTSGSYPTSPANSHAYRRSVEQDHSEMLHAGDSPREADPRAARHRGRRRDVYGCLASTSTAVRSQRQRQQRQCTATPTRAPTLQQWPRCQLTGAVHKMVRSEAMLEYPNNQQ

SEQ ID NO: 31641 - protein, 264 aa, Triticum aestivum
MYTNIHYHHQYEREHLFEKSFTPSDVGKLNRLVIPKQHAERYFPLNGGDSPGDKDLLLSFEDEAGKPWRFRYSYWTSSQSYVLTKGWSRYVKEKQLDAGDIVHFERVRGLGTGDRLFIHCRRRGESAPPPPVRVPPPALNAGEQQPWSPMCYSTSGSYPTSPANSHAYRRSVEQDHSEMLHAGDSPREADPRAARHRGRRRDVYGCLASTSTAVRSQRQRQQRQCTATPTRAPTLQQWPRCQLTGAVHKMVRSEAMLEYPNNQQ

SEQ ID NO: 31642 - DNA, 1374 bp, Triticum aestivum
acacaccactccttcccctcccctgatctccccgccgcgccgatccccccaccagcgcagcagccatggcgaccgcctacaacctccggtcccgcgacgagccggacgacttcgacgagttcgactccacgccctacggcggcggctacgacctcttcgtcaccttcggccgcccgctcccgccctccgacgagacctgctacccctgctccgccccctccacctcctacgacgcgccccactacgccgccgaggagccctccccctacgcccaccaccagaagccgcagcccgcctacggcttccgcccccagaacgagcagcagcagcagccttcctacggccgcgaggacgacgactccggctacgtatccaagcccaagcccaagccccagcccgcgtacggcttccgcccccaggcggaggaggagcagcgcccgtcctacggcggcggcggggaggaggatgactccggctacggatccaagccgcagcccgcctacggcttccgcccccagcaggaggagcagccggcctacggctccggctacgggtccaagccccagcgctcccaggaggacacctacggatctggctacggccggaagccgcagcaggaggagcccgcctacgggtccgggtacggctccggctacgggaggaagccgcaggccgaggagagctacggatctgggtacgggaacacgacgcagccggaggagggctacggctccggctacgggtccaagccgcaggtggagcagacctacggcgggtcggagtacggctctgggtacggaaggaagccgcaggtggaggagagctatgggtcggggtacggaagcaggccgcaggggggagaggagtatggtagtgctgggtatggtgggaggaagactgaggaggagggctatggtggttctgggtatggatctgggaggaaggtgcaagaggaggatgaaggtgcctatggctctggtgggtaccagaagcccaagccgtatggagaggagactcaggcttcgtatggtggtgggtatgagaagcccagctacggcggggggaactatggccgcaagaagcaggatgacgactctgatgatgagaagaagaaccgttacgcgaagcgcgatgactcggatgatgagaaggagcgttacgagaagcaccaccaccaccgccgccacaactacgacgactaagcatccagcatggtcttgacctgctgccatcgcccccacatctcgctactacacgaataaagattggtcttgtttcccttgttggtgccggatcattcccctcttttatgaacttgtatgactgcaacctaaagtgtgctatgtgggtggtttatatgtttgaactatctcc

SEQ ID NO: 31643 - protein, 406 aa, Triticum aestivum
THHSFPSPDLPAAPIPPPAQQPWRPPTTSGPATSRTTSTSSTPRPTAAATTSSSPSAARSRPPTRPATPAPPPPPPTTRPTTPPRSPPPTPTTRSRSPPTASAPRTSSSSSLPTAARTTTPATYPSPSPSPSPRTASAPRRRRSSARPTAAAGRRMTPATDPSRSPPTASAPSRRSSRPTAPATGPSPSAPRRTPTDLATAGSRSRRSPPTGPGTAPATGGSRRPRRATDLGTGTRRSRRRATAPATGPSRRWSRPTAGRSTALGTEGSRRWRRAMGRGTEAGRRGERSMVVLGMVGGRLRRRAMVVLGMDLGGRCKRRMKVPMALVGTRSPSRMERRLRLRMVVGMRSPATAGGTMAARSRMTTLMMRRRTVTRSAMTRMMRRSVTRSTTTTAATTTTTKHPAWS

SEQ ID NO: 31644 - protein, 378 aa, Triticum aestivum
MATAYNLRSRDEPDDFDEFDSTPYGGGYDLFVTFGRPLPPSDETCYPCSAPSTSYDAPHYAAEEPSPYAHHQKPQPAYGFRPQNEQQQQPSYGREDDDSGYVSKPKPKPQPAYGFRPQAEEEQRPSYGGGGEEDDSGYGSKPQPAYGFRPQQEEQPAYGSGYGSKPQRSQEDTYGSGYGRKPQQEEPAYGSGYGSGYGRKPQAEESYGSGYGNTTQPEEGYGSGYGSKPQVEQTYGGSEYGSGYGRKPQVEESYGSGYGSRPQGGEEYGSAGYGGRKTEEEGYGGSGYGSGRKVQEEDEGAYGSGGYQKPKPYGEETQASYGGGYEKPSYGGGNYGRKKQDDDSDDEKKNRYAKRDDSDDEKERYEKHHHHRRHNYDD

SEQ ID NO: 31645 - protein, 251 aa, Triticum aestivum
MTPATDPSRSPPTASAPSRRSSRPTAPATGPSPSAPRRTPTDLATAGSRSRRSPPTGPGTAPATGGSRRPRRATDLGTGTRRSRRRATAPATGPSRRWSRPTAGRSTALGTEGSRRWRRAMGRGTEAGRRGERSMVVLGMVGGRLRRRAMVVLGMDLGGRCKRRMKVPMALVGTRSPSRMERRLRLRMVVGMRSPATAGGTMAARSRMTTLMMRRRTVTRSAMTRMMRRSVTRSTTTTAATTTTTKHPAWS

SEQ ID NO: 31646 - DNA, 1323 bp, Triticum aestivum
attcgactccacaccctcggttcacacacagtgatcagctcagctacagcctacagagcacagacccaaccccgggagacaacagagcacggcgaggatgctgctgaacccggcctcggaggcgatggtgctggacagcatcaggcagcacctcatggaggacacggcggctccggcgccggaggcgaggaggcagaggccggcctactgccgcagcgccagcttcgggagcctggtggccgaccagtggagcgagtcgctcccgttccgcgcggacgactccgacgacatggtcgtctacggcgcgctccgcgacgccttctcctgcggctggctccccgacggctccttcgccgccgtcaagccggagcccctcctgccttccccggactcctgctatgtcggcttcctcgagccggagacgcctccggccacgtccccgggcgggagcgaggaggaggccgccgcggcgttcatgggcgaggaggcggccgcggccgtggcgagggggaagcactaccgcggggtgaggcagcggccgtggggcaagttcgcggcggagatccgggacccggccaagaacggcgcccgcgtgtggctcggcacctacgacaccgccgaggacgccgccgtggcctacgaccgcgccgcgtaccgcatgcgcggctcccgcgcgctcctcaacttcccgctccgcatcggctccgagatcgccgccgcgcacgccgcggccgcggccgccggcgacaagcggccgtcgcccgagcccgcgacatcggactcgtcatcctcctcgtcctcctccgggtccccgaaaaggaggaagagaggcgaggccgcggccgcgtccatggccatggcgctggtgccgccgtcctcgcagttgagccggccggcccacgcgtggtaccccgccgtgccggcggagcaggtggccatggcgccgtgcgtgcagcagctggtcagctaggccccgctctccagcccccgggcgcacgatcgtgaaagacaatgcgcaagtgcagtggattcgccagcaagtgcatggacgcgacagcaacaggagcccgcctttcactgttgcacggtgcaaggtggtgatggcaatggagtgcgatacctatcgagcgagcaggcaaagcaaccttggcgacggctccatttggatagatatttggatatttgatggcaatggaagataagctctcggagcaactgggcgctgcaatttggtctggaacgatagttcctcctctggctgctcggtgcaactcgcccaagtgggtcaaagcgaaactgtgctagtatcgggttgtcgtggtt

SEQ ID NO: 31647 - protein, 334 aa, Triticum aestivum
IRLHTLGSHTVISSATAYRAQTQPRETTEHGEDAAEPGLGGDGAGQHQAAPHGGHGGSGAGGEEAEAGLLPQRQLREPGGRPVERVAPVPRGRLRRHGRLRRAPRRLLLRLAPRRLLRRRQAGAPPAFPGLLLCRLPRAGDASGHVPGRERGGGRRGVHGRGGGRGRGEGEALPRGEAAAVGQVRGGDPGPGQERRPRVARHLRHRRGRRRGLRPRRVPHARLPRAPQLPAPHRLRDRRRARRGRGRRRQAAVARARDIGLVILLVLLRVPEKEEERRGRGRVHGHGAGAAVLAVEPAGPRVVPRRAGGAGGHGAVRAAAGQLGPALQPPGARS

SEQ ID NO: 31648 - protein, 290 aa, Triticum aestivum
MLLNPASEAMVLDSIRQHLMEDTAAPAPEARRQRPAYCRSASFGSLVADQWSESLPFRADDSDDMVVYGALRDAFSCGWLPDGSFAAVKPEPLLPSPDSCYVGFLEPETPPATSPGGSEEEAAAAFMGEEAAAAVARGKHYRGVRQRPWGKFAAEIRDPAKNGARVWLGTYDTAEDAAVAYDRAAYRMRGSRALLNFPLRIGSEIAAAHAAAAAAGDKRPSPEPATSDSSSSSSSSGSPKRRKRGEAAAASMAMALVPPSSQLSRPAHAWYPAVPAEQVAMAPCVQQLVS

SEQ ID NO: 31649 - protein, 281 aa, Triticum aestivum
MVLDSIRQHLMEDTAAPAPEARRQRPAYCRSASFGSLVADQWSESLPFRADDSDDMVVYGALRDAFSCGWLPDGSFAAVKPEPLLPSPDSCYVGFLEPETPPATSPGGSEEEAAAAFMGEEAAAAVARGKHYRGVRQRPWGKFAAEIRDPAKNGARVWLGTYDTAEDAAVAYDRAAYRMRGSRALLNFPLRIGSEIAAAHAAAAAAGDKRPSPEPATSDSSSSSSSSGSPKRRKRGEAAAASMAMALVPPSSQLSRPAHAWYPAVPAEQVAMAPCVQQLVS

SEQ ID NO: 31650 - DNA, 1349 bp, Triticum aestivum
actctgcatctcaacgggtttggttttgttcgcgttataaatgacgcccactgcctggcgtaaggaagccacaagccccactcaagctagcttcacctcaagctcgagcttcacttgagccccaaaaatggcgagcagctcactagtagtcctggccgtcctggccaccgtggccgcgctgctgctctctccggccatgcccctacccgtcttcaccggcgactcctccccgggcttccacgcggcgtcgtgcccgcagctggacggcatcgtgtggtcgtccgtggaggcggcgctgcggcaggaggtggcggtggcggcgggcatgctccgcctctacttccacgactgcttcccgcagggctgcgacgcctccatcctcctcaacaccaccgccgcccgcgagaccgctctcggacccaacctcagcatccagccgcgcgccatgcagctcatcgagtccatccgcgccagggcgcacgccgtttgcgggcccgtcgtctcctgcgccgacatcaccctgctcgccacccgcgacatcatcgtcatctccggcgggccctggttcaacgtgccgcagggcaacctcgacagcctcgccccggcgtcgcaggacaaggtgttcgacctcccggcgcctgacacggccagcgtggcgacgctcgtgaactccttcgccaccaggggcctcggcgacgtggccgacctcgtggcgctctccggcgcgcacaccatcgggcggtcgcagtgcggcagcttcgtcgaccggtccaagcgcgccgacgacaccttctcgaggaagctggcggccaactgcagcaagcacccggagcggctgcagaacctggacgtgatcaccccggacctgttcgacaacgcgtactacaaggcgctggggttcaaccagggcgtgttcacctccgacatggccctcgtgaagaacaagaccaccgcgcccatcgtgaagcggttcgccgagagcaaggacgccttcttcgggcagttcgccaggtccatggagaagctcgcgagggtgcccaaaccggccggcaacgtgggcgagatccggcgcttcagctgcttcaggaccaacgcccagcgcgccgacgctgcaaccgtggacgccgccggcaaggaggaggaggagggcttcgccgcttccgcttgatctgatggtacggtcaagtgcgtacgggcgcaagatggtcgtcggcaggcaggctagcaggtacccgtgcgttgtgttagcgtgcatgcacggcatggccgtaggccatagccaatcgtgtttgagttgtcggcatgcttcctttttctgcgtgtagcaataaagagacagagatttcgac

SEQ ID NO: 31651 - protein, 346 aa, Triticum aestivum
MASSSLVVLAVLATVAALLLSPAMPLPVFTGDSSPGFHAASCPQLDGIVWSSVEAALRQEVAVAAGMLRLYFHDCFPQGCDASILLNTTAARETALGPNLSIQPRAMQLIESIRARAHAVCGPVVSCADITLLATRDIIVISGGPWFNVPQGNLDSLAPASQDKVFDLPAPDTASVATLVNSFATRGLGDVADLVALSGAHTIGRSQCGSFVDRSKRADDTFSRKLAANCSKHPERLQNLDVITPDLFDNAYYKALGFNQGVFTSDMALVKNKTTAPIVKRFAESKDAFFGQFARSMEKLARVPKPAGNVGEIRRFSCFRTNAQRADAATVDAAGKEEEEGFAASA

SEQ ID NO: 31652 - protein, 323 aa, Triticum aestivum
MPLPVFTGDSSPGFHAASCPQLDGIVWSSVEAALRQEVAVAAGMLRLYFHDCFPQGCDASILLNTTAARETALGPNLSIQPRAMQLIESIRARAHAVCGPVVSCADITLLATRDIIVISGGPWFNVPQGNLDSLAPASQDKVFDLPAPDTASVATLVNSFATRGLGDVADLVALSGAHTIGRSQCGSFVDRSKRADDTFSRKLAANCSKHPERLQNLDVITPDLFDNAYYKALGFNQGVFTSDMALVKNKTTAPIVKRFAESKDAFFGQFARSMEKLARVPKPAGNVGEIRRFSCFRTNAQRADAATVDAAGKEEEEGFAASA

SEQ ID NO: 31653 - protein, 280 aa, Triticum aestivum
MLRLYFHDCFPQGCDASILLNTTAARETALGPNLSIQPRAMQLIESIRARAHAVCGPVVSCADITLLATRDIIVISGGPWFNVPQGNLDSLAPASQDKVFDLPAPDTASVATLVNSFATRGLGDVADLVALSGAHTIGRSQCGSFVDRSKRADDTFSRKLAANCSKHPERLQNLDVITPDLFDNAYYKALGFNQGVFTSDMALVKNKTTAPIVKRFAESKDAFFGQFARSMEKLARVPKPAGNVGEIRRFSCFRTNAQRADAATVDAAGKEEEEGFAASA

SEQ ID NO: 31654 - DNA, 1242 bp, Triticum aestivum
gcatagctcacatcacatcaatacatcaccaccaccaccaccctcctctctcctctccctccctctctcctcgtagacaccttctccttctaggtctccttgcctgtgcaggctccagcacgtacactcaaggaccgacgacgacgatgcggcttagctgcaacggctgccgcgtgctgcggaagggctgcagcgaggactgcagcatccgcccctgcctgcagtggatcaagagccccgaggcgcaggccaacgccaccgtcttcctcgccaagttctacggccgcgcggggctcatgaacctcatcaacgccggcacggacgacagcctccgccccggcatcttccgctcgctcctctacgaggcctgcggccggatcgtcaaccccatatacggctccgtcggcctgctctggtccaacaactggcagatgtgccaggccgccgtcgaggccgtcctcagcggcaagcccatcgtccaggtctcctccgaggatgccgccgccgaccggacaccgccgctcaaggcgtacgacatccgccacgtctccacctcgccagccgccgacgggaggctccacaaggtcgccaagccgggtcgcacccgcttcaagcgcgcgtcctccgcctcgtcccaccacaacccgtccagcgactccaacaacaagcccaagcccaagccgcagcctcagacgcgggcgcccacggcggaggaggagctggatcgtcaacaccgcaaggagatggaggagggcgcgtcccagcgtgctccgagccacgaatcctccgacagccgacacgaggaccccgtggagccacactgccagcaagaggcgtccgcagacacggaggccgaggcggggtcgcacgtcagccaggcggagcaggagcaggagcagagcacagagccggccgcagagcacgcggaggaggtcgaaaaggaggaggacgaagaactagcgctcgagcttacgcttggattcgctcccgtcgcagtacggccggccggatttcacctgagcgtccggaccgcggcggagccggctttcgtcgggctccggttcctctaaaagcacatttaccttgtgaaaagaatatagagctatttgatggactcttttacctttaattggaaaaaaattaggtccgttagttcgtttttgtttcatggttgcaatgagtgtacagacaatagctccctcatggccaagatttttccaataaaaaatgtgttttgctgac

SEQ ID NO: 31655 - protein, 355 aa, Triticum aestivum
IAHITSIHHHHHHPPLSSPSLSPRRHLLLLGLLACAGSSTYTQGPTTTMRLSCNGCRVLRKGCSEDCSIRPCLQWIKSPEAQANATVFLAKFYGRAGLMNLINAGTDDSLRPGIFRSLLYEACGRIVNPIYGSVGLLWSNNWQMCQAAVEAVLSGKPIVQVSSEDAAADRTPPLKAYDIRHVSTSPAADGRLHKVAKPGRTRFKRASSASSHHNPSSDSNNKPKPKPQPQTRAPTAEEELDRQHRKEMEEGASQRAPSHESSDSRHEDPVEPHCQQEASADTEAEAGSHVSQAEQEQEQSTEPAAEHAEEVEKEEDEELALELTLGFAPVAVRPAGFHLSVRTAAEPAFVGLRFL

SEQ ID NO: 31656 - protein, 307 aa, Triticum aestivum
MRLSCNGCRVLRKGCSEDCSIRPCLQWIKSPEAQANATVFLAKFYGRAGLMNLINAGTDDSLRPGIFRSLLYEACGRIVNPIYGSVGLLWSNNWQMCQAAVEAVLSGKPIVQVSSEDAAADRTPPLKAYDIRHVSTSPAADGRLHKVAKPGRTRFKRASSASSHHNPSSDSNNKPKPKPQPQTRAPTAEEELDRQHRKEMEEGASQRAPSHESSDSRHEDPVEPHCQQEASADTEAEAGSHVSQAEQEQEQSTEPAAEHAEEVEKEEDEELALELTLGFAPVAVRPAGFHLSVRTAAEPAFVGLRFL

SEQ ID NO: 31657 - protein, 257 aa, Triticum aestivum
MNLINAGTDDSLRPGIFRSLLYEACGRIVNPIYGSVGLLWSNNWQMCQAAVEAVLSGKPIVQVSSEDAAADRTPPLKAYDIRHVSTSPAADGRLHKVAKPGRTRFKRASSASSHHNPSSDSNNKPKPKPQPQTRAPTAEEELDRQHRKEMEEGASQRAPSHESSDSRHEDPVEPHCQQEASADTEAEAGSHVSQAEQEQEQSTEPAAEHAEEVEKEEDEELALELTLGFAPVAVRPAGFHLSVRTAAEPAFVGLRFL

SEQ ID NO: 31658 - DNA, 1282 bp, Triticum aestivum
aacccaaacggcacgcccaaacccaaagccaagtcgcactcctcctcctatcctcttcctcgccgaggcggcgaccggccagcgccgcagcagcaaccccggccgccgccagctccacctccaccgcccgcgcgtctccgattcggcgaatttggggctgaggaaagaggaggagcgacttctctctgctctggtggttgcaacttcaggacaaggttttgagcttttgtctgtttccctgggatggatgccaagaagttcctgcagatggtcgaagacaagaagaagagactccttgagaagaaggaagccccactgaaatggcagcagaaactggaagcggcaattaaggccactgaagagaaggagaagaagctcaagtcaaaaaagcacaggaggcgaagctattcttcctcagagtctgacagtgaatccgagagcgacagtgatcggaaacacaggaagaggaaggaccgcaaaaggcacaggaaacatggccactctgactctgatggtgccaggaggcgcaagcacaggtcaaagaggaggagcttggactctagtgatgagagcgacagtgatgaatatgatagcgaatctgaagaagagcgcccaaggaagaagcactcgcacaggaggaagcatcaccgacactctccaaggtcagagtctgatgcttcagattacagcagcgatgatgatgagcggagatcaaccaggaaggaccacacaaggagccgcaggcgtcgccaccgatcattagacgatgaatctgaggacaagatcaggtcgaggcataggaagcgtcacagatcaagtgacgaggacaagccatcagattctgacatccataagcgtcacaggagccgctctatgtccttggatgatggtgctgctggtgagccagacaagatgaatgatggtaaggggtctcacaaaagccggcaccaccgccgccatcaccatcaccatcatgatcaccatggcaactctgctgaacccagtgacgggaagcaactcgtgtaagttgttaatgcctcagaacctgattggcgtcatcactgggctctgtgacgggaaggtttgccccagttggctagttgctgaatgaaagcatgtatctttcataatgttactgtctcggctctgctgcgacttctgaagcctgtacttgttgtactgaaaaatttggcgacaccagatgttatttccagcatttcctctgttgagacatggcttggttgctgatttggtggttaaacatgcctgtttcatttgctgc

SEQ ID NO: 31659 - protein, 260 aa, Triticum aestivum
MDAKKFLQMVEDKKKRLLEKKEAPLKWQQKLEAAIKATEEKEKKLKSKKHRRRSYSSSESDSESESDSDRKHRKRKDRKRHRKHGHSDSDGARRRKHRSKRRSLDSSDESDSDEYDSESEEERPRKKHSHRRKHHRHSPRSESDASDYSSDDDERRSTRKDHTRSRRRRHRSLDDESEDKIRSRHRKRHRSSDEDKPSDSDIHKRHRSRSMSLDDGAAGEPDKMNDGKGSHKSRHHRRHHHHHHDHHGNSAEPSDGKQLV

SEQ ID NO: 31660 - protein, 252 aa, Triticum aestivum
MVEDKKKRLLEKKEAPLKWQQKLEAAIKATEEKEKKLKSKKHRRRSYSSSESDSESESDSDRKHRKRKDRKRHRKHGHSDSDGARRRKHRSKRRSLDSSDESDSDEYDSESEEERPRKKHSHRRKHHRHSPRSESDASDYSSDDDERRSTRKDHTRSRRRRHRSLDDESEDKIRSRHRKRHRSSDEDKPSDSDIHKRHRSRSMSLDDGAAGEPDKMNDGKGSHKSRHHRRHHHHHHDHHGNSAEPSDGKQLV

SEQ ID NO: 31661 - DNA, 1565 bp, Triticum aestivum
gtgcccctcgcctccatcactcactctcacagccccccagctagctagtgccctctgcatctcgtgctcggagaacttagatcagcacagagcgagggtcgattagcagctgatcggcagatcatgggcgtggagggctgctgcaacaagaaggtgatggaggaggaggccctggtgaagaagatcaccggcctcgccgcggccatcggcgagctgccctcgctgagcccctcgccggcggtgaacgcgctcttcaccgagctggtgacgtcctgcatcccggcgagcaccgtcgacgtcgacgcgctgggcccggaggcgcaggagatgcgcgcccgcctcatccgcctctgcgccgacgccgagggccacctggaggcgcactactccgacctcctcgccgcgcacgacaacccgctcgaccacctcaccctcttcccctacttcaacaactacatcaagctcagccagctggagcacggcctcctcgcccgccacgtcccgggcccggccccggcccgcgtcgccttcctcggctccggcccgctgccgctcagctccctcgtgctcgccgcgcgccacctgcccgacgcctccttcgacaactacgacatctccggcgaggccaacgagcgcgccagccggctggtccgcaacgacgccgacgccggcgcgcgcatggcgttccgcacggcagacgtggccgacgtgacgaccgagctggcgggctacgacgtggtgttcctggcggcgctggtgggcatggcggccgaggagaaggcgcgcctggtggagcacctcgggaggcacatggcccccggcgcggcgctcgtggtgcggagcgcgcacggcgcgcgcgggttcctgtacccggtggtggaccccgaggagatccggcgaggcgggttcgaggtgctcaccgtgcaccacccggaggacgaggtgatcaactccgtcatcatcgcgcgcaaggcggcggcgccagcagccgtcgccgccgacggcgacgtgccggtgaacaacggcggcatgccggcccagtgcgcggtggcggtgagcagaccgtgcctgggctgcgcctgcgagctggggacgagggcgcaccagaagatgaaggagatggccatggaggagatggaggcgtaggccggccggcactccggcagacaccgtcaccgtcatcgcccagagcacggtgatgcatgaactcacccaccgattaatatttgcccgattaatcaccgaccgatacatacatgcatggtaataattggtttgtcctcatgcatggatggatggacgtggctacttatttaccataattattaatccttgcctgcgtatggctggctggattatttattttctaccgtaatcgtgccgtgtttgttttagcaatcgtctgacagctgctatatgcctccgggtttaacatagaggagggggatgatatgtgtcgtgttgtggtgtggtgagatcgagtcgagtcgagttgcctgcctgctagctgttgttgtaataagtgtttttgacactctatatgactcaagtgatccatcatcacc

SEQ ID NO: 31662 - protein, 340 aa, Triticum aestivum
MGVEGCCNKKVMEEEALVKKITGLAAAIGELPSLSPSPAVNALFTELVTSCIPASTVDVDALGPEAQEMRARLIRLCADAEGHLEAHYSDLLAAHDNPLDHLTLFPYFNNYIKLSQLEHGLLARHVPGPAPARVAFLGSGPLPLSSLVLAARHLPDASFDNYDISGEANERASRLVRNDADAGARMAFRTADVADVTTELAGYDVVFLAALVGMAAEEKARLVEHLGRHMAPGAALVVRSAHGARGFLYPVVDPEEIRRGGFEVLTVHHPEDEVINSVIIARKAAAPAAVAADGDVPVNNGGMPAQCAVAVSRPCLGCACELGTRAHQKMKEMAMEEMEA

SEQ ID NO: 31663 - protein, 329 aa, Triticum aestivum
MEEEALVKKITGLAAAIGELPSLSPSPAVNALFTELVTSCIPASTVDVDALGPEAQEMRARLIRLCADAEGHLEAHYSDLLAAHDNPLDHLTLFPYFNNYIKLSQLEHGLLARHVPGPAPARVAFLGSGPLPLSSLVLAARHLPDASFDNYDISGEANERASRLVRNDADAGARMAFRTADVADVTTELAGYDVVFLAALVGMAAEEKARLVEHLGRHMAPGAALVVRSAHGARGFLYPVVDPEEIRRGGFEVLTVHHPEDEVINSVIIARKAAAPAAVAADGDVPVNNGGMPAQCAVAVSRPCLGCACELGTRAHQKMKEMAMEEMEA

SEQ ID NO: 31664 - protein, 272 aa, Triticum aestivum
MRARLIRLCADAEGHLEAHYSDLLAAHDNPLDHLTLFPYFNNYIKLSQLEHGLLARHVPGPAPARVAFLGSGPLPLSSLVLAARHLPDASFDNYDISGEANERASRLVRNDADAGARMAFRTADVADVTTELAGYDVVFLAALVGMAAEEKARLVEHLGRHMAPGAALVVRSAHGARGFLYPVVDPEEIRRGGFEVLTVHHPEDEVINSVIIARKAAAPAAVAADGDVPVNNGGMPAQCAVAVSRPCLGCACELGTRAHQKMKEMAMEEMEA

SEQ ID NO: 31665 - DNA, 1161 bp, Triticum aestivum
atcagaccacagctgccgagttacttgacaagtactactggctacagtgcaagtatggctggggtctctaccaatgcagttgcactcgtcgcactcgtcttcgttcttctcacatatggctgctgcgcccagtcgccgctcaactacaccggctccttggctaaagcctccaaggctagctggtcatggctccctgccaaggccacatggtacggcgcgcctactggtgccggtcccgatgacaacggtggtgcttgcggctacaagcacactaaccagtacccgttcatgtccatgacttcctgcggcaacgaacccctgttcaaggacggcatgggctgcggcgcctgctaccggatacgatgcgtcaataacaaggcctgctccggcaagccggagacggtcatgatcaccgacatgaactactacccagtcgccaagtaccatttcgacctcagcggcacggcgttcggcgccatggcgaagcctggcccagaacgacaagctccgccacgccggcattatcgacatccagttccaaagggtgccatgcaatcatctgggattgaacatgaacttccacgtcgagcggggctccaaccccaactacctcgccgtgctggtggagttcgcgaaccgggagggcaccgtggtgcagatggacatcatggagtcaaggaacggccgcccgacggggtactggacggcgctgcgccattcgtggggcgccatctggcggatggactccagccgccggctgcagggccccttctctctccgcatccgcagcgaatccggcaagacgctggtggccaaacaagtcatcccggccaactggaagcccgacacaaactaccgttccaacgtccagttccgttgatcgctccgagcttccgatcgatcaacaaatacgtcgattgattcggtaccgtgtgaatgcaaagtatattgttgaattttactttcaaggtactagtatatgtttggaatggaaggaggctttagcatgggtagcctggcccgaaagcctaacatacaggccggacttctgtccagtggagtagtatccacgtgctacccagcccgctatcacaagattcacagctcgaaatctaatctattgtaattaatcaggtttatccatatacattatggggtacc

SEQ ID NO: 31666 - protein, 306 aa, Triticum aestivum
IRPQLPSYLTSTTGYSASMAGVSTNAVALVALVFVLLTYGCCAQSPLNYTGSLAKASKASWSWLPAKATWYGAPTGAGPDDNGGACGYKHTNQYPFMSMTSCGNEPLFKDGMGCGACYRIRCVNNKACSGKPETVMITDMNYYPVAKYHFDLSGTAFGAMAKPGPERQAPPRRHYRHPVPKGAMQSSGIEHELPRRAGLQPQLPRRAGGVREPGGHRGADGHHGVKERPPDGVLDGAAPFVGRHLADGLQPPAAGPLLSPHPQRIRQDAGGQTSHPGQLEARHKLPFQRPVPLIAPSFRSINKYVD

SEQ ID NO: 31667 - protein, 288 aa, Triticum aestivum
MAGVSTNAVALVALVFVLLTYGCCAQSPLNYTGSLAKASKASWSWLPAKATWYGAPTGAGPDDNGGACGYKHTNQYPFMSMTSCGNEPLFKDGMGCGACYRIRCVNNKACSGKPETVMITDMNYYPVAKYHFDLSGTAFGAMAKPGPERQAPPRRHYRHPVPKGAMQSSGIEHELPRRAGLQPQLPRRAGGVREPGGHRGADGHHGVKERPPDGVLDGAAPFVGRHLADGLQPPAAGPLLSPHPQRIRQDAGGQTSHPGQLEARHKLPFQRPVPLIAPSFRSINKYVD

SEQ ID NO: 31668 - protein, 210 aa, Triticum aestivum
MSMTSCGNEPLFKDGMGCGACYRIRCVNNKACSGKPETVMITDMNYYPVAKYHFDLSGTAFGAMAKPGPERQAPPRRHYRHPVPKGAMQSSGIEHELPRRAGLQPQLPRRAGGVREPGGHRGADGHHGVKERPPDGVLDGAAPFVGRHLADGLQPPAAGPLLSPHPQRIRQDAGGQTSHPGQLEARHKLPFQRPVPLIAPSFRSINKYVD

SEQ ID NO: 31669 - DNA, 1403 bp, Triticum aestivum
atcaattattgtatccaaacagatctagaagagaagctgatcttctccttccttcggcaccctctccttccctgatccacctactactccttctctcttcctcctagatcctgatcgggtacgttacagacgcgctggccatggcttcccctcgccatcgccaggacggagacggaccacacgacggcgcgccgacgtacgccggcatggcgaagctggtgccggcgctcccgctcgagacgcggtgcccgccgttcgcgctgcggcgctacggcggcttctggctgccggaggcggccctgcggcgcggcctcccggcgttgcacgccgggttcgcgcccaggcgcgcagacgtgctcctcgccagctaccccaagtccggcaccacctggctcaaggccctcgccttcgccaccgtccgccgcgccgtgcacccgccttcttccatcgaccacccgctccgccgtcgcaacccgcaggactgcgtcccgttcctcgagttcgacttcgaccacggggacatggccgagctcgaggcgctcccttccccgcgggtgctcgccacgcacctcccctactcgctcctccccgaccgcgtcgtcgccgacgacggcgcgcggatcgtgtacgtctgccgggaccccaaggacgcgctggtctcctcgtggctcttcaccaggaaagcgtcgccgagtgtcggagtggactccgactcctactcgctgcaggaggcggccgagcttttccgcgagggccggtgcttctacggccctcagtgccggcacgtgctcgagtactgggacgcgagccgccgtcccttcggcggcggcgaggtgctgttcctgaggtacgaggagatgctgcgcgacccggcggggagtctgaagacgatggcggagttcatgggatgcggcttctccgaggaggaggtggcgcgaggggtggtggacgagatcgtggacctgtgcagcctggagaagctgaagaacatggaggccaacagggacgggcggcggaacgcgtcgggcatcaggagcgactctttcttccggaagggggtcgccggggactggagcagccacatgtcgccggagatggggaagatgctggacgaggccgtcgaggaggcactccaggggtctgggttcagcttctctggctgagctccggcgagcactggccagggcggtagtgcggggcaaacaacaatgtcattgcaaagcacggcttggaacacatgttttgtggcgatccatggatttaaggcgcgagtttgattccagtttcttgctcgaaagttgattgtcttgtaagttcaaacagtagtttgataactcattccaaatgtttctttcccaaagttccgaatcattccagttctacaatttcagtcctcattcagc

SEQ ID NO: 31670 - protein, 340 aa, Triticum aestivum
MASPRHRQDGDGPHDGAPTYAGMAKLVPALPLETRCPPFALRRYGGFWLPEAALRRGLPALHAGFAPRRADVLLASYPKSGTTWLKALAFATVRRAVHPPSSIDHPLRRRNPQDCVPFLEFDFDHGDMAELEALPSPRVLATHLPYSLLPDRVVADDGARIVYVCRDPKDALVSSWLFTRKASPSVGVDSDSYSLQEAAELFREGRCFYGPQCRHVLEYWDASRRPFGGGEVLFLRYEEMLRDPAGSLKTMAEFMGCGFSEEEVARGVVDEIVDLCSLEKLKNMEANRDGRRNASGIRSDSFFRKGVAGDWSSHMSPEMGKMLDEAVEEALQGSGFSFSG

SEQ ID NO: 31671 - protein, 318 aa, Triticum aestivum
MAKLVPALPLETRCPPFALRRYGGFWLPEAALRRGLPALHAGFAPRRADVLLASYPKSGTTWLKALAFATVRRAVHPPSSIDHPLRRRNPQDCVPFLEFDFDHGDMAELEALPSPRVLATHLPYSLLPDRVVADDGARIVYVCRDPKDALVSSWLFTRKASPSVGVDSDSYSLQEAAELFREGRCFYGPQCRHVLEYWDASRRPFGGGEVLFLRYEEMLRDPAGSLKTMAEFMGCGFSEEEVARGVVDEIVDLCSLEKLKNMEANRDGRRNASGIRSDSFFRKGVAGDWSSHMSPEMGKMLDEAVEEALQGSGFSFSG

SEQ ID NO: 31672 - protein, 213 aa, Triticum aestivum
MAELEALPSPRVLATHLPYSLLPDRVVADDGARIVYVCRDPKDALVSSWLFTRKASPSVGVDSDSYSLQEAAELFREGRCFYGPQCRHVLEYWDASRRPFGGGEVLFLRYEEMLRDPAGSLKTMAEFMGCGFSEEEVARGVVDEIVDLCSLEKLKNMEANRDGRRNASGIRSDSFFRKGVAGDWSSHMSPEMGKMLDEAVEEALQGSGFSFSG

SEQ ID NO: 31673 - DNA, 1660 bp, Triticum aestivum
gttccatttcatttctgtttcggaggaaaggtccagaagcgccgccgccgccgcagcagcgacacgctccctacggcatggcgccggcgtacctggcgaccatacccgcgctccggcgcgcggcgcggcgggccccggcggcgctgttctcgtcggggatcgtcgccggcgacaagcccgttctggtgcgcgatttcgtgaggtcggcgctctacgaccccaaccacggctacttctccaagcggtcggggcccgtcggcgtgctcgactccgccatccgcttccacaagctcgacgggaggaatgcgtacatgaagcatcttgataagctgtataagatgcatgatatctcttggtttactccagtggagctttttaagccatggtatgcctatgcaatagctgcgtcaatccttcgcacggctaatctttcagtcccattgaagatatatgaaatcggaggtggatccgggacatgtgcaaagtgcgtacttgattacatgatgttaaatgccccgccaaaagtctacaataatatgaaatacatctcagtagagattagctcctcccttgctgaaaagcagttggaaactgtcggtgaagtgcagagccatttgtcaaagttcacagtggagcatcgtgatgcaactgacgtagctggatggggcagcaaggatcctcaaccatgctgggtgctaatgcttgaggtacttgacaatctacctcatgaccttgtctattcaccagatcaggtctctccatggatggaggtgtggattgaaaaagtaaatggcagttcacaagtctgtgaggtctacaaaccattgcaagacccattagtttcctgctgcagtgagattgttggcatgaatgaagagaatccatctttgagagaaaaactatcattcgctgcaaaaggactcatctcaaaagtattcccgaagcctcggagagcttggttaccaaccggatgcttgaaactactggatactttgcatcaagctttgccaagtatgtcccttattgcttcagacttcagttatcttcctgatgttagcatacctggcgatagagctccattggtttcttcaaagaaggatgggaaaactttggatcatcccaactatcttgatgcacggggcgatgcagatatcttcttcccaaccgatttcttgctgttggagcagatcgaccaccactgctctggtttctcgaaagaccagatgaatcgtggtgcatttaaacctgtgaagagtaggagaacaatcatacttgattcggctgcctttatggaggagtttgggttgccactgaagacgaggaccaaagatggatacaatccacttcttgatgatttcaggaacacaaagttctatctcagtgtgcctacccacaacaagtagtagtccagcatgcctgcgtcgcttcttctgtttgccatgaggcgctgcattagacgccagtgaatacctaatatgcaactcagtaatcaatttgtcagagcaggttatttatgttttttttcctgtagaagaccgaaattcttaggttggtcaaatttgaggccacagttcaacttcaggcatgctgccgccttttctatgtttgattgatggcacggaagtgaataataccatttgaggccacagttcaattcact

SEQ ID NO: 31674 - protein, 466 aa, Triticum aestivum
SISFLFRRKGPEAPPPPQQRHAPYGMAPAYLATIPALRRAARRAPAALFSSGIVAGDKPVLVRDFVRSALYDPNHGYFSKRSGPVGVLDSAIRFHKLDGRNAYMKHLDKLYKMHDISWFTPVELFKPWYAYAIAASILRTANLSVPLKIYEIGGGSGTCAKCVLDYMMLNAPPKVYNNMKYISVEISSSLAEKQLETVGEVQSHLSKFTVEHRDATDVAGWGSKDPQPCWVLMLEVLDNLPHDLVYSPDQVSPWMEVWIEKVNGSSQVCEVYKPLQDPLVSCCSEIVGMNEENPSLREKLSFAAKGLISKVFPKPRRAWLPTGCLKLLDTLHQALPSMSLIASDFSYLPDVSIPGDRAPLVSSKKDGKTLDHPNYLDARGDADIFFPTDFLLLEQIDHHCSGFSKDQMNRGAFKPVKSRRTIILDSAAFMEEFGLPLKTRTKDGYNPLLDDFRNTKFYLSVPTHNK

SEQ ID NO: 31675 - protein, 441 aa, Triticum aestivum
MAPAYLATIPALRRAARRAPAALFSSGIVAGDKPVLVRDFVRSALYDPNHGYFSKRSGPVGVLDSAIRFHKLDGRNAYMKHLDKLYKMHDISWFTPVELFKPWYAYAIAASILRTANLSVPLKIYEIGGGSGTCAKCVLDYMMLNAPPKVYNNMKYISVEISSSLAEKQLETVGEVQSHLSKFTVEHRDATDVAGWGSKDPQPCWVLMLEVLDNLPHDLVYSPDQVSPWMEVWIEKVNGSSQVCEVYKPLQDPLVSCCSEIVGMNEENPSLREKLSFAAKGLISKVFPKPRRAWLPTGCLKLLDTLHQALPSMSLIASDFSYLPDVSIPGDRAPLVSSKKDGKTLDHPNYLDARGDADIFFPTDFLLLEQIDHHCSGFSKDQMNRGAFKPVKSRRTIILDSAAFMEEFGLPLKTRTKDGYNPLLDDFRNTKFYLSVPTHNK

SEQ ID NO: 31676 - protein, 363 aa, Triticum aestivum
MKHLDKLYKMHDISWFTPVELFKPWYAYAIAASILRTANLSVPLKIYEIGGGSGTCAKCVLDYMMLNAPPKVYNNMKYISVEISSSLAEKQLETVGEVQSHLSKFTVEHRDATDVAGWGSKDPQPCWVLMLEVLDNLPHDLVYSPDQVSPWMEVWIEKVNGSSQVCEVYKPLQDPLVSCCSEIVGMNEENPSLREKLSFAAKGLISKVFPKPRRAWLPTGCLKLLDTLHQALPSMSLIASDFSYLPDVSIPGDRAPLVSSKKDGKTLDHPNYLDARGDADIFFPTDFLLLEQIDHHCSGFSKDQMNRGAFKPVKSRRTIILDSAAFMEEFGLPLKTRTKDGYNPLLDDFRNTKFYLSVPTHNK

SEQ ID NO: 31677 - DNA, 1151 bp, Triticum aestivum
acagagtctcactcacagaaaagaaaccatcgtccagccacgcaggcgagcgatggcgagcctgagcgtgcctccggtgctcacgcctccgcgtgatgacgccgtcgctctccacaaggccttcaaagggttcggctgcgacagcacgacggtgactaacatacttgctcaccgcgactcggcgcagcgcgcgctcatcctgcacgagtacaaagccatataccatcaggatctctaccatcgcctagcaactgaactgagtggaaaccacaagaatgctatgctgctttgggtcctcgaccccgtggggcgtgacgcgaccatactgaaccaggctctcaacagcgacatcaccgacctgagagccgccacggaggtaatctgctccaggacgccgtcgcagctgcagatcatgaagcaaacctaccgcgcgaggttcggttgctacctcgagcatgacatcaccgaacgcacctacggtgatcatcagaagcttttgcttgcgtacctgggagtccggcgcaacgaaggcccggaagttgatccttcggcggtgacagacgacgcgagggagctgtatcaagccggcgagaagagggtgggcaccgatgagcgggccttcatccgcatcttcagcgaacgcagctgggcgcacatggtgtccgtggccaacgcttaccagcacatgtacgcccggtccctggagaaggccgtgaagagtgagacgacagggaacttccagttcgggctgctgaccatcctcaggtgcgccgacactccggcaaagtactttgccaaggtcctgcacaaggcgatgaaaggcctgggcaccagcaacgcggcgctcacacgggtggcggtgacgaggaccgaggttgacatgaagtacatcaaggcagagtaccacaacaagtacaaggggtcgctggctgaagctatccactccgagacgtcggggaactaccgaaccttcctcctctcactcgtcggctgggaccgctaattcgctcctgtcgatcccacgcatgcatggtggcgccaccaagactgccatgtgtgatccatcaataggcattggggcacaataatctgaaaaggagcaaaataagattgtattattcctgtggaatcaacacaattgttctatgtgc

SEQ ID NO: 31678 - protein, 333 aa, Triticum aestivum
QSLTHRKETIVQPRRRAMASLSVPPVLTPPRDDAVALHKAFKGFGCDSTTVTNILAHRDSAQRALILHEYKAIYHQDLYHRLATELSGNHKNAMLLWVLDPVGRDATILNQALNSDITDLRAATEVICSRTPSQLQIMKQTYRARFGCYLEHDITERTYGDHQKLLLAYLGVRRNEGPEVDPSAVTDDARELYQAGEKRVGTDERAFIRIFSERSWAHMVSVANAYQHMYARSLEKAVKSETTGNFQFGLLTILRCADTPAKYFAKVLHKAMKGLGTSNAALTRVAVTRTEVDMKYIKAEYHNKYKGSLAEAIHSETSGNYRTFLLSLVGWDR

SEQ ID NO: 31679 - protein, 316 aa, Triticum aestivum
MASLSVPPVLTPPRDDAVALHKAFKGFGCDSTTVTNILAHRDSAQRALILHEYKAIYHQDLYHRLATELSGNHKNAMLLWVLDPVGRDATILNQALNSDITDLRAATEVICSRTPSQLQIMKQTYRARFGCYLEHDITERTYGDHQKLLLAYLGVRRNEGPEVDPSAVTDDARELYQAGEKRVGTDERAFIRIFSERSWAHMVSVANAYQHMYARSLEKAVKSETTGNFQFGLLTILRCADTPAKYFAKVLHKAMKGLGTSNAALTRVAVTRTEVDMKYIKAEYHNKYKGSLAEAIHSETSGNYRTFLLSLVGWDR

SEQ ID NO: 31680 - protein, 240 aa, Triticum aestivum
MLLWVLDPVGRDATILNQALNSDITDLRAATEVICSRTPSQLQIMKQTYRARFGCYLEHDITERTYGDHQKLLLAYLGVRRNEGPEVDPSAVTDDARELYQAGEKRVGTDERAFIRIFSERSWAHMVSVANAYQHMYARSLEKAVKSETTGNFQFGLLTILRCADTPAKYFAKVLHKAMKGLGTSNAALTRVAVTRTEVDMKYIKAEYHNKYKGSLAEAIHSETSGNYRTFLLSLVGWDR

SEQ ID NO: 31681 - DNA, 639 bp, Triticum aestivum
atattatcaacaccgaatctcaaacacaaacacacacatctttcttcaaaaaaaaacttttgcttctcccaagaatctgaatctgcttcacttttgttcaaccatgatgaacatagacgatacgacatctccaatggcccacccgatcgttccatctcaacctccttccgaccaaacccaacaagatccaagttcgcccaatgaagcttcttctgttaccgacaagaaagatgatcaagcttttcccgaagagaaaccgaagcagaatcaagaagaagagagagtggacacagggagagagaagctaaagaagcaccggagagacgtcgccggaagagtttggatacctgacatatggggacaagaagagcttcttaaggactggatcgactgttcaacgtttgatacgtgtctagtccctgccggaatctcgtcggcacgtgcagctctcgtagacgaagctaggcgagctgcttcggcttctggtgggttacatagtcgttgcttgatctcccgctgaatttttatataatatcatatataaatgtggttcttgttcctcaataatatatgtaagccattattgatatattgttgatatagagtctttttcattttcccaataattatattggccct

SEQ ID NO: 31682 - protein, 172 aa, Triticum aestivum
YYQHRISNTNTHIFLQKKTFASPKNLNLLHFCSTMMNIDDTTSPMAHPIVPSQPPSDQTQQDPSSPNEASSVTDKKDDQAFPEEKPKQNQEEERVDTGREKLKKHRRDVAGRVWIPDIWGQEELLKDWIDCSTFDTCLVPAGISSARAALVDEARRAASASGGLHSRCLISR

SEQ ID NO: 31683 - protein, 138 aa, Triticum aestivum
MMNIDDTTSPMAHPIVPSQPPSDQTQQDPSSPNEASSVTDKKDDQAFPEEKPKQNQEEERVDTGREKLKKHRRDVAGRVWIPDIWGQEELLKDWIDCSTFDTCLVPAGISSARAALVDEARRAASASGGLHSRCLISR

SEQ ID NO: 31684 - protein, 137 aa, Triticum aestivum
MNIDDTTSPMAHPIVPSQPPSDQTQQDPSSPNEASSVTDKKDDQAFPEEKPKQNQEEERVDTGREKLKKHRRDVAGRVWIPDIWGQEELLKDWIDCSTFDTCLVPAGISSARAALVDEARRAASASGGLHSRCLISR

SEQ ID NO: 31685 - DNA, 1342 bp, Triticum aestivum
gacccccaacaacctccctcccccctcgtgcgcctctactaaaccgagtagtcggcaaggaggggcagcaggggagggagatctgactgacgaggcagggatgatggagagccagccgctgcaggccccgacggccgagccccacggcgccggagccgcggacgaccaggccggagccggagctccccccgccgtcgttcccgggaaggagttcacgcggacctgcaagggcctcgtcgtcgtgctcatcggcggctacgtgctgctgcaactcctcccatcctccctcaactacctcgccatcatccccgccaagacaattccctttgtatggaccgtcttcaccgccggttacatcgagcaagtcctcccaggggctattggcagttcccttggtcttctcttctgcgggaaggatattgagccagtctggggccgcaaggagttcttgaagttcattatcttgatcaactccatctgcggcatccttgcgttctgcattgctgttgcactgtactatgtcaccgggaaagagagcttccttgtaacgccactttctggcttccatggcgcccttgctggctttctggttggcctgaagcagctcttgccaaaccttgagctccccatgtgctttttctggaaaataaaggctaagtggatgccattctttgtcatgtgcttctcaactatcatggccttcattgtgccggattccatcaacttcctgccgactttgttgtctgggatgtacgtcagctggctttacctgagatacttccagaagaacccactgacaggacttaagggcgacccaagtgatgacttctccttccccagcttgttcccagatgccatgcggccagtcacagacccagttgctaatctgttcgaccggatgttgtgtgcgaggtctaagccttcagaaattgccctcccagttaccgatcctaccaaggcatcgagaagaagggagcgtggcgagagggttctcgaggaaaggatggccgcggatcatgcggctgacgccgaagccccagctcactctgcggaagattaagaattttcccctgtgctacgtcgtcatagtggccacggtcgccttgtaactcctcggatttgtgttctggggagcatattcatttttacagtggaccgatgatatgataatactttactgcccctcttttgtttccttgttttgagaatattggttggttaaattgtgttgtagttcctgattacagtgaggaaagaagaaaaagggtggcatccccttgcccccgatgttgtaatgtagaaaaagaatgacttgtcagtaacaatgtgaagtattttttcc

SEQ ID NO: 31686 - protein, 352 aa, Triticum aestivum
TPNNLPPPSCASTKPSSRQGGAAGEGDLTDEAGMMESQPLQAPTAEPHGAGAADDQAGAGAPPAVVPGKEFTRTCKGLVVVLIGGYVLLQLLPSSLNYLAIIPAKTIPFVWTVFTAGYIEQVLPGAIGSSLGLLFCGKDIEPVWGRKEFLKFIILINSICGILAFCIAVALYYVTGKESFLVTPLSGFHGALAGFLVGLKQLLPNLELPMCFFWKIKAKWMPFFVMCFSTIMAFIVPDSINFLPTLLSGMYVSWLYLRYFQKNPLTGLKGDPSDDFSFPSLFPDAMRPVTDPVANLFDRMLCARSKPSEIALPVTDPTKASRRRERGERVLEERMAADHAADAEAPAHSAED

SEQ ID NO: 31687 - protein, 319 aa, Triticum aestivum
MMESQPLQAPTAEPHGAGAADDQAGAGAPPAVVPGKEFTRTCKGLVVVLIGGYVLLQLLPSSLNYLAIIPAKTIPFVWTVFTAGYIEQVLPGAIGSSLGLLFCGKDIEPVWGRKEFLKFIILINSICGILAFCIAVALYYVTGKESFLVTPLSGFHGALAGFLVGLKQLLPNLELPMCFFWKIKAKWMPFFVMCFSTIMAFIVPDSINFLPTLLSGMYVSWLYLRYFQKNPLTGLKGDPSDDFSFPSLFPDAMRPVTDPVANLFDRMLCARSKPSEIALPVTDPTKASRRRERGERVLEERMAADHAADAEAPAHSAED

SEQ ID NO: 31688 - protein, 318 aa, Triticum aestivum
MESQPLQAPTAEPHGAGAADDQAGAGAPPAVVPGKEFTRTCKGLVVVLIGGYVLLQLLPSSLNYLAIIPAKTIPFVWTVFTAGYIEQVLPGAIGSSLGLLFCGKDIEPVWGRKEFLKFIILINSICGILAFCIAVALYYVTGKESFLVTPLSGFHGALAGFLVGLKQLLPNLELPMCFFWKIKAKWMPFFVMCFSTIMAFIVPDSINFLPTLLSGMYVSWLYLRYFQKNPLTGLKGDPSDDFSFPSLFPDAMRPVTDPVANLFDRMLCARSKPSEIALPVTDPTKASRRRERGERVLEERMAADHAADAEAPAHSAED

SEQ ID NO: 31689 - DNA, 1182 bp, Triticum aestivum
ccatggcggaagccgacgcccaaacccagagcaacgcgcagtcctcctcgccgccggcggaggcgtcgggcgagccgatccggccgccccaggtaggcgctccaagtgctgcttctcccacggttccactcatgtacccgatgctcgtgccagggatgttctcccagcagggtatggatgatcaggctcagggtccagggatatatgccatacaggagaatcagttcatgggggcgatgggaggttacgctccaaagacattcataccgctcgcttacaatataccaactgaaagcgtcggggcattggctggtgaagagcaaggacaggatgctaggcagcaaaatggccctcaaagacaagttgttgtgaggaggtttcactttgcttttcagcttgacctggctctgatcatcaagttagcagcagtggtctttttgtttagccaagaaggatcaaaacaaaggctgtttcttctcatattgtttgcgtccatgatttacctatatcaaactggagcgattacacctttcttaagatggctccagcgggcaggaggtggccgctcgtccgccacaggctcctgctaaccgtgctcctgtggctgctcagaatgatggcaacgatcaaccacctggtggaaacctcgcagatcctgcaaaccctgaccaagccgcggagaaccaggaaccaggagcagcagcgggcaacgagaaccagccaggtgcagagggagaagcaaaccggcgcagctggctcggcggcatcttgaaagaggtccagctggtcgttgtaggggttcgtcgcgtcgcttcttcctggttttcagcacaatgactaggtgaaagtcttcccgtggcggaatcgaatattggcaccgtaactgtttgttgtgacatagggaggaggaacaagcaaaggatatatataaagcgggttgaaataagacttttgttgcatatgcttgttataagattgactgaatgcagtgctgttgtacatcttgtttccgtttcaagtgctctagttctctttgatctttcatctggtatatgaagtatgaacttcttgaacctacgggcatccgtggcgcagctatcgtcactcaaagaacatgtaagtaattcattttttattatatggtgaatgaagattacagatatgagttccggagcgttgtag

SEQ ID NO: 31690 - protein, 195 aa, Triticum aestivum
MAEADAQTQSNAQSSSPPAEASGEPIRPPQVGAPSAASPTVPLMYPMLVPGMFSQQGMDDQAQGPGIYAIQENQFMGAMGGYAPKTFIPLAYNIPTESVGALAGEEQGQDARQQNGPQRQVVVRRFHFAFQLDLALIIKLAAVVFLFSQEGSKQRLFLLILFASMIYLYQTGAITPFLRWLQRAGGGRSSATGSC

SEQ ID NO: 31691 - protein, 152 aa, Triticum aestivum
MYPMLVPGMFSQQGMDDQAQGPGIYAIQENQFMGAMGGYAPKTFIPLAYNIPTESVGALAGEEQGQDARQQNGPQRQVVVRRFHFAFQLDLALIIKLAAVVFLFSQEGSKQRLFLLILFASMIYLYQTGAITPFLRWLQRAGGGRSSATGSC

SEQ ID NO: 31692 - protein, 149 aa, Triticum aestivum
MLVPGMFSQQGMDDQAQGPGIYAIQENQFMGAMGGYAPKTFIPLAYNIPTESVGALAGEEQGQDARQQNGPQRQVVVRRFHFAFQLDLALIIKLAAVVFLFSQEGSKQRLFLLILFASMIYLYQTGAITPFLRWLQRAGGGRSSATGSC

SEQ ID NO: 31693 - DNA, 942 bp, Triticum aestivum
cccactcacaccgagctttccttcgacccacatgctacacatcgcaaacagccacagtcctagttagcagccctcactcgaagacacacacacacacaccgaagcccagttgatcaggccaccatgagcaagggcaaggttcaccacgactggatcctccggcggtgctgcggttccatcgccgcctgcatcctcacgctcgccgtcctcgtcggcttcgtcgcgctcgtcatctacctcgccctgcacccctccaagccctccttctacctccaggacatccagctccgctccatcgacctcgccgatccggctctctcccttgacgtccaggtgaccatcgcgtcccggaacccgaacgaccgggtgggcatctactacaagaccctgcacgccttcaccacgtaccgcgacgagccggtgacggtgccggtgtcgctgccggcgatctaccaggggcacaaggaccagtcggtgtggtcgccggtgatgtccggggactcggtgccggtggcgccctacgtggcggacgccatgaagcaggacatcgcggccgggtacgtgctgctgcacgtgaaggtggacggccgcgtcaagtggaaggtcggcagctgggtctccggcggataccacatcttcgtcaactgccccgcgctgctctccgccagcggcggctccgtcggcggcgccttagccatgagcgccacggtgggcggcaagcagaccgtctcgctcaagttcacgcagccgtcctactgcaccgtcgacgtgtgacgcggacgcacgtcgtgtctcgccggggcgacgtcgagcgctcttaattatttgcaggagtaaatcttgtagagtagcaacaaccatgatatgatagtgtataattatcaccaatttccttaccctgtttttctgaatctgtgcagaataatgctactgcttttttat

SEQ ID NO: 31694 - protein, 216 aa, Triticum aestivum
MSKGKVHHDWILRRCCGSIAACILTLAVLVGFVALVIYLALHPSKPSFYLQDIQLRSIDLADPALSLDVQVTIASRNPNDRVGIYYKTLHAFTTYRDEPVTVPVSLPAIYQGHKDQSVWSPVMSGDSVPVAPYVADAMKQDIAAGYVLLHVKVDGRVKWKVGSWVSGGYHIFVNCPALLSASGGSVGGALAMSATVGGKQTVSLKFTQPSYCTVDV

SEQ ID NO: 31695 - DNA, 1735 bp, Triticum aestivum
  misc_feature (594)..(594): n is a, c, g, or t
tcaatttgggctctggtgtttaatttcgttagccttcttcctccgctcgtgtcgtcgtctccaccacttcctagccacgtctctgtcttcctctccctctcgttctccatctcgttacctctctgctgccaacccgacccaaggttgttcgtcgccagcatgggtctggcgaaggatggcgccgagatggaggagggcacattggagattggcatagagtataggactgtctccggtgtggcagggccattggttattttggacaaagtaaagggcccaaagtatcaggagattgtgaacatccgattgggagatggcaccactcgtcgtggtcaagtcctcgaagttgatggtgaaaaagctgttgtgcaggtatttgaaggtacttcagggatagacaacaagtatactactgtgcagttcacaggcgaggttttgaaaactcctgtctcacttgatatgcttggacgcatttttaatggttctggaaaacctattgataatggcccccctatattgcccgaggcttacttggatatttctggaagttctatcaacccaagtgagagaacctatccagaagagatgattcanacaggaatatccaccattgatgtcatgaactcgattgctcgagggcaaaaaattcctcttttctctgctgctggacttcctcataatgaaattgctgctcaaatttgtcgtcaagctggcctcgttaaaaggttggagcaaagcaagcatgcagcagaggaaggtgaagaagacaatttcgcaattgtgtttgctgctatgggagtaaacatggaaacggcacaatttttcaagcgtgacttcgaagaaaatggttcgatggagcgggtcacacttttcctgaatttggcaaatgaccccactattgagcgtattatcactcctcgaattgccctaacgactgctgaatatttggcatatgaatgtgggaagcatgttcttgtgattctgacagatatgagctcatatgccgatgcacttcgtgaggtctcagcagcacgagaagaggtacctggtaggcgtggttatcctgggtatatgtatactgatctggccaccatatatgagcgagctgggcgtatcgagggaagaaaaggatcaattactcaaattcctattcttacaatgcctaatgatgatatcactcatccaactcctgatcttacgggatacattaccgaagggcagatatatattgacagacagcttcataatagacagatatacccacccatcaacgtcctgccatctctttctcgtctgatgaagagtgctattggtgaaggtatgacacgccgggatcattcagatgtgtccaatcagctgtatgccaactacgccattgggaaggatgttcaagccatgaaagcagttgtcggagaggaggctctttcatctgaggacctgctctatttagaattcctcgacaagtttgagaggaaatttgtagcgcaaggagcatatgatactcggaacatttttcagtcacttgatctggcatggacattgctacgcatattcccccgtgaacttctccaccgtattcctgcgaagaccttggatcagttctacagcagagatgccacccattgatccattttgttcataaaaattcatttttttcatgatgaacagcttgaataagagaagaatccaaacttgtatcattttgctacgttatatagtcagatcctattcttcc

SEQ ID NO: 31696 - protein, 541 aa, Triticum aestivum
  misc_feature (198)..(198): Xaa can be any naturally occurring amino acid
SIWALVFNFVSLLPPLVSSSPPLPSHVSVFLSLSFSISLPLCCQPDPRLFVASMGLAKDGAEMEEGTLEIGIEYRTVSGVAGPLVILDKVKGPKYQEIVNIRLGDGTTRRGQVLEVDGEKAVVQVFEGTSGIDNKYTTVQFTGEVLKTPVSLDMLGRIFNGSGKPIDNGPPILPEAYLDISGSSINPSERTYPEEMIXTGISTIDVMNSIARGQKIPLFSAAGLPHNEIAAQICRQAGLVKRLEQSKHAAEEGEEDNFAIVFAAMGVNMETAQFFKRDFEENGSMERVTLFLNLANDPTIERIITPRIALTTAEYLAYECGKHVLVILTDMSSYADALREVSAAREEVPGRRGYPGYMYTDLATIYERAGRIEGRKGSITQIPILTMPNDDITHPTPDLTGYITEGQIYIDRQLHNRQIYPPINVLPSLSRLMKSAIGEGMTRRDHSDVSNQLYANYAIGKDVQAMKAVVGEEALSSEDLLYLEFLDKFERKFVAQGAYDTRNIFQSLDLAWTLLRIFPRELLHRIPAKTLDQFYSRDATH

SEQ ID NO: 31697 - protein, 488 aa, Triticum aestivum
  misc_feature (145)..(145): Xaa can be any naturally occurring amino acid
MGLAKDGAEMEEGTLEIGIEYRTVSGVAGPLVILDKVKGPKYQEIVNIRLGDGTTRRGQVLEVDGEKAVVQVFEGTSGIDNKYTTVQFTGEVLKTPVSLDMLGRIFNGSGKPIDNGPPILPEAYLDISGSSINPSERTYPEEMIXTGISTIDVMNSIARGQKIPLFSAAGLPHNEIAAQICRQAGLVKRLEQSKHAAEEGEEDNFAIVFAAMGVNMETAQFFKRDFEENGSMERVTLFLNLANDPTIERIITPRIALTTAEYLAYECGKHVLVILTDMSSYADALREVSAAREEVPGRRGYPGYMYTDLATIYERAGRIEGRKGSITQIPILTMPNDDITHPTPDLTGYITEGQIYIDRQLHNRQIYPPINVLPSLSRLMKSAIGEGMTRRDHSDVSNQLYANYAIGKDVQAMKAVVGEEALSSEDLLYLEFLDKFERKFVAQGAYDTRNIFQSLDLAWTLLRIFPRELLHRIPAKTLDQFYSRDATH

SEQ ID NO: 31698 - protein, 479 aa, Triticum aestivum
  misc_feature (136)..(136): Xaa can be any naturally occurring amino acid
MEEGTLEIGIEYRTVSGVAGPLVILDKVKGPKYQEIVNIRLGDGTTRRGQVLEVDGEKAVVQVFEGTSGIDNKYTTVQFTGEVLKTPVSLDMLGRIFNGSGKPIDNGPPILPEAYLDISGSSINPSERTYPEEMIXTGISTIDVMNSIARGQKIPLFSAAGLPHNEIAAQICRQAGLVKRLEQSKHAAEEGEEDNFAIVFAAMGVNMETAQFFKRDFEENGSMERVTLFLNLANDPTIERIITPRIALTTAEYLAYECGKHVLVILTDMSSYADALREVSAAREEVPGRRGYPGYMYTDLATIYERAGRIEGRKGSITQIPILTMPNDDITHPTPDLTGYITEGQIYIDRQLHNRQIYPPINVLPSLSRLMKSAIGEGMTRRDHSDVSNQLYANYAIGKDVQAMKAVVGEEALSSEDLLYLEFLDKFERKFVAQGAYDTRNIFQSLDLAWTLLRIFPRELLHRIPAKTLDQFYSRDATH

SEQ ID NO: 31699 - DNA, 1653 bp, Triticum aestivum
cagccaagcagcggcgtgcgcgctctcgctcgctcgctttctcgctaccttcctcagctgggccgagggcattagcggagccgcccttttctatttataattctctcctcctcaaccctacaagaatcgagagccgggataaagtcaatcatcagctcagcctcatcccgttgcgcgtgcgtgcgtgcgtgttgcctccctcctgtgattggattttgagagtttcttggctgtgtttgagaatggacggcgctccggtggccgagttccggccgacgatgacgcacggcggccgcttcctcctctacaacatattcggcaaccagttcgagatcacggccaagtaccagccgccgatcatgcccatcggccgcggcgcctacgggatcgtctgctcggtgatgaacttcgagacgagggagatggtggcaatcaagaagatcgcaaacgctttcgacaacaacatggacgccaagcgcacgctccgggagatcaagctcctgaggcacctcgaccacgagaacatagtaggcctccgagatgtgatcccgccggcgaccccgcagtccttcaacgacgtctacatcgccaccgagctcatggacacggacctccaccacatcatccgctccaaccaagaactctcggaagaacactgccagtacttcctgtaccagctgctgcgcggcctcaagtacatccactcggcgaacgtgatccaccgcgacctcaagccgagcaacctgctgctgaacgccaactgcgacctcaagatctgcgacttcggcctggcgcggccgtcgtccgagagcgacatgatgacggagtacgtggtcacgcggtggtaccgggccccggagctgctgctcaactccaccgactactccgcggccatcgacgtctggtccgtcggctgcatcttcatggagctcatcaaccgcgcgccgctcttcccggggagggaccacatgcaccagatgcggctcatcacggaggtgatcggcacccccaccgacgacgacctgggcttcatccggaacgaggacgccaggaggtacatgaggcacctgccgcagttccctcgccggtccttcccgggacagttccccaaggtgcagcccgccgcgctggacctcatcgagaggatgctcaccttcaacccgctgcagaggatcacagttgaagaggcgctggagcacccatacctagagcggcttcacgacgtcgccgacgagcccatctgcacggaccccttctccttcgacttcgaacagcacccactgacggaagaccagatgaagcagctcatattcaacgaagccctggagttgaaccccaacttccgatactagacgattcattcctagttacccccaatagtatgatttcgatgtaaactgtttgtaaataggagtaaggtcaaagaacatggtagattgcgcactgcatttgtttgtttgttctgtgtaagttgttgctgcttcttcagacctttgtccctcggctgtgcgaataaaaagtttggagcatgatttgagagcaaatcattctctagtttatgaagaaatggattttattaatcaggtggatgctcgcctgatattgagaatgcagtttatgtctatatatgaaaggcagcagtatttaggatcc

SEQ ID NO: 31700 - protein, 449 aa, Triticum aestivum
AKQRRARSRSLAFSLPSSAGPRALAEPPFSIYNSLLLNPTRIESRDKVNHQLSLIPLRVRACVLPPSCDWILRVSWLCLRMDGAPVAEFRPTMTHGGRFLLYNIFGNQFEITAKYQPPIMPIGRGAYGIVCSVMNFETREMVAIKKIANAFDNNMDAKRTLREIKLLRHLDHENIVGLRDVIPPATPQSFNDVYIATELMDTDLHHIIRSNQELSEEHCQYFLYQLLRGLKYIHSANVIHRDLKPSNLLLNANCDLKICDFGLARPSSESDMMTEYVVTRWYRAPELLLNSTDYSAAIDVWSVGCIFMELINRAPLFPGRDHMHQMRLITEVIGTPTDDDLGFIRNEDARRYMRHLPQFPRRSFPGQFPKVQPAALDLIERMLTFNPLQRITVEEALEHPYLERLHDVADEPICTDPFSFDFEQHPLTEDQMKQLIFNEALELNPNFRY

SEQ ID NO: 31701 - protein, 369 aa, Triticum aestivum
MDGAPVAEFRPTMTHGGRFLLYNIFGNQFEITAKYQPPIMPIGRGAYGIVCSVMNFETREMVAIKKIANAFDNNMDAKRTLREIKLLRHLDHENIVGLRDVIPPATPQSFNDVYIATELMDTDLHHIIRSNQELSEEHCQYFLYQLLRGLKYIHSANVIHRDLKPSNLLLNANCDLKICDFGLARPSSESDMMTEYVVTRWYRAPELLLNSTDYSAAIDVWSVGCIFMELINRAPLFPGRDHMHQMRLITEVIGTPTDDDLGFIRNEDARRYMRHLPQFPRRSFPGQFPKVQPAALDLIERMLTFNPLQRITVEEALEHPYLERLHDVADEPICTDPFSFDFEQHPLTEDQMKQLIFNEALELNPNFRY

SEQ ID NO: 31702 - protein, 357 aa, Triticum aestivum
MTHGGRFLLYNIFGNQFEITAKYQPPIMPIGRGAYGIVCSVMNFETREMVAIKKIANAFDNNMDAKRTLREIKLLRHLDHENIVGLRDVIPPATPQSFNDVYIATELMDTDLHHIIRSNQELSEEHCQYFLYQLLRGLKYIHSANVIHRDLKPSNLLLNANCDLKICDFGLARPSSESDMMTEYVVTRWYRAPELLLNSTDYSAAIDVWSVGCIFMELINRAPLFPGRDHMHQMRLITEVIGTPTDDDLGFIRNEDARRYMRHLPQFPRRSFPGQFPKVQPAALDLIERMLTFNPLQRITVEEALEHPYLERLHDVADEPICTDPFSFDFEQHPLTEDQMKQLIFNEALELNPNFRY

SEQ ID NO: 31703 - DNA, 2432 bp, Triticum aestivum
ctctctcttcttcctcttcctctccccttcaccggcctcctccttcctccgcttcctcctcacgcccccaccccacccgctacctcgaaagcccgaaccctaaacccacgcagaagcggcggcggcgcggcctccgcctgtcgcatgcccgctgcctcctagcagcctgggccgccggcgatcgccggagtcggggagggcggcgagctcccgtgcgtcggagagagatgggggcgggcgggaagggctggccggagacggcgagccgcggggtgaggacggcctggttcatggtggtcatggtggcgtcgctgctcgtcgcgtcggcgcccgtcgtggtggccgccggcgacgtggccgtcacgctctggctcgaggcgcgcctcggctgcccgcgctgccgcggcctccgggaccacctccgggggtacgccttccggagctcgctcgtggacataccgctcctctccgtccttcgctccttcgccatcacctgcgtatacctcgtgtgtgatacttctggtctctctcacggcccgtaccttggaaccacaaccttctgttccttggcttcgctgctcatcttgctcatgaaggcctgcgtttacagtccagctcaggacattgggcctgagctctcgccgtcattggcggaccacaggctaaatatgaagaagctatggggaatgcctgcgcttttcctgtcatccttgatctttgctctcggccattttgttgtcgcttacagaacgagctgcagggctcgacgaaagctgctcatccatcgcattgaccctgaatcgattctggcttacaagaatgcctttcctggatgctacaaggttcctcggtcgcccactccgcacagtgcgaaactttattcaaggagcgagagcgagacaaagagaaaaactcttgtgcacgatgacagggatattccaatcagttttcttgctgatagtgatagcatgttcactgcttgccaggggatcactgtacactacaaaatgtctgatccatcaagttgcatacctccagctcctgaattgtttccagaaactaatcatgatgctgtttcgtcaagcatttctcctagaagacagaggcatgagagcccaccaacagcttcctcgagtacccgtcgtcttttgcataggagctttagtcatcagtaccaccaaacatcgttatatgcaccattgttggtagaaccgctgacctctccaacggtgtcagatggcatcccctttctcagtctcgacgacgacagcttacaggtgtgttcgagacctatgggctttgatctcgaggctggagagcacgggaaatttgctgttgttttggtccatgggtttggagggggagtatttgcatggagacatgttagtaatttgcttgctcgacaagtgggttgcactgtgctggcctttgatcgccctggatgggggttaacatctcgacctcgcagaaaggactgggaagacaagaatttgccaaacccgtacgagcttgagtcacaggttgatcttctgatttcattttgcttagacatgggcttgggctcggtcattttagttggtcatgatgatggcggcttgctggcactgaggaccgcagaaaagttacgtgcttctggagattctaggaaggttgaagtgaagggagttgttcttataggcgtaagcttatcaagagaagtgattcctgcatttgctcgtatactcctgcatactcctctgaggaaaaagcacatggtgcgcccacttctacgtactgaaatcactcaggtgatcaatcgacgagcatggtttgatgctaccaagttgacaacagatgttcttaatctttacaaggctccactatatgtcgagggctgggacgaagcactccatgaagtaggccgtctttcattttccaccgtcctatcatcaaaaagagcaacggaactactaagatcggtggaagacctccctgttttggtggtagcaggctctgaggatgctcttgtttctctgaagtcagcacaaactatggcttcagaacttgtaaattctaggctagtaactatatcaggatgtggtcatctgccacacgaagaatgtgccaatgcattgctctcagctctttctccgttcatctcaaaattggtatcatcagatgattcattgcaaagattgtagcatacacctgtccatcttcccttttgaattttgctctcttctgtgccctctacattgagtagatgacctctagctgttgcgagttggtgtgagcccatgttagttgcaaagtagtggagcctgacccaaaatctcaagggtcctagagctcccctaatttattttttggtcatatgtatttctgttcctgatctgttcaattgagcaagttgaatctgtacagcccatgcctgcagtgttccagttcacgtc

SEQ ID NO: 31704 - protein, 725 aa, Triticum aestivum
LSSSSSSPLHRPPPSSASSSRPHPTRYLESPNPKPTQKRRRRGLRLSHARCLLAAWAAGDRRSRGGRRAPVRRREMGAGGKGWPETASRGVRTAWFMVVMVASLLVASAPVVVAAGDVAVTLWLEARLGCPRCRGLRDHLRGYAFRSSLVDIPLLSVLRSFAITCVYLVCDTSGLSHGPYLGTTTFCSLASLLILLMKACVYSPAQDIGPELSPSLADHRLNMKKLWGMPALFLSSLIFALGHFVVAYRTSCRARRKLLIHRIDPESILAYKNAFPGCYKVPRSPTPHSAKLYSRSESETKRKTLVHDDRDIPISFLADSDSMFTACQGITVHYKMSDPSSCIPPAPELFPETNHDAVSSSISPRRQRHESPPTASSSTRRLLHRSFSHQYHQTSLYAPLLVEPLTSPTVSDGIPFLSLDDDSLQVCSRPMGFDLEAGEHGKFAVVLVHGFGGGVFAWRHVSNLLARQVGCTVLAFDRPGWGLTSRPRRKDWEDKNLPNPYELESQVDLLISFCLDMGLGSVILVGHDDGGLLALRTAEKLRASGDSRKVEVKGVVLIGVSLSREVIPAFARILLHTPLRKKHMVRPLLRTEITQVINRRAWFDATKLTTDVLNLYKAPLYVEGWDEALHEVGRLSFSTVLSSKRATELLRSVEDLPVLVVAGSEDALVSLKSAQTMASELVNSRLVTISGCGHLPHEECANALLSALSPFISKLVSSDDSLQRL

SEQ ID NO: 31705 - protein, 650 aa, Triticum aestivum
MGAGGKGWPETASRGVRTAWFMVVMVASLLVASAPVVVAAGDVAVTLWLEARLGCPRCRGLRDHLRGYAFRSSLVDIPLLSVLRSFAITCVYLVCDTSGLSHGPYLGTTTFCSLASLLILLMKACVYSPAQDIGPELSPSLADHRLNMKKLWGMPALFLSSLIFALGHFVVAYRTSCRARRKLLIHRIDPESILAYKNAFPGCYKVPRSPTPHSAKLYSRSESETKRKTLVHDDRDIPISFLADSDSMFTACQGITVHYKMSDPSSCIPPAPELFPETNHDAVSSSISPRRQRHESPPTASSSTRRLLHRSFSHQYHQTSLYAPLLVEPLTSPTVSDGIPFLSLDDDSLQVCSRPMGFDLEAGEHGKFAVVLVHGFGGGVFAWRHVSNLLARQVGCTVLAFDRPGWGLTSRPRRKDWEDKNLPNPYELESQVDLLISFCLDMGLGSVILVGHDDGGLLALRTAEKLRASGDSRKVEVKGVVLIGVSLSREVIPAFARILLHTPLRKKHMVRPLLRTEITQVINRRAWFDATKLTTDVLNLYKAPLYVEGWDEALHEVGRLSFSTVLSSKRATELLRSVEDLPVLVVAGSEDALVSLKSAQTMASELVNSRLVTISGCGHLPHEECANALLSALSPFISKLVSSDDSLQRL

SEQ ID NO: 31706 - protein, 629 aa, Triticum aestivum
MVVMVASLLVASAPVVVAAGDVAVTLWLEARLGCPRCRGLRDHLRGYAFRSSLVDIPLLSVLRSFAITCVYLVCDTSGLSHGPYLGTTTFCSLASLLILLMKACVYSPAQDIGPELSPSLADHRLNMKKLWGMPALFLSSLIFALGHFVVAYRTSCRARRKLLIHRIDPESILAYKNAFPGCYKVPRSPTPHSAKLYSRSESETKRKTLVHDDRDIPISFLADSDSMFTACQGITVHYKMSDPSSCIPPAPELFPETNHDAVSSSISPRRQRHESPPTASSSTRRLLHRSFSHQYHQTSLYAPLLVEPLTSPTVSDGIPFLSLDDDSLQVCSRPMGFDLEAGEHGKFAVVLVHGFGGGVFAWRHVSNLLARQVGCTVLAFDRPGWGLTSRPRRKDWEDKNLPNPYELESQVDLLISFCLDMGLGSVILVGHDDGGLLALRTAEKLRASGDSRKVEVKGVVLIGVSLSREVIPAFARILLHTPLRKKHMVRPLLRTEITQVINRRAWFDATKLTTDVLNLYKAPLYVEGWDEALHEVGRLSFSTVLSSKRATELLRSVEDLPVLVVAGSEDALVSLKSAQTMASELVNSRLVTISGCGHLPHEECANALLSALSPFISKLVSSDDSLQRL

SEQ ID NO: 31707 - DNA, 1434 bp, Triticum aestivum
gaaccttccagaccgctcccgcgccccctcccctatttatcccctcaccccctcccccattcaccaccatctccacaccacacctcactcgcccacaatctcgaacaacggccgtcggatccatcatcatcggcagcggagcgattccatcgaccagctttctacagacggacatggggatgccggccgtgaggaggagggagagggacgcggaggcggagctcaacctgccccccggcttccgcttccaccccaccgacgacgagctcgtcgagcactacctctgccgcaaggcggcggggcagcgcctcccggtccccatcatcgtcgaggtcgacctctaccgcttcgacccctgggcgctccctgaccgcgccctcttcggcacccgcgagtggtacttcttcaccccccgcgaccgcaagtaccccaacggctcccgacccaaccgcgccgccggcaacggctactggaaggccaccggcgccgacaagcccgtcgcgccccgcggcgggcggaccatggggatcaagaaggccctcgtgttttacgcgggcaaggcgcctaagggggtcaagaccgactggatcatgcatgagtatcgcctcgccgacgccggccgcgccgccgccagcaagaagggctcgctcaggctggacgactgggtgctctgccggctctacaacaagaagaacgagtgggagaagatgcagctgcagcagcaaggggaagaggagacgatgatggagcccaaggcggagaacacggcctccgacatggtggtcacctcgcactcccactcgcagtcccagtcgcactcgcactcgtggggcgaggcgcgcacgccggagtcggagatcgtcgacaacgacccgtcgctgttccagcaggcgacggcggcggcgttccaggcccagagccccgcggccgccgcggcgcaccaggagatgatggccacgctgatggtgcccaagaaggaggcggcggacgaggccggcaggaacgacctcttcgtcgacctcagctacgacgacatccagagcatgtacaacggcctcgacatgatgccgcccggggacgacctgctctactcctccctcttcgcctccccccgtgtccgcgggagccagcccagcgccggcggcatgccggccccgttctaagcagagcaaagacagagaccgtcagagaccccgagatcgacagaagtggaatggacgacttcttggccgcgagcgagcgagaccgcggtgcagtgtaaatacagcataggaaacgggagggagggaggtggcgtcgtgtcgagagaagccggcgtcgtgccggggcgtgccgttgtacatggagagcccggcgccggggcctggccggctgggttgattcttttgttcttactaccttgtactctcaatgcggatgtagctctttcttctc

SEQ ID NO: 31708 - protein, 386 aa, Triticum aestivum
TFQTAPAPPPLFIPSPPPPFTTISTPHLTRPQSRTTAVGSIIIGSGAIPSTSFLQTDMGMPAVRRRERDAEAELNLPPGFRFHPTDDELVEHYLCRKAAGQRLPVPIIVEVDLYRFDPWALPDRALFGTREWYFFTPRDRKYPNGSRPNRAAGNGYWKATGADKPVAPRGGRTMGIKKALVFYAGKAPKGVKTDWIMHEYRLADAGRAAASKKGSLRLDDWVLCRLYNKKNEWEKMQLQQQGEEETMMEPKAENTASDMVVTSHSHSQSQSHSHSWGEARTPESEIVDNDPSLFQQATAAAFQAQSPAAAAAHQEMMATLMVPKKEAADEAGRNDLFVDLSYDDIQSMYNGLDMMPPGDDLLYSSLFASPRVRGSQPSAGGMPAPF

SEQ ID NO: 31709 - protein, 329 aa, Triticum aestivum
MGMPAVRRRERDAEAELNLPPGFRFHPTDDELVEHYLCRKAAGQRLPVPIIVEVDLYRFDPWALPDRALFGTREWYFFTPRDRKYPNGSRPNRAAGNGYWKATGADKPVAPRGGRTMGIKKALVFYAGKAPKGVKTDWIMHEYRLADAGRAAASKKGSLRLDDWVLCRLYNKKNEWEKMQLQQQGEEETMMEPKAENTASDMVVTSHSHSQSQSHSHSWGEARTPESEIVDNDPSLFQQATAAAFQAQSPAAAAAHQEMMATLMVPKKEAADEAGRNDLFVDLSYDDIQSMYNGLDMMPPGDDLLYSSLFASPRVRGSQPSAGGMPAPF

SEQ ID NO: 31710 - protein, 327 aa, Triticum aestivum
MPAVRRRERDAEAELNLPPGFRFHPTDDELVEHYLCRKAAGQRLPVPIIVEVDLYRFDPWALPDRALFGTREWYFFTPRDRKYPNGSRPNRAAGNGYWKATGADKPVAPRGGRTMGIKKALVFYAGKAPKGVKTDWIMHEYRLADAGRAAASKKGSLRLDDWVLCRLYNKKNEWEKMQLQQQGEEETMMEPKAENTASDMVVTSHSHSQSQSHSHSWGEARTPESEIVDNDPSLFQQATAAAFQAQSPAAAAAHQEMMATLMVPKKEAADEAGRNDLFVDLSYDDIQSMYNGLDMMPPGDDLLYSSLFASPRVRGSQPSAGGMPAPF

SEQ ID NO: 31711 - DNA, 1124 bp, Triticum aestivum
tcccaaatctgaccgcagccgcacgacgcacctacccaacccccagagcaccagcagccccgacctagcccagcccggcccctcgcgcgcccgcacagccggcctccaccgcgccgccgcgccgccgcgccgtggccgccgggcacctcccggtaggggagcggcgcctcgtttctttgatgcgccgtgaaggaattgggagcaagaagccgtgatgtttactccgcaggggaaaggatggaacggctggtccacgccgtctccagggaaccagcgggccggtggtggcgctccgcccgcatctgcgccccttggcaaggccaaagggacttcacagagagctgccgagctcgagcaggagttacatgaatatcaatacaatatggggctgctcttgattgagaaaaaagagtgggcagccaaatttgacgaagtcacccacgtgctgacacaaaaggaggagatcttaaagcgggaacaagctgcacatttgaatgctatatcagaatatgaaaggcgagaagaaaacatgcggaaatcactgggtgttgagaaacaatgtgtagctgatcttgaaaaggcactacgtgaaattcgatcagagatagctgaggttaagttcacgtctcagaaaaagatagctgatgctcattctcttgaggctaatttggaggaaaaatctttggagatcgaggggaagcttcatgctgcagatgcgaagcttgcggaggcaaaccgtaagaagtcacaagctgacagagatttagaggaggcagaagctcggcaacgtaggttggagaaggagaagctatattttgagactgagaggaaggcccgagagaagcaactcaaggagcaggaggaatctctgcaagactgggagaaaaagcttaaagaaagtcagaacagactcgttgatttgcagagatctgtaaatgacagagaggagagagcaaatgagaatgacaaactttgtaagataaaacaggaagaattggaggaggcaaagaagacagtggagtcaactaaaatcattttgaaaacaaaggaggatgatattgccaaaaggctaaatgaattacgctcacaagagaaggatgctgacgcaaagcacaagattttgg

SEQ ID NO: 31712 - protein, 303 aa, Triticum aestivum
MFTPQGKGWNGWSTPSPGNQRAGGGAPPASAPLGKAKGTSQRAAELEQELHEYQYNMGLLLIEKKEWAAKFDEVTHVLTQKEEILKREQAAHLNAISEYERREENMRKSLGVEKQCVADLEKALREIRSEIAEVKFTSQKKIADAHSLEANLEEKSLEIEGKLHAADAKLAEANRKKSQADRDLEEAEARQRRLEKEKLYFETERKAREKQLKEQEESLQDWEKKLKESQNRLVDLQRSVNDREERANENDKLCKIKQEELEEAKKTVESTKIILKTKEDDIAKRLNELRSQEKDADAKHKIL

SEQ ID NO: 31713 - protein, 247 aa, Triticum aestivum
MGLLLIEKKEWAAKFDEVTHVLTQKEEILKREQAAHLNAISEYERREENMRKSLGVEKQCVADLEKALREIRSEIAEVKFTSQKKIADAHSLEANLEEKSLEIEGKLHAADAKLAEANRKKSQADRDLEEAEARQRRLEKEKLYFETERKAREKQLKEQEESLQDWEKKLKESQNRLVDLQRSVNDREERANENDKLCKIKQEELEEAKKTVESTKIILKTKEDDIAKRLNELRSQEKDADAKHKIL

SEQ ID NO: 31714 - protein, 198 aa, Triticum aestivum
MRKSLGVEKQCVADLEKALREIRSEIAEVKFTSQKKIADAHSLEANLEEKSLEIEGKLHAADAKLAEANRKKSQADRDLEEAEARQRRLEKEKLYFETERKAREKQLKEQEESLQDWEKKLKESQNRLVDLQRSVNDREERANENDKLCKIKQEELEEAKKTVESTKIILKTKEDDIAKRLNELRSQEKDADAKHKIL

SEQ ID NO: 31715 - DNA, 575 bp, Triticum aestivum
actccaacacagccatacaagactatctctcagaagtcaaaacctcccagttaattagcaatggcaaagagtctcgcagtggccctcctgctactggtggtgctcgcgcactgcgatgggagggagctgagcgccaacgaccgcgcacttgcaggttccggtgccggtggcgtccaagagtccaaggcgtcggggtcgccaggcttgccgattgtgggaacaacacctacgggcaccagtaccattaacggaccgctggtggtcattcctggggtcccagttcacccatgatcattccggcgctggctgacaagcaagctgaagctcggcctgtgcctttacttttctagcttacacctcacagaacaacggcgtttttctctcacctccatgcatatgttcgttataatgagcgtatgtatcaactatctcgtcgtgtgtatgtatttattttcagttcatgctgcggtatgttccgttccttgatgtgctacatgtaccattgcaaatttcaatacttaccgtgcacgggatgttctacatgtatcaattatatctaagaacatgttatttgg

SEQ ID NO: 31716 - protein, 81 aa, Triticum aestivum
SNTAIQDYLSEVKTSQLISNGKESRSGPPATGGARALRWEGAERQRPRTCRFRCRWRPRVQGVGVARLADCGNNTYGHQYH

SEQ ID NO: 31717 - protein, 76 aa, Triticum aestivum
MAKSLAVALLLLVVLAHCDGRELSANDRALAGSGAGGVQESKASGSPGLPIVGTTPTGTSTINGPLVVIPGVPVHP

SEQ ID NO: 31718 - protein, 47 aa, Triticum aestivum
MYQLSRRVYVFIFSSCCGMFRSLMCYMYHCKFQYLPCTGCSTCINYI

SEQ ID NO: 31719 - DNA, 610 bp, Triticum aestivum
accccacttcccacttcccaagcgcgcccacgcgcacgaaaatactcctagtactaattcgagagccagtgagtctagggtcgagtcccggctggggatgacgagccctcgccggcgatggacttgccgctagccctcgcagctctactcctcctcctcctagtgctcctcgctgccccgccggcggcgctcctcattgccctccacctgaaccgccgccgccgcctaacgccgcccgagccggcggccgcggcgctcgagccgagcgcgccggccgaggagaacgagggcgggaaggagaagaggcggcggcgcagggcgaggcggaagcagcagcagaagcagggcggcgacggggccctctcgcaggcggcaggcggcggcggggacgacgcgctgccgccgcggccgcggttcccgctcgcctcggtggccggcgcactgcagcggcggatcaccgcgcggtacgacgagctcgcgcgggccagccaggcccagtccctcaccatggacggtgtgatcgtgctcgtcaagctcttgggcctccccctgtgccttgaactcttgagtcatggctatgaataagatctgaactgggcagatccaaatg

SEQ ID NO: 31720 - protein, 155 aa, Triticum aestivum
MDLPLALAALLLLLLVLLAAPPAALLIALHLNRRRRLTPPEPAAAALEPSAPAEENEGGKEKRRRRRARRKQQQKQGGDGALSQAAGGGGDDALPPRPRFPLASVAGALQRRITARYDELARASQAQSLTMDGVIVLVKLLGLPLCLELLSHGYE

SEQ ID NO: 31721 - DNA, 1432 bp, Triticum aestivum
acccaatccatccctccgagcctttccactccactccgtgcgcccccaaccacgccgcacacttctcgcggcctccaaaacccaaatccctgaccgccggcggcggcgatgctcctctgccaccgcatcctccctcgcctcctctccctcccctccagcgccacctcgaaactcctcatccgcccctcccgcctccctcctcgccgccccttcctgcctcgctgcgccgtgctctctcagcttgcggccccccaaactgtagaccacgccgacgccgaagaatccgctgaccacctcgacgccgaagagccgcaggagccccaggagccgcaggaggtgctggtaaagctccccctcgaccggctcttcctgccaccgggggcgagcgtgaccccgggggacgaggaggtcgtgaccgcgcgtgtcctcaagggttccaacatcgtgctgggcacgtacgcgcggggcgatgcgcaggtggttaacgcggatttcataaagagcagcgtgcgacccgatgactgccccagggatgggctgcccgagttcgcgctcgtcggccgctccaacgtcggcaagtcgtcactgctcaactcgctcgtccgccgcaagcgcctcgcgctcacctccaagaaacctggcaagacccagtgtatcaatcattttaaaataaatgacagttggtaccttgttgacttgcctggttatggatatgcttcagcaccacaggtagctcgtaaagattgggatgagtttactagaaattacttccttagcagggataatctggtgtcagtttttctccttatagatgcaagtattcctgctaagaagattgatcttgactatgctagttggcttgggcaaaacaaggtcccaatgaccctcgtgttcacaaagtgcgacaagcgcaagaagaagaaaaatggcggcaagagaccggaagaaaacgtagaatgcttccagagtctgattcgcgaatattttgaggcggcgcctccgtggataatgacgagcagcgtaacgaaccaaggcagagacgagatacttctgcacatgtctcagctcagaaactattggcgcaagcattaagaggaggaattacaagagtaggactgaagcaatagcaaaccgcatgcaggcggcagccgcacctttgcaatcaggatttcaccaaccaatccgccttgccttttgagctgttgattgtccacgattgcatgatgattactcaatcaacaggaaggccgagaatacagacaagccgctgaaatcaactaccctgtttttttcttctatatttgtacaaccgtacagtctcaacgttttgtctttgttactttctgattataagattgtgcgtcctgtatgtagattaaagaaactcccgtgtcagctaatcatcatcgggaatcccacacgtttgtttgtc

SEQ ID NO: 31722 - protein, 327 aa, Triticum aestivum
MLLCHRILPRLLSLPSSATSKLLIRPSRLPPRRPFLPRCAVLSQLAAPQTVDHADAEESADHLDAEEPQEPQEPQEVLVKLPLDRLFLPPGASVTPGDEEVVTARVLKGSNIVLGTYARGDAQVVNADFIKSSVRPDDCPRDGLPEFALVGRSNVGKSSLLNSLVRRKRLALTSKKPGKTQCINHFKINDSWYLVDLPGYGYASAPQVARKDWDEFTRNYFLSRDNLVSVFLLIDASIPAKKIDLDYASWLGQNKVPMTLVFTKCDKRKKKKNGGKRPEENVECFQSLIREYFEAAPPWIMTSSVTNQGRDEILLHMSQLRNYWRKH

SEQ ID NO: 31723 - DNA, 1678 bp, Triticum aestivum
aattcgtgcttaaattcagtacagtgagactcgggtcctgacagacccaacccaccatggcttcgttgccggatctccgacttccaccccaatcagacccatcacccttccacaagggagcacgcggctgcatcgcagaccccggcgaacccccggagccgtcgcccctcgtgcggctcctccgggcaatcgatcgacatctgctgacccctggggaggtcaggccggaaggtgctccactgcttcctaaaagcgcagagagctatcccaacttgcatggatgaatccaatcgaatcaaattggtgtgtcgccttgagcattttttctctggggaaccaatgcttgacttttctgctagtaaatctttgggccaccacaaatggaagacaaggatgtggcgccactgttcttttgtttagtcattaatcagaagcctaacagcatgtgtattcctctgtccggtcgtcaagtcagtggaagaatcaatacaatcatgtacggctccaccaaacctgaagatgatattttgggtaggggctttcggcgcaatttctgctcagaaaaagggctgaaaagcgcgttgcttgtgccttactagatggagcagagaccttactggaagacaaacacaaaccttgaagcaaccaccacatcacttgtgaaatctcacatagaagaaagcttgccagcgagagacccatggaggctgctcttgtcaccgtttccacgggggtgatgaagcccctcctgtccaagctcttcaagctgccgctggacgagcaccggaagctccaaggcgtccgccgtgacgccaagttcataggagacgagcttcgcagcatgaaggctgcactggaggtgcttgcggatgaagaacaactcgaacctgcgatgagaatttggcgggatgatgtccgtgagctttcttatgacatggaagattgcattgatgtctttgtggctcatgtcgaccatgagcccgatgggcgtaccatgctcaagaagttcgttgacatgttgaagaagcccaaacatcgccatcaggctgctagtgagataggtaaactcaaggcccgtgtggctgaggcaagcgagaggcacaagaggtataatattatccggccaacaccttgcattagctcttgtgccattgacccccggctgccggcgctttacgcggaggttgatgaacttgtcggcattgatggtcctaaggacgatatcatcgactggtttcagtgggaggctacttctacgcagcctcaagtgctgtctattgttggttctggcggtcttggtaagactactctagcaaagcaagtctatcatgcattggaaagccaattttcatgtgcagcttttgtgtcggtttctcgaaatcctgatatgagaaagattctaagagatattgctcaaggagtggggttcacagacagcccaccggatgatgatgtgcaacaattgatcagtaaactcaggcaacatcttaaaaacgaaaggtactttgttgtaattgatgatgtgtggagcgcggacgtatgggaaactatcaggcttgtattattgaataataataaccatgggagtagaattattactacaacacgtaatactgaagttgcatcatgttgttcttcaggtggtggtcatgtttataaaatggaaccccttacgttt

SEQ ID NO: 31724 - protein, 326 aa, Triticum aestivum
MEAALVTVSTGVMKPLLSKLFKLPLDEHRKLQGVRRDAKFIGDELRSMKAALEVLADEEQLEPAMRIWRDDVRELSYDMEDCIDVFVAHVDHEPDGRTMLKKFVDMLKKPKHRHQAASEIGKLKARVAEASERHKRYNIIRPTPCISSCAIDPRLPALYAEVDELVGIDGPKDDIIDWFQWEATSTQPQVLSIVGSGGLGKTTLAKQVYHALESQFSCAAFVSVSRNPDMRKILRDIAQGVGFTDSPPDDDVQQLISKLRQHLKNERYFVVIDDVWSADVWETIRLVLLNNNNHGSRIITTTRNTEVASCCSSGGGHVYKMEPLTF

SEQ ID NO: 31725 - protein, 314 aa, Triticum aestivum
MKPLLSKLFKLPLDEHRKLQGVRRDAKFIGDELRSMKAALEVLADEEQLEPAMRIWRDDVRELSYDMEDCIDVFVAHVDHEPDGRTMLKKFVDMLKKPKHRHQAASEIGKLKARVAEASERHKRYNIIRPTPCISSCAIDPRLPALYAEVDELVGIDGPKDDIIDWFQWEATSTQPQVLSIVGSGGLGKTTLAKQVYHALESQFSCAAFVSVSRNPDMRKILRDIAQGVGFTDSPPDDDVQQLISKLRQHLKNERYFVVIDDVWSADVWETIRLVLLNNNNHGSRIITTTRNTEVASCCSSGGGHVYKMEPLTF

SEQ ID NO: 31726 - protein, 279 aa, Triticum aestivum
MKAALEVLADEEQLEPAMRIWRDDVRELSYDMEDCIDVFVAHVDHEPDGRTMLKKFVDMLKKPKHRHQAASEIGKLKARVAEASERHKRYNIIRPTPCISSCAIDPRLPALYAEVDELVGIDGPKDDIIDWFQWEATSTQPQVLSIVGSGGLGKTTLAKQVYHALESQFSCAAFVSVSRNPDMRKILRDIAQGVGFTDSPPDDDVQQLISKLRQHLKNERYFVVIDDVWSADVWETIRLVLLNNNNHGSRIITTTRNTEVASCCSSGGGHVYKMEPLTF

SEQ ID NO: 31727 - DNA, 1616 bp, Triticum aestivum
ctttttcgtagcagcacctgttttatccaccacgacctcttctcctccgatcccacaagagagccgagcgaggactcgctcgaccccagccgccattgatggctcgtgccacctccgcagcgctcgcgctgctcatcttcctcctctgccggcacgcccacgccgacgcgggcacgacgctgtcgcaagggcagtcgctggcgggcaacgagaagctcctgtcagccaacggcgccttctcgctctccttcttctccccgcgcggcggcgacggctcgcgggtgtacctgggcgtcatgttcgccagggccgcggagccgaccgtgccgtgggtggccaaccgcgacgcgccggtgcgcgccacggccccgtcctactccgccaccgtcacggactccggggacctccgggtgctggagggggagcgcgtcgtgtggcggaccaacacgacctcgtcggcggggaacttcacgctgacgatccaggacacggggaacctcgtgctcgccggcggcagcggcgcgcaggcggtgcagctgtggcagagcttcgaccaccccgcggacaccttcctccccgggatgaacatcacgctggcccggcgcggcggcgccgtcgtcaggcagacgctgttccggtcgtggaggagccccgacgacccggcccccgggaacttcacgctggggcaggacccgctgggctcggcgcagctcttcatatggcgccgcggccaggacggcaaggacgtgacgcactggaggtccgggcagtgggccaagggcagcttcgtgggcatcccgtatcggccgctcaacctctacggcttccagctctccggcgacccgtcccagagcaacggcctgttctacaccttccagcgcttcaactcctcgcagtacaggttcgtgctccagcccaacggcacggagacgtgctaccagcttgtggacgccaccggcgcctgggaggtcgtctggtcgcagccgacgatgccgtgccaggcctacaacacgtgcggcccgaacgccgagtgctccgctgccgaccactgcacctgcctcagaggttttgagccgaaatccgaagaggagtacagcaacggggtgtggacgcaggggtgcgtgaggagcagccagctgacctgcagcgagaggaacgtgagcatgagcggcagcgacgcgttcgccgtcctctccggcgtgaagctgccggacctggcggcgtgggagtcggcggtcatcagcgcggacgcgtgcaggcagtggtgcctggccaactgcacgtgcaacgcgtacagctatagcggcggcaccgggtgcctgacctgggcccacgagttggtggacgtctaccagttccccagcggacagttccccaacggacaagggtttgacctgcacatcaaggtcccggcttctctattaggtaagctcatcaacgttgatgatttgttaacctttgaagttctaaattgggtttagaaaactgcagctaggaaacttctcggttgttgaggaaatgtcgataaacgcttagactgtagaaattgttgtttttgttgtgtgcttgtggcaagacttgcacgactgatttgggttgttacaacccgaaaatcc

SEQ ID NO: 31728 - protein, 460 aa, Triticum aestivum
MARATSAALALLIFLLCRHAHADAGTTLSQGQSLAGNEKLLSANGAFSLSFFSPRGGDGSRVYLGVMFARAAEPTVPWVANRDAPVRATAPSYSATVTDSGDLRVLEGERVVWRTNTTSSAGNFTLTIQDTGNLVLAGGSGAQAVQLWQSFDHPADTFLPGMNITLARRGGAVVRQTLFRSWRSPDDPAPGNFTLGQDPLGSAQLFIWRRGQDGKDVTHWRSGQWAKGSFVGIPYRPLNLYGFQLSGDPSQSNGLFYTFQRFNSSQYRFVLQPNGTETCYQLVDATGAWEVVWSQPTMPCQAYNTCGPNAECSAADHCTCLRGFEPKSEEEYSNGVWTQGCVRSSQLTCSERNVSMSGSDAFAVLSGVKLPDLAAWESAVISADACRQWCLANCTCNAYSYSGGTGCLTWAHELVDVYQFPSGQFPNGQGFDLHIKVPASLLGKLINVDDLLTFEVLNWV

SEQ ID NO: 31729 - protein, 394 aa, Triticum aestivum
MFARAAEPTVPWVANRDAPVRATAPSYSATVTDSGDLRVLEGERVVWRTNTTSSAGNFTLTIQDTGNLVLAGGSGAQAVQLWQSFDHPADTFLPGMNITLARRGGAVVRQTLFRSWRSPDDPAPGNFTLGQDPLGSAQLFIWRRGQDGKDVTHWRSGQWAKGSFVGIPYRPLNLYGFQLSGDPSQSNGLFYTFQRFNSSQYRFVLQPNGTETCYQLVDATGAWEVVWSQPTMPCQAYNTCGPNAECSAADHCTCLRGFEPKSEEEYSNGVWTQGCVRSSQLTCSERNVSMSGSDAFAVLSGVKLPDLAAWESAVISADACRQWCLANCTCNAYSYSGGTGCLTWAHELVDVYQFPSGQFPNGQGFDLHIKVPASLLGKLINVDDLLTFEVLNWV

SEQ ID NO: 31730 - protein, 356 aa, Triticum aestivum
FFVAAPVLSTTTSSPPIPQESRARTRSTPAAIDGSCHLRSARAAHLPPLPARPRRRGHDAVARAVAGGQREAPVSQRRLLALLLLPARRRRLAGVPGRHVRQGRGADRAVGGQPRRAGARHGPVLLRHRHGLRGPPGAGGGARRVADQHDLVGGELHADDPGHGEPRARRRQRRAGGAAVAELRPPRGHLPPRDEHHAGPARRRRRQADAVPVVEEPRRPGPRELHAGAGPAGLGAALHMAPRPGRQGRDALEVRAVGQGQLRGHPVSAAQPLRLPALRRPVPEQRPVLHLPALQLLAVQVRAPAQRHGDVLPACGRHRRLGGRLVAADDAVPGLQHVRPERRVLRCRPLHLPQRF

SEQ ID NO: 31731 - DNA, 1498 bp, Triticum aestivum
gtacgctgccacgccagagcagagcagagcagaatccggtagccagatcgaacgccccaccctctctccctccctccctcgcccccttccgatcgagcccgtcgccatggcgccgccccgcgtcggcctgctcctcgccctcgccttgtgcctcgcgttcgcgcgcgcggacgcggccgtgagggagctcagggtcgggtactacgcgcagacgtgcccccgcgcggaggagatcgtgcggcgcgtcatggcccgcgcgctcgcgcgcgaggcccgcagcgtcgcctccgtcatgcgcctccagttccacgactgcttcgtcaacggatgcgacgggtcggtgctgatggacgcgacgccgacgatggcgggggagaaggaggcgctctccaacatcaactccctccgctccttcgaggtcgtggacgaggtcaagagcgccctggaggagcagtgccccggcgtcgtctcctgcgccgacatcatcatcatggccgcccgcgacgccgtcgtgctgactggtggacccaactgggacgtgaggctcgggcgcgaggacagtctgacggcgagccaggaggactcggacaacatcatgccgagcccgcgcgccaacgcgagcgcgctcatccgcctcttcgccggctacaagctcaccgtcaccgacctcgtcgcgctctccggctcgcactccatcggcgaggcccgctgcttctccatcgtcttccgcctctacaaccagtcgggctccggccgccccgacccccacatggacccggcctaccgccaggcgctcgacgcgctctgccccctcaccggcgaccagaacgtcaccggcggcctggacgctaccccggtcgtcttcgacaaccagtacttcaaggacctggtccacctccgcggattcctcaactccgaccagacgctcttctccgacaacgaggggacccggcgggtggtgacgcagttcagccagaaccaggacgccttcttcagggccttcatcgaggggatggtcaagctgggcgagctccagaaccccaggaagggggagatccggcgcaactgccgcgtcgccaacggcgggcggccgccgctggagaagcaggtcgcgccgttccgggtgctggacttctgaacctggttctacggtaggcctgtaggtgtctcacgggagctctggtgtgggagcgatccatatgcttgacataggtttggtcgtgtcgcagttctgtgcctacccaagaatggtttcaggtctggctactgcttattgctaattgttgaggaataatagagaaattgatgcctctggtactttgattgccaaaggctgcattaaggtttgcttctttgttgattctccaaagattagctagcgatagtgcaagatgcttacttagagagatggttacaagaacaaataatgattttaagagtcatagaactagcgcttaatgtttagtttggttttaaaactttgaaaatatgaaattgc

SEQ ID NO: 31732 - protein, 378 aa, Triticum aestivum
YAATPEQSRAESGSQIERPTLSPSLPRPLPIEPVAMAPPRVGLLLALALCLAFARADAAVRELRVGYYAQTCPRAEEIVRRVMARALAREARSVASVMRLQFHDCFVNGCDGSVLMDATPTMAGEKEALSNINSLRSFEVVDEVKSALEEQCPGVVSCADIIIMAARDAVVLTGGPNWDVRLGREDSLTASQEDSDNIMPSPRANASALIRLFAGYKLTVTDLVALSGSHSIGEARCFSIVFRLYNQSGSGRPDPHMDPAYRQALDALCPLTGDQNVTGGLDATPVVFDNQYFKDLVHLRGFLNSDQTLFSDNEGTRRVVTQFSQNQDAFFRAFIEGMVKLGELQNPRKGEIRRNCRVANGGRPPLEKQVAPFRVLDF

SEQ ID NO: 31733 - protein, 343 aa, Triticum aestivum
MAPPRVGLLLALALCLAFARADAAVRELRVGYYAQTCPRAEEIVRRVMARALAREARSVASVMRLQFHDCFVNGCDGSVLMDATPTMAGEKEALSNINSLRSFEVVDEVKSALEEQCPGVVSCADIIIMAARDAVVLTGGPNWDVRLGREDSLTASQEDSDNIMPSPRANASALIRLFAGYKLTVTDLVALSGSHSIGEARCFSIVFRLYNQSGSGRPDPHMDPAYRQALDALCPLTGDQNVTGGLDATPVVFDNQYFKDLVHLRGFLNSDQTLFSDNEGTRRVVTQFSQNQDAFFRAFIEGMVKLGELQNPRKGEIRRNCRVANGGRPPLEKQVAPFRVLDF

SEQ ID NO: 31734 - protein, 296 aa, Triticum aestivum
MARALAREARSVASVMRLQFHDCFVNGCDGSVLMDATPTMAGEKEALSNINSLRSFEVVDEVKSALEEQCPGVVSCADIIIMAARDAVVLTGGPNWDVRLGREDSLTASQEDSDNIMPSPRANASALIRLFAGYKLTVTDLVALSGSHSIGEARCFSIVFRLYNQSGSGRPDPHMDPAYRQALDALCPLTGDQNVTGGLDATPVVFDNQYFKDLVHLRGFLNSDQTLFSDNEGTRRVVTQFSQNQDAFFRAFIEGMVKLGELQNPRKGEIRRNCRVANGGRPPLEKQVAPFRVLDF

SEQ ID NO: 31735 - DNA, 656 bp, Triticum aestivum
caaatctcccagtcccttcctcgctcttctctctagctattggatcggtgactctgcttctgttagtttcagctttgagtcgctgctacaatgtcttgcattaagagagttgatagatccgcgtacgttgccatggcaccagaagctccgttcatggctgccggaacgatggccggagccgttgatctgtctttcagctcatcctccaacctcgagatctttgaactcgattttaactccgaagaccacgagatcaaactattaggtcagtgctcaagctcagagaggtttactcgactcgcttggggaagttatggacccgggtccgaggaatctccttatggtctcatcgctggtggcctcgtcgacgggaatatcggtttatggaatccaatcactctgattcggtgagttttctctttctctataaccctaattgttagggtttatatatgaaaaagtgtttccgtaatggacaagtaaagtatttgattttctttttgtttatttcagttctgagtgtaatgaaagtgcgcacgttagacatctttcaaaacataaagggccagtgagttgtaatctctttaacagaatctaatgttgggctaggttcttttcgatgcttacatatatatatatatattctcttgtatgtt

SEQ ID NO: 31736 - protein, 106 aa, Triticum aestivum
MSCIKRVDRSAYVAMAPEAPFMAAGTMAGAVDLSFSSSSNLEIFELDFNSEDHEIKLLGQCSSSERFTRLAWGSYGPGSEESPYGLIAGGLVDGNIGLWNPITLIR

SEQ ID NO: 31737 - protein, 92 aa, Triticum aestivum
MAPEAPFMAAGTMAGAVDLSFSSSSNLEIFELDFNSEDHEIKLLGQCSSSERFTRLAWGSYGPGSEESPYGLIAGGLVDGNIGLWNPITLIR

SEQ ID NO: 31738 - protein, 87 aa, Triticum aestivum
KSPSPFLALLSSYWIGDSASVSFSFESLLQCLALRELIDPRTLPWHQKLRSWLPERWPEPLICLSAHPPTSRSLNSILTPKTTRSNY

SEQ ID NO: 31739 - DNA, 981 bp, Triticum aestivum
agtagacaacagaaaatttccccattcttctccgaaccctagctccccgcttcccgctcctcacgcctctcgccgtcgccgtcccgccgagcccatggctaagacgcgtccgcccaagaagatcctcgagtcctacaccatcaaggggtccgacaaagtcatcaagcctggggactgtgtgctaatgagatcagctgatacatcaaagccaccatatgtggcaaaagttgagtccattgaggcagcagggtctcgaggcacaaatgtgagagtacgggttcgatggtactatcgtccagaagaattcattggtgggaggcgaccatttcatggttccaaagaggtattcctctctgaccactatgatgtacagagtgctgacacaatagagggaaaatgcaatgtccacagcttccgtagctacacaaagcttgattctgtgaatgccgaggacttcttctgtcgctttgactacaaatcagcatctggcagtttcgtgcccgaccgtatagctgtgttttgcaagtgtgagatgccgtacaatcctgatgaccttatgatccaatgtgaggaatgctctgactggtttcacccttcttgtattggaatgaccattaaagaagcaaagaaacgagaacactttttctgccagagctgtactgctgaaaatgggaagacaactgagaattttcatgaagccacggcagagtcagaagaaaagctggtggagtcgaaaaggcggagaaggtgatgggctggattaatttgatggaattcccacacggatatacaaactacatagccttctagtatgaggtctgtggtgatgtttgtggcagtctgtgaccccttctaatgtcaggcatgcagtgtacataacgtgcaacctgagattgttgtattaggagaaaatagaatttggacgctagtgtcagagtttgagcagtatggcaccatcaagatcccttgtgatcttccctc

SEQ ID NO: 31740 - protein, 249 aa, Triticum aestivum
VDNRKFPHSSPNPSSPLPAPHASRRRRPAEPMAKTRPPKKILESYTIKGSDKVIKPGDCVLMRSADTSKPPYVAKVESIEAAGSRGTNVRVRVRWYYRPEEFIGGRRPFHGSKEVFLSDHYDVQSADTIEGKCNVHSFRSYTKLDSVNAEDFFCRFDYKSASGSFVPDRIAVFCKCEMPYNPDDLMIQCEECSDWFHPSCIGMTIKEAKKREHFFCQSCTAENGKTTENFHEATAESEEKLVESKRRRR

SEQ ID NO: 31741 - protein, 218 aa, Triticum aestivum
MAKTRPPKKILESYTIKGSDKVIKPGDCVLMRSADTSKPPYVAKVESIEAAGSRGTNVRVRVRWYYRPEEFIGGRRPFHGSKEVFLSDHYDVQSADTIEGKCNVHSFRSYTKLDSVNAEDFFCRFDYKSASGSFVPDRIAVFCKCEMPYNPDDLMIQCEECSDWFHPSCIGMTIKEAKKREHFFCQSCTAENGKTTENFHEATAESEEKLVESKRRRR

SEQ ID NO: 31742 - protein, 188 aa, Triticum aestivum
MRSADTSKPPYVAKVESIEAAGSRGTNVRVRVRWYYRPEEFIGGRRPFHGSKEVFLSDHYDVQSADTIEGKCNVHSFRSYTKLDSVNAEDFFCRFDYKSASGSFVPDRIAVFCKCEMPYNPDDLMIQCEECSDWFHPSCIGMTIKEAKKREHFFCQSCTAENGKTTENFHEATAESEEKLVESKRRRR

SEQ ID NO: 31743 - DNA, 1367 bp, Triticum aestivum
ctccttttgccacggcccgcgcgcaccggtcacacatggctgagaccccccgtgccccgccgccactgaggcctccgccgcccgttccgctgccggacacgccgcctcgcccggattcgtcgccttccacgcccggcgaggattaccacacgccgacgccctcgctggacgaggcgcgcgaagaaacgccaccgtggtcgcaagaaaccaacggcaacgagagagcggccagcaaaagcccggccctctcgcccgtgcgcctcccctcgccgcaccgcctgctgccgcccaactcccccaccggcaacggcgatgacggtgccgccgccgggcatgcgccggtgccgggccgccgcccgcagctccgcctcgcgcccggcctcgtccggacgccgtcggaagggtccgtcgccaagtctccctcgccgtcgccctcttcgtcgctgacgtcgccatcgcctctaaccctggctcccacaatcacaaccaacagcaagagcgcccagagcacgccgaagcgcacggaggcatggaagccgccggccacggggatcgcggtgcagttcgaccctgtcgaggaagccgtcacgtcgccgctgcaactgggcaaggcccgaatcgaccgccatcgcgccactacgatggcggcagcagagaacggaggcgcgcccaacacggtgcctcgcgacgtggcggcggtggccgctgtcggggagaggaggccactgtcggtggcgctgcggctggccacggcagtgctcagcctggcgtccttcgcggtgatggccagcgcccggacgtccggctgggacggcgatcacttcgatcgctacgatcagtacaggtacgccctggcgatgaacgtgatcgtctgcgcctactcaatcgcgcaatcgcttggtgagatccgccgtctggtcgcggcgaggtttatttacaggagcatgtcaagctactacgtcagcctgttccttgatcaggtcctggcgtatctcctcatgtcggcgtcctcggctgccgcgtcgcgcaacgatctgtgggtgtcgaggttcagccaggacgccttcaacaggaagatcaccagctccgtgtggctgtccttccttgccttcatagcgctcgccgcaagctcgctcatctccacggctaatctcttcagcatggtctaattatgatagatacggttcatccctttccctctggggatgagtaactgccgacgttcttcatgtaaattttgcattttatattgcgagaaatcatacgatcgacttataccgtacgttgttctcggtcctgacctctgactcgtcagaaatcccttgtaaagaggttcatatagtgctctaattaagcttttcactgtc

SEQ ID NO: 31744 - protein, 388 aa, Triticum aestivum
PFATARAHRSHMAETPRAPPPLRPPPPVPLPDTPPRPDSSPSTPGEDYHTPTPSLDEAREETPPWSQETNGNERAASKSPALSPVRLPSPHRLLPPNSPTGNGDDGAAAGHAPVPGRRPQLRLAPGLVRTPSEGSVAKSPSPSPSSSLTSPSPLTLAPTITTNSKSAQSTPKRTEAWKPPATGIAVQFDPVEEAVTSPLQLGKARIDRHRATTMAAAENGGAPNTVPRDVAAVAAVGERRPLSVALRLATAVLSLASFAVMASARTSGWDGDHFDRYDQYRYALAMNVIVCAYSIAQSLGEIRRLVAARFIYRSMSSYYVSLFLDQVLAYLLMSASSAAASRNDLWVSRFSQDAFNRKITSSVWLSFLAFIALAASSLISTANLFSMV

SEQ ID NO: 31745 - protein, 377 aa, Triticum aestivum
MAETPRAPPPLRPPPPVPLPDTPPRPDSSPSTPGEDYHTPTPSLDEAREETPPWSQETNGNERAASKSPALSPVRLPSPHRLLPPNSPTGNGDDGAAAGHAPVPGRRPQLRLAPGLVRTPSEGSVAKSPSPSPSSSLTSPSPLTLAPTITTNSKSAQSTPKRTEAWKPPATGIAVQFDPVEEAVTSPLQLGKARIDRHRATTMAAAENGGAPNTVPRDVAAVAAVGERRPLSVALRLATAVLSLASFAVMASARTSGWDGDHFDRYDQYRYALAMNVIVCAYSIAQSLGEIRRLVAARFIYRSMSSYYVSLFLDQVLAYLLMSASSAAASRNDLWVSRFSQDAFNRKITSSVWLSFLAFIALAASSLISTANLFSMV

SEQ ID NO: 31746 - DNA, 1157 bp, Triticum aestivum
gaataacccgcacctatccacgacaccgagggagaggagcaactgatccccgacgccccaaatggcgcctcccctcctcctcctcctcctcgtccctctcgtcgccgccaccgcaccgtgcgcccacccggcccacccgagccagccggcgtcgtgcgccgcggagcccgtgctggcgccggagcgccgggaggcgcacggcgggggccgcatcctggacatcacccactactaccgggaggacatgccctcgtgggagtccggcgccggggtgggccagttcctctggctgcccgcctccatgcgcaacggctccctcgccaacaactccgagatgcggatgcccacccacaccggcacccacatcgacgcctccggccacgtcttccagcactacttcgacgctggcttcgacgtcgacaccctcgacctcgacgtcctcaacggtcctgcactgctggttgatgttccaagggatgaaaatattactgctaaaacgatggaatctttgcatattcctaaaggagttcaacgggtactttttagaacattaaacactgacaggaacctaatgtggaagaaagagtttgacacaagctatgtgggttttatgaaagatggtgcccaatggttggtagacaacacggatattaagcttgtcggaatagactatttgtccgttgcagctttcgatgacttgatcccttcacatttagttttacttgaaaaccgggatatcattcttgtggagggcctcaaactggagaatgtcatacctgggatatactcgttgcattgcctgccacttcggttgcgtggagctgaaggttcgccgatcagatgcatccttataaagtgaaagacatttgcatcccgctgcggcggtttagtttgataccgcaagcacttatatataaaaatagaatgtgtatagcagcaaaactcgtgtctttgataccagaggagtactgtcatgtgtccagaaacatggtggcacttcgatgcttagtaaggagcgacaaacggctagggatgcaaatgtgtagcctctagggtaccctccgaacctttagttgggctatagaagggatggattacaatacaaaccgcaatgttcggtggtaccaaaatcccaaaaaaaaaaaaaaaaaaaaaag

SEQ ID NO: 31747 - protein, 265 aa, Triticum aestivum
MAPPLLLLLLVPLVAATAPCAHPAHPSQPASCAAEPVLAPERREAHGGGRILDITHYYREDMPSWESGAGVGQFLWLPASMRNGSLANNSEMRMPTHTGTHIDASGHVFQHYFDAGFDVDTLDLDVLNGPALLVDVPRDENITAKTMESLHIPKGVQRVLFRTLNTDRNLMWKKEFDTSYVGFMKDGAQWLVDNTDIKLVGIDYLSVAAFDDLIPSHLVLLENRDIILVEGLKLENVIPGIYSLHCLPLRLRGAEGSPIRCILIK

SEQ ID NO: 31748 - protein, 204 aa, Triticum aestivum
MPSWESGAGVGQFLWLPASMRNGSLANNSEMRMPTHTGTHIDASGHVFQHYFDAGFDVDTLDLDVLNGPALLVDVPRDENITAKTMESLHIPKGVQRVLFRTLNTDRNLMWKKEFDTSYVGFMKDGAQWLVDNTDIKLVGIDYLSVAAFDDLIPSHLVLLENRDIILVEGLKLENVIPGIYSLHCLPLRLRGAEGSPIRCILIK

SEQ ID NO: 31749 - protein, 185 aa, Triticum aestivum
MRNGSLANNSEMRMPTHTGTHIDASGHVFQHYFDAGFDVDTLDLDVLNGPALLVDVPRDENITAKTMESLHIPKGVQRVLFRTLNTDRNLMWKKEFDTSYVGFMKDGAQWLVDNTDIKLVGIDYLSVAAFDDLIPSHLVLLENRDIILVEGLKLENVIPGIYSLHCLPLRLRGAEGSPIRCILIK

SEQ ID NO: 31750 - DNA, 1088 bp, Triticum aestivum
agagcagagccgagcataccccatctattaccgtcttctcggaccgtgcttccctgccgccctcgctgctgctgcgagctccggtcggcaatcttttcccggttcaagatgaccatcatcatcgagcagcctcagttcgatgcggcggcggagaggaaggtcgccggcgacccggcggagctcgtgctcgacggcggcttcaccgtaccggactccaacgccttcggccacaccttcagggactacgacgcggagtcggagcggaagaagactgtggaggagttctaccgcgtgaaccacatcaaccagacgtacgagtttgtgcagcggatgcgggacgcatacgggcggctggacaagacggagatgagcatctgggagtgcatcgagcttctcaacgagttcatcgacgacagcgaccctgacctggacatgccgcagatcgagcacctcctccagaccgccgaggccatccgcaaggactaccccgatgaggactggctccacctcactggcctcatccatgatctgggcaaggtgctgctgcatcccagcttcggggagcttcctcagtgggcagtcgtaggtgacaccttccccgtcggctgcgcgttcgacgaatgcaacgtccacttcaagtacttcaaggagaaccctgactaccacaacccggagttcaacaccaagttcggggtctactccgaggggtgcgggctggacaacgtgctcatgtcatggggccatgacgactacatgtgcctggttgccaaggagaacaagaccacccttccttccgcagggctgttcatcatcagataccactccttctaccccctgcacaagcatggagcctacatgcacctgatgaacgaggaggacaaggagaacctcaaatggctgcacgtcttcaacaagtatgacctgtacagcaagagcagcgtcaggatcgacgtcgaggaagtgaagccctactacatgtcgctcatcgacaagtacttcccggggaagctgcgatggtgaggaggccgcacccagacagggaacggagcccagacaacatattatatagtttatttaccttcgaaagc

SEQ ID NO: 31751 - protein, 339 aa, Triticum aestivum
RAEPSIPHLLPSSRTVLPCRPRCCCELRSAIFSRFKMTIIIEQPQFDAAAERKVAGDPAELVLDGGFTVPDSNAFGHTFRDYDAESERKKTVEEFYRVNHINQTYEFVQRMRDAYGRLDKTEMSIWECIELLNEFIDDSDPDLDMPQIEHLLQTAEAIRKDYPDEDWLHLTGLIHDLGKVLLHPSFGELPQWAVVGDTFPVGCAFDECNVHFKYFKENPDYHNPEFNTKFGVYSEGCGLDNVLMSWGHDDYMCLVAKENKTTLPSAGLFIIRYHSFYPLHKHGAYMHLMNEEDKENLKWLHVFNKYDLYSKSSVRIDVEEVKPYYMSLIDKYFPGKLRW

SEQ ID NO: 31752 - protein, 303 aa, Triticum aestivum
MTIIIEQPQFDAAAERKVAGDPAELVLDGGFTVPDSNAFGHTFRDYDAESERKKTVEEFYRVNHINQTYEFVQRMRDAYGRLDKTEMSIWECIELLNEFIDDSDPDLDMPQIEHLLQTAEAIRKDYPDEDWLHLTGLIHDLGKVLLHPSFGELPQWAVVGDTFPVGCAFDECNVHFKYFKENPDYHNPEFNTKFGVYSEGCGLDNVLMSWGHDDYMCLVAKENKTTLPSAGLFIIRYHSFYPLHKHGAYMHLMNEEDKENLKWLHVFNKYDLYSKSSVRIDVEEVKPYYMSLIDKYFPGKLRW

SEQ ID NO: 31753 - protein, 229 aa, Triticum aestivum
MRDAYGRLDKTEMSIWECIELLNEFIDDSDPDLDMPQIEHLLQTAEAIRKDYPDEDWLHLTGLIHDLGKVLLHPSFGELPQWAVVGDTFPVGCAFDECNVHFKYFKENPDYHNPEFNTKFGVYSEGCGLDNVLMSWGHDDYMCLVAKENKTTLPSAGLFIIRYHSFYPLHKHGAYMHLMNEEDKENLKWLHVFNKYDLYSKSSVRIDVEEVKPYYMSLIDKYFPGKLRW

SEQ ID NO: 31754 - DNA, 2130 bp, Triticum aestivum
agctagcgcagatcccaccccgcaaatggcagctcgcctcctcctctagcccactcctctagcccactcccctccacccacccacctaccctcctccgcacgcaaccatgccggggctcgccgcagcggacgcgtcgccgccggccgcggcgccggcgccgcggcggctctcctcgccgctgccgaggcgggcgccgccgtcgccgtccccctcctccgcgtcccgcgccgtcgggaagccggcgcggaagtcgctcgggcagggccagcacccggaggcgacggacgaggcggcgctggacaacccggatctgggccccttcctgctcaagcaggcgcgggacgccatggtgtccggcgagggcgggggcgcggcgcgcgcgctcgagttcgccgagcgtgcggcccgcgcgctcgagcgccgcggcgagggcgccgagctcgagctcgccatgagcctccacgtcgccgccgcgatccactgcgggctcggccggcacgccgacgccgtgcccgtgctcgagcgcgccgtcgccgtcgtcaccccgccgcccgcgccggcccccgtggccgagggtgaggaggtgccgcagccggaggaggaggtggatgagcgcaagggggaggagtgggcgctcgccgccttctccggctggatgcagctcggcgacacccacgccatgctcggccgcatggacgagtccatcgcctgctacggcaagggcttcgagatccagatggccgcgctcggcgaccgcgacccccgcgtcgccgagacctgcaggtatctggcggaagcgcatgtgcaagctctgcagttcgatgaggcagagaaactgtgccgcaaagccctcgagatccaccgggagcacagtgcacctgcatccctcgaggaggcctccgatcgccggctgatggcccttatcctggacgccaagggtgactatgacggcgccctggagcaccttgtactggcttccatgaccatggttgccaatggacgcgacgtcgaggttgcgacgattgatgtcgcgataggcaacacttacctggcccttgctcgtttcgacgagtctgtcttctcataccagaaggctttgactgtactcaagtctgcccgtggcgacgaccacccttcagtggcatctgtcttcgtccgccttgctgatctctatcaccgcacagggaagctccgtgagtccaaatcctactgtgagaatgctctccgtgtctatgcaaagcccgcgcctggtgctgcccctgatgaggttgctggaggcctaatggagattgctgccatctatgaggcgcttggagaccttgatgaggccctaaagcttcttcaaagggcactgaagttgctcgaggactcaccagggcagtggagcactgttgctgggatcgaagcacaaatgggtgtgttgtactacatgatagggaggtatgccgattcaaggaactcgttcgagagcgcggtttccaaattgagggccagtggggaaaggaagtcggcatttttcggtgttctgctgaaccagatggggctagcttgcgtacagctgttcaagattgatgaggctgcacagctgtttgaagaagcacgggcagttctagagcaggagtgtggtgcctctcatcctgatactcttggcgtatacagcaacctggctgcgatctatgatgccatgggaagggtggaggacgcgattgagatcctggagcatgtgctgaaggtgcgggaggagaagctgggcacggcgaacccggacgtggaggatgagaagaagcggctggcggagctgctgaaggaggcggggcggtcccggaaccggaagcagaagtcgctggagaacctgttcgggtccggcggtgctgcgcggggcgccaagaaggacggctccgggggcaggcggtggaccaacttcgggttcaggagctgagctgagaagaaaacagtggtgtgggcctttgtaacataagaggagagagaaagagagaaaaggaagggaggagagagaagcatgtgtaaagaaagaaaggtgttgctggtagagtaggaaggaaggaagatgagatgattgtgattgcagtttgttttgagtttcttctacatgttctgcatctactctc

SEQ ID NO: 31755 - protein, 610 aa, Triticum aestivum
MPGLAAADASPPAAAPAPRRLSSPLPRRAPPSPSPSSASRAVGKPARKSLGQGQHPEATDEAALDNPDLGPFLLKQARDAMVSGEGGGAARALEFAERAARALERRGEGAELELAMSLHVAAAIHCGLGRHADAVPVLERAVAVVTPPPAPAPVAEGEEVPQPEEEVDERKGEEWALAAFSGWMQLGDTHAMLGRMDESIACYGKGFEIQMAALGDRDPRVAETCRYLAEAHVQALQFDEAEKLCRKALEIHREHSAPASLEEASDRRLMALILDAKGDYDGALEHLVLASMTMVANGRDVEVATIDVAIGNTYLALARFDESVFSYQKALTVLKSARGDDHPSVASVFVRLADLYHRTGKLRESKSYCENALRVYAKPAPGAAPDEVAGGLMEIAAIYEALGDLDEALKLLQRALKLLEDSPGQWSTVAGIEAQMGVLYYMIGRYADSRNSFESAVSKLRASGERKSAFFGVLLNQMGLACVQLFKIDEAAQLFEEARAVLEQECGASHPDTLGVYSNLAAIYDAMGRVEDAIEILEHVLKVREEKLGTANPDVEDEKKRLAELLKEAGRSRNRKQKSLENLFGSGGAARGAKKDGSGGRRWTNFGFRS

SEQ ID NO: 31756 - protein, 530 aa, Triticum aestivum
MVSGEGGGAARALEFAERAARALERRGEGAELELAMSLHVAAAIHCGLGRHADAVPVLERAVAVVTPPPAPAPVAEGEEVPQPEEEVDERKGEEWALAAFSGWMQLGDTHAMLGRMDESIACYGKGFEIQMAALGDRDPRVAETCRYLAEAHVQALQFDEAEKLCRKALEIHREHSAPASLEEASDRRLMALILDAKGDYDGALEHLVLASMTMVANGRDVEVATIDVAIGNTYLALARFDESVFSYQKALTVLKSARGDDHPSVASVFVRLADLYHRTGKLRESKSYCENALRVYAKPAPGAAPDEVAGGLMEIAAIYEALGDLDEALKLLQRALKLLEDSPGQWSTVAGIEAQMGVLYYMIGRYADSRNSFESAVSKLRASGERKSAFFGVLLNQMGLACVQLFKIDEAAQLFEEARAVLEQECGASHPDTLGVYSNLAAIYDAMGRVEDAIEILEHVLKVREEKLGTANPDVEDEKKRLAELLKEAGRSRNRKQKSLENLFGSGGAARGAKKDGSGGRRWTNFGFRS

SEQ ID NO: 31757 - protein, 495 aa, Triticum aestivum
MSLHVAAAIHCGLGRHADAVPVLERAVAVVTPPPAPAPVAEGEEVPQPEEEVDERKGEEWALAAFSGWMQLGDTHAMLGRMDESIACYGKGFEIQMAALGDRDPRVAETCRYLAEAHVQALQFDEAEKLCRKALEIHREHSAPASLEEASDRRLMALILDAKGDYDGALEHLVLASMTMVANGRDVEVATIDVAIGNTYLALARFDESVFSYQKALTVLKSARGDDHPSVASVFVRLADLYHRTGKLRESKSYCENALRVYAKPAPGAAPDEVAGGLMEIAAIYEALGDLDEALKLLQRALKLLEDSPGQWSTVAGIEAQMGVLYYMIGRYADSRNSFESAVSKLRASGERKSAFFGVLLNQMGLACVQLFKIDEAAQLFEEARAVLEQECGASHPDTLGVYSNLAAIYDAMGRVEDAIEILEHVLKVREEKLGTANPDVEDEKKRLAELLKEAGRSRNRKQKSLENLFGSGGAARGAKKDGSGGRRWTNFGFRS

SEQ ID NO: 31758 - DNA, 1702 bp, Triticum aestivum
cattccagcccccctgattccctcctccctttcccattccgttcaccttcctacctctcatagttggtggtggcgcaagcagacgaaccattccggattcctcgccgccgccgccgaccggtccaaccccgaaccctagcttgctcgcccgcaatgccggccaccgactcctcagcctcgccggcgcaccaccaccaccacacctccttcggccgccacatcctctcgctgcgccaccgcgagcacggccagatccactccgccccgcccacgcccgaccacgccaacaccgccaacccctcctcctcccccgccgaccgcgaagtcgacgcctttcagcgccacgccgccgagctgctcctcgacctgctcccctgctcccccgacgccgcccccgccgacgccaagaacgccccgccggagatcctgtcgatagcgtggacccagcacctgctcgactccttcctcatctgcctcgaggagttccgctccgcgctcctcggcggcggccccggggccctcgcgcgccccccgctcgaccgcctcgtcgccgacttcttcgaccgcgccgtcaaggcgctcgacctctgcaacgcgctccgcgacggcctcgacctgctccgccagtggcgcaagcacctcgccatcgccgccgccgcgctcgccccgcagggcgccgcgtccgaccccgccgcgccgctcggggagggccagatccgccgcgcccgcaaggcgctcaccgacctcaccatcctcatgctcgacgacaaggacgccggcggcggggggcagcggaaccgctccttcggccggacgggtaacggcggcaaggacgccgccgggggccagagccgggggcaccaccgccgcagcagcagcggctccggctccggctccggcggctcccacttcaggtcgctgtcctggagcgtgtcccgcacctggtccgcgtcccgccagctgcaggccatcgggggcaacctgccggtgccccgcgccaacgacatcgccgccacgggcggcctcgcgtccgccgtgtacaccatgggcgccgtcctcttcgtcaccgcctgggcgctcgtcgccgccatcccctgccaggaccgcggcctccaggcgcacttcgccgtgcccaggagcttcccctgggccggcccggtcaccacgctctacgagcgcgtcctcgaggagtccaagaagaaggaccgcaagcactcgtgcgggctgctcaaggagatacacctcatcgagcgttggtcgcggcagctcatggagatcaccgacgccgcgcagttccccctggacaaggagaaggacgccgaggtgcgggaggccgcgcaggagctggtgcaggtgtgcgagacactcaaggaagggctcgacccgctcgagcggcaggtgcgcgagatgttccaccgcatcgtgcgcaccaggacggagatcctcgactgcttgagtaggcccaacaccgccgagtaggcgaaccggcatggatcatcatggcaatgctgtttggttgaacattgtgtgatatactcaaaatgcaggtggtatgctgatgatcatcgattgccggttgaaattgaggtagctttcctctgcataagttatacatgtgtcttgatgcatagaggccggcgtggccttatgataaaatcgagtggtttagttgtatttgatttattctttgtttgtagcagct

SEQ ID NO: 31759 - protein, 441 aa, Triticum aestivum
MPATDSSASPAHHHHHTSFGRHILSLRHREHGQIHSAPPTPDHANTANPSSSPADREVDAFQRHAAELLLDLLPCSPDAAPADAKNAPPEILSIAWTQHLLDSFLICLEEFRSALLGGGPGALARPPLDRLVADFFDRAVKALDLCNALRDGLDLLRQWRKHLAIAAAALAPQGAASDPAAPLGEGQIRRARKALTDLTILMLDDKDAGGGGQRNRSFGRTGNGGKDAAGGQSRGHHRRSSSGSGSGSGGSHFRSLSWSVSRTWSASRQLQAIGGNLPVPRANDIAATGGLASAVYTMGAVLFVTAWALVAAIPCQDRGLQAHFAVPRSFPWAGPVTTLYERVLEESKKKDRKHSCGLLKEIHLIERWSRQLMEITDAAQFPLDKEKDAEVREAAQELVQVCETLKEGLDPLERQVREMFHRIVRTRTEILDCLSRPNTAE

SEQ ID NO: 31760 - protein, 240 aa, Triticum aestivum
MLDDKDAGGGGQRNRSFGRTGNGGKDAAGGQSRGHHRRSSSGSGSGSGGSHFRSLSWSVSRTWSASRQLQAIGGNLPVPRANDIAATGGLASAVYTMGAVLFVTAWALVAAIPCQDRGLQAHFAVPRSFPWAGPVTTLYERVLEESKKKDRKHSCGLLKEIHLIERWSRQLMEITDAAQFPLDKEKDAEVREAAQELVQVCETLKEGLDPLERQVREMFHRIVRTRTEILDCLSRPNTAE

SEQ ID NO: 31761 - DNA, 974 bp, Triticum aestivum
acacagaatcaacagcccacaacgaaccaagtgtgatctagccactccctgcttcctgctgtgagtaatggcgaccatggtggccttgagctccttcgccggtgccgccgtcgtcggccgctccgcctcctggtctccggcggtgccgcgccggcgcgctctcctcgtcagggcccagaccgagccggatgtcgagccgaccaaggagacgatgacgagcgcatcgacatcctcccccagccccaccccaagcccgagcccgaccccggtggcgcccaagcccaaggccaaggctaacccctcggtctgggacgcgctcgcgttcagcggcccggcgccggagcgcatcaacggccggctcgccatggtgggcttcgtggcggcactctccgtcgaggcggcgcgcggcggcgggctactcgaccaggtcggcagcggcgccgggctgggatggttcctgacaaccgcggctgtgttctccgtggcatctctggtgccgctgcttcagggacagagcgtggagagcaagtccagcggcgtatggaccgccgacgccgagctatggaacggccgcttcgccatgctcggcctcgtcgcactcgccgtcaccgagttcatcaccggcacgcccttcgtcaacgtctgaaactagtgtagcactcccgtatgtgcgtgtacatattgttgagcaactagtggtacggactctggtagagtattctgtaacggattctgtaagccttatactccctccgttccaaattacttgtcgcagaaattgatgtaagccttatactccctccgttccaaattacttgtcgcagaaattgatgtatctaaaattaaaatacatctagatacatccatatttgtgacaagtaattcggaacggaagaaataggttatgtttcttgatgatgttgtctgggagcttagaattactgcatgaatgaattaagttcataccattgtat

SEQ ID NO: 31762 - protein, 192 aa, Triticum aestivum
MATMVALSSFAGAAVVGRSASWSPAVPRRRALLVRAQTEPDVEPTKETMTSASTSSPSPTPSPSPTPVAPKPKAKANPSVWDALAFSGPAPERINGRLAMVGFVAALSVEAARGGGLLDQVGSGAGLGWFLTTAAVFSVASLVPLLQGQSVESKSSGVWTADAELWNGRFAMLGLVALAVTEFITGTPFVNV

SEQ ID NO: 31763 - protein, 189 aa, Triticum aestivum
MVALSSFAGAAVVGRSASWSPAVPRRRALLVRAQTEPDVEPTKETMTSASTSSPSPTPSPSPTPVAPKPKAKANPSVWDALAFSGPAPERINGRLAMVGFVAALSVEAARGGGLLDQVGSGAGLGWFLTTAAVFSVASLVPLLQGQSVESKSSGVWTADAELWNGRFAMLGLVALAVTEFITGTPFVNV

SEQ ID NO: 31764 - protein, 144 aa, Triticum aestivum
MTSASTSSPSPTPSPSPTPVAPKPKAKANPSVWDALAFSGPAPERINGRLAMVGFVAALSVEAARGGGLLDQVGSGAGLGWFLTTAAVFSVASLVPLLQGQSVESKSSGVWTADAELWNGRFAMLGLVALAVTEFITGTPFVNV

SEQ ID NO: 31765 - DNA, 767 bp, Triticum aestivum
aaaaaccccgcgctcctcaccagaccagggcgcttcagtcgtggaggggatgctgctgatggccgcgcccgccgccgccgaccagcaccagaggcgccgccggggacggccgccgtgcgccgatctgctcctcaactgcgacctgccccctccctccaagctcttcggcccgttcccggccctgcacccgcagagggaaaggctggagagcgcgggcgggaccgacgagaagggcggcggcggcggcaaggacgtcctgctgcaggcgctgcgcctgtcgcagtcgcgggcgcgggaggcggaggagaagctggccgccgcggccgccagcagcggaggcctcgcggcgctgctcgtgcgggactccgtggcgctctcggcgcaccgccggtgggtgatgatgctggaggccgagaactcccccctcagggcaggaggaggaggaggaggagccgccggcacggagcccgacgaggaggatggcgcgggggccccccggcacccggtggcccccgcgtggtgggtcgcgctggcggtgtgcgtcggcctcgcgctcggcaacctcctgctctcaaactgatcgtccttgatttgattcggtttttgtcaatcccccgacgatccagtgcagtgctccagcgcttgtttgtgtgaaaatgttactaacatctactcctgtcgatgcttagcatgggaaacctcgtgctgttgtagataagataaacgggcgaaatcaagaggggaaacctcgggggattggtaggttg

SEQ ID NO: 31766 - protein, 217 aa, Triticum aestivum
KNPALLTRPGRFSRGGDAADGRARRRRPAPEAPPGTAAVRRSAPQLRPAPSLQALRPVPGPAPAEGKAGERGRDRREGRRRRQGRPAAGAAPVAVAGAGGGGEAGRRGRQQRRPRGAARAGLRGALGAPPVGDDAGGRELPPQGRRRRRRSRRHGARRGGWRGGPPAPGGPRVVGRAGGVRRPRARQPPALKLIVLDLIRFLSIPRRSSAVLQRLFV

SEQ ID NO: 31767 - protein, 192 aa, Triticum aestivum
KTPRSSPDQGASVVEGMLLMAAPAAADQHQRRRRGRPPCADLLLNCDLPPPSKLFGPFPALHPQRERLESAGGTDEKGGGGGKDVLLQALRLSQSRAREAEEKLAAAAASSGGLAALLVRDSVALSAHRRWVMMLEAENSPLRAGGGGGGAAGTEPDEEDGAGAPRHPVAPAWWVALAVCVGLALGNLLLSN

SEQ ID NO: 31768 - protein, 176 aa, Triticum aestivum
MLLMAAPAAADQHQRRRRGRPPCADLLLNCDLPPPSKLFGPFPALHPQRERLESAGGTDEKGGGGGKDVLLQALRLSQSRAREAEEKLAAAAASSGGLAALLVRDSVALSAHRRWVMMLEAENSPLRAGGGGGGAAGTEPDEEDGAGAPRHPVAPAWWVALAVCVGLALGNLLLSN

SEQ ID NO: 31769 - DNA, 1298 bp, Triticum aestivum
agaacatcctaatcgaaaatcatcgagctcgcatcacaggagttatctctggctagtcacgtcgcatcaaagccgaagaagcaatggccgccttcgccaccaggtccgcggccttccttggcctcgccgtcgtgctctgtttcctcgccggcgcggcgagcgcgcagcagctctctcccaacttctactcgaggtcttgccccaacctggcgtccatcgtgcggtcggggatgaccgccgcattgcagacggagaggcggatgggcgcgtccatcctccgcctcttcttccacgactgcttcgtcaatgggtgtgacggctcgattctgcttgacgacacctcgacgttcaccggcgagaagaacgccgggccgaacgccaactcggcgcgtgggttcgaggtgatcgacgccatcaagacccgggtcgaagccgcgtgcagggccaccgtctcctgcgccgacatcctcgcgctcgccgcccgtgacggtgtcaacctgctcggaggtcccacgtggagcgtgccgctggggcgcaaggactcgcgcacggcgagccagagcgcggccaacgcgaacctcccggggccggggtccagcctcgccacgctcatcgccatgttcggcaacaagaacctgtcgccgcgggacatgacggcgctctccggcgcgcacaccatcgggcgctcgcagtgccagttcttccgcaaccgcatctacaacgagcgcaacatcaacgccagcttcgcggcgctgcggcagcggacgtgcccgcggtcgggcggcgacggcaacctcgcgcccttcgacgtgcagaccgccgacgggttcgacaacgcctactaccagaacctggtcgggcagcgcggcctcctgcactcggaccaggagctcttcaacggcgggtcgcaggacgcgctggtgcggcagtacagcagcagccccagccagttctccgccgacttcgtcacggccatgctgaagatgggcggcctgctgccgtcgtccgggacgcagacggaggtcaggttgaactgcaggagacccaactaaaaagtacacacataacaagtgtgctaaataatgattgatgccttggaaaaccaggcattggtcaggttcacgtatgtatgtgtatgtatgatgaagaacaccaaatgtacaaacgctcgtttgctcaatccggggcgaacgtgcaaactacaaagtatcaaaatgtatgttggtcgtaaaagtgtatcatgatcatcatcatcaatacagaacaatgggatggtgcaatcatcataattaaagaat

SEQ ID NO: 31770 - protein, 322 aa, Triticum aestivum
MAAFATRSAAFLGLAVVLCFLAGAASAQQLSPNFYSRSCPNLASIVRSGMTAALQTERRMGASILRLFFHDCFVNGCDGSILLDDTSTFTGEKNAGPNANSARGFEVIDAIKTRVEAACRATVSCADILALAARDGVNLLGGPTWSVPLGRKDSRTASQSAANANLPGPGSSLATLIAMFGNKNLSPRDMTALSGAHTIGRSQCQFFRNRIYNERNINASFAALRQRTCPRSGGDGNLAPFDVQTADGFDNAYYQNLVGQRGLLHSDQELFNGGSQDALVRQYSSSPSQFSADFVTAMLKMGGLLPSSGTQTEVRLNCRRPN

SEQ ID NO: 31771 - protein, 273 aa, Triticum aestivum
MTAALQTERRMGASILRLFFHDCFVNGCDGSILLDDTSTFTGEKNAGPNANSARGFEVIDAIKTRVEAACRATVSCADILALAARDGVNLLGGPTWSVPLGRKDSRTASQSAANANLPGPGSSLATLIAMFGNKNLSPRDMTALSGAHTIGRSQCQFFRNRIYNERNINASFAALRQRTCPRSGGDGNLAPFDVQTADGFDNAYYQNLVGQRGLLHSDQELFNGGSQDALVRQYSSSPSQFSADFVTAMLKMGGLLPSSGTQTEVRLNCRRPN

SEQ ID NO: 31772 - protein, 263 aa, Triticum aestivum
MGASILRLFFHDCFVNGCDGSILLDDTSTFTGEKNAGPNANSARGFEVIDAIKTRVEAACRATVSCADILALAARDGVNLLGGPTWSVPLGRKDSRTASQSAANANLPGPGSSLATLIAMFGNKNLSPRDMTALSGAHTIGRSQCQFFRNRIYNERNINASFAALRQRTCPRSGGDGNLAPFDVQTADGFDNAYYQNLVGQRGLLHSDQELFNGGSQDALVRQYSSSPSQFSADFVTAMLKMGGLLPSSGTQTEVRLNCRRPN

SEQ ID NO: 31773 - DNA, 1724 bp, Triticum aestivum
aaaactgaacccaagggttcgctacccgcccccctcccatcctcgcgatggcggctgcgacggcgacggcggcaggagcagccgctgcggccgcctccatatccttgtttgcgtactacttcctcttcggcaggagcggctccaagttcctatgggcccgcaccaccagcgcggacgaccggaggacgcggcggaagggcctcgtggaggccgtcggcaacacgcccctcatccgcatcaacagcctctccgacgccaccgggtgtgagattctggggaaggccgaatttctgaacccgggaggcagcgtgaaggaccgtgtggcggttaagattatcgaggaggctctgaaatctggggatcttgtctgtggtggtgtagtaacagaagggagtgccggaagcacggctattagcttggccactgttgctcctgcttatggctgtaggtgccatgttgttattcctgatgatgctgccgttgagaagtctcaaataattgaagcgcttggagctactgtggaacgagtgcgtcctgtttcaatcactcacagagaccattttgtcaatattgcaagaagaagggcattggaagccaatatagcatcagcacaaagggaacctaatcacatacaaactaatggttcagcctatgttgatactaaaacgctgaactccaaacaaactaacgggtcagcacatgccagttctgaagtgcctgacactggcaaatgttaccctaattctgattcaaagggaggtttctttgctgaccagtttgagaatatggcaaactatcgagcgcattacgaatggactggtcctgagatatggaagcaaactaaagggactgttcatgcctttgttgctgccgctggtactggcggtacgattgctggagtttcacgatatcttaaggaaatgaacagaaatgtccaatgctttttaatggatccacctggatctggtctgtttaataaggtaactagaggggttatgtacacaaaagaggaggctgagggcaaaaggctgaaaaatccttttgacactattactgaaggaattggaatcaacagggtcacagcaaattttatgatggcagaactggatggcgcttaccggggaacagatagagaagctgtcgagatgtcaaggtttctgctgagaagagatggactatttgttgggagttcttcagccatgaattgtgtcggggctgtaagagttgcccgggatttaggtccaggacatacaattgtgacaattctctgcgacagtgggatgaggcatctaagtaagttcttcaatgatgaatatttggccaatcatgggttgacaccaactgctactggtctggagtttctcgatcaataaaaacttcacaggggaatgcatgatttcagcaattttgtcattcctcgttgtctgtcctgaaaacagttgatgagtgaacaccgaggcgccgaaacattccatctaacaagggaactgttggctccagataatggacctcaaattttatgtcaccctaattgaaggttcccctggaagatatagttatgtactttagagtagttgtcatagccatttagtaggggttgggatagccaaccattcagactgttgtacactgcaaatcttcttgtttttctttagcctgttgtacactgctcaagtcaccaattcatctatgtatacgcagttatttatacaatcatctatgcg

SEQ ID NO: 31774 - protein, 441 aa, Triticum aestivum
MAAATATAAGAAAAAASISLFAYYFLFGRSGSKFLWARTTSADDRRTRRKGLVEAVGNTPLIRINSLSDATGCEILGKAEFLNPGGSVKDRVAVKIIEEALKSGDLVCGGVVTEGSAGSTAISLATVAPAYGCRCHVVIPDDAAVEKSQIIEALGATVERVRPVSITHRDHFVNIARRRALEANIASAQREPNHIQTNGSAYVDTKTLNSKQTNGSAHASSEVPDTGKCYPNSDSKGGFFADQFENMANYRAHYEWTGPEIWKQTKGTVHAFVAAAGTGGTIAGVSRYLKEMNRNVQCFLMDPPGSGLFNKVTRGVMYTKEEAEGKRLKNPFDTITEGIGINRVTANFMMAELDGAYRGTDREAVEMSRFLLRRDGLFVGSSSAMNCVGAVRVARDLGPGHTIVTILCDSGMRHLSKFFNDEYLANHGLTPTATGLEFLDQ

SEQ ID NO: 31775 - DNA, 389 bp, Triticum aestivum
ctccagaaaaaccctagccctcgcagccgcagcggcgcgcacacctctccctccttcctgaagacagcgccgccgccggccagagcacaggatggcgaccgtccccgctcccttgtggccgccgcgcgcgacctgctgcgcgaccgcgccgcggactatgccgcgaggctcaaggccatggggaagccggtggagctcgtggagttcgaggggcagcaccacgggttcttcgcggtcgagccgtacggcgacgccggcagcgaggtggtccggctcgtcaaacggtttgtctacggcaacggcggcgcctccgactaaattggagatcgagcaaagctgttgagggctcctttgattcaaaggatatctttagaatttttgaaggattg

SEQ ID NO: 31776 - protein, 105 aa, Triticum aestivum
LQKNPSPRSRSGAHTSPSFLKTAPPPARAQDGDRPRSLVAAARDLLRDRAADYAARLKAMGKPVELVEFEGQHHGFFAVEPYGDAGSEVVRLVKRFVYGNGGASD

SEQ ID NO: 31777 - protein, 83 aa, Triticum aestivum
MATVPAPLWPPRATCCATAPRTMPRGSRPWGSRWSSWSSRGSTTGSSRSSRTATPAARWSGSSNGLSTATAAPPTKLEIEQSC

SEQ ID NO: 31778 - protein, 61 aa, Triticum aestivum
MPRGSRPWGSRWSSWSSRGSTTGSSRSSRTATPAARWSGSSNGLSTATAAPPTKLEIEQSC

SEQ ID NO: 31779 - protein, 46 aa, Triticum aestivum
MGKPVELVEFEGQHHGFFAVEPYGDAGSEVVRLVKRFVYGNGGASD

SEQ ID NO: 31780 - DNA, 1451 bp, Triticum aestivum
gtagaaaatccacccccgttcccgcacaggccagacctggctgattgacttttcggtcccggccgagcgagctcacacacccacacacgctccgcaccccgtctgcctcacatgtggaaccgcccccaccccctctcacactcccgtcccggcgccctctccccactcctccgcgtcctcccccgcgccgtcgccgggccgccgccgccgtccgagcacgaccggatccgggtggcgccgcctccgcggatggacgccacctcgccgtcggggcgccccaccacgcctcggcggcagctgcagctgcagggcccgcgcccgccgcggctcagcgtgcgccccgagtctcacgccatcaagaagccgtccggggcgccgccgcaggcccaggggcagggccacgcccggcgggaggagaagcagcaaggccagccgccgcgggagccggtgatcatctacgacgcgtcgcccaagatcatccacaccaagcccagcgagttcatggcgctcgtgcagcgtctcaccggccccggctctggcgcgctcccctccgaggcccagacccaggactaccagatggacgaggccgtgccggggcagtccttcctgccgccggagcttctcctctcgccgtccgccgcgatgtccccggccgcgaggctggctaccatcgagcggtccgtccggccgatgcccgcgccgacgccggattacgtcgacttcaataactacagattcgacgacggcggcctcgcggcggttctcggcgcgggtaggccagggcccggcatcctctcccctttgccgtcgtccctgccgccagccgcggcgtccgtgctgttctcgccgctgccgttcgacccgaacggcctcagctggctgaacgagctgagccccatcctccgagcggcgtccaccggcgccggctcctcaggcagcggcagcggcggcggcgggactagcaacggcggcgcctaccggcaaccacaatcctactactccgaccccttcgtcccgagcccccgcaacctccttgccacgcccaccgtgccgtcgccgcgaaccttcgcggagctcatgagcaacctgccagatctctaggccgccgcctccgtcaaagacggcaccagcggccgaaatttctcttttttttttcttttttgcttctccatttttggggggttaggcgcagcccggtgtggtggggccccgtagtgatgacaggttaattagcgaaaaattatcctctgggttttattaattcttgctgggcaaccacttgcccactaggcagcgaggaaagggactaggcagcgaggaaagggggaggaaggggaggagaaagcaatgcctaaagtcagcagtggtagccgaggaaatgattgtttgataatgcaccatgactttattcttttaccctggtgaattactccactgatgatgcgttcttg

SEQ ID NO: 31781 - protein, 329 aa, Triticum aestivum
MWNRPHPLSHSRPGALSPLLRVLPRAVAGPPPPSEHDRIRVAPPPRMDATSPSGRPTTPRRQLQLQGPRPPRLSVRPESHAIKKPSGAPPQAQGQGHARREEKQQGQPPREPVIIYDASPKIIHTKPSEFMALVQRLTGPGSGALPSEAQTQDYQMDEAVPGQSFLPPELLLSPSAAMSPAARLATIERSVRPMPAPTPDYVDFNNYRFDDGGLAAVLGAGRPGPGILSPLPSSLPPAAASVLFSPLPFDPNGLSWLNELSPILRAASTGAGSSGSGSGGGGTSNGGAYRQPQSYYSDPFVPSPRNLLATPTVPSPRTFAELMSNLPDL

SEQ ID NO: 31782 - protein, 283 aa, Triticum aestivum
MDATSPSGRPTTPRRQLQLQGPRPPRLSVRPESHAIKKPSGAPPQAQGQGHARREEKQQGQPPREPVIIYDASPKIIHTKPSEFMALVQRLTGPGSGALPSEAQTQDYQMDEAVPGQSFLPPELLLSPSAAMSPAARLATIERSVRPMPAPTPDYVDFNNYRFDDGGLAAVLGAGRPGPGILSPLPSSLPPAAASVLFSPLPFDPNGLSWLNELSPILRAASTGAGSSGSGSGGGGTSNGGAYRQPQSYYSDPFVPSPRNLLATPTVPSPRTFAELMSNLPDL

SEQ ID NO: 31783 - protein, 199 aa, Triticum aestivum
MALVQRLTGPGSGALPSEAQTQDYQMDEAVPGQSFLPPELLLSPSAAMSPAARLATIERSVRPMPAPTPDYVDFNNYRFDDGGLAAVLGAGRPGPGILSPLPSSLPPAAASVLFSPLPFDPNGLSWLNELSPILRAASTGAGSSGSGSGGGGTSNGGAYRQPQSYYSDPFVPSPRNLLATPTVPSPRTFAELMSNLPDL

SEQ ID NO: 31784 - DNA, 986 bp, Triticum aestivum
aaaaatcgccttcgtctttccccgtcgtctccaccaacgccagtttttccccgtcgtctccaccaacgccagtccaaatccaaacccgaaggaggaagagaggctagctagctagggttccgcctcccgccggccggagagagggagagagaggatgacgacggcggcgcggccaacgtgggcgccagcgaagggcgggaacgagcagggcggcacgcgtatcttcgggccctccgggaagtactcctcccgcgacctcgccgcacacacctccctcaagcccagaaaagagggacaacaaactcaagaggaggtacagaagaggaatcttagggatgaacttgaggagcgtgaacgcaagcacttctcatccaaggataagtcctatgttgacgagagggaccggcgaaaaagttcaggcctgctcttagaaggttcaaaacgggatgaggataagatagttccacgtgaaattgatgcagatgactctgacgtggaactaaaaagtgatgatgaaagcgacgatgatgacgacgacgatgacactgaggcactaatggcagagcttgaaaggattaaaaaagaaagagccgaggacaggcttagaaaggagcgtcagcaagcagaagaagaggccaagatgaaggaggctgagctgatgcgaggaaacccactgatcaatatgaataattctggctccttcaatgtgaagagaaggtgggatgatgatgttgtattcaagaaccaggctcgtggagagactaagacaccgaaacggttcatcaatgacaccatcagaagtgatttccaccgcaagtttctgcataggtacatgaaatgatgctgctgtatgctttatgttgtctggacagtatgcatgctgaaagagcctgtgatgtttctgtattctgaagatcgatttgtatgacataactgtaacagctacgttatcttaatggtgatatgtttaccctgttcctaagagt

SEQ ID NO: 31785 - protein, 228 aa, Triticum aestivum
MTTAARPTWAPAKGGNEQGGTRIFGPSGKYSSRDLAAHTSLKPRKEGQQTQEEVQKRNLRDELEERERKHFSSKDKSYVDERDRRKSSGLLLEGSKRDEDKIVPREIDADDSDVELKSDDESDDDDDDDDTEALMAELERIKKERAEDRLRKERQQAEEEAKMKEAELMRGNPLINMNNSGSFNVKRRWDDDVVFKNQARGETKTPKRFINDTIRSDFHRKFLHRYMK

SEQ ID NO: 31786 - DNA, 1862 bp, Triticum aestivum
cccatcccctctcttctctatagcttactagcagcagcgctctcttcttgctcttcgctatctagctccactttgctcgttgtcctctccctcttggatcgatccggccttcggcggccatgaattgcgccggggtcgccgatgggttgcctgcaggcgagccggataccggcgtcgtcgaccagccacggaggaggagctgcctgtagcgtagctgagctatagtgctcggtcgatctgctgcttcttgggggcgaggaagaagaataaccgaggcttactctcgacgacaggtgcttcgcacagtcgcgatgtttaggaaggacacgtcggacagaagcatccgtttcaagagaaggggcacaaggcggagccagataatttccggtgacgcacaccatggatccccagacatttgtgaggctctcagtcgggcagcttggcctgaggctccccggcgcaagtgccagaaaggctttccactgcgagatccggctccgaggcttcccggttcagttagctccggtgcctctggaaaattcttcagagtttcatcttgatccgcacgcgaatgcggcggtgttctccctggacgagcccggcctcaaggcgctgccgacgtcgaggtggttccgaaccccggagccgccgtacctcgagatcgctgtgtacgtgagcaggcgcgacggcggcgggcattgcgtcgggttgaagcggcggctggtcggggctgtcagggtggatgtcgggccggagtggcgcgacggcaagcctgtgctgcttcgccatagctggacgggcatcggcagggcggcggagctgcacgtgagagtgagggtggaggctgaccctcggtacgtgttccggttcgaggacgaggtcgcgctgaacccgcaggtggtccagctccatggcggcgccagccagcccatctttagctgcaagttcatccgcgacgtgaggcgggcgtcgcagccggatcatttgggcgggaagtattggtcgagctccggaagcggcgaagagaaggagacggagatggcggggaggaggagggagaggaagggctggaaggtggcgatccacgacctgtccggctccgccgtggccgcggcgttcatggccacgccgttcgtgccggcgacgggctccgacacggtggcgcggtccaacccaggcgcgtggctcatcgtccgcgccgacacaacgggatcgtcggagagctggcagccgtggggccggctggaggcgtggcgggagtgcgctgcgccggcgggcggcaaggacgccgtgtgccttcggctgcatctcctcccggagcggcgggacgcgtgcgtactcgtgtccgagacgcctctgagctgtgataagggcggggagttctccatcgacatggacagacagtcgatcctcccggaggacgcagtggcgtcggagacgacgtcgtcgtcgtactgcgcagcgagcatgggacagtcgtgcgcgggcggcggcttcgtgatgagctgcagcgtgcagggcgaggcggcgacgagcagcaggccgccgctggtgcacctcgccgcgcggcacgtcatgtgcatggaagacgcagccatgttcctcgcgcttgcggctgccgtcgacctcagtgtcaaggcgtgccggccgttccggagcaagacggcggcggctaagaagaagacggctgctggctcctcttcccccgattccctggagctcgacacatagattagctagagctagcagtcctcactcctcagtcaagcatcagatcatccatggtcactctgtaaatccacttgtttcgaccaaacttgttgaaaactctaccagttttttctaggcctaacctgtagacg

SEQ ID NO: 31787 - protein, 443 aa, Triticum aestivum
MDPQTFVRLSVGQLGLRLPGASARKAFHCEIRLRGFPVQLAPVPLENSSEFHLDPHANAAVFSLDEPGLKALPTSRWFRTPEPPYLEIAVYVSRRDGGGHCVGLKRRLVGAVRVDVGPEWRDGKPVLLRHSWTGIGRAAELHVRVRVEADPRYVFRFEDEVALNPQVVQLHGGASQPIFSCKFIRDVRRASQPDHLGGKYWSSSGSGEEKETEMAGRRRERKGWKVAIHDLSGSAVAAAFMATPFVPATGSDTVARSNPGAWLIVRADTTGSSESWQPWGRLEAWRECAAPAGGKDAVCLRLHLLPERRDACVLVSETPLSCDKGGEFSIDMDRQSILPEDAVASETTSSSYCAASMGQSCAGGGFVMSCSVQGEAATSSRPPLVHLAARHVMCMEDAAMFLALAAAVDLSVKACRPFRSKTAAAKKKTAAGSSSPDSLELDT

SEQ ID NO: 31788 - protein, 230 aa, Triticum aestivum
MAGRRRERKGWKVAIHDLSGSAVAAAFMATPFVPATGSDTVARSNPGAWLIVRADTTGSSESWQPWGRLEAWRECAAPAGGKDAVCLRLHLLPERRDACVLVSETPLSCDKGGEFSIDMDRQSILPEDAVASETTSSSYCAASMGQSCAGGGFVMSCSVQGEAATSSRPPLVHLAARHVMCMEDAAMFLALAAAVDLSVKACRPFRSKTAAAKKKTAAGSSSPDSLELDT

SEQ ID NO: 31789 - DNA, 1177 bp, Triticum aestivum
accccccactccccatctatccccgccccgcccgtcccggatccacaccgccgccgcgatgccgtcgttcaaggccccggcgccgggcttctccgtccgcttcagcccgttccacgagcatcgcctcctcgctgccacctcgcagcacttcggtctcgtcggcaacgggcacctcctggttctcgacctctccgccgccgggcccggcgggcccggcctcaccccgctcttctccttccccacctccgacgcgctcttcgactgcgcgtggtccgagtcccacgactccctctgcgccgccgcgtcgggggacggctccgtgcggctcttcgacgtcacgctgccgccggcgcagaaccccgtccgcctcctccgggagcacgcgcgggaggtccacgggatcgactggaaccccgtccgccgcgacgccttcctctccgcctcctgggacgacaccctcaagctctggtcccccgaccgccccgcctccgtccgcaccttccgcggccacgagtactgcgtctacgccgccgcgtggtcggcccggcacccggacgtcttcgcgtcggcgtccggcgaccacacggcccgcgtctgggacgtgcgggagccggggcccaccctcgtcatcccggcccacgaccacgaggtgctctccctggattgggacaagtacgacccgtccatcctggccaccggctccgtcgacaagtcgatccgcatctgggacgtccgctcgccgcaggcgcccctcgcccagctcgcggggcacgggtacgccgtcaagcgcgtcaagttctcgccgcatcggcagggcatgctcatgtcctgctcctacgacatgacggtctgcatgtgggattaccggaaagaggacgccctgctgcaaaggtacggccaccacaccgagttcgtagctgggatcgacatgagcgtgctcaccgatgggctgctggccagcaccggctgggacgagatgatctacgtttggccatttgggagtgatcccagagcaatgtaacacaacatattttgataatctgtatcatgtctgttgagtcgatcttacattggctgtgatacatatggaatggaatggaagtaaacacctggtgagttgaagttggaataatgctacggtaccattgtttgcttcacaaattggttaagtttttag

SEQ ID NO: 31790 - protein, 339 aa, Triticum aestivum
PPTPHLSPPRPSRIHTAAAMPSFKAPAPGFSVRFSPFHEHRLLAATSQHFGLVGNGHLLVLDLSAAGPGGPGLTPLFSFPTSDALFDCAWSESHDSLCAAASGDGSVRLFDVTLPPAQNPVRLLREHAREVHGIDWNPVRRDAFLSASWDDTLKLWSPDRPASVRTFRGHEYCVYAAAWSARHPDVFASASGDHTARVWDVREPGPTLVIPAHDHEVLSLDWDKYDPSILATGSVDKSIRIWDVRSPQAPLAQLAGHGYAVKRVKFSPHRQGMLMSCSYDMTVCMWDYRKEDALLQRYGHHTEFVAGIDMSVLTDGLLASTGWDEMIYVWPFGSDPRAM

SEQ ID NO: 31791 - protein, 334 aa, Triticum aestivum
TPHSPSIPAPPVPDPHRRRDAVVQGPGAGLLRPLQPVPRASPPRCHLAALRSRRQRAPPGSRPLRRRARRARPHPALLLPHLRRALRLRVVRVPRLPLRRRVGGRLRAALRRHAAAGAEPRPPPPGARAGGPRDRLEPRPPRRLPLRLLGRHPQALVPRPPRLRPHLPRPRVLRLRRRVVGPAPGRLRVGVRRPHGPRLGRAGAGAHPRHPGPRPRGALPGLGQVRPVHPGHRLRRQVDPHLGRPLAAGAPRPARGARVRRQARQVLAASAGHAHVLLLRHDGLHVGLPERGRPAAKVRPPHRVRSWDRHERAHRWAAGQHRLGRDDLRLAIWE

SEQ ID NO: 31792 - protein, 320 aa, Triticum aestivum
MPSFKAPAPGFSVRFSPFHEHRLLAATSQHFGLVGNGHLLVLDLSAAGPGGPGLTPLFSFPTSDALFDCAWSESHDSLCAAASGDGSVRLFDVTLPPAQNPVRLLREHAREVHGIDWNPVRRDAFLSASWDDTLKLWSPDRPASVRTFRGHEYCVYAAAWSARHPDVFASASGDHTARVWDVREPGPTLVIPAHDHEVLSLDWDKYDPSILATGSVDKSIRIWDVRSPQAPLAQLAGHGYAVKRVKFSPHRQGMLMSCSYDMTVCMWDYRKEDALLQRYGHHTEFVAGIDMSVLTDGLLASTGWDEMIYVWPFGSDPRAM

SEQ ID NO: 31793 - DNA, 2023 bp, Triticum aestivum
gttagatctctgcttacagtagccgagtccccactgtgtagcgtagtgtgttctcttctcttctcccgtcacgcccaccccccttcttcccccctcactctccctcccacactctcagcagccgccgcccaagctgagagggcggggcacacacagaggcacgcatccggccagcagaccagcacggtgcgagcaatggagtatgagaggattcacaagccccaggcaggcgccctttctcccacaaagctgaggatgaagctcctgggagcccacaaccgcgtgagggtcatcagcagcagctcgtcgcgaacatcgccttcaaagaacgccgagccatcgctagcgcacaacagattattagtatgcgatgttcttgacgaagtttcagacagctccggtgcctccaaatgccctgcagcagtcagcaacaccgaagttatagacaaggatccagcagtagataggtacaaggttcagaacacgcccaagagttcagttcaccaaccggcgccgagcaactcaagcatgatacatccagtgcgaactgtcgaggaggacagtaacgaatgcgacagtggtcttgacaatgccagtaccagcagcttcgagttccatggaggtgagaagacggcggcgaagaacccaacggcggggtacttctcgagacaggcttcctccaagtggaacgacgcggagaaatggattgtgaacaagcagactgttcagcagaacaccaccaccaagggcgcatcgcagaaccagagtgcgcaccaggtgagttccgctgcgcccaggggcggtggcgttgtgcccaaacaccacggaacatttgctcgccccattcagaacatgaagagattcaatccggcttcgtcagcctctcggagcatattagagaggctgtctttcgcttcgcatcagccgaagctggtcaggcatgctgatgtctgtgcagatcaaggttctagcgccatctcggactatcagaagggtcaagctgaaaccgattcaattgcaattaagccctgcaatgatactgaagctatttctacagttcaggcggtgtctgtgagagatgtgggcacagaaatgactccaataccaagtcaagatccgtcaagaacaggaacaccacttgggtctgtgacaccgactcgcagccctaattgttcgataccatcaactcctgtaggtggacgatcgtcggcatcaataggagaagacaacgcagatgatggtccttatttcaacagaaaaggtggcatgaatgaaatgtcagaggatgaaatcaggctcaaggcaaggaaagaaatcgctgccctaggtgtacaactaggaaagatgaacattgcttcatgggctagtaaagaggagctagaattagtctctgcgacaccgagcatcgctgatctggagcggatgaagcaggaatacgctactcgtgctgcagcattcgaggatgctgaaaattctaaacacacggcacgattcaagaaggaagagctgaagatcgaagcatgggagagccgccaaagaacaaaagttgaatccgaaatgaagagactagaggaacgcgcggagaaaatgagaagcgaggccatggcgaggatggccgaaaggctggagctggcacgccgtgtggccgaggagaagcgggcatcagccaacgccaagatgaacaagcaagcagcaagggcagttcagaaggccgatctgattcgccagacaggacggattccagggtcgcgtatcctatgctgcggctgcttctgtgaaccttagcacttgtttaactactagcctgttaaaatatggtcgtgagaggaatctaatttcctcctatagtcagcattccctggttttttagtatgcaaaagggaatgtctggtctaggtgattcaggtgtacacattcttcattgtcatataaataatttgcttagtgtgaggtgtgccaggttcttgttttttttagaaaaaaaaaaaaaaaaaaaaaaaaaaaaaaaaaaaaaaaaaaaaag

SEQ ID NO: 31794 - protein, 594 aa, Triticum aestivum
VRSLLTVAESPLCSVVCSLLFSRHAHPPSSPLTLPPTLSAAAAQAERAGHTQRHASGQQTSTVRAMEYERIHKPQAGALSPTKLRMKLLGAHNRVRVISSSSSRTSPSKNAEPSLAHNRLLVCDVLDEVSDSSGASKCPAAVSNTEVIDKDPAVDRYKVQNTPKSSVHQPAPSNSSMIHPVRTVEEDSNECDSGLDNASTSSFEFHGGEKTAAKNPTAGYFSRQASSKWNDAEKWIVNKQTVQQNTTTKGASQNQSAHQVSSAAPRGGGVVPKHHGTFARPIQNMKRFNPASSASRSILERLSFASHQPKLVRHADVCADQGSSAISDYQKGQAETDSIAIKPCNDTEAISTVQAVSVRDVGTEMTPIPSQDPSRTGTPLGSVTPTRSPNCSIPSTPVGGRSSASIGEDNADDGPYFNRKGGMNEMSEDEIRLKARKEIAALGVQLGKMNIASWASKEELELVSATPSIADLERMKQEYATRAAAFEDAENSKHTARFKKEELKIEAWESRQRTKVESEMKRLEERAEKMRSEAMARMAERLELARRVAEEKRASANAKMNKQAARAVQKADLIRQTGRIPGSRILCCGCFCEP

SEQ ID NO: 31795 - protein, 529 aa, Triticum aestivum
MEYERIHKPQAGALSPTKLRMKLLGAHNRVRVISSSSSRTSPSKNAEPSLAHNRLLVCDVLDEVSDSSGASKCPAAVSNTEVIDKDPAVDRYKVQNTPKSSVHQPAPSNSSMIHPVRTVEEDSNECDSGLDNASTSSFEFHGGEKTAAKNPTAGYFSRQASSKWNDAEKWIVNKQTVQQNTTTKGASQNQSAHQVSSAAPRGGGVVPKHHGTFARPIQNMKRFNPASSASRSILERLSFASHQPKLVRHADVCADQGSSAISDYQKGQAETDSIAIKPCNDTEAISTVQAVSVRDVGTEMTPIPSQDPSRTGTPLGSVTPTRSPNCSIPSTPVGGRSSASIGEDNADDGPYFNRKGGMNEMSEDEIRLKARKEIAALGVQLGKMNIASWASKEELELVSATPSIADLERMKQEYATRAAAFEDAENSKHTARFKKEELKIEAWESRQRTKVESEMKRLEERAEKMRSEAMARMAERLELARRVAEEKRASANAKMNKQAARAVQKADLIRQTGRIPGSRILCCGCFCEP

SEQ ID NO: 31796 - protein, 509 aa, Triticum aestivum
MKLLGAHNRVRVISSSSSRTSPSKNAEPSLAHNRLLVCDVLDEVSDSSGASKCPAAVSNTEVIDKDPAVDRYKVQNTPKSSVHQPAPSNSSMIHPVRTVEEDSNECDSGLDNASTSSFEFHGGEKTAAKNPTAGYFSRQASSKWNDAEKWIVNKQTVQQNTTTKGASQNQSAHQVSSAAPRGGGVVPKHHGTFARPIQNMKRFNPASSASRSILERLSFASHQPKLVRHADVCADQGSSAISDYQKGQAETDSIAIKPCNDTEAISTVQAVSVRDVGTEMTPIPSQDPSRTGTPLGSVTPTRSPNCSIPSTPVGGRSSASIGEDNADDGPYFNRKGGMNEMSEDEIRLKARKEIAALGVQLGKMNIASWASKEELELVSATPSIADLERMKQEYATRAAAFEDAENSKHTARFKKEELKIEAWESRQRTKVESEMKRLEERAEKMRSEAMARMAERLELARRVAEEKRASANAKMNKQAARAVQKADLIRQTGRIPGSRILCCGCFCEP

SEQ ID NO: 31797 - DNA, 1168 bp, Triticum aestivum
acagcggtcgtgccactcaacattattgccagatccattcctcccgtgcgagagcgacaggcagacagcggccgtgccgtgccggtggcgcgcggcaagcggcgacggccatggagctcctgcgggacagcatccccatggtgtccctggccgccgcggccgccgcgctgtacgcgcgcatggcctcgtcgctcctccgccccggcctcccgcgcctcgtctcgctgctcccgctcttcccattcctcgccgccgctcccctggccctcacttcctccgccatcgtccggggcaccgccgccttcttcctgacctggctctgcacgttcaagctcgccctcctcgccgccggccgcgggccgctcgaccccgcgctccccgtgctgccgttcctcttcaccacgctgctccccgtcaagctccgcccctccggtgcgggagcatccaaagccaagccgctgccgtcgctcgtctcttgcgcggccaaggtcgccgccatagccgccatcctcggcatctaccagtacaacgctcggctgcacccctacgcgcgccggacgctgtacggcgtccacatatactgcttcctggacctcttcttcccctgcatcgcggcggccgccggcgcgctcggcatggagacggagccgcagttcgaccgcccctacctggcctcctcgctgcgggacttctggggccgccggtggaacctcatggtgtcggccatcctccggccgtcggtgtacatccccgtgcttgcgcgcgccgggagccccgccggcgtgctggccaccttcctggtgtccgggctgatgcacgagggcatggtgtactacctcagcttccggcggccggacggccggatgaccgccttcttcctgctccatggcgtctgctgcgtcgccgaggggtggtgcgcccggcggtgggcggcgagggggtggccgtcgccgtcgcgggccgtggcgacggtgattgtggtggtgttcgtcgcccgcacgtcgttctggctcttcttcccgccgttgtgcagggacggaggcgaggagaagctgctggcggagtgggctgccctggcggccttcttcctcgacgccggcagaaagattaatggcattgtacgttcaaccgactaacgaaggaaaataaacactctcaaaagtttaac

SEQ ID NO: 31798 - protein, 377 aa, Triticum aestivum
SGRATQHYCQIHSSRARATGRQRPCRAGGARQAATAMELLRDSIPMVSLAAAAAALYARMASSLLRPGLPRLVSLLPLFPFLAAAPLALTSSAIVRGTAAFFLTWLCTFKLALLAAGRGPLDPALPVLPFLFTTLLPVKLRPSGAGASKAKPLPSLVSCAAKVAAIAAILGIYQYNARLHPYARRTLYGVHIYCFLDLFFPCIAAAAGALGMETEPQFDRPYLASSLRDFWGRRWNLMVSAILRPSVYIPVLARAGSPAGVLATFLVSGLMHEGMVYYLSFRRPDGRMTAFFLLHGVCCVAEGWCARRWAARGWPSPSRAVATVIVVVFVARTSFWLFFPPLCRDGGEEKLLAEWAALAAFFLDAGRKINGIVRSTD

SEQ ID NO: 31799 - protein, 369 aa, Triticum aestivum
QRSCHSTLLPDPFLPCESDRQTAAVPCRWRAASGDGHGAPAGQHPHGVPGRRGRRAVRAHGLVAPPPRPPAPRLAAPALPIPRRRSPGPHFLRHRPGHRRLLPDLALHVQARPPRRRPRAARPRAPRAAVPLHHAAPRQAPPLRCGSIQSQAAAVARLLRGQGRRHSRHPRHLPVQRSAAPLRAPDAVRRPHILLPGPLLPLHRGGRRRARHGDGAAVRPPLPGLLAAGLLGPPVEPHGVGHPPAVGVHPRACARREPRRRAGHLPGVRADARGHGVLPQLPAAGRPDDRLLPAPWRLLRRRGVVRPAVGGEGVAVAVAGRGDGDCGGVRRPHVVLALLPAVVQGRRRGEAAGGVGCPGGLLPRRRQKD

SEQ ID NO: 31800 - protein, 341 aa, Triticum aestivum
MELLRDSIPMVSLAAAAAALYARMASSLLRPGLPRLVSLLPLFPFLAAAPLALTSSAIVRGTAAFFLTWLCTFKLALLAAGRGPLDPALPVLPFLFTTLLPVKLRPSGAGASKAKPLPSLVSCAAKVAAIAAILGIYQYNARLHPYARRTLYGVHIYCFLDLFFPCIAAAAGALGMETEPQFDRPYLASSLRDFWGRRWNLMVSAILRPSVYIPVLARAGSPAGVLATFLVSGLMHEGMVYYLSFRRPDGRMTAFFLLHGVCCVAEGWCARRWAARGWPSPSRAVATVIVVVFVARTSFWLFFPPLCRDGGEEKLLAEWAALAAFFLDAGRKINGIVRSTD

SEQ ID NO: 31801 - DNA, 666 bp, Triticum aestivum
gaaaaacttcgattcgccgtctcctcctcctcccttcccctccgtctcgctcctcgcccttatccccgtccctttcccctcccttcctcccacccgcagccgacgaaactttccccaagcccctcggtggatcggaccgccgcgctcaatccatgtcggaggaatctggtcgccctttgcccaagtttggcgaatgggacgtcaacgacccagcttctgctgatgggttccctgttatattcaccaaacccagggatgagaagaaggctgggaatggccaagataccgaatccccttgcaaagaccccaggactgagagggtggaagcttatgcccccaaggcaaattcaaagtggttttgctgcgtgacgccaagtcctccccaatcttgaggaggccaagcatcccctgaagaagaatggttgcgaaagtatggtcgtttaattttgctatatccatcctatccataagcccttgtaagaggtacccaggccccctgggccatcccgatgggtatctcgtaaaactctgaagtgtgtatgtatggtgtgagggttgtcagcccctcgtttggataagtgaacttctgattgtaattctggtcttccttgtcggtctccttttgtgtagtagtagtagtggggaagttgatatatgatttgagtc

SEQ ID NO: 31802 - protein, 129 aa, Triticum aestivum
KTSIRRLLLLPSPPSRSSPLSPSLSPPFLPPAADETFPKPLGGSDRRAQSMSEESGRPLPKFGEWDVNDPASADGFPVIFTKPRDEKKAGNGQDTESPCKDPRTERVEAYAPKANSKWFCCVTPSPPQS

SEQ ID NO: 31803 - protein, 122 aa, Triticum aestivum
EKLRFAVSSSSLPLRLAPRPYPRPFPLPSSHPQPTKLSPSPSVDRTAALNPCRRNLVALCPSLANGTSTTQLLLMGSLLYSPNPGMRRRLGMAKIPNPLAKTPGLRGWKLMPPRQIQSGFAA

SEQ ID NO: 31804 - protein, 79 aa, Triticum aestivum
MSEESGRPLPKFGEWDVNDPASADGFPVIFTKPRDEKKAGNGQDTESPCKDPRTERVEAYAPKANSKWFCCVTPSPPQS

SEQ ID NO: 31805 - DNA, 950 bp, Triticum aestivum
caccccagctcactcccacacagccactttacttcctccactcttcaagtcacatcggcagctgctagccaagtagccaaggcaaggaagtgatcgaggaagagggagcgaagcggcgtccctcatggcggcgaaggcggtgcagtggccggtgatggtggtggtggtgatgatgggggcggcggtggctagcgtgggagcggacatggacgcggaccggagcgagtgcgcagagcagctggtggggctggcgccgtgtctgcagtacgtgcaggggcaggcgcggtcgccggcgccggactgctgcggcgggctgagccaggtgctggacaagagccccaagtgcctgtgcgtgctggtcaaggacaaggacgaccccaacctgggcatcaagatcaacgcctccctcgcgctcgccctcccctccgcctgcgggcaacaccaaggccaacgtctcccactgcccacagctgctgcacctccctccgaactccaaggacgccgccatcttcagccccggcggcgacaagggcaccgctgcagctccagccaaggacaacacggcgtcgacggccaactcccgcgcgcagcaggcggccagcgccggcaccgcctcctcgacagcgaccgccggcgtcgcactggcggcgttgctcgccggctaccttgcgctactcctgcccgcggacttcctggccaccgccgccaccttctagtccatcattccgtacgtgcgcgtctgtctcctcccccctatggcgccaccgaagatcgatcaggagcaggggagccaggaaccagtgactgtgtttgggagaatgaaatgcctcgagtacgatcgatcatgcatgttatagtatgtgacagagatggtagtggactagtggtggtagtggttggtttgttggtgttgtattgaacctatgtttttcgctgtatggatatgacgc

SEQ ID NO: 31806 - protein, 264 aa, Triticum aestivum
MAAKAVQWPVMVVVVMMGAAVASVGADMDADRSECAEQLVGLAPCLQYVQGQARSPAPDCCGGLSQVLDKSPKCLCVLVKDKDDPNLGIKINASLALALPSACGQHQGQRLPLPTAAAPPSELQGRRHLQPRRRQGHRCSSSQGQHGVDGQLPRAAGGQRRHRLLDSDRRRRTGGVARRLPCATPARGLPGHRRHLLVHHSVRARLSPPPYGATEDRSGAGEPGTSDCVWENEMPRVRSIMHVIVCDRDGSGLVVVVVGLLVLY

SEQ ID NO: 31807 - protein, 254 aa, Triticum aestivum
MVVVVMMGAAVASVGADMDADRSECAEQLVGLAPCLQYVQGQARSPAPDCCGGLSQVLDKSPKCLCVLVKDKDDPNLGIKINASLALALPSACGQHQGQRLPLPTAAAPPSELQGRRHLQPRRRQGHRCSSSQGQHGVDGQLPRAAGGQRRHRLLDSDRRRRTGGVARRLPCATPARGLPGHRRHLLVHHSVRARLSPPPYGATEDRSGAGEPGTSDCVWENEMPRVRSIMHVIVCDRDGSGLVVVVVGLLVLY

SEQ ID NO: 31808 - protein, 249 aa, Triticum aestivum
MMGAAVASVGADMDADRSECAEQLVGLAPCLQYVQGQARSPAPDCCGGLSQVLDKSPKCLCVLVKDKDDPNLGIKINASLALALPSACGQHQGQRLPLPTAAAPPSELQGRRHLQPRRRQGHRCSSSQGQHGVDGQLPRAAGGQRRHRLLDSDRRRRTGGVARRLPCATPARGLPGHRRHLLVHHSVRARLSPPPYGATEDRSGAGEPGTSDCVWENEMPRVRSIMHVIVCDRDGSGLVVVVVGLLVLY

SEQ ID NO: 31809 - DNA, 785 bp, Triticum aestivum
cccaagcccgggatttgagggagaggagggatttgtcgagagagggaggggcgcgattcgctgctcttcctccagcctcctactgctcgcctccggtgtgggggtgcgctgcggtgggcggaggggaggccaggggatcgagaggcgaaccgaggaaggaaatggcggcgtggacctccgtgggcctggtggcggtggccgtgctggtcgtcggcatcgcaatgccggcctcagccgccgtgcagccgcccgcgcccgcgccctccagcgacggcacgtcgattgatcaggggatcgcatacgtcctgatgctggtggcccttgtgctcacctacctcatccacccgctggacgcgtcctccccatacaggctcttctaatctaatcaataattcgggttgtacctgtagaggtagctagcagctgtgcgatgatgatttaggtgagtgtgtgtgtatggtgttctatttttgtgtgcgcgtcagatgattatgtatggacatgtttggtggtggcatgattctgccatcatgtgagtgtttcgctatttagttcatgctaatgtgtgtatgtatttcactggcgctgtgccgcttgccatgtgctgcgatgcgtggtgtaggtctggttttgcaagttgtgtgacacctactacccatgtgaatgcttgtccggcccctgacaggctgacatgggtgatctcttgtggtccagttggtccatccaagattcatctgtactacgaaaacccttttattccttttcatttttattatttctggagt

SEQ ID NO: 31810 - protein, 125 aa, Triticum aestivum
QARDLRERRDLSREGGARFAALPPASYCSPPVWGCAAVGGGEARGSRGEPRKEMAAWTSVGLVAVAVLVVGIAMPASAAVQPPAPAPSSDGTSIDQGIAYVLMLVALVLTYLIHPLDASSPYRLF

SEQ ID NO: 31811 - protein, 94 aa, Triticum aestivum
PSPGFEGEEGFVERGRGAIRCSSSSLLLLASGVGVRCGGRRGGQGIERRTEEGNGGVDLRGPGGGGRAGRRHRNAGLSRRAAARARALQRRHVD

SEQ ID NO: 31812 - protein, 72 aa, Triticum aestivum
MAAWTSVGLVAVAVLVVGIAMPASAAVQPPAPAPSSDGTSIDQGIAYVLMLVALVLTYLIHPLDASSPYRLF

SEQ ID NO: 31813 - DNA, 617 bp, Triticum aestivum
aacaaacacggtcgcctggatcagaagccatagcttgtttcacctaaagagagaaaaaaaggctttgctccatcaacctacctacccccacagaagcaaatggagttcaagcccaaggcgaccgtgtgcgcggtgatgctggtgctgctcctgctttcctcctacagcggcggcggtggcatcggcgtggcggaggcgcgcatttgcacggggaagagccagcaccactcgttcccgtgcgtctcggacaagagctgcaccaagacgtgcctcagcgagcacggcgcaaaatggacggccggctactgcaaaatcaggcgctgcacctgccagagggagtgctagggcagacgctccgcgcgcgagctcccccacccccgccccgtccatggcgccgtctgtcaaacgaagccacctatgtatcttaagtcttaactaccatgtacccactcgccgcctctgtcaggagatgtaataaaacgtggcgcggcgacccgccggcgcgtcaccgctgtacgtagcatgatgcatgccacgcgttgcttttggtaacaaaataaattgattttaaaaaaaaaaaaaaaaaaaaaaaaaaaaaaaaaaaaaaaaaaaaaaag

SEQ ID NO: 31814 - protein, 81 aa, Triticum aestivum
MEFKPKATVCAVMLVLLLLSSYSGGGGIGVAEARICTGKSQHHSFPCVSDKSCTKTCLSEHGAKWTAGYCKIRRCTCQREC

SEQ ID NO: 31815 - protein, 69 aa, Triticum aestivum
MLVLLLLSSYSGGGGIGVAEARICTGKSQHHSFPCVSDKSCTKTCLSEHGAKWTAGYCKIRRCTCQREC

SEQ ID NO: 31816 - protein, 45 aa, Triticum aestivum
MDGRLLQNQALHLPEGVLGQTLRARAPPPPPRPWRRLSNEATYVS

SEQ ID NO: 31817 - DNA, 1126 bp, Triticum aestivum
ccccccagctccaaccagccagaccatccaaccaacgccgcaccgcaacaacaaccgccgcgcacgcgccgagcacggtcgaacacttgccatggctcccaagaacgcgctccccgtcgccgtcgccgccgccgcggacgccggcatggagcccaggttccgcggcgtgcgcaagcggccgtggggcaggtacgcggcggagatccgcgacccggccaggaaggcccgcgtctggctcggcaccttcgacaccgccgaggccgcggcccgcgcctacgacgccgccgcgctccactaccgcgggcccaaggccaagaccaacttccccgtcggcaccgtcgccgccttcgcccacgtcccgctcccgccgcccaaggcgctggccgtcagccccagcagcagcaccgtcgagtcttcgtcccgggacacgccggccgcggcgcccgccgctcctgctgctgctgcccccgcgcccccgccggcgctcgacctgagcctggcgatgccggccatggtggcggcgcagccgttcctgttcctggaccccagggtcgcggtgaccgtggccgtggccgcgccggcgccggccccctgccggtcagcggcgatcagcggcatgaacaaggtggcgtcccgcgaggaagagcagagcgacaccgggtcgtcgtcatccgtggtggacgcctcgccggccgtgggcgtggggttcgacctgaacctgccgccgccggtggagatggcgtaggagatggaccgatctcggtcgcccgatgacgacgcggcccggaagtaaagcaaagcgctctcgtggtagaatttaaagtttagaagaatggcgtgtacttactagtaagaggttaatcggccgtttaattgccaggatcgatccatcgatgggtaagggtaagtaggtgtacatagatcgcgtgcgtgcgttttttgcatggggaggcaggtaggatgaaacacatccatctatctgctcccaatgttacttacaatttccttaaaagcaagggaaaaaaagacaaaaaggaagaagccagtagtagagcattttgttcttcagtgtacaatatttgatctctgtctctcggattaatgtgaaatttatgatttccattcc

SEQ ID NO: 31818 - protein, 257 aa, Triticum aestivum
PPSSNQPDHPTNAAPQQQPPRTRRARSNTCHGSQERAPRRRRRRRGRRHGAQVPRRAQAAVGQVRGGDPRPGQEGPRLARHLRHRRGRGPRLRRRRAPLPRAQGQDQLPRRHRRRLRPRPAPAAQGAGRQPQQQHRRVFVPGHAGRGARRSCCCCPRAPAGARPEPGDAGHGGGAAVPVPGPQGRGDRGRGRAGAGPLPVSGDQRHEQGGVPRGRAERHRVVVIRGGRLAGRGRGVRPEPAAAGGDGVGDGPISVAR

SEQ ID NO: 31819 - protein, 247 aa, Triticum aestivum
PPAPTSQTIQPTPHRNNNRRARAEHGRTLAMAPKNALPVAVAAAADAGMEPRFRGVRKRPWGRYAAEIRDPARKARVWLGTFDTAEAAARAYDAAALHYRGPKAKTNFPVGTVAAFAHVPLPPPKALAVSPSSSTVESSSRDTPAAAPAAPAAAAPAPPPALDLSLAMPAMVAAQPFLFLDPRVAVTVAVAAPAPAPCRSAAISGMNKVASREEEQSDTGSSSSVVDASPAVGVGFDLNLPPPVEMA

SEQ ID NO: 31820 - protein, 217 aa, Triticum aestivum
MAPKNALPVAVAAAADAGMEPRFRGVRKRPWGRYAAEIRDPARKARVWLGTFDTAEAAARAYDAAALHYRGPKAKTNFPVGTVAAFAHVPLPPPKALAVSPSSSTVESSSRDTPAAAPAAPAAAAPAPPPALDLSLAMPAMVAAQPFLFLDPRVAVTVAVAAPAPAPCRSAAISGMNKVASREEEQSDTGSSSSVVDASPAVGVGFDLNLPPPVEMA

SEQ ID NO: 31821 - DNA, 1005 bp, Triticum aestivum
tcacgcgtatactggtttctcaacccatcaatgcaaagcgtgcagtcgaggggaagaatattgctaatgttgtgctattgcgaggctgtggtatccggattgaggtacctccctttgaaaccaagcatggactcacgccgtgcatggtagctcctaccaagatcatagccgggctggggctgtcattgggcattgatatccttgaagcacctggagcaactggagattatagaactctcttaacttccaaggcaaaagctatagccaaggcactctctgctcctctggacacgccacctcgtgtttttgtgcctggagaggatgaatataaagccggaagagaagacggatatgactttggtttcttgcacatcaaggctattgatgatgctggccatgacaaggctgtcaagttaaaggtgcgaggcctggaagctgttgaccgggctattggtcagcttgcaaggctcctgtgggaagctgagaagtccgggcagtaccagtacttcctctgtgtcactggagaccactctactccggttgagtacggagaccacagcttcgaacctgtcccgtttgcgatatgccggctgagagattttgtgggagcaattggggaggacaatgtgatgaacacccccctcgacgatttcccactgccttcggttaagtccggagaagatttaaccgatgattcagaaccagcggaacacaagcctgaagagcgtaaagcttttagcggcgataaagtgtgtgaatacaccgagattgctgctgcaaggggctgccttgggcggttccctggaagtgagatgatgggcatcatcaagaagttcatgaaagcaaagaatgattaacgccagtttgattgctaacattgtacttgatctttgggcgcgaagcttctttgtaataatgacgaatggataaacggcacagaaccagcttaatatgatacgaataaaatctatcatggttgaggtataatgacatgtgctttgaatc

SEQ ID NO: 31822 - protein, 284 aa, Triticum aestivum
TRILVSQPINAKRAVEGKNIANVVLLRGCGIRIEVPPFETKHGLTPCMVAPTKIIAGLGLSLGIDILEAPGATGDYRTLLTSKAKAIAKALSAPLDTPPRVFVPGEDEYKAGREDGYDFGFLHIKAIDDAGHDKAVKLKVRGLEAVDRAIGQLARLLWEAEKSGQYQYFLCVTGDHSTPVEYGDHSFEPVPFAICRLRDFVGAIGEDNVMNTPLDDFPLPSVKSGEDLTDDSEPAEHKPEERKAFSGDKVCEYTEIAAARGCLGRFPGSEMMGIIKKFMKAKND

SEQ ID NO: 31823 - protein, 237 aa, Triticum aestivum
MVAPTKIIAGLGLSLGIDILEAPGATGDYRTLLTSKAKAIAKALSAPLDTPPRVFVPGEDEYKAGREDGYDFGFLHIKAIDDAGHDKAVKLKVRGLEAVDRAIGQLARLLWEAEKSGQYQYFLCVTGDHSTPVEYGDHSFEPVPFAICRLRDFVGAIGEDNVMNTPLDDFPLPSVKSGEDLTDDSEPAEHKPEERKAFSGDKVCEYTEIAAARGCLGRFPGSEMMGIIKKFMKAKND

SEQ ID NO: 31824 - DNA, 998 bp, Triticum aestivum
ctcctcctctcgagatcgaaggccgcgaaaagaccagagtgccccgcccctcatccccgaagtctccaaacccctcgtcggaagaggtgagcaagccttcacgatggcggtggcggagctctgggagacgctgaagcaggcgatcttagcgtacacggggctgtccccgacggccttcttcaccgccgtggcggtcgccgccgcgctgtaccacgtcgtgtcggggatctttgcgccgccgccgcctccccggcagcggccgctcgaggagcccgaggcggagccgctcccgccgcccgtgcagctgggcgaggtcgacgaggaggagctccggcagtacgacgggtccgaccccaagaaacccctcctcatggccatcaagggtcagatctatgacgtcacgcagagcagaatgttctacggacctggtggaccttatgccctattcgctggcaaagacgccagcagagctctagccaagatgtctttcgagccccaggacctgaacggtgatacctctggcctcgggccgtttgagctcgacgccctgcaagactgggaatacaagttcatgagcaaatatgtgaaggtcggcaccatcaagaaggcagctcccgcagaagacggcaccacaagcacatccccagaaacaaatgaaacagtcaccgccgaggcagagaccgagaaggcacccgccacggagcacaagccgagggaggtgagctcggaggaggtaaaagagaaggaagccacagccgacgcagtcagcgccgagagctagagcaatcccatacccccttgtggtggcaataaatctgtgtcattcagtatgtaatctgtaccagcacgttggacatggggatatagtgctggtgcgctgttattgttagtcggtaaaatggagtgctggatattactggggtagcggggtgtgcgtgtgcctcccctttgttaagccgtcggttgatacttttgggtgaataatttagctgttgtcc

SEQ ID NO: 31825 - protein, 259 aa, Triticum aestivum
SSSRDRRPRKDQSAPPLIPEVSKPLVGRGEQAFTMAVAELWETLKQAILAYTGLSPTAFFTAVAVAAALYHVVSGIFAPPPPPRQRPLEEPEAEPLPPPVQLGEVDEEELRQYDGSDPKKPLLMAIKGQIYDVTQSRMFYGPGGPYALFAGKDASRALAKMSFEPQDLNGDTSGLGPFELDALQDWEYKFMSKYVKVGTIKKAAPAEDGTTSTSPETNETVTAEAETEKAPATEHKPREVSSEEVKEKEATADAVSAES

SEQ ID NO: 31826 - protein, 225 aa, Triticum aestivum
MAVAELWETLKQAILAYTGLSPTAFFTAVAVAAALYHVVSGIFAPPPPPRQRPLEEPEAEPLPPPVQLGEVDEEELRQYDGSDPKKPLLMAIKGQIYDVTQSRMFYGPGGPYALFAGKDASRALAKMSFEPQDLNGDTSGLGPFELDALQDWEYKFMSKYVKVGTIKKAAPAEDGTTSTSPETNETVTAEAETEKAPATEHKPREVSSEEVKEKEATADAVSAES

SEQ ID NO: 31827 - protein, 136 aa, Triticum aestivum
MAIKGQIYDVTQSRMFYGPGGPYALFAGKDASRALAKMSFEPQDLNGDTSGLGPFELDALQDWEYKFMSKYVKVGTIKKAAPAEDGTTSTSPETNETVTAEAETEKAPATEHKPREVSSEEVKEKEATADAVSAES

SEQ ID NO: 31828 - DNA, 1515 bp, Triticum aestivum
acccaaccaggcaaccaccacatcccggctccaactcctacatcgtgcgcgttccaactccggtagcgtactcctcctcagaaaaaactccggtggcgtactactagaaaacagcagagacggctgtgccctgctccaccttctcgccggtgccttctgctcgaggcaaacgaaacccatcctcctcctcctgcccctctctcccacgcttcccccttcgtctccgtcgaggagaggcgaggcgaggcgaggcggcgacgatgcaggtgaagcagaaggtctacgagctctacaaggggacggtggagcgggtcacgggcccgcgcactgtctcggcgttcctcgagaagggcgtcctctccgtccccgagttcatcctcgccggcgacaacctcgtatccaagtgccccacctggtcctgggaggcgggcgatccgagcaagagaaagccatacctcccctccgataagcagttcctcgtcaccaggaacgtgccctgcctaagacgagctgtggcggtcgaggaagagtatgatgcagcgggagctgaggttgttctcgatgatgatgaggatggcgaaggctggctcgcaacacatgggctgcaagcatcagagtcaaaagaggaggaagacataccgtctatggatacattggacatagggaaagttgaagagatcaaatctatcccctcctactttggtgctggtgaaaagccagatgacgaggaggatatacctgatatggacacctatgaagacacaggagatcattccacagctacccctcagccttcatattttgtcgcagaagagcctgatgatgacaacattcttctcaccagaacatatgatgtcagcatcacatatgacaagtactaccaaactccacgtgtctggcttacaggctatgatgaggcaagaatgccattaaagcctgaacttgtgtttcaagatatcagtcaagaccatgcacacaaaacggtgactatcgaagaccaccctcacttgttagtgggacagcacgcttcagtgcatccttgcaagcacgctgctgtgatgaaaaagatcattgatgttatagtgtctcaaggaggtgcaccagaagttgacaagtaccttttcatatttctgaaattcatggcttctgtcatacccaccattgagtatgattacactatggacttcgatctgggcagtacaagcacataagtcgcccattgaagaaaagctgaaacttccaagaaggcaggctggtcattgtcgccgaataattgctgctcttcggaaggatctgtacattgtgtccgtgtgtgttggttcgtctggaaatgaactttcaattgtaaactctgatgctctgcaggaagattgtgccgatttgtcctcttacggtgcagcgccgcactgatgacatttgtgattcttcgccaacaaatctgaattttgttgaaaaactgaaggatagtaaaatccctgcactgaaaaaaaaaaaaaaaaaaaaaaaaaaaaaaag

SEQ ID NO: 31829 - protein, 316 aa, Triticum aestivum
MQVKQKVYELYKGTVERVTGPRTVSAFLEKGVLSVPEFILAGDNLVSKCPTWSWEAGDPSKRKPYLPSDKQFLVTRNVPCLRRAVAVEEEYDAAGAEVVLDDDEDGEGWLATHGLQASESKEEEDIPSMDTLDIGKVEEIKSIPSYFGAGEKPDDEEDIPDMDTYEDTGDHSTATPQPSYFVAEEPDDDNILLTRTYDVSITYDKYYQTPRVWLTGYDEARMPLKPELVFQDISQDHAHKTVTIEDHPHLLVGQHASVHPCKHAAVMKKIIDVIVSQGGAPEVDKYLFIFLKFMASVIPTIEYDYTMDFDLGSTST

SEQ ID NO: 31830 - protein, 188 aa, Triticum aestivum
MDTLDIGKVEEIKSIPSYFGAGEKPDDEEDIPDMDTYEDTGDHSTATPQPSYFVAEEPDDDNILLTRTYDVSITYDKYYQTPRVWLTGYDEARMPLKPELVFQDISQDHAHKTVTIEDHPHLLVGQHASVHPCKHAAVMKKIIDVIVSQGGAPEVDKYLFIFLKFMASVIPTIEYDYTMDFDLGSTST

SEQ ID NO: 31831 - DNA, 1310 bp, Triticum aestivum
agaaaactgaggaaagtagaccgagccccaaacgaaatcaaatcgagaggagaggagaaagagagaggagcacgcgccgccgccaggccaagcacatcgccatggccgcctcctgccgccgcgcgccccagatgctgggctccgccgcctcccgcctcctccattcgcgtggctacgcggccgccgccgccgcgccctccccggcggtgttcgtcgacaagagcacccgcgtgatctgccagggcatcaccgggaagaacggcaccttccacaccgagcaggccatcgagtacggcaccaacatggtaggtggagttactcccaagaaaggtggaactgagcacctaggccttccagttttcaactcggtagcagaagctaaggccgagacaaaggccaatgcatctgttatatatgttccaccaccatttgctgccgctgcaataatggaggcattggaagcagagcttgaccttgttgtctgcattactgaagggatacctcagcatgacatggtgaaagtgaaagctgctctgaacaggcaatcaaaaaccagattgatcgggccaaactgccctggtatcattaagcctggtgaatgtaagattggaatcatgccaggttacatccacaaaccaggacgcattggaattgtatctcgttctggtaccttgacatatgaagcggtgtttcaaacaacagccgtaggcttggggcagtcaacttgtgtgggcatgggtggtgacccctttaacggcactaattttgttgactgccttgaaaagtttgttgatgatcctcagacagaaggtattgttctcattggagaaattggcggtactgctgaggaggatgctgcagcctttatccgggagagcaaaacagaaaagcctgtcgttgcattcatagctggacttactgcacccccaggccgtcgcatgggccatgctggagcaattgtgtcaggggggaagggtaccgcccaggacaagatcaaggcactcagggatgctggggttactgttgtcgagtcaccagctaagatcggttcaaccatgttcgaacttttcaagcagcgcggaatggtagagtagagagaaggaatggtacagtagaaaagaaaacattgggaaacttctttttgttgctcgttggttaatagcgagcaatacgtcggtagggccccatcgctggtcgctgagttgagctactcagtcccttttttccttttcctttccccgtcttaagtgtgagactggcctttacatgtgctcatttcaaatgttcaataagacaaattctcgacatac

SEQ ID NO: 31832 - protein, 363 aa, Triticum aestivum
KTEESRPSPKRNQIERRGERERSTRRRQAKHIAMAASCRRAPQMLGSAASRLLHSRGYAAAAAAPSPAVFVDKSTRVICQGITGKNGTFHTEQAIEYGTNMVGGVTPKKGGTEHLGLPVFNSVAEAKAETKANASVIYVPPPFAAAAIMEALEAELDLVVCITEGIPQHDMVKVKAALNRQSKTRLIGPNCPGIIKPGECKIGIMPGYIHKPGRIGIVSRSGTLTYEAVFQTTAVGLGQSTCVGMGGDPFNGTNFVDCLEKFVDDPQTEGIVLIGEIGGTAEEDAAAFIRESKTEKPVVAFIAGLTAPPGRRMGHAGAIVSGGKGTAQDKIKALRDAGVTVVESPAKIGSTMFELFKQRGMVE

SEQ ID NO: 31833 - protein, 330 aa, Triticum aestivum
MAASCRRAPQMLGSAASRLLHSRGYAAAAAAPSPAVFVDKSTRVICQGITGKNGTFHTEQAIEYGTNMVGGVTPKKGGTEHLGLPVFNSVAEAKAETKANASVIYVPPPFAAAAIMEALEAELDLVVCITEGIPQHDMVKVKAALNRQSKTRLIGPNCPGIIKPGECKIGIMPGYIHKPGRIGIVSRSGTLTYEAVFQTTAVGLGQSTCVGMGGDPFNGTNFVDCLEKFVDDPQTEGIVLIGEIGGTAEEDAAAFIRESKTEKPVVAFIAGLTAPPGRRMGHAGAIVSGGKGTAQDKIKALRDAGVTVVESPAKIGSTMFELFKQRGMVE

SEQ ID NO: 31834 - protein, 320 aa, Triticum aestivum
MLGSAASRLLHSRGYAAAAAAPSPAVFVDKSTRVICQGITGKNGTFHTEQAIEYGTNMVGGVTPKKGGTEHLGLPVFNSVAEAKAETKANASVIYVPPPFAAAAIMEALEAELDLVVCITEGIPQHDMVKVKAALNRQSKTRLIGPNCPGIIKPGECKIGIMPGYIHKPGRIGIVSRSGTLTYEAVFQTTAVGLGQSTCVGMGGDPFNGTNFVDCLEKFVDDPQTEGIVLIGEIGGTAEEDAAAFIRESKTEKPVVAFIAGLTAPPGRRMGHAGAIVSGGKGTAQDKIKALRDAGVTVVESPAKIGSTMFELFKQRGMVE

SEQ ID NO: 31835 - DNA, 1235 bp, Triticum aestivum
atatccgcttccagacacttctcccgtcccgtcccgtccccagccaacctcccatctccgtctcgcgtcgcggcggcagttccactccctcgccatgggcaagattaagatcggaatcaacggtttcggaaggatcgggaggctcgtcgccagggtagccctccagagcgacgatgtcgagctcgtcgccgtcaacgaccccttcatcaccaccgagtacatgacctacatgttcaagtacgacaccgttcacggccactggaagcacagtgacatcaagctcaaggacgacaagactctgctctttggcgagaagccagttaccgtcttcggcgtcaggaaccctgaggagatcccgtggggtgaggctggtgccgattacgttgtggagtccaccggtgtcttcactgacaaggacaaggccgctgctcacttgaagggtggtgccaagaaggtggtcatctctgccccaagcaaagatgcccctatgtttgtggttggtgtcaacgaggacaagtacacctcagacgttaacattgtctcaaatgctagctgcaccactaactgccttgctcccctagctaagatcattaatgacaacttcggtattattgagggtttgatgaccactgttcatgccatcactgccacacagaagaccgttgatggtccctcgagcaaggactggagaggtggcagggccgcaagctttaacatcattcccagcagcactggtgctgctaaggctgttgaaccgagaaggctgcatcatatgatgacatcaagaaggctatcaaggctgcatctgaggggaagctcaaggggatcatgggttacgttgaggaggatttggtctccaccgactttgttggtgacagcaggtcgagcatctttgatgccaaggctggaattgctctgaacgaccatttcgtcaagcttgtctcgtggtatgacaacgaatggggttacagcaaccgcgttgtcgacctgatccgccacatggccaagactcagtagagtgctctgctttcctttgtggcgcctggtcagaggtgtccctgctttgtctatgcgaagaataaatgtggatggcgtcgccagacgacgcctggttcatgttagttggacatgagttaccttctgttttccgcatcaactagtatctgtaatggagttgctaatcaagtactcttttttggttgtggtttgtgaagaatatataaatcgttcagtcc

SEQ ID NO: 31836 - protein, 305 aa, Triticum aestivum
YPLPDTSPVPSRPQPTSHLRLASRRQFHSLAMGKIKIGINGFGRIGRLVARVALQSDDVELVAVNDPFITTEYMTYMFKYDTVHGHWKHSDIKLKDDKTLLFGEKPVTVFGVRNPEEIPWGEAGADYVVESTGVFTDKDKAAAHLKGGAKKVVISAPSKDAPMFVVGVNEDKYTSDVNIVSNASCTTNCLAPLAKIINDNFGIIEGLMTTVHAITATQKTVDGPSSKDWRGGRAASFNIIPSSTGAAKAVEPRRLHHMMTSRRLSRLHLRGSSRGSWVTLRRIWSPPTLLVTAGRASLMPRLELL

SEQ ID NO: 31837 - protein, 274 aa, Triticum aestivum
MGKIKIGINGFGRIGRLVARVALQSDDVELVAVNDPFITTEYMTYMFKYDTVHGHWKHSDIKLKDDKTLLFGEKPVTVFGVRNPEEIPWGEAGADYVVESTGVFTDKDKAAAHLKGGAKKVVISAPSKDAPMFVVGVNEDKYTSDVNIVSNASCTTNCLAPLAKIINDNFGIIEGLMTTVHAITATQKTVDGPSSKDWRGGRAASFNIIPSSTGAAKAVEPRRLHHMMTSRRLSRLHLRGSSRGSWVTLRRIWSPPTLLVTAGRASLMPRLELL

SEQ ID NO: 31838 - protein, 232 aa, Triticum aestivum
MTYMFKYDTVHGHWKHSDIKLKDDKTLLFGEKPVTVFGVRNPEEIPWGEAGADYVVESTGVFTDKDKAAAHLKGGAKKVVISAPSKDAPMFVVGVNEDKYTSDVNIVSNASCTTNCLAPLAKIINDNFGIIEGLMTTVHAITATQKTVDGPSSKDWRGGRAASFNIIPSSTGAAKAVEPRRLHHMMTSRRLSRLHLRGSSRGSWVTLRRIWSPPTLLVTAGRASLMPRLELL

SEQ ID NO: 31839 - DNA, 971 bp, Triticum aestivum
cattacttggttttctgcctctaataacttaaggtttacatattttcttctttattttctcaaggaggacaagctaagaggaaaaccaggctatgagcatctgagtgaacaacttcatatcttgatagaggctgagttcccagccaatattattgatgccagattgagacatgcacaggaaattctagaagaactgctaaagccagtggatgagacacaggatatctacaagaggcaacagctcagggagctggcgatgctaaactcaaccctgagagaggacagccctcatccgggaagcgtctccccattcagcaatggtggcatgaagcgtgcgaaaacaggccagtagggaaggagccacccctcatcgttaccggtattgtccaggtgccttatgcccccccaatggggacgccatgtctccgggcaacgtttgccgcgggcgcacttgaaggaagcgacgccctgcatttcgctagacgagtcagtatgagtctgcggtctctcctgcggacaaggagaagccgctgggacagtggaagtagtagagtcctgggtcggtgggtcggcccagctttgggttgctgtaaggtcctagaacattcgctttatttgttaattgactgttaaccctagtaatgtggtgctatgatggtaggtgatgtccatgacagacagactagagaggcccgagtatgtgagctttcatgttttccttttcaccctcttttaggcgtcggaacttccttgtatattatccacccttctgcattatggagtcgcggataataataaaaagggtataaggatcatcagcttgtgccttgtggagtcgtggtgtttggttcgggccgcggaggctttgaaccgacgatgtcgcagtctggtttttaatgtcaaaatcagtgttcatggatcgttgtggtttatattgttggactgtaagaatttgtggtaattttgggttg

SEQ ID NO: 31840 - protein, 116 aa, Triticum aestivum
ITWFSASNNLRFTYFLLYFLKEDKLRGKPGYEHLSEQLHILIEAEFPANIIDARLRHAQEILEELLKPVDETQDIYKRQQLRELAMLNSTLREDSPHPGSVSPFSNGGMKRAKTGQ

SEQ ID NO: 31841 - protein, 74 aa, Triticum aestivum
MGTPCLRATFAAGALEGSDALHFARRVSMSLRSLLRTRRSRWDSGSSRVLGRWVGPALGCCKVLEHSLYLLIDC

SEQ ID NO: 31842 - DNA, 897 bp, Triticum aestivum
aaataaacgcaagtagtatttccgagtctccctctccctcccccgatgccgcccatctccctcctcccccccctcctcctcctcctcgccggcgccgccgcggcggcgccggccgagcccccgaccccggctcccccgccggggaagaacaagaccctctacgagctcctcccgctctttggcctcccggcgggcgtcttcccggccaacgtcaccgccttctcgctcgccggcaacggcagcctcgccgtggacctcgcgggggccctgctacgtgcacttcgagtacctcacctacttcgagccccgcgtcacgggcgtgctccgctacggctccctcaccgagctggagggcgtgcaggtccgccgcttcctcgtctggttcagcgtcgtccgcgtcaaggtcgacctgcccccgcccccgcgcttcgtctacctcgacatcggctggatcacccgcaagctccccgccgccgacttccagtccgtccacgcctgcgaggccggcaagcggcggaggaggtgccgcctcccctccgcgctcgccgccgccgccgcctggttccaggacttctttgcccaattttaggggatgcagaaggtctaattttgtggcagcatcacacgagcttacggccttccgcgtcctaaaggaattggagcgctcaactcccatttgttgattgttacacacggtgtatgtctctacgagtactcgacgctgctgtctgagctctacatttgttcgagagacgcacgatctttaagaaagatttgtattggttattttagtccgaaccgatcatgctgtgtgctccacgcttcgatacaatagcacttcagtagtggcatgtaatatcattttgttggaactttaaaaggtctccacagaagttt

SEQ ID NO: 31843 - protein, 226 aa, Triticum aestivum
INASSISESPSPSPDAAHLPPPPPPPPPRRRRRGGAGRAPDPGSPAGEEQDPLRAPPALWPPGGRLPGQRHRLLARRQRQPRRGPRGGPATCTSSTSPTSSPASRACSATAPSPSWRACRSAASSSGSASSASRSTCPRPRASSTSTSAGSPASSPPPTSSPSTPARPASGGGGAASPPRSPPPPPGSRTSLPNFRGCRRSNFVAASHELTAFRVLKELERSTPIC

SEQ ID NO: 31844 - protein, 201 aa, Triticum aestivum
MPPISLLPPLLLLLAGAAAAAPAEPPTPAPPPGKNKTLYELLPLFGLPAGVFPANVTAFSLAGNGSLAVDLAGALLRALRVPHLLRAPRHGRAPLRLPHRAGGRAGPPLPRLVQRRPRQGRPAPAPALRLPRHRLDHPQAPRRRLPVRPRLRGRQAAEEVPPPLRARRRRRLVPGLLCPILGDAEGLILWQHHTSLRPSAS

SEQ ID NO: 31845 - DNA, 1492 bp, Triticum aestivum
atcccttcccccccgcctccacccctcccactgcccccacgcagcagcccgcgcccccaacccacccaacgcgccgccgccgctagggtttctccccctccccccgccgccgcccgcgcagagccccgaatctccctacccgcggcagccatgagcgacggcaaggacaccctcgacctctccgccctcggcgccgccgtccccaacgccgcagagctcagcgccgaggacaaggccaacctcgtggagtcgattaagaacacgctgcagggattggcggcgcggcacacggacgtgctcgagagcctggagcccaaggtcaggaagcgcgtcgaggcgctcagggagatccagagccaacatgatgaatttgaggcaaagttttttgaggagagagctgcacttgaagctaaatatcagaagatgtatgaaccactgtactcaaagcgtcatgatgttgtcaatggtgtggttgaggcagaaggcgtaaccaaagattcaggtgaagccgctccagatgagaaagaggaaaagggtgtgccagatttctggttgaatgcaatgaagaaccatgaaatccttgctgaggagattcaagagagggatgaggaagctctcaagtacctcaaggatatcaagtggtacagaattactgagccaaagggtttcaagcttgagttccacttcaatactaatccattcttcaagaatgaagtgctttcaaaaacgtaccacatgatcgatgaagatgaaccaatcctagagaaggctattggaactgaaattgaatggtatcctggaaagagcttgacacaaaaggtgctaaagaagaagccaaagaaggggtcgaagaacactaaacctatcacgaaaatcgaaaattgcgagagcttctttaatttcttcagtccacctcaagttcctgatgatgatgaggaaattgatgaggatacagctgagcagttgcagaaccagatggagcaagattatgatatcggatctaccatcagagacaagattattccacatgctgtttcatggtttactggagaggccgctcaagatgaggactttgatggcatcatggatgatgatgaagatgacgacgaagatgacgaggaggatgaagatgaggatgaggacgacgaggaagatgaagacgatgacgatggtgataagaagaagggcgggcgagttcctgcaggggaaggtcaggcaggggagcggcccgcagagtgcaagcaacagtgagatccttcccagacgaagactatttttcttggctgaagaatgtttggttctgcttgatgctatgtctttgagtttggttccgaggagccagtgggggattgattgagttgggttttgtggaagaaccggtggggggtttctttgtgggggacatggtattatatactggtagcatttcaattgttgtattgggttgaaatactttgtccgctgctgcgagtgatcatcgatggtgcccgtt

SEQ ID NO: 31846 - protein, 416 aa, Triticum aestivum; identical to SEQ ID NO: 26531

SEQ ID NO: 31847 - protein, 366 aa, Triticum aestivum; identical to SEQ ID NO: 26532

SEQ ID NO: 31848 - protein, 275 aa, Triticum aestivum; identical to SEQ ID NO: 26533

SEQ ID NO: 31849 - DNA, 1699 bp, Triticum aestivum
actgctcctccctcctccctcctcctccacctcttccctcccctgacccctcgcctccaaattactatctccgtcggacgcacgcacgcgcgcggaaaggtttggttttgcggtgaccatgcaggcagcgacggtggcagcggcggcgaacggcgggggcgacgtgcagaagcagcagcaggtgggggcggcgccgctcccggcggtggcggcgctggcgccgccgccccattgggtggccatgccgttcgcgccgccgggcgccgcggccatggtggtgccgcaccagatggcgccggcgccgccccaccagttcgcgccgcacttcgtgccgttccacgccgtcgcaccgccgcccccgccgctgcagccgcgcccggcgcacgtcgccatgggctcgcccgcccccgccgcgcagcccggccaggaggagaacaagaccatctgggtcggcgacctccattactggatggacgagaactacctccacacctgcttcggctacaccggcgaggttgtcgcaatcaaggttattcgtaataagcaaaccggacaatcagaaggatatggatttgtagagttctacagtcatgctgcagctgaaaaagtacttgatggttttgctgggcatataatgccaaatactgaccaaccttttaggataaactgggcatcatttagcatgggggataggcgctcggacattgcttcagatcattccatatttgtaggcgatcttgcctctgatgtcaatgatactgcattgctagagactttctccagcaggtactcctctgtcaaaggtgcaaaagttgttattgatgctaacactggtagatccaagggctatggctttgtgcggtttggagatgatagtgagaagacaaacgccatgactgagatgaatggagtgtattgctcaactaggcccatgaggattggccctgcaactcccagaaaatcttcaggtacttctggatctactgtttcatctgctcgatcagacggagatttgacaaacacaactgtatttgtcggtgggcttgacccaaatgttagtgaagatgatcttaagcaaaccttctcccagtatggcgagatttcctctgtgaagattccagttgggaaacagtgcgggtttgtgcagtttcttcagagaaagaatgcagaagatgcattgcaagggctgaacgggagcaccattgggaaacagaccgtgcgcctttcatggggtcgcaatccagcaaacaagcagttgaggagtgacaacggcaaccagtggaacaacgggatgtactacgcgccctcgcccttctacaacgggtacggctaccccgcggcaccgttccctgacccgggcatgtacgccgctgcctatggcgcataccccgtctacgggaaccagcaacaggtcagctgaagatcggaggatcacacgcccatcgatccctcgacaacaacccgaggcgcgcacgcagtagctgtagctcttgctagagaaagaaggtagacgatgacggcttcttaggtgagctagatgtagtgactggtcatgtaaagtacattactattacgaagaactagcaccactaaggcacctaaaatgactcgaccgccatggccgtctagctggattgttctagggaaaaaaaaagttttggcatagagctgcaatataaggtagaacaataatctattc

SEQ ID NO: 31850 - protein, 433 aa, Triticum aestivum
MQAATVAAAANGGGDVQKQQQVGAAPLPAVAALAPPPHWVAMPFAPPGAAAMVVPHQMAPAPPHQFAPHFVPFHAVAPPPPPLQPRPAHVAMGSPAPAAQPGQEENKTIWVGDLHYWMDENYLHTCFGYTGEVVAIKVIRNKQTGQSEGYGFVEFYSHAAAEKVLDGFAGHIMPNTDQPFRINWASFSMGDRRSDIASDHSIFVGDLASDVNDTALLETFSSRYSSVKGAKVVIDANTGRSKGYGFVRFGDDSEKTNAMTEMNGVYCSTRPMRIGPATPRKSSGTSGSTVSSARSDGDLTNTTVFVGGLDPNVSEDDLKQTFSQYGEISSVKIPVGKQCGFVQFLQRKNAEDALQGLNGSTIGKQTVRLSWGRNPANKQLRSDNGNQWNNGMYYAPSPFYNGYGYPAAPFPDPGMYAAAYGAYPVYGNQQQVS

SEQ ID NO: 31851 - protein, 392 aa, Triticum aestivum
MPFAPPGAAAMVVPHQMAPAPPHQFAPHFVPFHAVAPPPPPLQPRPAHVAMGSPAPAAQPGQEENKTIWVGDLHYWMDENYLHTCFGYTGEVVAIKVIRNKQTGQSEGYGFVEFYSHAAAEKVLDGFAGHIMPNTDQPFRINWASFSMGDRRSDIASDHSIFVGDLASDVNDTALLETFSSRYSSVKGAKVVIDANTGRSKGYGFVRFGDDSEKTNAMTEMNGVYCSTRPMRIGPATPRKSSGTSGSTVSSARSDGDLTNTTVFVGGLDPNVSEDDLKQTFSQYGEISSVKIPVGKQCGFVQFLQRKNAEDALQGLNGSTIGKQTVRLSWGRNPANKQLRSDNGNQWNNGMYYAPSPFYNGYGYPAAPFPDPGMYAAAYGAYPVYGNQQQVS

SEQ ID NO: 31852 - protein, 382 aa, Triticum aestivum
MVVPHQMAPAPPHQFAPHFVPFHAVAPPPPPLQPRPAHVAMGSPAPAAQPGQEENKTIWVGDLHYWMDENYLHTCFGYTGEVVAIKVIRNKQTGQSEGYGFVEFYSHAAAEKVLDGFAGHIMPNTDQPFRINWASFSMGDRRSDIASDHSIFVGDLASDVNDTALLETFSSRYSSVKGAKVVIDANTGRSKGYGFVRFGDDSEKTNAMTEMNGVYCSTRPMRIGPATPRKSSGTSGSTVSSARSDGDLTNTTVFVGGLDPNVSEDDLKQTFSQYGEISSVKIPVGKQCGFVQFLQRKNAEDALQGLNGSTIGKQTVRLSWGRNPANKQLRSDNGNQWNNGMYYAPSPFYNGYGYPAAPFPDPGMYAAAYGAYPVYGNQQQVS

SEQ ID NO: 31853 - DNA, 1916 bp, Triticum aestivum
ctcgctcctcctccgtccatccacaactcaattgctgccaaatcttagcgctgcacccaccgcctccgtttggttccctggattcttctccgcgcccgcgagaaatctgggtgatgagatgatgaggacggcggcggtgctgttcctctgctttttcgccttcgccggcagcggctggggcggagcgcgggtcgcggccgtatgggcggagggggtcagacagacggcggcggtggtggtggaccctgcctggcgcttccctagcccgcggctgcgggacgcgtacgtcgcgctgcagacatggaagcagcaggccatcttctccgaccccaagaacctcaccggcgactgggtgggtcccgcggtctgcggctacaccggcgtgttctgcgcgcctgctccgtcgtcgggcgagctcgccgtcgccggcatcgacctcaaccacggcgacatcgcgggctacctcccgtcggagctcggcctcctctgcgacctcgcgctgctccacctcaactccaaccgcttctgcggcctcgtgcccgacaccttccgccggctcgtcctcctccacgagctcgacctcagcaacaaccgcttcgtgggcgcgttcccgaccgtcgtgctcgacctcccgtccctcaggttcctcgacctccgcttcaacgacttcgagggcggcgtgccgcgggagctcttcgaccgcccgttcgacgccatcttcctcaaccacaatcgcctccgcttccagctccccgacaacttcggcaattcgcccgtgtccgtcatcgtcctcgccaacaaccacttcggcggctgcctcccggcgagcctcggcaacatgtccgacacgctcaacgagatcctcctcatcaacaacggcctcacctcgtgcctcccggcggaggtcgggatgctccgggaggtgacggtgttcgacgtcagcttcaacgccctcgcagggccgctgccgccggaggtggccgggatgcaaaaggtggagcagctcgacatcgcgcacaacctgctgtcggggaccgtgccggaggccgtgtgcgacctcccacggctcaagaacttcaccttctcctacaacttcttcaccggcgagccgccgtcctgcgcgcgcgtcgtgcctgccgacggcgaccgccggaactgcctccccaaccgccccgcccagcgcatgccgcagcagtgcgccgctttctatgcccgcccgcccgtcgactgcgcagctttccagtgcaagccgtttgtcccacctcggccacccccaccgccagcataccccggcccgttgccgccagtgtaccccatgccatacgcgtcgccgccgccgcctccacgttaccgatgattctttgacaacagaagcattgccagtttcactttcccttgccgcaccccttgccgccggtgtggaagagccagcggagctcgccgtcacaaaagtacgtggtcattgttgttcgtggattaccagttcttgattgatagctaccggcgtaaagaagaacgtggtgcatatatccttttcttgtttttttgcattggttggtgtctgttttccgcatcgtcgtcttcgatcatccgtttgcgcggtggcgatggcgaaaaggattggagcatggtgataaggaaatttgaaaggtgggagcaaattgggcttggattgatggctaattgggttgtgaataataaactggctgagagagacaggttaagctgagattgagaaatccatggaaaagttgtgatgcgggatgtatagaatgatacttttagttcggtaaagctctagttgagggtcagagataagtttctacatcaagagatttgtcctactgaattcctcttgtgtcacagctgcttactgttattcgattattattattaagatgtttagttgggcttct

SEQ ID NO: 31854 - protein, 451 aa, Triticum aestivum
SLLLRPSTTQLLPNLSAAPTASVWFPGFFSAPARNLGDEMMRTAAVLFLCFFAFAGSGWGGARVAAVWAEGVRQTAAVVVDPAWRFPSPRLRDAYVALQTWKQQAIFSDPKNLTGDWVGPAVCGYTGVFCAPAPSSGELAVAGIDLNHGDIAGYLPSELGLLCDLALLHLNSNRFCGLVPDTFRRLVLLHELDLSNNRFVGAFPTVVLDLPSLRFLDLRFNDFEGGVPRELFDRPFDAIFLNHNRLRFQLPDNFGNSPVSVIVLANNHFGGCLPASLGNMSDTLNEILLINNGLTSCLPAEVGMLREVTVFDVSFNALAGPLPPEVAGMQKVEQLDIAHNLLSGTVPEAVCDLPRLKNFTFSYNFFTGEPPSCARVVPADGDRRNCLPNRPAQRMPQQCAAFYARPPVDCAAFQCKPFVPPRPPPPPAYPGPLPPVYPMPYASPPPPPRYR

SEQ ID NO: 31855 - protein, 412 aa, Triticum aestivum
MMRTAAVLFLCFFAFAGSGWGGARVAAVWAEGVRQTAAVVVDPAWRFPSPRLRDAYVALQTWKQQAIFSDPKNLTGDWVGPAVCGYTGVFCAPAPSSGELAVAGIDLNHGDIAGYLPSELGLLCDLALLHLNSNRFCGLVPDTFRRLVLLHELDLSNNRFVGAFPTVVLDLPSLRFLDLRFNDFEGGVPRELFDRPFDAIFLNHNRLRFQLPDNFGNSPVSVIVLANNHFGGCLPASLGNMSDTLNEILLINNGLTSCLPAEVGMLREVTVFDVSFNALAGPLPPEVAGMQKVEQLDIAHNLLSGTVPEAVCDLPRLKNFTFSYNFFTGEPPSCARVVPADGDRRNCLPNRPAQRMPQQCAAFYARPPVDCAAFQCKPFVPPRPPPPPAYPGPLPPVYPMPYASPPPPPRYR

SEQ ID NO: 31856 - protein, 411 aa, Triticum aestivum
MRTAAVLFLCFFAFAGSGWGGARVAAVWAEGVRQTAAVVVDPAWRFPSPRLRDAYVALQTWKQQAIFSDPKNLTGDWVGPAVCGYTGVFCAPAPSSGELAVAGIDLNHGDIAGYLPSELGLLCDLALLHLNSNRFCGLVPDTFRRLVLLHELDLSNNRFVGAFPTVVLDLPSLRFLDLRFNDFEGGVPRELFDRPFDAIFLNHNRLRFQLPDNFGNSPVSVIVLANNHFGGCLPASLGNMSDTLNEILLINNGLTSCLPAEVGMLREVTVFDVSFNALAGPLPPEVAGMQKVEQLDIAHNLLSGTVPEAVCDLPRLKNFTFSYNFFTGEPPSCARVVPADGDRRNCLPNRPAQRMPQQCAAFYARPPVDCAAFQCKPFVPPRPPPPPAYPGPLPPVYPMPYASPPPPPRYR

SEQ ID NO: 31857 - DNA, 1467 bp, Triticum aestivum
atcgcctcatcccgctctccggtaatacacgttctctgcactcctctcgtgcgagaatggctgcaagcattctgtcccacgttgtctccgacctctgcatcggcaagccggcggtgcgtgtgctgccgccgtcgactccaatcgcggcggccctcgccacgctccgcgctggtgccgacccgttcgtcttcgtggacgctgcacccccggacgcgaagaagacggccgtgttgtccgtcgtcaaggtcagcgtcgcggagatcctgtgttacgtctgcggcgacggtggcaacctcagcgaccccgcggccgcgctcggccggcccgtttccgtgctcacggccgtggtgggcgatcacggcgtcactcgccaagtggatccacagacgagcctgctcgacgccatcgacgcgctgctggccaacaactcgcacagcctggtcgtcccgctccacgcccgggcccgaaagaagcaccaccacgtctccgccggctactgcgtgctgacgcagcaagacatcgtccggcacctcttcggctccatctccctcttctccccggtcgccgcgctctccgtgtcctccctcggcctcgtgcgccgggacgacgtgcacgccgtccacgtcgacgacgacgcgctcgacgccatccctctcctgcggaggtccatcgggcaaggcaccgccgtggccgtcgtggcggacgacgacgcgctcgtcggagagatctgcccgggcgtgctcggctcgtgcgacgacgtcgagtccgtgtccgcggccttcgccacgctctccgccggcgacgccatgacgtacatcgactgctacttctcgccgcccgagttcctgctccgctccatcagagccgagctcacgggcaaagggcttcatgccatgtgcgacctcatggatgccgcctacacaacggacgttggagctctgtcgtcgtcatcaacgtcatctgatgaggagtgtttgccattggcgcctgcgagacgcgcgaggaagatgtcgtcgggaagcttccggtggcggtcgacggaggacgtggcggcgtgtcatgctgagagttcgctggtcgccgtcatggcccaagcgcttgcgcaccgagtcgggcatgtttgggtcgtcgatgagctcagcggcgctctagtcggagtcgtcagctgcgccgatgtgcttgctgtgctccgggaccatctccgcccagagtgatatgcagatgatttgtgatcgatcctatagcctgcggatgtgtaagcatagcttagagctcggcgatttcccgtcgtgccgccctgctacgactgttggagacctgctgctgttttttttaggatcggcccagcttttttttagaacatgttggttccagtttttatttttgtttttgattttgagggtgtaaccaagttttatattcatcgtaagccaggaatacatctcggatcatgaggttgaccaagcc

SEQ ID NO: 31858 - protein, 403 aa, Triticum aestivum
RLIPLSGNTRSLHSSRARMAASILSHVVSDLCIGKPAVRVLPPSTPIAAALATLRAGADPFVFVDAAPPDAKKTAVLSVVKVSVAEILCYVCGDGGNLSDPAAALGRPVSVLTAVVGDHGVTRQVDPQTSLLDAIDALLANNSHSLVVPLHARARKKHHHVSAGYCVLTQQDIVRHLFGSISLFSPVAALSVSSLGLVRRDDVHAVHVDDDALDAIPLLRRSIGQGTAVAVVADDDALVGEICPGVLGSCDDVESVSAAFATLSAGDAMTYIDCYFSPPEFLLRSIRAELTGKGLHAMCDLMDAAYTTDVGALSSSSTSSDEECLPLAPARRARKMSSGSFRWRSTEDVAACHAESSLVAVMAQALAHRVGHVWVVDELSGALVGVVSCADVLAVLRDHLRPE

SEQ ID NO: 31859 - protein, 385 aa, Triticum aestivum
MAASILSHVVSDLCIGKPAVRVLPPSTPIAAALATLRAGADPFVFVDAAPPDAKKTAVLSVVKVSVAEILCYVCGDGGNLSDPAAALGRPVSVLTAVVGDHGVTRQVDPQTSLLDAIDALLANNSHSLVVPLHARARKKHHHVSAGYCVLTQQDIVRHLFGSISLFSPVAALSVSSLGLVRRDDVHAVHVDDDALDAIPLLRRSIGQGTAVAVVADDDALVGEICPGVLGSCDDVESVSAAFATLSAGDAMTYIDCYFSPPEFLLRSIRAELTGKGLHAMCDLMDAAYTTDVGALSSSSTSSDEECLPLAPARRARKMSSGSFRWRSTEDVAACHAESSLVAVMAQALAHRVGHVWVVDELSGALVGVVSCADVLAVLRDHLRPE

SEQ ID NO: 31860 - DNA, 1165 bp, Triticum aestivum
attttctagaaccctagcacgattcccaaaacccaaagctcctcctcatcctcttccatggcgatggcgttcgcgctcccgctcctcctcgtgccccgccccatcgtctctccgagacccgctgcagcgggccgcttcctttccctctccgctcccctgtccaccgccgctcccgcccctgcccccgtcgagcccctgaagggcggcggccgcctcgcgcggctccagactctccacgcagcctcctgctgcaactccgcccccgcagcagcatctggaggagtggaggcggcccgggcgaagggcttgcagctcgtggcctggtaccttctgtctcttgacaagcatccggtggcgaccaaggctgtcacttctgctgtgctgactctggccggggacctcatctgccagcttgtaattgataaagtgccagagctagacctgaagagaacatttgtgttcacgttattgggacttgtcctggtggggccaacgttgcatttctggtacttgtatttgagtaaattagtgacgatcagcgggacatctggtgtcatttctcgcctgttacttgaccagttcatcttctctcctgttttcattggtgtcttcatgagcttactcgtaaccttggagggaaagccatctcttgtagtgccaaagcttaagcaggagtggttctcttcattgatcgcgaattggcaattgtggataccgttccagttttttaatttctattttgtcccacagaagctccaggttcttgctgctaattttgtagcccttgcatggaacgtgattttgtcatataaagctcataagaaggttatcgcggagtagtcaaataggtgagagagtagactctagggcggggtatctaagccggttgcaacatgtggcgatgtaaggctggaagaataaacctattatcagttatcctggcgtctcgtctgtgttacccaaccgatgaaacgcctgcctagtattgtaaattaacgtccatcttgtctgtcgagtgcagcccgcgatgccagttaatcatgcgttgtacaatctgtataaccgtttgtgatgggaggttgttcttggtttccgaagaattacataatgtaaaattctggggttcctagcaaatcaaaactcaggccccgggggtgttattggc

SEQ ID NO: 31861 - protein, 260 aa, Triticum aestivum
MAMAFALPLLLVPRPIVSPRPAAAGRFLSLSAPLSTAAPAPAPVEPLKGGGRLARLQTLHAASCCNSAPAAASGGVEAARAKGLQLVAWYLLSLDKHPVATKAVTSAVLTLAGDLICQLVIDKVPELDLKRTFVFTLLGLVLVGPTLHFWYLYLSKLVTISGTSGVISRLLLDQFIFSPVFIGVFMSLLVTLEGKPSLVVPKLKQEWFSSLIANWQLWIPFQFFNFYFVPQKLQVLAANFVALAWNVILSYKAHKKVIAE

SEQ ID NO: 31862 - protein, 258 aa, Triticum aestivum
MAFALPLLLVPRPIVSPRPAAAGRFLSLSAPLSTAAPAPAPVEPLKGGGRLARLQTLHAASCCNSAPAAASGGVEAARAKGLQLVAWYLLSLDKHPVATKAVTSAVLTLAGDLICQLVIDKVPELDLKRTFVFTLLGLVLVGPTLHFWYLYLSKLVTISGTSGVISRLLLDQFIFSPVFIGVFMSLLVTLEGKPSLVVPKLKQEWFSSLIANWQLWIPFQFFNFYFVPQKLQVLAANFVALAWNVILSYKAHKKVIAE

SEQ ID NO: 31863 - DNA, 1453 bp, Triticum aestivum
attcgactcgacgccctcggttcacacacactgatcagctcagctacagcctacagagtacagacccaacccaactccgggagacaacagagcagagcacggcgagaatgctgctgaacccggcctcggaggcgctggtgctcgacagcatcaggcagcacctcatggaggacacggcggcgccggcgccggaggcgaggaggcagcggccggcctactgccgcagcgccagcttcgggagcctggtggccgaccagtggagcgagtcgctcccgttccgcgccgacgactccgacgacatggtcgtctacggcgcgctccgcgacgccttctcctgcggctggctccccgacggctccttcgccgccgtcaagccggagcccctcctgccttccccggactcctgctacgtcggcttcctcgagccggagacgcctccggccacgtccccgggagagagcgaggaggaggccgccgcggcgttcatgggcgaggcggccgcggccgcggcgagggggaagcactaccgcggggtgaggcagcggccgtggggcaagttcgcggcggagatccgggacccggccaagaacggcgcgcgcgtgtggctcggcacctacgacaccgccgaggacgccgccgtggcctacgaccgcgccgcgtaccgcatgcgcggctcccgcgccctcctcaacttcccgctccgcatcggctccgagatcgccgccgcgcacgccgcggccgcggccgccggggacaagcggccttcccccgagccggcgacctcagactcgtcgtcgtcctcctcctcctccgggtccccgaaaagaaggaagaggggcgaggccgcggccgcgtccatggccatggcgctggtgccgccgccctcgcagctgagccggccggcccaggcgtggtaccccgcggcgccggtggagcaggtggccatggcgccgcgcgcgcagcagctggtcagctaggccccgctcgccagcccccgggcgcacgatcggtcgtaaaagcacacaatgcgcaagtgcaatggattcgccagcaagtgcatggacgcgacagcaacaggagcccgcctttcactggtgcacggtgcaaggtggtgatggcaatggagagcgatggcgagcgagcgagcgagcaatcaggcaaagcaaccttggcgacggctccatttggatatttggatgggtcgagccgtcgacaacggaagataagctcggagcaactgggtgctgcaatttggcctggaatgatagttcctcctctctccactgctcggtgcaactcgcccaagtggatcaaagcgaaactgtgccagtatcggatcgtcgtggttccttctgagtcgtagggttatattttgtcactgtcagagtgcgtgtggtaaaaattacaaactcgtgaatcgtgatcgagcataatggaacttgtgaaactttac

SEQ ID NO: 31864 - protein, 324 aa, Triticum aestivum
STRRPRFTHTDQLSYSLQSTDPTQLRETTEQSTARMLLNPASEALVLDSIRQHLMEDTAAPAPEARRQRPAYCRSASFGSLVADQWSESLPFRADDSDDMVVYGALRDAFSCGWLPDGSFAAVKPEPLLPSPDSCYVGFLEPETPPATSPGESEEEAAAAFMGEAAAAAARGKHYRGVRQRPWGKFAAEIRDPAKNGARVWLGTYDTAEDAAVAYDRAAYRMRGSRALLNFPLRIGSEIAAAHAAAAAAGDKRPSPEPATSDSSSSSSSSGSPKRRKRGEAAAASMAMALVPPPSQLSRPAQAWYPAAPVEQVAMAPRAQQLVS

SEQ ID NO: 31865 - protein, 289 aa, Triticum aestivum
MLLNPASEALVLDSIRQHLMEDTAAPAPEARRQRPAYCRSASFGSLVADQWSESLPFRADDSDDMVVYGALRDAFSCGWLPDGSFAAVKPEPLLPSPDSCYVGFLEPETPPATSPGESEEEAAAAFMGEAAAAAARGKHYRGVRQRPWGKFAAEIRDPAKNGARVWLGTYDTAEDAAVAYDRAAYRMRGSRALLNFPLRIGSEIAAAHAAAAAAGDKRPSPEPATSDSSSSSSSSGSPKRRKRGEAAAASMAMALVPPPSQLSRPAQAWYPAAPVEQVAMAPRAQQLVS

SEQ ID NO: 31866 - protein, 270 aa, Triticum aestivum
MEDTAAPAPEARRQRPAYCRSASFGSLVADQWSESLPFRADDSDDMVVYGALRDAFSCGWLPDGSFAAVKPEPLLPSPDSCYVGFLEPETPPATSPGESEEEAAAAFMGEAAAAAARGKHYRGVRQRPWGKFAAEIRDPAKNGARVWLGTYDTAEDAAVAYDRAAYRMRGSRALLNFPLRIGSEIAAAHAAAAAAGDKRPSPEPATSDSSSSSSSSGSPKRRKRGEAAAASMAMALVPPPSQLSRPAQAWYPAAPVEQVAMAPRAQQLVS

SEQ ID NO: 31867 - DNA, 1545 bp, Triticum aestivum
acacgttgctcgctgctcggagagaggttcacacggctgcggttgtctcgtcgccgtcttggtctccccgtcccggtccgcgcgtcgcggttctcacatgaccaccgggccgcgctagttttcacggcgtggccatggccgtcgtcgtctgcgtcaccggcgccggcggcttcatcggctcctggatcgtcaagctcctcctcgcccgcggctacgccgtccgcggcacctcccgccgcgccgatgaccccaagaacgcgcacctgtgggcgctcgacggcgcggcggagcggctgacgatggtgcaggtcgacctgctcgaccgggccagcctccgcgccgccttccacggctgcgacggcgttatccacaccgcatcaccgatgcacgacacccccgaggagatcatcgagccggtgatcaccgggacgctcaacgtggtggagatggccgcggacgccggcgtccggcgcgtggtgctgtcctccaccatcggcaccatgtacatgaacccccaccgcgacccggacgcgccgctcgacgagtcgtgctggagcgacctcgactactgcaaacaaaccaagaactggtactgctacgccaagacgatcgcggagcggggcgcgtgggaggcggcgcgggcgctggggctggacctggcggtggtgatcccggtggtgacgctgggcgagctgctgcagccgagcatgaacaccagcaccaggcacatactcaagtacctcaccggcgaggccaaggcgtacgtcaacgagtcgcacgcctacgtgcatgtcaaggacgccgccgaggcgcacgtcagggtgctcgaggcgcccaacgccgggggacggcgctacgtctgcgccgagaggacgctgcaccgcggcgagctctgccggatcctcgccgggctcttcccggagtacccgattcccacaagatgtaaggacgaggtaaatccgccaaagaagggttacaagtacaccaaccagcctctgaaggaccttggcatgaagttcacccctgtgcaagaatacctctatgaagcggtgaaatccctgcaagagaagggattcattcagaaggcttctggcaacaaggggcttgctagtagagggagttcgccgcctcaaaattcaacggcgcccgtgtttatgtcgaaactttgatgggcttctgcacaaagtaacaatgcagttcgccgtcatgtgaattgtaattcatttgattaagtgatatgttgctggacagttcttgtatgtggcaaactgccaactttgtgtagtagcgccgtgttgcctggaacagtacaccgctacagagcaacttcagtgatgcatgccaaatattttccctggtcgatgttcttctaccaccacctagttgttcaccttgtctgactcagcgggtacaaaaacccgatcaagttggcacttggcagcagagcatacaagcgtgccctctttggagtctcgttcggagagtgatgctgttttggccaacttctgcttgttgttggtcgtgatcttgtttatgcgctttctc

SEQ ID NO: 31868 - protein, 344 aa, Triticum aestivum
MAVVVCVTGAGGFIGSWIVKLLLARGYAVRGTSRRADDPKNAHLWALDGAAERLTMVQVDLLDRASLRAAFHGCDGVIHTASPMHDTPEEIIEPVITGTLNVVEMAADAGVRRVVLSSTIGTMYMNPHRDPDAPLDESCWSDLDYCKQTKNWYCYAKTIAERGAWEAARALGLDLAVVIPVVTLGELLQPSMNTSTRHILKYLTGEAKAYVNESHAYVHVKDAAEAHVRVLEAPNAGGRRYVCAERTLHRGELCRILAGLFPEYPIPTRCKDEVNPPKKGYKYTNQPLKDLGMKFTPVQEYLYEAVKSLQEKGFIQKASGNKGLASRGSSPPQNSTAPVFMSKL

SEQ ID NO: 31869 - protein, 289 aa, Triticum aestivum
MVQVDLLDRASLRAAFHGCDGVIHTASPMHDTPEEIIEPVITGTLNVVEMAADAGVRRVVLSSTIGTMYMNPHRDPDAPLDESCWSDLDYCKQTKNWYCYAKTIAERGAWEAARALGLDLAVVIPVVTLGELLQPSMNTSTRHILKYLTGEAKAYVNESHAYVHVKDAAEAHVRVLEAPNAGGRRYVCAERTLHRGELCRILAGLFPEYPIPTRCKDEVNPPKKGYKYTNQPLKDLGMKFTPVQEYLYEAVKSLQEKGFIQKASGNKGLASRGSSPPQNSTAPVFMSKL

SEQ ID NO: 31870 - protein, 261 aa, Triticum aestivum
MHDTPEEIIEPVITGTLNVVEMAADAGVRRVVLSSTIGTMYMNPHRDPDAPLDESCWSDLDYCKQTKNWYCYAKTIAERGAWEAARALGLDLAVVIPVVTLGELLQPSMNTSTRHILKYLTGEAKAYVNESHAYVHVKDAAEAHVRVLEAPNAGGRRYVCAERTLHRGELCRILAGLFPEYPIPTRCKDEVNPPKKGYKYTNQPLKDLGMKFTPVQEYLYEAVKSLQEKGFIQKASGNKGLASRGSSPPQNSTAPVFMSKL

SEQ ID NO: 31871 - DNA, 1480 bp, Triticum aestivum
acctacctactgcctccattcccaccacagctagcttcagcttttagctaagctctacttccctcccgagctaagcatcttcttgatttctcggtgatcggattcggatggacagcgcaagaagctgcctcgtggacgacgtgagcagcggcgcgtccacgggcaagaaggcctctccgtccccggccgcgccggcgaccaagccgctgcagcgcgtgggcagcggggccagcgcggtcatggacgcgccggagcccggcgccgaggcggactccggccgcgtcggcaggctgccgtcctccaagtacaagggcgtggtgccgcagcccaacgggcgctggggcgcgcagatctacgagcgccaccagcgcgtctggctcggcaccttcacgggggaggccgaggctgcgcgcgcctacgacgcggcggcgcagcgcttccgcggccgcgacgcagtcaccaacttccgctcgctcaccgagtccgacccggaggacgccgccgagctccgcttcctcgctgcccgctccaaggccgaggtcgtcgacatgctgcgcaagcacacctatcccgacgagctcgctcagtacaagcgcgcctacttcgccgccgctgcggcgtcctcccctacatcgtcctcggtgcctcccgcctcgtcgccctcttcggcggcttcgccctcgccggcggcgcggcgcgagcacctgttcgacaagacggtcacgcccagcgacgtggggaagctgaaccggcttgtgataccgaagcagcacgccgagaagcactttcctctccagcttccttccgccggcgccgccgtgtccggcgagtgcaagggcatgcttctcaacttcgacgactcggccggcaaggtgtggaggttccggtactcgtactggaacagcagccagagctacgtgctcaccaagggctggagccgctttgtcaaggagaagggcctgcacgccggcgacgccgtcgggttctaccgctctgcctcaggcagcaaccagctcttcatcgactgcaagctccggtccaagaccacgacgatgacgacgactttcgtcaacgcggcggccgccccgtcgccggcacccgtgatgaggaccgtgcgactcttcggcgtcgaccttctcacggcgccggcgccgagtcacgtgcccgagcacgaggactgcagcatggtgcccaagacaagcaagagatccatggacgccaacgcagcggccactccggcgcacgcggtctggaagaagcggtgcatagacttcgcgctgacctagccagctagcgtttttcctccatggttgctttgcttgcctccaaatttccatgttagtagcttagagctcttgatcggtccaagtgtttgccttttttttcctcttcttctcatacacaagttagctctaaatccagtcttctttaattaatctactgtaaattaagcccgttctcgaaatggcaagtgttcacc

SEQ ID NO: 31872 - protein, 392 aa, Triticum aestivum
MDSARSCLVDDVSSGASTGKKASPSPAAPATKPLQRVGSGASAVMDAPEPGAEADSGRVGRLPSSKYKGVVPQPNGRWGAQIYERHQRVWLGTFTGEAEAARAYDAAAQRFRGRDAVTNFRSLTESDPEDAAELRFLAARSKAEVVDMLRKHTYPDELAQYKRAYFAAAAASSPTSSSVPPASSPSSAASPSPAARREHLFDKTVTPSDVGKLNRLVIPKQHAEKHFPLQLPSAGAAVSGECKGMLLNFDDSAGKVWRFRYSYWNSSQSYVLTKGWSRFVKEKGLHAGDAVGFYRSASGSNQLFIDCKLRSKTTTMTTTFVNAAAAPSPAPVMRTVRLFGVDLLTAPAPSHVPEHEDCSMVPKTSKRSMDANAAATPAHAVWKKRCIDFALT

SEQ ID NO: 31873 - protein, 348 aa, Triticum aestivum
MDAPEPGAEADSGRVGRLPSSKYKGVVPQPNGRWGAQIYERHQRVWLGTFTGEAEAARAYDAAAQRFRGRDAVTNFRSLTESDPEDAAELRFLAARSKAEVVDMLRKHTYPDELAQYKRAYFAAAAASSPTSSSVPPASSPSSAASPSPAARREHLFDKTVTPSDVGKLNRLVIPKQHAEKHFPLQLPSAGAAVSGECKGMLLNFDDSAGKVWRFRYSYWNSSQSYVLTKGWSRFVKEKGLHAGDAVGFYRSASGSNQLFIDCKLRSKTTTMTTTFVNAAAAPSPAPVMRTVRLFGVDLLTAPAPSHVPEHEDCSMVPKTSKRSMDANAAATPAHAVWKKRCIDFALT

SEQ ID NO: 31874 - protein, 245 aa, Triticum aestivum
MLRKHTYPDELAQYKRAYFAAAAASSPTSSSVPPASSPSSAASPSPAARREHLFDKTVTPSDVGKLNRLVIPKQHAEKHFPLQLPSAGAAVSGECKGMLLNFDDSAGKVWRFRYSYWNSSQSYVLTKGWSRFVKEKGLHAGDAVGFYRSASGSNQLFIDCKLRSKTTTMTTTFVNAAAAPSPAPVMRTVRLFGVDLLTAPAPSHVPEHEDCSMVPKTSKRSMDANAAATPAHAVWKKRCIDFALT

SEQ ID NO: 31875 - DNA, 1422 bp, Triticum aestivum
atcccgcacccaccattgagagaagcagcagcacgagcagcacatgtcacagagggccagcgtcccacactcctcctgcatagccttcgccctccattcccacctcctcgtgtcctctgagatgtgccccagctcctactgggaatagaatagccacccccgcccaaatcccacacctttttcgtttttgatttcctctcttctttagattttttttctagatctttgggggcctccaattcgtccgtccgcgagggggaagcgaggggaagatgggcgtcaaggggttcgtcgagggcggcatcgcctccatcgtcgccggctgctccacccaccctctcgacctcatcaaggtccggatgcagctgcagggggagtcctccgcggccgcggcccagcccgcgctccgcccggcgctcgccttccaggccggggcgcacaccgtgacgctcccgcacgcgcccacgccggtgcccaagcccggcccgattggcatctgcacgcagatcctgcgcgccgagggcgccgccgggctcttctccgggatctcggccaccatgctgcgccagacgctctactccaccacgcggatggggctctacgacatcctcaagaagcgctggacccaggagaacgccggcgtgctgccgctgcaccgcaagatcgccgccggcctcatcgccggcggcgtcggcgcggccgtcggcaacccggccgacctggccatggtgcggatgcaggccgacggccgcctcccgctggccgaccgcaggaactaccgcagcgtgggcgacgccatcgcccggatgacgcgcgacgagggcgtgcgcagcctctggcgcggctccgcgctcacggtcaaccgcgccatgattgtcaccgcgtcgcagctggccacctacgaccaggccaaggaggccatcctggcccgccgcggcccggccgccgacgggctgggcacgcacgtggccgccagcttcgccgcgggcatcgtggccgccgccgcgtccaaccccgtggacgtggtcaagaccagggtgatgaacatgaaggtggcgcccggcgcgccccctccgtacgccggggccctggactgcgcgctcaagacggtgcggtcggagggcgtgatggcgctctacaaggggttcatccccacggtgtcgcgccaggggcccttcaccgtggtgctcttcgtcaccctggagcaggtgcgcaaggtcttcaaggacgtcgagttctaatgcagtgcagaccaccgcacggcgcggcgccatggatccatgatgatgacgacaagaagctgcccattgatgccgctgctgctaagaataactagtagtaccgctggagggatttctccagttcctgcctctcattttattcggatgaatttgatcgattttgaatgaaattctcattttc

SEQ ID NO: 31876 - protein, 322 aa, Triticum aestivum
MGVKGFVEGGIASIVAGCSTHPLDLIKVRMQLQGESSAAAAQPALRPALAFQAGAHTVTLPHAPTPVPKPGPIGICTQILRAEGAAGLFSGISATMLRQTLYSTTRMGLYDILKKRWTQENAGVLPLHRKIAAGLIAGGVGAAVGNPADLAMVRMQADGRLPLADRRNYRSVGDAIARMTRDEGVRSLWRGSALTVNRAMIVTASQLATYDQAKEAILARRGPAADGLGTHVAASFAAGIVAAAASNPVDVVKTRVMNMKVAPGAPPPYAGALDCALKTVRSEGVMALYKGFIPTVSRQGPFTVVLFVTLEQVRKVFKDVEF

SEQ ID NO: 31877 - protein, 293 aa, Triticum aestivum
MQLQGESSAAAAQPALRPALAFQAGAHTVTLPHAPTPVPKPGPIGICTQILRAEGAAGLFSGISATMLRQTLYSTTRMGLYDILKKRWTQENAGVLPLHRKIAAGLIAGGVGAAVGNPADLAMVRMQADGRLPLADRRNYRSVGDAIARMTRDEGVRSLWRGSALTVNRAMIVTASQLATYDQAKEAILARRGPAADGLGTHVAASFAAGIVAAAASNPVDVVKTRVMNMKVAPGAPPPYAGALDCALKTVRSEGVMALYKGFIPTVSRQGPFTVVLFVTLEQVRKVFKDVEF

SEQ ID NO: 31878 - protein, 227 aa, Triticum aestivum
MLRQTLYSTTRMGLYDILKKRWTQENAGVLPLHRKIAAGLIAGGVGAAVGNPADLAMVRMQADGRLPLADRRNYRSVGDAIARMTRDEGVRSLWRGSALTVNRAMIVTASQLATYDQAKEAILARRGPAADGLGTHVAASFAAGIVAAAASNPVDVVKTRVMNMKVAPGAPPPYAGALDCALKTVRSEGVMALYKGFIPTVSRQGPFTVVLFVTLEQVRKVFKDVEF

SEQ ID NO: 31879 - DNA, 1346 bp, Triticum aestivum
cttttccccgtcagacgccagcaagctgcttgctttgcttcggttagctcgctgcgcggcgccgctctcggctcccccgcggccaggctgctcggatggcggggcggccggggtacgtcacgctgccgataatctcggtgttcgccgcgatcgggtacgtctactacaccgcggtgttcctcgcgatccccgcgtggctggggctcgccacggcggcgggggtcgccaacgtcgcggcctacaccgcgctcgcgctcgcctgcgtcgccgcctacggcctcgtcgtcacgcgcgacccgggccgcgtgccgcccgccttcgtgcccgacgtcgaggacacggagacccccctccatgagatcaagcgcaagggtggtgatttgagatactgccagaagtgttttcattataaacctcctcgcgcgcatcattgtcgtgtctgcaagagatgtattctgaaaatggatcaccactgtatttggattaacaattgtgttgggcatgagaattacaaaattttcctcgtctttgtgttgtatgctgcaaccgcaagcttctattctttggctctgatgattggaggcgtagtgcatagtgtgcctacagatgaacaatcaggaattgattctccaagaaaatcgttagttatttgtggcgtctttgtgggtgtaatgactttggcgttgtctatcctcttggtctggcatgtttacctcatcttacataataagactactattgagtaccatgaaggagttagggcaatgtggttggcagaaaaggctggaaatctttaccatcatccatatgatctcggtgtctatcataatattgtttcggtcctaggccccaacatgctatgctggttctgccctgtatcgaggaacataggcgacggcgttcgtttccgcacatcgtatgatattccgctatcgacaccaccatccaaagcagaaaagcatctggcaatgtcttgagctcttgcattgagagcgtatattgtgggatcaaatctgtgaatcatgccgcaagtgtaaggtacatagcgagggctgaggagcttcaagagtagttcctccaggccccagggatgtatctggagttagaaaccctaatctagctagttattccattatactttttggccagcttgatgagaagaatcaccgatgggcctcaatagatctggagtgacctggctcgcctgtactcatacaaaaagtctgaactgaagagtcaaagactgctctgttgtaaagtacgtgcctgtagtgtcgtttaccctgaagtccgtatattgcgtttttgtgtcagagagagttaagggacaaatgtcctatttactc

SEQ ID NO: 31880 - protein, 293 aa, Triticum aestivum
MAGRPGYVTLPIISVFAAIGYVYYTAVFLAIPAWLGLATAAGVANVAAYTALALACVAAYGLVVTRDPGRVPPAFVPDVEDTETPLHEIKRKGGDLRYCQKCFHYKPPRAHHCRVCKRCILKMDHHCIWINNCVGHENYKIFLVFVLYAATASFYSLALMIGGVVHSVPTDEQSGIDSPRKSLVICGVFVGVMTLALSILLVWHVYLILHNKTTIEYHEGVRAMWLAEKAGNLYHHPYDLGVYHNIVSVLGPNMLCWFCPVSRNIGDGVRFRTSYDIPLSTPPSKAEKHLAMS

SEQ ID NO: 31881 - protein, 171 aa, Triticum aestivum
MDHHCIWINNCVGHENYKIFLVFVLYAATASFYSLALMIGGVVHSVPTDEQSGIDSPRKSLVICGVFVGVMTLALSILLVWHVYLILHNKTTIEYHEGVRAMWLAEKAGNLYHHPYDLGVYHNIVSVLGPNMLCWFCPVSRNIGDGVRFRTSYDIPLSTPPSKAEKHLAMS

SEQ ID NO: 31882 - DNA, 1489 bp, Triticum aestivum
aaccaatcacccccatcccccctccatctcgcgtggattaatggatctccgccccgccccgccctgctctctcgcttgctaggaaccgtagctgccgccagcccagcccaccccgcccgattcggagccgcgccgagggagagggagcgacatggggctccgcaggagaggccctctgctgctgctcctcctcctcggcctcgtggtggccacggccgcggcggcggcggacgacgcctccgcctccgagggcgacgccgatccgctctacagagcttgcttcgaagaatgtcaaaggactggcaccctgaaagaggattctattaaacactgtgttgtgccgaccgatgaccagcctgctgacaaggcatggtacgcgcacgagccattgtacctgcagtggaaggagtggaactgcaacagcgaatgccgataccattgtatgatggaaagagagcaggaaagggaagagcttgggctagggcccgtcaagtatcatggcaaatggcctctcaaacgtgcttctgtatttcaggaacctctttctgcagctctgtctgccctgactcttctcgtgcaatttaacggatggctatcgtttttcctcttgctttcttacaagctgcctcttaggccagaaactcatgccacatactacgaatacaccgggttatggcacattaacgcgctcttggccttgaattcatggttctggtgtgccatatatcacagttgtgatactgcttggacagaaaagctgtacctgtcatcagctgctgcttttcttggctactccctcatcttggccatactgcgaacttcgaatctgagggatgaagcttcaagagtgatggttgcagctccaattctggcttttgtgacaacccacattttgtacctcaacttctatgaactcgacaaaggcctgaacatgaaggtttgcactgttattagcgttgctcagctccttctgtggacagtgtgggctgctatcacaaggcatccttcacgcctgaaggtcgtctttgttgccatcggcggtgtcctctcactatacctggaagcccatgatgtccctccgcgatggggatatgttgatggacacgcaatctgcctcgccatggctatccccctgtcatacctctggtggagcttcgccaaggaagacgctgagatgcgcacggcggcaattatgaagaagaaacgataacgggcttcgccagaccaaatacttccatctttggtggcgaatctgtgaaaacttgtctccactcatccaatgtaaagatgagtttttcattgtaaatttaggagatctcgtatgtgaattactgttttttccatgctactttttgcctcagctcaggaggtttacatggtttgaaacttgtgatagccctttgtatttctctcatttacaagccaattgagtgtgtgctaggtttgttttcatctcttttagatgcacttactggaagcagttctgatc

SEQ ID NO: 31883 - protein, 352 aa, Triticum aestivum
MGLRRRGPLLLLLLLGLVVATAAAAADDASASEGDADPLYRACFEECQRTGTLKEDSIKHCVVPTDDQPADKAWYAHEPLYLQWKEWNCNSECRYHCMMEREQEREELGLGPVKYHGKWPLKRASVFQEPLSAALSALTLLVQFNGWLSFFLLLSYKLPLRPETHATYYEYTGLWHINALLALNSWFWCAIYHSCDTAWTEKLYLSSAAAFLGYSLILAILRTSNLRDEASRVMVAAPILAFVTTHILYLNFYELDKGLNMKVCTVISVAQLLLWTVWAAITRHPSRLKVVFVAIGGVLSLYLEAHDVPPRWGYVDGHAICLAMAIPLSYLWWSFAKEDAEMRTAAIMKKKR

SEQ ID NO: 31884 - protein, 255 aa, Triticum aestivum
MMEREQEREELGLGPVKYHGKWPLKRASVFQEPLSAALSALTLLVQFNGWLSFFLLLSYKLPLRPETHATYYEYTGLWHINALLALNSWFWCAIYHSCDTAWTEKLYLSSAAAFLGYSLILAILRTSNLRDEASRVMVAAPILAFVTTHILYLNFYELDKGLNMKVCTVISVAQLLLWTVWAAITRHPSRLKVVFVAIGGVLSLYLEAHDVPPRWGYVDGHAICLAMAIPLSYLWWSFAKEDAEMRTAAIMKKKR

SEQ ID NO: 31885 - protein, 254 aa, Triticum aestivum
MEREQEREELGLGPVKYHGKWPLKRASVFQEPLSAALSALTLLVQFNGWLSFFLLLSYKLPLRPETHATYYEYTGLWHINALLALNSWFWCAIYHSCDTAWTEKLYLSSAAAFLGYSLILAILRTSNLRDEASRVMVAAPILAFVTTHILYLNFYELDKGLNMKVCTVISVAQLLLWTVWAAITRHPSRLKVVFVAIGGVLSLYLEAHDVPPRWGYVDGHAICLAMAIPLSYLWWSFAKEDAEMRTAAIMKKKR

SEQ ID NO: 31886 - DNA, 1439 bp, Triticum aestivum
gaaaagcaaatcgtgcccaaccaaaccctagccccctccccagcccatggcgaagttcggcgagggcgacgctcggtggatcgtgcaggagcgcgccgacggtgccaacgtccacaactggcactgggcggagcgcgactgtctcgactggtctcgcgcgcttctctccaagctcctcgcgggcctccccgtcctctccggagagggcggcctcaccctccgcaccaccaccctcgacaagctcgatggcgaggcctacgtcaacatccgcaagggcaaggtcatcccagggtacgagctttccctcacgctcgcctgggaggccgatgccacaaccgagtcgggggtcgtcaaggtcaccggcaccgctgaggtaccctacctcgctgacgagaacgccgacgaggaccccgaactccgcatcactgttcgcggtgacgacggccccctcgcgcgccgggccaaggatgccttcatcgcccatggcaagcctctggttattacgaagatccgggattatgtcgccgccatggcgaatggtggccccgccaaggacgagatagattctaagaagatttccaccaaggctgccccagcggccggtggcgcagctgttgctcctgctccttcagtgaaggtaacagcagcgccagtgcaggcgccagcagctaaggagaagaaggcgaatggcaaggataaggaaggattcaagactatcgagatgacagagaagttcaactgccgctccaaggacatctatgagatcttgatggatgacaacaggtggaagggtttcacacagagcaatgcgaggatcagcaaggatgttggtgggcagtttagcctctttgatgggtccatcacaggtgttaatgaggagctgcaggaagggaagctgatcgtgcagaaatggcggtttgggagctgggctgatggcgtccattctacagtcaggttggtgtttgatgagcctgagtcaggagtgacaacaataaagctcaaacaaactgatgtgccagaggaagacaggtatgggaactcaaccgtggtggagaacactgagagaggctggaaagagctcatcttccagaggatacgtgcagtgttcggttttggggtctgaaaaagcatctttgacatccagcttcaatgaagtcgatcctgccttttcatggctatccatgttttgctgtcttagtttattcgatgctgatcgacacacaaaacttcgtgaacttccgggaattgaaaaatactccgtgttaccttgtattcatcacgctgggttgtgctttgaagtcgtcactcatgaaagtttgagcttgtgactcatgtagaggccggcgaaagatggtcgctgagtgactattatttttattccttgcgtctgtatgacatggtaccagataaattgtattgaagtttctagttctacaagc

SEQ ID NO: 31887 - protein, 358 aa, Triticum aestivum; identical to SEQ ID NO: 30698

SEQ ID NO: 31888 - protein, 197 aa, Triticum aestivum; identical to SEQ ID NO: 30699

SEQ ID NO: 31889 - protein, 186 aa, Triticum aestivum; identical to SEQ ID NO: 30700

SEQ ID NO: 31890 - DNA, 1533 bp, Triticum aestivum
ctctttcggtcttggaatccttcctccctcccttccctccgtgtcgcccgcgctccgcctaccggatcgcaattccgcatcgccccgccgcagccccagccccagccccggccaggcccccatggcgaggcgatccgccccgctcctccgccgcctggtctcctccgcgccgcccctcccgggccacggcggcggcgcgcgccgcacggtcacctacatgccccgcccgggcgatggcaccccgcgccccgtcacgctcatcccgggcgacggcatcggacccctcgtcaccggcgccgtggagcaggtcatggaggccatgcacgcgcccgtctacttcgagtcctacgacgtccacggcgacatgcccgccgtgccgcccgccgtcatcgaatccatccgccgcaacaaggtctgcctcaagggcggcctcgccacccccgtcggcgggggcgtctcctccctcaacatgcagctccgcaaggagctcgacctcttcgcctccctcgtcaactgcgccaacgtccccggcctgcccaccaggcaccagaacgtcgacatcgtcgtcatcagggagaacaccgagggcgagtactcgggcctcgagcacgaggtcgtcccgggggtcgtcgagagcctcaaggtgatcacgaagttttgctccgagaggattgccaaatatgccttcgagtatgcttaccttaactaccggaagaaagtcacagcagtgcataaagcaaacatcatgaaacttgctgatggtttgttcttggagtcttgccgtgagattgctgctaaatatccaagtattgagtataatgaaatcattgttgacaactgctgcatgcaacttgtttcaaggcctgagcaatttgatgttatggttacgcctaacctttacggcaatttggttgccaacacagctgcaggtcttgttggaggaacaggtgtcatgccaggaggtaatgtaggtcaggatcatgccatcttcgagcaaggtgcttctgcaggaaatgtgggaaatgacaatcttgtagagcagcagaaagcaaaccctgtcgccctgctcctgtcgtctgctatgatgttgaggcatttgcagttcccgtcgttcgctgaccgtctggaaactgcggtgaagcgggtcattgcagatggcaagtacaggacaaaggatctgggcggcaccagcaccacccaggaagttactgatgcagtgatcgctaatctggattaggtacctgatgcacgcctgaagaatcgattcttttggaggactggtttaaaggtcccaactcctgagtgctattttttccgtacagcattagatcggcaattatgtttgagaaataattgaggaacccacgaggattattcttcccactatactttgtagcaaggcaaaacaccttgtgttgcagaggggatagctggctaccttaaatttaaacggcatgtattgaaagtttattctcagttcttattcgtggttatcactcccatggaaccggaaatctggtcctctttttcagt

SEQ ID NO: 31891 - protein, 411 aa, Triticum aestivum
SFGLGILPPSLPSVSPALRLPDRNSASPRRSPSPSPGQAPMARRSAPLLRRLVSSAPPLPGHGGGARRTVTYMPRPGDGTPRPVTLIPGDGIGPLVTGAVEQVMEAMHAPVYFESYDVHGDMPAVPPAVIESIRRNKVCLKGGLATPVGGGVSSLNMQLRKELDLFASLVNCANVPGLPTRHQNVDIVVIRENTEGEYSGLEHEVVPGVVESLKVITKFCSERIAKYAFEYAYLNYRKKVTAVHKANIMKLADGLFLESCREIAAKYPSIEYNEIIVDNCCMQLVSRPEQFDVMVTPNLYGNLVANTAAGLVGGTGVMPGGNVGQDHAIFEQGASAGNVGNDNLVEQQKANPVALLLSSAMMLRHLQFPSFADRLETAVKRVIADGKYRTKDLGGTSTTQEVTDAVIANLD

SEQ ID NO: 31892 - protein, 371 aa, Triticum aestivum
MARRSAPLLRRLVSSAPPLPGHGGGARRTVTYMPRPGDGTPRPVTLIPGDGIGPLVTGAVEQVMEAMHAPVYFESYDVHGDMPAVPPAVIESIRRNKVCLKGGLATPVGGGVSSLNMQLRKELDLFASLVNCANVPGLPTRHQNVDIVVIRENTEGEYSGLEHEVVPGVVESLKVITKFCSERIAKYAFEYAYLNYRKKVTAVHKANIMKLADGLFLESCREIAAKYPSIEYNEIIVDNCCMQLVSRPEQFDVMVTPNLYGNLVANTAAGLVGGTGVMPGGNVGQDHAIFEQGASAGNVGNDNLVEQQKANPVALLLSSAMMLRHLQFPSFADRLETAVKRVIADGKYRTKDLGGTSTTQEVTDAVIANLD

SEQ ID NO: 31893 - protein, 339 aa, Triticum aestivum
MPRPGDGTPRPVTLIPGDGIGPLVTGAVEQVMEAMHAPVYFESYDVHGDMPAVPPAVIESIRRNKVCLKGGLATPVGGGVSSLNMQLRKELDLFASLVNCANVPGLPTRHQNVDIVVIRENTEGEYSGLEHEVVPGVVESLKVITKFCSERIAKYAFEYAYLNYRKKVTAVHKANIMKLADGLFLESCREIAAKYPSIEYNEIIVDNCCMQLVSRPEQFDVMVTPNLYGNLVANTAAGLVGGTGVMPGGNVGQDHAIFEQGASAGNVGNDNLVEQQKANPVALLLSSAMMLRHLQFPSFADRLETAVKRVIADGKYRTKDLGGTSTTQEVTDAVIANLD

SEQ ID NO: 31894 - DNA, 1506 bp, Triticum aestivum
aaactcgagtctcggtcaacagacgtcgaagcatcacgaactaccgccgataactccggcggtcgccgccgatggactcctcttcgtcctccgtccctgcggctgcggagggggcgcttccggcgggggagaatctggctgtgttctggcacgagggcatgctggcccacgacgccggccgcggcgtgttcgactcgggccgcgacccgggcttcctcgacgtgctcgaccaccacccggagaacgccgaccgcgtccgcaacatggtatccatcctccgccgcgggcccatcgcgcccttcctctcttggcactccggcacccccgcccacgccagcgacctcctctccttccactccccagaatacattgaggagctcgtgcaggcgaatgccagtggacccaagaagttatgtgagggtactttcttgaactctggttcatggggcgctgcgcttctggctgccggaacaaccttatcagctgtgaggcacatactagacgggcatgggaagatagcctacgcattggtccgcccccctggccatcacgcgcagccggaccatgccgacggttactgctttctgaacaacgccgggcttgctgtgcagctggctctggattctggccgcgcaaaggttgccgttgttgacatagatgtgcactatggaaatggtaccgcagagggcttctatcgcacggacaacgtgttggcaatctctcttcacatgaagcatggtacttggggtccttcgcatctgcagagtggctcggctgatgagattggggaaggcaaggggcttgggtacaatctcaatatacctttgcctaatggcagtggggataaaggctatgagtatgcaatgaatgaattggttgtcccggcgattgacaagtttcaacctcagcttttggtttttgtcattggccaagattctagcatgtttgatccaaatggaagacagtgcttgaccatggatggttacaggaaaattggacaaataatgaggggcgtggctaatcgacatagcgatgggcaaatgttgattgtccaggaagggggttaccacatcagttattcagcatattgtctgcatgcgacactagaaggcgttctgaatcttgaggccccattgctggacgacccaatcgcatactatcccgaggatgagaagtacaccatggaagctgtcgacgtcacgaagaaacgctggaaagaatccattcccttcttgaaggacatttaaggacgcgttacgtctcttcttcgacgcagcggcaaacgacgaacctcggtctcgaatcatgtcatggtttgtattctcggaattaaatcgcactgtcaagaaaagagtgacgcagctcatgtagatgagcattaagagttttttttttcctttgtcgtttaagagaatgaatgaaaccagacattttcttgagcagtttgttgaactgagaatatgtttgttgcatcccgtccgttggattaataaagagatcatatat

SEQ ID NO: 31895 - protein, 391 aa, Triticum aestivum
MDSSSSSVPAAAEGALPAGENLAVFWHEGMLAHDAGRGVFDSGRDPGFLDVLDHHPENADRVRNMVSILRRGPIAPFLSWHSGTPAHASDLLSFHSPEYIEELVQANASGPKKLCEGTFLNSGSWGAALLAAGTTLSAVRHILDGHGKIAYALVRPPGHHAQPDHADGYCFLNNAGLAVQLALDSGRAKVAVVDIDVHYGNGTAEGFYRTDNVLAISLHMKHGTWGPSHLQSGSADEIGEGKGLGYNLNIPLPNGSGDKGYEYAMNELVVPAIDKFQPQLLVFVIGQDSSMFDPNGRQCLTMDGYRKIGQIMRGVANRHSDGQMLIVQEGGYHISYSAYCLHATLEGVLNLEAPLLDDPIAYYPEDEKYTMEAVDVTKKRWKESIPFLKDI

SEQ ID NO: 31896 - protein, 362 aa, Triticum aestivum
MLAHDAGRGVFDSGRDPGFLDVLDHHPENADRVRNMVSILRRGPIAPFLSWHSGTPAHASDLLSFHSPEYIEELVQANASGPKKLCEGTFLNSGSWGAALLAAGTTLSAVRHILDGHGKIAYALVRPPGHHAQPDHADGYCFLNNAGLAVQLALDSGRAKVAVVDIDVHYGNGTAEGFYRTDNVLAISLHMKHGTWGPSHLQSGSADEIGEGKGLGYNLNIPLPNGSGDKGYEYAMNELVVPAIDKFQPQLLVFVIGQDSSMFDPNGRQCLTMDGYRKIGQIMRGVANRHSDGQMLIVQEGGYHISYSAYCLHATLEGVLNLEAPLLDDPIAYYPEDEKYTMEAVDVTKKRWKESIPFLKDI

SEQ ID NO: 31897 - protein, 327 aa, Triticum aestivum
MVSILRRGPIAPFLSWHSGTPAHASDLLSFHSPEYIEELVQANASGPKKLCEGTFLNSGSWGAALLAAGTTLSAVRHILDGHGKIAYALVRPPGHHAQPDHADGYCFLNNAGLAVQLALDSGRAKVAVVDIDVHYGNGTAEGFYRTDNVLAISLHMKHGTWGPSHLQSGSADEIGEGKGLGYNLNIPLPNGSGDKGYEYAMNELVVPAIDKFQPQLLVFVIGQDSSMFDPNGRQCLTMDGYRKIGQIMRGVANRHSDGQMLIVQEGGYHISYSAYCLHATLEGVLNLEAPLLDDPIAYYPEDEKYTMEAVDVTKKRWKESIPFLKDI

SEQ ID NO: 31898 - DNA, 1702 bp, Triticum aestivum
attttcacatcaaaatttctcctctttctatccatggccacggacgcacagcaccagcgacacagccgcaacggcggcgtgcacaccggccaccacttcctcatcgtggcctacggcatccagagccacctcaacccgtgccgcgtcctcgcgcaccgcctcgcgcgcctccacggcgtcgacggctccggggccgtcctcgccacggtctccctcccggtgtccgctcaccgccgcatgttcccttcgtccggagacgtcgacaatgatgataaagccaccgacggcgtcgtctcttacgctccatactccgacggcctcgacgacggctccatggccagggacggcgaggcgagggcgcgcagccgccaggccacctttgagagcctgtcagccgtcgtcgccaccctcgccgcacgtggccggccggtgacgtgtgtcgtttgcagcatggttctccccgcggcgctggacgtcgcgcgtgagcacggcatcccgctggccgtgtactggatccaaccggccaccgtgctcgccgcgtactaccactacttccacggccacggcgacctcctcgcgtcccacgccgccgaccccgcgtacgaggtgtccctgcccgggctacaccgccctctccggatccgcgacttcccgtccttcctcgtcgacacgacgggcagcgagctggccaaggtcttcaacgaagcggcccgagaactgttcgagcacttgggcgatcacggctgcaccaaggttctcgtgaacactttcgacgagctggagccggcagcgctggcagccatgaaggagcacctagacgtgttcgccgtcgggccggtgatcgggtcctcctcggccgagccgcgcatccacctgttcaaccacgccggcgccgacgagaagaggtacatggagtggctgggtgcgcaggcggcgaggtcggtgctgtacgtttcatttgggagcatatggacgtacagcaagaagcaaatggaggagattgcgaacgggctgcggcggtgcgggcggccgtacctgctcgtcgtgcgcaatgacgggcggcaggaggacgtgagccggagcctagacgacctcgtgctagaggggcagggcatggtggtggagtggtgcgaccaacccaaggtcctgtcgcacgcgtccgtgggatgcttcgtcacgcactgcggctggaactcgacgctggaggccatggccctcggcgtgccggtcgtcgccgcgccaagcttgttcgaccagccgacgaacgccttcttgatagaggaggagtgggctgccggcgtcagaggggagcgcaacagcgagggcggcttcaccggggaggagctcgcaaggtgcgtcgagctgctcatgggtcatggcccgagggccattgagatcagggaaagagtggacgctctgaaagggatgacgcgagaggcggcggcttcgggcgggccggcggagcggagcctccgaagctttgtcatggcggccggttcaatcgtcggatgaagtttgcaggaatacaccaccaaatctgtccaaatcgattaagtggatgcatgctggagtggatcagctagctctctcgatcggtcggagttaaacaacatttaataaccgggattgctaaatctcagtcgacttcttggtcgatgatatattcgcaggatcttacgtgaagatcggtgcgaattttttt

SEQ ID NO: 31899 - protein, 503 aa, Triticum aestivum
IFTSKFLLFLSMATDAQHQRHSRNGGVHTGHHFLIVAYGIQSHLNPCRVLAHRLARLHGVDGSGAVLATVSLPVSAHRRMFPSSGDVDNDDKATDGVVSYAPYSDGLDDGSMARDGEARARSRQATFESLSAVVATLAARGRPVTCVVCSMVLPAALDVAREHGIPLAVYWIQPATVLAAYYHYFHGHGDLLASHAADPAYEVSLPGLHRPLRIRDFPSFLVDTTGSELAKVFNEAARELFEHLGDHGCTKVLVNTFDELEPAALAAMKEHLDVFAVGPVIGSSSAEPRIHLFNHAGADEKRYMEWLGAQAARSVLYVSFGSIWTYSKKQMEEIANGLRRCGRPYLLVVRNDGRQEDVSRSLDDLVLEGQGMVVEWCDQPKVLSHASVGCFVTHCGWNSTLEAMALGVPVVAAPSLFDQPTNAFLIEEEWAAGVRGERNSEGGFTGEELARCVELLMGHGPRAIEIRERVDALKGMTREAAASGGPAERSLRSFVMAAGSIVG

SEQ ID NO: 31900 - protein, 492 aa, Triticum aestivum
MATDAQHQRHSRNGGVHTGHHFLIVAYGIQSHLNPCRVLAHRLARLHGVDGSGAVLATVSLPVSAHRRMFPSSGDVDNDDKATDGVVSYAPYSDGLDDGSMARDGEARARSRQATFESLSAVVATLAARGRPVTCVVCSMVLPAALDVAREHGIPLAVYWIQPATVLAAYYHYFHGHGDLLASHAADPAYEVSLPGLHRPLRIRDFPSFLVDTTGSELAKVFNEAARELFEHLGDHGCTKVLVNTFDELEPAALAAMKEHLDVFAVGPVIGSSSAEPRIHLFNHAGADEKRYMEWLGAQAARSVLYVSFGSIWTYSKKQMEEIANGLRRCGRPYLLVVRNDGRQEDVSRSLDDLVLEGQGMVVEWCDQPKVLSHASVGCFVTHCGWNSTLEAMALGVPVVAAPSLFDQPTNAFLIEEEWAAGVRGERNSEGGFTGEELARCVELLMGHGPRAIEIRERVDALKGMTREAAASGGPAERSLRSFVMAAGSIVG

SEQ ID NO: 31901 - protein, 424 aa, Triticum aestivum
MFPSSGDVDNDDKATDGVVSYAPYSDGLDDGSMARDGEARARSRQATFESLSAVVATLAARGRPVTCVVCSMVLPAALDVAREHGIPLAVYWIQPATVLAAYYHYFHGHGDLLASHAADPAYEVSLPGLHRPLRIRDFPSFLVDTTGSELAKVFNEAARELFEHLGDHGCTKVLVNTFDELEPAALAAMKEHLDVFAVGPVIGSSSAEPRIHLFNHAGADEKRYMEWLGAQAARSVLYVSFGSIWTYSKKQMEEIANGLRRCGRPYLLVVRNDGRQEDVSRSLDDLVLEGQGMVVEWCDQPKVLSHASVGCFVTHCGWNSTLEAMALGVPVVAAPSLFDQPTNAFLIEEEWAAGVRGERNSEGGFTGEELARCVELLMGHGPRAIEIRERVDALKGMTREAAASGGPAERSLRSFVMAAGSIVG

SEQ ID NO: 31902 - DNA, 1426 bp, Triticum aestivum
ccattccattccatcccccttcatcttcttgtagccaccgagccagccagcgaccgagcggcggcgatttccatttcatctcagaattcagacggtgttcttgtctagagcaagaggggtttcttggcgttgatgtcgatggcgcaggtgtgctgtgactcggcctcgtcggcggtggtggtcggtgcggaggcggaggccagggccagggcgcgcgccgggaggcgccgcagagcgggcgacgcggcagccaggtggaaggtcaccgcggaggcgccgcagggcgccgaggaggccgcggccacgaggaagcgccgcgcggctgggggcgagggggtgcccgcgaaacgccacgggttcacgtcggttgccggacggaggagggagatggaggatgccgtctccatacgggaggccttcaccgtcccggccgaggaggggaagcccaggcgcgacttctacggcgttttcgacggacacggctgctcgcacgtggcggacgcgtgcagagaccggatgcacgagctcgttgccgaggagctcgccggcgcggcccagcccgagtcctggaccggcgcaatggagcgcagtttcgcgaggatggacgccgaggtgaccgccagcgggggcggcgacagcgccagctgccgctgcgaggccaacaagtgcgaccacgtggggtccacggccgtggtggccgtcgtgggggagcagcgcgtcctggtggccaactgcggcgactcccgcgccgtcctctgccgcgacggcgcgcccgtcgtcctctcctccgaccacaagcccgacaggccggacgagctggagaggatcgaggcggccggcggccgcgtcatattctgggagggcgcgagggtgctgggcgttctggccatgtcgcgcgccatcggcgacggctacctgaagccgttcgtgacggcggtcccggaggtgacggtgaccgacagggcggccggcgacgagtgcctgatccttgccagcgacggcctgtgggacgtggtcaacaacgagacagcgtgcgaggtggcgcgggcctgcctccggaggggcagagacaggtggtgcgccgaggcggcggccatgctcaccaagctggctctgaccaagaacagctcggacaacatctccgttgtcgtcgtcgatctccggccaaggaatcatttgtaggagggcgaccagctgccgtgatcttccattgcaacaatagcagtatagtagtagtaacagtaggatcaaatccaaaactagctctatagtgattctactgattatttctcttcttcaaaattcatttttttttttttttttttttttttttgcaatatttctccctggatcaagttcagtggagcacatagattatggtggggttgtggaaagaaataacaactggtgtaaccaagttcgatcc

SEQ ID NO: 31903 - protein, 349 aa, Triticum aestivum
MSMAQVCCDSASSAVVVGAEAEARARARAGRRRRAGDAAARWKVTAEAPQGAEEAAATRKRRAAGGEGVPAKRHGFTSVAGRRREMEDAVSIREAFTVPAEEGKPRRDFYGVFDGHGCSHVADACRDRMHELVAEELAGAAQPESWTGAMERSFARMDAEVTASGGGDSASCRCEANKCDHVGSTAVVAVVGEQRVLVANCGDSRAVLCRDGAPVVLSSDHKPDRPDELERIEAAGGRVIFWEGARVLGVLAMSRAIGDGYLKPFVTAVPEVTVTDRAAGDECLILASDGLWDVVNNETACEVARACLRRGRDRWCAEAAAMLTKLALTKNSSDNISVVVVDLRPRNHL

SEQ ID NO: 31904 - protein, 347 aa, Triticum aestivum
MAQVCCDSASSAVVVGAEAEARARARAGRRRRAGDAAARWKVTAEAPQGAEEAAATRKRRAAGGEGVPAKRHGFTSVAGRRREMEDAVSIREAFTVPAEEGKPRRDFYGVFDGHGCSHVADACRDRMHELVAEELAGAAQPESWTGAMERSFARMDAEVTASGGGDSASCRCEANKCDHVGSTAVVAVVGEQRVLVANCGDSRAVLCRDGAPVVLSSDHKPDRPDELERIEAAGGRVIFWEGARVLGVLAMSRAIGDGYLKPFVTAVPEVTVTDRAAGDECLILASDGLWDVVNNETACEVARACLRRGRDRWCAEAAAMLTKLALTKNSSDNISVVVVDLRPRNHL

SEQ ID NO: 31905 - protein, 264 aa, Triticum aestivum
MEDAVSIREAFTVPAEEGKPRRDFYGVFDGHGCSHVADACRDRMHELVAEELAGAAQPESWTGAMERSFARMDAEVTASGGGDSASCRCEANKCDHVGSTAVVAVVGEQRVLVANCGDSRAVLCRDGAPVVLSSDHKPDRPDELERIEAAGGRVIFWEGARVLGVLAMSRAIGDGYLKPFVTAVPEVTVTDRAAGDECLILASDGLWDVVNNETACEVARACLRRGRDRWCAEAAAMLTKLALTKNSSDNISVVVVDLRPRNHL

SEQ ID NO: 31906 - DNA, 1347 bp, Triticum aestivum
tctctcgactcattctcacggtcgtcaccagctatcgattcgcaacacagccgtcaagcccagccccgaggaaggaaggaaggaaaggaaggaataggtcggcgccgccatggagatgctgagcatgctgaaggtggggtacacggtgctgcgcagcgagacgccggcgacggacctcgtcaacaccttcatggactgggcggctcgccggtcgctcctccttctggcgctcttcatgcccccctactacgtctacaagctcaccgcgtcggccgccgccaccgtcgcgccgcaggacgtcgcggggaaggtcgtgctcgtcacgggcgcctcctccggcatcggcgagcaaatagcttaccagtacgcgaagaagggagcgaggctggccctggtggcacggagggagggaagcctgcgcgaggtcgccgccaaggcgaccgatctcggctcgccggacgtgctcgttgtgcccggggacgtggcgaggccggaggactgtaaggcgttcgtccaggccacagtcgagcgctttggccggttggatcatctcgtgaacaatgccggtctggtcaacgtgtgctggttcgaggagatgcccgacgtcgccactttcaagcaagtcttggacgtgaacttctggggcacggtgcatccaacccacgccgctcttcctcacctgacgaggagccgcggcaagatcttcgtcaactcctcggccgcggcggtgctggcaatgcctaggatgagcttctacaatgctagcaaggctgccgtgctgagcttcgccgacaccctgcggatggagctcggcgacgaggtgggcgtcacggtggcgacgcccggatggatcgagtccgagatgaccaaggggaagcacctctccaaaggagggagagtcgaggtcgatcaagacacgagggatgctcaggtggggctgtttccggtggtgcgtgccgagcggtgcgccgaggccatcgtggacgccgtttgccgcggccggcgcagcgtcaccgtgccgctgtggtaccgggcgctgttcctctggcggtcgttggcgccggaggtgggcgacgtcctgcaacgcgtgttctaccgccggagctccggcgacgggggcaggcagatgagggcgaggagggtcctggaggtcacgggcgccaagcgcgtgctgcagccgccgtcgctgcacacctcggatatcaaacgggagtagatgctacgtgaataaatgaatgttccggtgtcgtactgcaaagaaaataagatagaatggcgaggtgtagatggatggtttgtgtaaatttaagttgcgttcgaactaagtatgattttgtttctacctac

SEQ ID NO: 31907 - protein, 368 aa, Triticum aestivum
MEMLSMLKVGYTVLRSETPATDLVNTFMDWAARRSLLLLALFMPPYYVYKLTASAAATVAPQDVAGKVVLVTGASSGIGEQIAYQYAKKGARLALVARREGSLREVAAKATDLGSPDVLVVPGDVARPEDCKAFVQATVERFGRLDHLVNNAGLVNVCWFEEMPDVATFKQVLDVNFWGTVHPTHAALPHLTRSRGKIFVNSSAAAVLAMPRMSFYNASKAAVLSFADTLRMELGDEVGVTVATPGWIESEMTKGKHLSKGGRVEVDQDTRDAQVGLFPVVRAERCAEAIVDAVCRGRRSVTVPLWYRALFLWRSLAPEVGDVLQRVFYRRSSGDGGRQMRARRVLEVTGAKRVLQPPSLHTSDIKRE

SEQ ID NO: 31908 - protein, 366 aa, Triticum aestivum
MLSMLKVGYTVLRSETPATDLVNTFMDWAARRSLLLLALFMPPYYVYKLTASAAATVAPQDVAGKVVLVTGASSGIGEQIAYQYAKKGARLALVARREGSLREVAAKATDLGSPDVLVVPGDVARPEDCKAFVQATVERFGRLDHLVNNAGLVNVCWFEEMPDVATFKQVLDVNFWGTVHPTHAALPHLTRSRGKIFVNSSAAAVLAMPRMSFYNASKAAVLSFADTLRMELGDEVGVTVATPGWIESEMTKGKHLSKGGRVEVDQDTRDAQVGLFPVVRAERCAEAIVDAVCRGRRSVTVPLWYRALFLWRSLAPEVGDVLQRVFYRRSSGDGGRQMRARRVLEVTGAKRVLQPPSLHTSDIKRE

SEQ ID NO: 31909 - protein, 363 aa, Triticum aestivum
MLKVGYTVLRSETPATDLVNTFMDWAARRSLLLLALFMPPYYVYKLTASAAATVAPQDVAGKVVLVTGASSGIGEQIAYQYAKKGARLALVARREGSLREVAAKATDLGSPDVLVVPGDVARPEDCKAFVQATVERFGRLDHLVNNAGLVNVCWFEEMPDVATFKQVLDVNFWGTVHPTHAALPHLTRSRGKIFVNSSAAAVLAMPRMSFYNASKAAVLSFADTLRMELGDEVGVTVATPGWIESEMTKGKHLSKGGRVEVDQDTRDAQVGLFPVVRAERCAEAIVDAVCRGRRSVTVPLWYRALFLWRSLAPEVGDVLQRVFYRRSSGDGGRQMRARRVLEVTGAKRVLQPPSLHTSDIKRE

SEQ ID NO: 31910 - DNA, 1477 bp, Triticum aestivum
acactccaactcagtggcaacagcatctcccctgttccgcccgcccgctcgcctctgtttcttttctttctttccacagcggctctgctccgctcctcacctccctcgatcgcacataccatatttggtagctcagcacagccatggtggttcttgccagcacgcccgccgtcgatcacatcccgctcctcaggtcccccgaccccggggactacttctccggcatgccggttgtcgacctctccagccctggcgcgccgcgggccatcgccgacgcctgcgagcgcttcgggttcttcaagctcgtcaaccacggggtgccagcggacacgatggacaggctcgagtcagaggccgtcaggttcttctcgctgccgcaggccgacaaggaccgctccggcccggcctacccgttcggctacggcagcaagcgcatcgggctcaatggcgacatgggctggctcgagtacctcctcctcgccgtcgagtccgcgtcgctctccggcgcctgcaccgtcccgtcctgcgcgctcttccgggcggcgctgaacgagtacatcgcggcggtgcggaaggtggcggtgcgggtgatggaggcgatggcggaggggctgggcattgcgcccgttgacgcgctgagcgcgatggtgacggcgggggggagcgaccaggtgttccgggtgaaccactacccgccgtgccacgcgctgcaagggctgggctgcagcgccacaggcttcggcgagcacaccgacccgcagctcatctccgtgctgcgctccaacggcacgtccggcctgcagatcgcgctccagaacgggcagtgggtgtccgtgccctcggaccgcgacgccttcttcgtcaacgtcggcgactcgttgcaggtgctgaccaacgggaggttcaagagcgtgaagcacagggtggtggccaacagcctaaagtctagggtttccatgatctactttggagggccagcgatgacacagaggattgcaccattgccgcagctgctgggcgcgggagagcagagcctgtacaaggacttcacatggggcgagtacaagaaggctgcctacaactcgaggctcggggacaacaggctggctcagttccacaggtagcctcgcctgccgcctgggcctgctcaaggagcagcttttaccaagccagctagctctagcttagctagctctgccgtggcttgtatttcccacacgatcgatgaagatcaagagggggggaagctactactagaaaagaaaaagaaacagggctaaaagaagatgatttcaagattcacatgcagtagtagagctgcggaggtagctagatcctttttgcgtgtgcgcgtgcgtgtgtgttcatagttgctaaaactcgcctttcctattcgggaatgccggacgaacgatgaacagataagttaacttgatgaatagttagtgtgaaccagatacagcagaggattggcatc

SEQ ID NO: 31911 - protein, 326 aa, Triticum aestivum
MVVLASTPAVDHIPLLRSPDPGDYFSGMPVVDLSSPGAPRAIADACERFGFFKLVNHGVPADTMDRLESEAVRFFSLPQADKDRSGPAYPFGYGSKRIGLNGDMGWLEYLLLAVESASLSGACTVPSCALFRAALNEYIAAVRKVAVRVMEAMAEGLGIAPVDALSAMVTAGGSDQVFRVNHYPPCHALQGLGCSATGFGEHTDPQLISVLRSNGTSGLQIALQNGQWVSVPSDRDAFFVNVGDSLQVLTNGRFKSVKHRVVANSLKSRVSMIYFGGPAMTQRIAPLPQLLGAGEQSLYKDFTWGEYKKAAYNSRLGDNRLAQFHR

SEQ ID NO: 31912 - protein, 299 aa, Triticum aestivum
MPVVDLSSPGAPRAIADACERFGFFKLVNHGVPADTMDRLESEAVRFFSLPQADKDRSGPAYPFGYGSKRIGLNGDMGWLEYLLLAVESASLSGACTVPSCALFRAALNEYIAAVRKVAVRVMEAMAEGLGIAPVDALSAMVTAGGSDQVFRVNHYPPCHALQGLGCSATGFGEHTDPQLISVLRSNGTSGLQIALQNGQWVSVPSDRDAFFVNVGDSLQVLTNGRFKSVKHRVVANSLKSRVSMIYFGGPAMTQRIAPLPQLLGAGEQSLYKDFTWGEYKKAAYNSRLGDNRLAQFHR

SEQ ID NO: 31913 - protein, 263 aa, Triticum aestivum
MDRLESEAVRFFSLPQADKDRSGPAYPFGYGSKRIGLNGDMGWLEYLLLAVESASLSGACTVPSCALFRAALNEYIAAVRKVAVRVMEAMAEGLGIAPVDALSAMVTAGGSDQVFRVNHYPPCHALQGLGCSATGFGEHTDPQLISVLRSNGTSGLQIALQNGQWVSVPSDRDAFFVNVGDSLQVLTNGRFKSVKHRVVANSLKSRVSMIYFGGPAMTQRIAPLPQLLGAGEQSLYKDFTWGEYKKAAYNSRLGDNRLAQFHR

SEQ ID NO: 31914 - DNA, 1497 bp, Triticum aestivum
atctctttccctccccggtacccagaatattctggggacaaaacggaaaaaccagtctccagcagctccccgattccctccatcagttttcggtgtccccggctccgagctcatccactgctcctgcgacgtcgccggccgccgctccggagcccccctccttgccgccggcacgcggccgctccgtctctcgcagaatggcgctcaacaaggagtacacttacgcggacttggagaaggagccatactggccattcgagaagctgcggatctcaatcactggagctggtgggttcatagcctcccacattgcaaagcgcctcaagggcgaggggcactacatcatcgcctctgactggaagaagaacgaacacatggaagaggatatgttctgccatgagtttcaccttgctgatctgagggtcatggacaactgcctcaaggtaaccactggggttgaccatgttttcaaccttgcagctgatatgggagggatgggcttcatccagtccaaccattctgtcatcatgtacaacaacactatgatcagctttaacatgcttgaggctagtagaatcaatggtgtcaagaggttcttttatgcctcgagtgcttgcatctaccctgaatttaagcagttggaaactgtagttagcttgaaggaggcagatgcttggcctgcagagcctcaagatgcctatggcttggagaaacttgccactgaggaattgtgcaagcactacacaaaggactttgacattgagtgccggattggtcgctttcacaatatatatggtccatatgggacatggaagggtggaagggagaaggcacctgctgctttctgcagaaaggctctaacctccactgaccggtttgagatgtggggagatggtctgcagactagatccttcacatttattgatgaatgtgtggagggtgtcctcaggctcacaaagtctgatttctgcgagcctgtaaacatcggaagtgacgaaatggtgagcatgaacgagatggctgagatagtcctgggcttcgagaacaagcagctgcccatccaccacatccctggccccgagggtgtccgtggccgtaactctgacaacacgctcatcaaggagaagcttggctgggctccaaccatgaggctgaaggatgggctcaggatcacgtattcttggatcaaggagcagctggagaaggaaaagtctgaaggcaccgacatgtccgcatacggaacatccaaggtctgcaccacgcaggcaccggtccagcttggctccctccgcgccgcagatggcaaggagtgaacactcagctctaggcaaggagatcagttgtttgtcagttgtcacaccatttcttggttcagtctgaactttcacatactgcatgagatttatagccttttgtgctgttgtaaacgggaataactgcttggtgcaagaggatgttatgttaaacattttatttatatacatgtaaaatctggtc

SEQ ID NO: 31915 - protein, 436 aa, Triticum aestivum
LFPSPVPRIFWGQNGKTSLQQLPDSLHQFSVSPAPSSSTAPATSPAAAPEPPSLPPARGRSVSRRMALNKEYTYADLEKEPYWPFEKLRISITGAGGFIASHIAKRLKGEGHYIIASDWKKNEHMEEDMFCHEFHLADLRVMDNCLKVTTGVDHVFNLAADMGGMGFIQSNHSVIMYNNTMISFNMLEASRINGVKRFFYASSACIYPEFKQLETVVSLKEADAWPAEPQDAYGLEKLATEELCKHYTKDFDIECRIGRFHNIYGPYGTWKGGREKAPAAFCRKALTSTDRFEMWGDGLQTRSFTFIDECVEGVLRLTKSDFCEPVNIGSDEMVSMNEMAEIVLGFENKQLPIHHIPGPEGVRGRNSDNTLIKEKLGWAPTMRLKDGLRITYSWIKEQLEKEKSEGTDMSAYGTSKVCTTQAPVQLGSLRAADGKE

SEQ ID NO: 31916 - protein, 371 aa, Triticum aestivum
MALNKEYTYADLEKEPYWPFEKLRISITGAGGFIASHIAKRLKGEGHYIIASDWKKNEHMEEDMFCHEFHLADLRVMDNCLKVTTGVDHVFNLAADMGGMGFIQSNHSVIMYNNTMISFNMLEASRINGVKRFFYASSACIYPEFKQLETVVSLKEADAWPAEPQDAYGLEKLATEELCKHYTKDFDIECRIGRFHNIYGPYGTWKGGREKAPAAFCRKALTSTDRFEMWGDGLQTRSFTFIDECVEGVLRLTKSDFCEPVNIGSDEMVSMNEMAEIVLGFENKQLPIHHIPGPEGVRGRNSDNTLIKEKLGWAPTMRLKDGLRITYSWIKEQLEKEKSEGTDMSAYGTSKVCTTQAPVQLGSLRAADGKE

SEQ ID NO: 31917 - protein, 312 aa, Triticum aestivum
MEEDMFCHEFHLADLRVMDNCLKVTTGVDHVFNLAADMGGMGFIQSNHSVIMYNNTMISFNMLEASRINGVKRFFYASSACIYPEFKQLETVVSLKEADAWPAEPQDAYGLEKLATEELCKHYTKDFDIECRIGRFHNIYGPYGTWKGGREKAPAAFCRKALTSTDRFEMWGDGLQTRSFTFIDECVEGVLRLTKSDFCEPVNIGSDEMVSMNEMAEIVLGFENKQLPIHHIPGPEGVRGRNSDNTLIKEKLGWAPTMRLKDGLRITYSWIKEQLEKEKSEGTDMSAYGTSKVCTTQAPVQLGSLRAADGKE

SEQ ID NO: 31918 - DNA, 1415 bp, Triticum aestivum
atcacaccatcacgatcgagcactcgcaacagcttcactcaactcgcagtgaagatcacctagagaccgactagcagtgatcgatggcgtccgtccggcgcccgtgcgcggtggcgctgctcgcctgcgccgccgcattcctcgtgacggtcggtgcccagccgaaggacaaccccattttgtcggaccccaacgtggtccccatctacatgagccccggcgcgcagcccaccgtggtgagctgctacaaccagagcagcccgtcgcaggccccagagtgcatgattccggtgcgccggtgccccgccggctgccgcgacctctgctacgtgcactgccccagctgcaagctcgtctgcatgtgtgaactggccggcacggagtgctacgacccgcgcttcgtgggtggcgacggcaacaagttcctcttccacggccgcagggacgccgacttctgcctgctctccgacgccaacctgcacatcaacgcgcacttcatcggcaagcgcaacgtgaaggcggcgcgtgacttcacatgggtgcaggcgctcggcatccgcttcggtggccaccgcctctacctcggcgtcaagaggacggtcacctgggacaacgccgtcgaccgcctcgtcatcaccttcgacggcgtgcccgtcgagctggacgcggcgccggccgccagctggagcccggcctccgcgcccgcgctgtctgtcttccgcatcggcaaggccaacggcgtggtggtgcgcctcgacggccggttccgcatcgtcgccaacgcggtgccggtgaccgaggaggactcgagggtccacgactacggcctcaccgccgacgacagcctcgcgcacctcaacgtcgcgttcaagttcaactccatcagcgccgacgtgcacggcgtgctcggccagacctaccgcccggactacgtcagcgccggggttgacatgggcgccaagatcccggtgatggggggtgccgcaaagtaccaggtgtcggacatcttcgggacggactgcgaggtggcgcgcttcgccggagaggacgtcgtccgcgtcggggcggtcgacatgatcgacgagccggccgacaccatgtgcggcagcggcaagggcagcgccgggctggtctgcaagaagtgatgtggtatcgcgagctgattttgcttcgttaccctcgtaagtgtgcccatacacgtctacgtgctcgctgctgctacactacattatcggtagtacctccgcatttcagaataaataaccgctggtgatgtcgtgtcgttgtgtgttagtcaatcgatagtcgtgtagggcaacgttggaaatccaggcgttgctcggtgtaacaggctactttttttccctccatgttttttcaaatgtaatgattgaacaatcaagtttgtgatttac

SEQ ID NO: 31919 - protein, 353 aa, Triticum aestivum
MASVRRPCAVALLACAAAFLVTVGAQPKDNPILSDPNVVPIYMSPGAQPTVVSCYNQSSPSQAPECMIPVRRCPAGCRDLCYVHCPSCKLVCMCELAGTECYDPRFVGGDGNKFLFHGRRDADFCLLSDANLHINAHFIGKRNVKAARDFTWVQALGIRFGGHRLYLGVKRTVTWDNAVDRLVITFDGVPVELDAAPAASWSPASAPALSVFRIGKANGVVVRLDGRFRIVANAVPVTEEDSRVHDYGLTADDSLAHLNVAFKFNSISADVHGVLGQTYRPDYVSAGVDMGAKIPVMGGAAKYQVSDIFGTDCEVARFAGEDVVRVGAVDMIDEPADTMCGSGKGSAGLVCKK

SEQ ID NO: 31920 - protein, 311 aa, Triticum aestivum
MSPGAQPTVVSCYNQSSPSQAPECMIPVRRCPAGCRDLCYVHCPSCKLVCMCELAGTECYDPRFVGGDGNKFLFHGRRDADFCLLSDANLHINAHFIGKRNVKAARDFTWVQALGIRFGGHRLYLGVKRTVTWDNAVDRLVITFDGVPVELDAAPAASWSPASAPALSVFRIGKANGVVVRLDGRFRIVANAVPVTEEDSRVHDYGLTADDSLAHLNVAFKFNSISADVHGVLGQTYRPDYVSAGVDMGAKIPVMGGAAKYQVSDIFGTDCEVARFAGEDVVRVGAVDMIDEPADTMCGSGKGSAGLVCKK

SEQ ID NO: 31921 - protein, 287 aa, Triticum aestivum
MIPVRRCPAGCRDLCYVHCPSCKLVCMCELAGTECYDPRFVGGDGNKFLFHGRRDADFCLLSDANLHINAHFIGKRNVKAARDFTWVQALGIRFGGHRLYLGVKRTVTWDNAVDRLVITFDGVPVELDAAPAASWSPASAPALSVFRIGKANGVVVRLDGRFRIVANAVPVTEEDSRVHDYGLTADDSLAHLNVAFKFNSISADVHGVLGQTYRPDYVSAGVDMGAKIPVMGGAAKYQVSDIFGTDCEVARFAGEDVVRVGAVDMIDEPADTMCGSGKGSAGLVCKK

SEQ ID NO: 31922 - DNA, 1433 bp, Triticum aestivum
taaaaccctagacaaaagctcagcggcgcagcacagcccagccgccgcgcaccacgctcttcccccctccccctccctctcccccaccctcctccgaccaccttctcccgaaacgcgcggagatgctctccgctgccttcgctgtccaccccgccgccgtcgcgccgcggctgcattcggtccgccagcgccagcaattctgcgctccaatcggcacggcgacgccaaggcggcggttgccagtggcgatgctttcggtcactaacgccgtcaccacccagagccgcgagagcgcccccgcagcgcctcgcaagctctctttcccgatactggtgaacagttgcaccgggaaaatggggaagtctgttgctgaagcagctgtgtctgctggtcttcagttagttccgatgtcattcagtgcaatagaggttcctgatggaaagctcaacatctgtgacagagatattcatattcatgatccatctgaaagtgaacgtattctccgttccattgctaaggactacccagatatgatagttgttgactacactgtgcctgatgctgttaatgccaatgctgaactttactgcaaacttggcttgccatttgtaatgggcacaactggtggaaataggcaactgttgaacaaaactgtgcaggatgcgaatgtttatgctgtgatatctccacagatggggaagcaggttgttgctttccttgctgccatggaaatcatggcagagaaattccctggtgcatttgcaggttacaaactagaggtaatggagtctcatcaagcgacaaaattggacgtttctggcactgccaaagctgtaatctcttgctttcagaagttgggtgtctcattcgacttaaacgaggtaaacttggttagggaccccgaagagcagcttgccattgttggtgtcccagaagaacatcttggagggcatgcatttcacaattaccatctcacttcgcctgatgaaacagtgtcatttgagttccagcacaatgtgtgtggccgttcaatatacgcagagggaactgttgatgccgccatgtttctccacacaaagatacgatctggggcggacaagaaattatatgatatgatcgatgtcctgagagaaggcaacatgagatgagcaggggcatttgtagggttaggaggagagcttatgcagcaaaattaggtcactgtccggatgcagcatctttgcgttgtaattggatcttagatttgttttactagttatattaactcttatttacttctcggcgaaaaaaggagtcatttggacgagataaggatgttaacttggacttgggcctctgtttgaggccagagttagctgttgttgtggcatgaatgatggaaggcaaatgcagtacgaataatatattgtggaagttgaaatagtttgctaatt

SEQ ID NO: 31923 - protein, 341 aa, Triticum aestivum
MLSAAFAVHPAAVAPRLHSVRQRQQFCAPIGTATPRRRLPVAMLSVTNAVTTQSRESAPAAPRKLSFPILVNSCTGKMGKSVAEAAVSAGLQLVPMSFSAIEVPDGKLNICDRDIHIHDPSESERILRSIAKDYPDMIVVDYTVPDAVNANAELYCKLGLPFVMGTTGGNRQLLNKTVQDANVYAVISPQMGKQVVAFLAAMEIMAEKFPGAFAGYKLEVMESHQATKLDVSGTAKAVISCFQKLGVSFDLNEVNLVRDPEEQLAIVGVPEEHLGGHAFHNYHLTSPDETVSFEFQHNVCGRSIYAEGTVDAAMFLHTKIRSGADKKLYDMIDVLREGNMR

SEQ ID NO: 31924 - protein, 299 aa, Triticum aestivum
MLSVTNAVTTQSRESAPAAPRKLSFPILVNSCTGKMGKSVAEAAVSAGLQLVPMSFSAIEVPDGKLNICDRDIHIHDPSESERILRSIAKDYPDMIVVDYTVPDAVNANAELYCKLGLPFVMGTTGGNRQLLNKTVQDANVYAVISPQMGKQVVAFLAAMEIMAEKFPGAFAGYKLEVMESHQATKLDVSGTAKAVISCFQKLGVSFDLNEVNLVRDPEEQLAIVGVPEEHLGGHAFHNYHLTSPDETVSFEFQHNVCGRSIYAEGTVDAAMFLHTKIRSGADKKLYDMIDVLREGNMR

SEQ ID NO: 31925 - protein, 264 aa, Triticum aestivum
MGKSVAEAAVSAGLQLVPMSFSAIEVPDGKLNICDRDIHIHDPSESERILRSIAKDYPDMIVVDYTVPDAVNANAELYCKLGLPFVMGTTGGNRQLLNKTVQDANVYAVISPQMGKQVVAFLAAMEIMAEKFPGAFAGYKLEVMESHQATKLDVSGTAKAVISCFQKLGVSFDLNEVNLVRDPEEQLAIVGVPEEHLGGHAFHNYHLTSPDETVSFEFQHNVCGRSIYAEGTVDAAMFLHTKIRSGADKKLYDMIDVLREGNMR

SEQ ID NO: 31926 - DNA, 1140 bp, Triticum aestivum
accactcgaccagagtccacagtccacagtccatagtccgtccacagtgtactgaccaagtagtgctcagaattcagggagcccaccgccatggcttcccctaagcttctcctcctgctcgccaccctcctcccaagctgcggcctcctcctggcggacttcgccccgatgaccctcaccgtggtgaacaactgcgcgtacccgatttggccgggcatccaggggagcgccggcagcgaggtcctggaggggggcggcttcttcctcccgtcgctctcccaccgctccttcccggcgcccacccacgcctggtccggccgcatctgggcgcgcaccggctgcacgcctgcaggggccgggcagctccgctgcgccacgggcgactgcggcgggcggctccagtgcgggggcctcggcggcgcggcgcccgccacgctggcgcaggtctccctccaccacggcggcgacgaccagtcgtcgtacggggtgagcgtggtggacggcttcaacgtgggactgtcggttaccccgcacgagggccgcggcaactgccccgtcctcgcctgccgcaaggacctgacgcagagctgccccggcgagctgcaggtgcgcgcggcggcgggcggcggcgtggccgcgtgcaagagcggctgcctggccttcggcaccgacgagctgtgctgccgcaacgcgtacaacagcccggccgcctgccgcccctccaagtactcggacttcttcaagaacgagtgcccgcaggccttcacctacgcgcatgacagcccctcgctcacccaccagtgctccgcgccgcgcgagctcaaggtcatcttctgccactagactagaggtagtccagcggcgctcgcggtgccgccgccggccgtcagcagctatgtctgggtctgggatcgatgtggtgtagtgcgtgtcatctcatctgtcatgtgtgagtgttcgattaggctttggagactgccaggctgaccggagtgcttggtgtagttcgtgctctgtaggcgttcacctctcgtctagtagtatggtgttagctgctctgattccagtctgaaataacatgtttagatgggcattgatctgatcacatgtttcaatcacgccttttgtgcatttgagttc

SEQ ID NO: 31927 - protein, 250 aa, Triticum aestivum
MASPKLLLLLATLLPSCGLLLADFAPMTLTVVNNCAYPIWPGIQGSAGSEVLEGGGFFLPSLSHRSFPAPTHAWSGRIWARTGCTPAGAGQLRCATGDCGGRLQCGGLGGAAPATLAQVSLHHGGDDQSSYGVSVVDGFNVGLSVTPHEGRGNCPVLACRKDLTQSCPGELQVRAAAGGGVAACKSGCLAFGTDELCCRNAYNSPAACRPSKYSDFFKNECPQAFTYAHDSPSLTHQCSAPRELKVIFCH

SEQ ID NO: 31928 - protein, 224 aa, Triticum aestivum
MTLTVVNNCAYPIWPGIQGSAGSEVLEGGGFFLPSLSHRSFPAPTHAWSGRIWARTGCTPAGAGQLRCATGDCGGRLQCGGLGGAAPATLAQVSLHHGGDDQSSYGVSVVDGFNVGLSVTPHEGRGNCPVLACRKDLTQSCPGELQVRAAAGGGVAACKSGCLAFGTDELCCRNAYNSPAACRPSKYSDFFKNECPQAFTYAHDSPSLTHQCSAPRELKVIFCH

SEQ ID NO: 31929 - DNA, 1607 bp, Triticum aestivum
agacaaggagaaaaggcaccaagtcttcctcggctctgaatgacaacgagaatggcggcgctcctcttactccgaaggctggcggccggcggcgcggttacaaggctgcagcaaccgtacgccggcctagccaccgcagcagcgaggcaggacgctctagacgctaccggcgaggagagcggacggccggacaaggggaacaagaaccgctggatggagctcccgccgttcgcgccggtcgatgccgccgccgctgcgagagccatttttcgagggcagggaggagatgagatagaagggaactccaactccaccgccatcagatgggtccggcgatgctgcccccacctgccggcctcgctggtgcagaagctcttccgcctacgcaaggttaagaagaatgctgtgactgcggagacatcttccacagatgctagtgctgagcaattccggttgagaagggataaagccatcattgtggtcaacaaaccccctggaatgccggttcaaggtggtgttggcataaaaaacagtatagatgtgcttgccccgatgttcgaagaaattcttctgacgcacctcgcctggtccacagacttgatagggattgtagcggcgtccttgttctgggtagaactcaacttagtgcttccattttgcatgctatctttcgtgagaaaactgctgatgctttagctgatggtactcaacaagtattgcaacgaaaatatgttgcacttgttatgggaacacctagacatcccaagggtttactctcggctccacttgcgaaggttttattacaagatggcaagtctgagcgtctgactgttagagctggtccaaatactacatctgttcaggatgctttgacagaatacagagtgattgaatcttgcccccgagggttcacttggttggaactatttcctctcaccggaagaaagcatcagctccgagtccactgtgcagaggttctcggaacgccgatcgtaggggactacaagtacgggcgtcaagcgcaccaggactggacgcctctccccgtgccgcaaaccgtcgacgaggaactgctcaggaagcaaaggcttccctttggtcttgtcctgggcggcgggagcgtcgcggaggagcagcctcagctgcatctgcactgcaagcagatgatgctccctgatatctcagctgccgtccaagggttgcagtctgaagacgccgagcgtgacttctcgggtctcgagaagctcagcttcgttgctccattgccgctgcacatgcggctgagctgggaggttttgaagtccgttgacaagtaatcgaagagtggcgtccttagtgtctgttctctacgccgaccgactgtgatacggatgatgtgttgctcaagtctacagccacagaagcttcaccaaaagatctcattttagtactatagcacagtgacagcggttccttttttccttttgttagggaattcactatccaccacattttcattttttgcttggagccttaacgctcaagggatgtacttctaatggttacattgttttcaatcggcatcatagaatacactagctcagctaagtatgaagcaatcattgaat

SEQ ID NO: 31930 - protein, 218 aa, Triticum aestivum
MTTRMAALLLLRRLAAGGAVTRLQQPYAGLATAAARQDALDATGEESGRPDKGNKNRWMELPPFAPVDAAAAARAIFRGQGGDEIEGNSNSTAIRWVRRCCPHLPASLVQKLFRLRKVKKNAVTAETSSTDASAEQFRLRRDKAIIVVNKPPGMPVQGGVGIKNSIDVLAPMFEEILLTHLAWSTDLIGIVAASLFWVELNLVLPFCMLSFVRKLLML

SEQ ID NO: 31931 - protein, 214 aa, Triticum aestivum
MAALLLLRRLAAGGAVTRLQQPYAGLATAAARQDALDATGEESGRPDKGNKNRWMELPPFAPVDAAAAARAIFRGQGGDEIEGNSNSTAIRWVRRCCPHLPASLVQKLFRLRKVKKNAVTAETSSTDASAEQFRLRRDKAIIVVNKPPGMPVQGGVGIKNSIDVLAPMFEEILLTHLAWSTDLIGIVAASLFWVELNLVLPFCMLSFVRKLLML

SEQ ID NO: 31932 - protein, 190 aa, Triticum aestivum
MGTPRHPKGLLSAPLAKVLLQDGKSERLTVRAGPNTTSVQDALTEYRVIESCPRGFTWLELFPLTGRKHQLRVHCAEVLGTPIVGDYKYGRQAHQDWTPLPVPQTVDEELLRKQRLPFGLVLGGGSVAEEQPQLHLHCKQMMLPDISAAVQGLQSEDAERDFSGLEKLSFVAPLPLHMRLSWEVLKSVDK

SEQ ID NO: 31933 - DNA, 1818 bp, Triticum aestivum
cgaaaaaaaatctatcggttttggtctctctcgccgccggatcgccggtccccaacccccacggccgcctccgtcagtaaggcatcgccatgtctgccgctccagaagctcctccttccgaaggtcctccatcgttcatcgccatgtctgccgctccggaagctcctccttccgaaggtccttcatcgtcggtcgccatatccacctcccccttccccaactggatactgctggagagctttgtcttccgcagggacgacaagaagtcttttccggacgacacaaaggcacccatcagggcgtccggcatcacctcctggaacgctcccttccggattgccttctcccttgccaagcccccgctcgcttcccgcctctatgcaaagttgcgacgctttccagatcctagtcaagagacgcctttagccatagtggcgacccacttcaatctactgctgcttcgcgtaggtaccaaaatccctgcacgagggctagtgcaggacttctttatctgcaatgcctatgaaccttccacgctcaaagctttgcctccttgtagagagccctacacagattatagccgcagcagcggtgacaacctacctcgtggtcgacccctccagaaggaggagcgacgcctgcttgaggttcaatcaatggggctcttgtgcggaggcggggagaagtttgcggtggcagagctctgcgttttcaagaccatccacttaaaatcatatgctgacatttgtttgctatgctctcccacatcagccgcccctgtccttggcggcaattggaactcgttccgtgtaccaatccttggcattgacagcaatgatccatggcacatttgttgctgggacactgacactgtcattacttttaggcactggctgtgctggatcgattatcatcgtggtattctattctttgacgtgttcggagagcctgtccctaccgtcacattccttgcttttcctcttgatgagtatccttccccgcacagtctcaaagaggtcaagccatccagccctctcaaatccagccggttgtatcgtggtgcgtctgtcttatttggtggcaatatgatcaaatttgtcaatgtcacccgccacgacggcattggttatggagaactcaaacctcgttcaggcttcaccatcacctgccacaccctcgagttaggcgacaccccagtgataggcaatgcaaggtggaagttagactacaagattacttctgatgagctttggtccgccaatcctcctgagcatcttccacacaacattctcatgttccctcaaatagacttagacatgccacatctagtgcactttatcatcagcgagtttgaattcgttattaagaagatgtggttggtgtccattgatatgaaaactaaggaggtgaaatcatttgctccgtacatcagtgggaaggaaggacttgaaacagacgacgcagacttgatcagagaaaggtctgacgctcccatgcccttcctaccctgtgatttctccaggtttctccgtctctcaaggttgagcaaggatatggaatgactcacggtgtacatttaagttcagctaccatgccaagactttccaaaggcaaacaacaagagaaatgacgcaatgacggacgatatacattaatacattattagatcctcacagacatcaagataacggtgtactacataagctgcgtatgagtagtctctcccaaagcttcatccttgtaattattgtagttgaacttgaattgtagaccgtaaagctatccagattgatgaagttggcacacgtgagtcattcc

SEQ ID NO: 31934 - protein, 490 aa, Triticum aestivum
MSAAPEAPPSEGPPSFIAMSAAPEAPPSEGPSSSVAISTSPFPNWILLESFVFRRDDKKSFPDDTKAPIRASGITSWNAPFRIAFSLAKPPLASRLYAKLRRFPDPSQETPLAIVATHFNLLLLRVGTKIPARGLVQDFFICNAYEPSTLKALPPCREPYTDYSRSSGDNLPRGRPLQKEERRLLEVQSMGLLCGGGEKFAVAELCVFKTIHLKSYADICLLCSPTSAAPVLGGNWNSFRVPILGIDSNDPWHICCWDTDTVITFRHWLCWIDYHRGILFFDVFGEPVPTVTFLAFPLDEYPSPHSLKEVKPSSPLKSSRLYRGASVLFGGNMIKFVNVTRHDGIGYGELKPRSGFTITCHTLELGDTPVIGNARWKLDYKITSDELWSANPPEHLPHNILMFPQIDLDMPHLVHFIISEFEFVIKKMWLVSIDMKTKEVKSFAPYISGKEGLETDDADLIRERSDAPMPFLPCDFSRFLRLSRLSKDME

SEQ ID NO: 31935 - protein, 472 aa, Triticum aestivum
MSAAPEAPPSEGPSSSVAISTSPFPNWILLESFVFRRDDKKSFPDDTKAPIRASGITSWNAPFRIAFSLAKPPLASRLYAKLRRFPDPSQETPLAIVATHFNLLLLRVGTKIPARGLVQDFFICNAYEPSTLKALPPCREPYTDYSRSSGDNLPRGRPLQKEERRLLEVQSMGLLCGGGEKFAVAELCVFKTIHLKSYADICLLCSPTSAAPVLGGNWNSFRVPILGIDSNDPWHICCWDTDTVITFRHWLCWIDYHRGILFFDVFGEPVPTVTFLAFPLDEYPSPHSLKEVKPSSPLKSSRLYRGASVLFGGNMIKFVNVTRHDGIGYGELKPRSGFTITCHTLELGDTPVIGNARWKLDYKITSDELWSANPPEHLPHNILMFPQIDLDMPHLVHFIISEFEFVIKKMWLVSIDMKTKEVKSFAPYISGKEGLETDDADLIRERSDAPMPFLPCDFSRFLRLSRLSKDME

SEQ ID NO: 31936 - protein, 301 aa, Triticum aestivum
MGLLCGGGEKFAVAELCVFKTIHLKSYADICLLCSPTSAAPVLGGNWNSFRVPILGIDSNDPWHICCWDTDTVITFRHWLCWIDYHRGILFFDVFGEPVPTVTFLAFPLDEYPSPHSLKEVKPSSPLKSSRLYRGASVLFGGNMIKFVNVTRHDGIGYGELKPRSGFTITCHTLELGDTPVIGNARWKLDYKITSDELWSANPPEHLPHNILMFPQIDLDMPHLVHFIISEFEFVIKKMWLVSIDMKTKEVKSFAPYISGKEGLETDDADLIRERSDAPMPFLPCDFSRFLRLSRLSKDME

SEQ ID NO: 31937 - DNA, 2137 bp, Triticum aestivum
agactagtaactgtccaatcaaatcaaaccgaggagggacggtgcagtccctcgttaattttactggaccatctctctgactctcctctccacctcgcccgcttctcttctttacctagccttctcgggtaagctggctaggaccagtggcagcagcagtagtgggagcaggagctgcttggcttgccgttgctgcctttcacgtccacctgcgcgggcgtgaggcgtggaatccaaacaatggcgctgggatccgcggatctataggcgaggccaggcgcgggatgggatctgggaccagcaaggccgcttcgccggcgccggcgccggccggcggcgaggccaaggcgcggaatgggaagccgagggggaggagcctgatgcgcctgcccagctactcctgcttccggggcttcacgcccgagtctgacccttcttcttcgctgccggcgccgccgccgctaggggtcgagtcaagcaagggaggggagacgccttcactcgctcacattggcatatcagataatgatgctccatcagctcctaaactgaatccaagtgaaggcagaacgacgccttcatcagataccgacagagatcaaggtgatgatgtattgcagaatgtcactgctaccaggactgcagtcgacgacgaccaatcgccaaatccttctgaccggccgcatccatgctttggtgtcaactttgggttgagtagagccgtcagcttgggatcatcagtggcatgctccattatgtcaaccggcctctcctcttcagctaatcctagtattggaaatgtggaccatccttccgatgcaagcatccctcaacaaggtggtgcatcaacttctgggatttattcaagtctggatatgctaagggatagcgtcacaacacaagctagagccgctcatcaggctaggagaaatttgctggaatctgaagatgctaacttgaggcattcgcacagaaggatgggaccccaggaaccttctgaaggcagtgtccggtttagccggacacttagtgttggaagacttcgtgacagggtcctcaggaggactccattctcagatagtttattcacctcttcactttatgatagaccagtgtggacagcaggaaatgccagtgcgaggcaagattcatctgtgatgcaacggactaattcagacagaggttccgaaccgcaatcagaaccttcaactaacagcacgtacaattctggctctgcaactctaagagaggccagtaatcgggatcttcttgagcggagatcagcttttcttgaaaggaggaggaggatacgatctcaggtccgagctctccaaaggttgggcagcaggtttgaaaatttatcaggtcatgagagatcatgcattctatctggtcaacatagaacaggaaattgcaactgcagggcaagcagtcgaccaggtaatcctgatgaagaatccggcacaagggctagcatatcaagaattgttatgctagcagaagcactctttgaggtcttggatgaaatccaccaacagtctgctgctttatcctcaaggacatcattaccttcaattggatccgttcctgctccaaaggagatcgtcgagagtcttcctgtcaaggtgtacagaaagccgttgaaacaccaaactgatgaggctgcacaatgctacatttgccttgtcgaatatgaagaaggagactgtgttcgcatacttccatgcaatcacgaatttcatctaacatgtgtagataagtggctgaaagagattcacagggtttgtccactctgtcgtggcgatgtctgccgatcggattcgtcgagcatagggaaattcagctgattccttttatctcttaaggatccagcttcttgcgagaaaaaaatggagcttccgacacggttatttgatccagccggatagagcccgcagaatgttgcgggtgtgatttgatcttcatttctagtctggtctgaacaactcaggatgctcctgtgtgttatagcagatttgcatggcggtcatcccattataaacgatgagcttccatgcgaatttgagatttgttgtacggtggtgtgaagcctgttgatatattggttatatatatggcttgcgttttcgtgatgttg

SEQ ID NO: 31938 - protein, 363 aa, Triticum aestivum
MSTGLSSSANPSIGNVDHPSDASIPQQGGASTSGIYSSLDMLRDSVTTQARAAHQARRNLLESEDANLRHSHRRMGPQEPSEGSVRFSRTLSVGRLRDRVLRRTPFSDSLFTSSLYDRPVWTAGNASARQDSSVMQRTNSDRGSEPQSEPSTNSTYNSGSATLREASNRDLLERRSAFLERRRRIRSQVRALQRLGSRFENLSGHERSCILSGQHRTGNCNCRASSRPGNPDEESGTRASISRIVMLAEALFEVLDEIHQQSAALSSRTSLPSIGSVPAPKEIVESLPVKVYRKPLKHQTDEAAQCYICLVEYEEGDCVRILPCNHEFHLTCVDKWLKEIHRVCPLCRGDVCRSDSSSIGKFS

SEQ ID NO: 31939 - protein, 520 aa, Triticum aestivum
MGSGTSKAASPAPAPAGGEAKARNGKPRGRSLMRLPSYSCFRGFTPESDPSSSLPAPPPLGVESSKGGETPSLAHIGISDNDAPSAPKLNPSEGRTTPSSDTDRDQGDDVLQNVTATRTAVDDDQSPNPSDRPHPCFGVNFGLSRAVSLGSSVACSIMSTGLSSSANPSIGNVDHPSDASIPQQGGASTSGIYSSLDMLRDSVTTQARAAHQARRNLLESEDANLRHSHRRMGPQEPSEGSVRFSRTLSVGRLRDRVLRRTPFSDSLFTSSLYDRPVWTAGNASARQDSSVMQRTNSDRGSEPQSEPSTNSTYNSGSATLREASNRDLLERRSAFLERRRRIRSQVRALQRLGSRFENLSGHERSCILSGQHRTGNCNCRASSRPGNPDEESGTRASISRIVMLAEALFEVLDEIHQQSAALSSRTSLPSIGSVPAPKEIVESLPVKVYRKPLKHQTDEAAQCYICLVEYEEGDCVRILPCNHEFHLTCVDKWLKEIHRVCPLCRGDVCRSDSSSIGKFS

SEQ ID NO: 31940 - protein, 488 aa, Triticum aestivum
MRLPSYSCFRGFTPESDPSSSLPAPPPLGVESSKGGETPSLAHIGISDNDAPSAPKLNPSEGRTTPSSDTDRDQGDDVLQNVTATRTAVDDDQSPNPSDRPHPCFGVNFGLSRAVSLGSSVACSIMSTGLSSSANPSIGNVDHPSDASIPQQGGASTSGIYSSLDMLRDSVTTQARAAHQARRNLLESEDANLRHSHRRMGPQEPSEGSVRFSRTLSVGRLRDRVLRRTPFSDSLFTSSLYDRPVWTAGNASARQDSSVMQRTNSDRGSEPQSEPSTNSTYNSGSATLREASNRDLLERRSAFLERRRRIRSQVRALQRLGSRFENLSGHERSCILSGQHRTGNCNCRASSRPGNPDEESGTRASISRIVMLAEALFEVLDEIHQQSAALSSRTSLPSIGSVPAPKEIVESLPVKVYRKPLKHQTDEAAQCYICLVEYEEGDCVRILPCNHEFHLTCVDKWLKEIHRVCPLCRGDVCRSDSSSIGKFS

SEQ ID NO: 31941 - DNA, 2088 bp, Triticum aestivum
cctgccggaaacgaaacaccattcgtcgctccctcgcctcccatcagcgcgcactagtccttccctgcctcctcctcttctcgggcgcgcgccgcctctgccctgcctcggcaacgacagcaaacaccggctagccagccaagaaagaggcgccgacatggccatcccgctccaggcgaagaagcagcaggagaacggaagcaagggcggccaaggcagccacgtggacggcggcgacgacaacccttcggcggcggaggagctgcgggagctgtggcgcatggcggcgccgatcacagcgctcaactgcgtggtgtacctgcgcgccatggtgtccgtgctctgcctgggccgcctcggcccgcttgacctcgccggcggcgcgctcgcgatcgggctcaccaacatcactggccacagtgtgctcttcggcctcgcgtccgggttggagccgctctgcgcgcaggcctacggctcccgcaactacgacctgctcacgctctccctccaccgcgccgtgctgctgctcgccatcgccgccgtccccatcgcgctgctctggctcaacgtcggccccatcctggtcgcgctcggccaggacccagccatctccgcctccgccgccgcatacgccgcgtgggcgctcccggacctcgccgcgctggccgtgctccagccgctccgcgtctaccttaggtcccagggcatcaccaagcccatggccgcctgctccgccgccgccgtcgcgctgcacatcccgctcaactttctcctcgtcttccgcatgggcttcggcgtgcgcggcgtcgcggcagcgcaggcgctcacaaacacaaacatggtgctcttcctgctcgcctacgtccgctgggcgggtgcgtgcgacgacacgtggaggggcttcgcgcggcccgccgccgtagccagcgggctcggcggcctcgtccgcctcgccgtgcccagctgcatcggcgtctgcctcgagtggtggtggtacgaggtcgtcaccgtgctcgccggctaccttgccaaccccaccgccgccgtcggcgccgcgggagtcctcatccagacaaccagcctgatgtacaccgtgcccatggcgctcgccgcctgcgtctccacccgggtgggcaacgagctcggcgccgggaagccgcggcgtgcgcggatggcggcgacggtggcgctgtggtgcgcagcgggcgtgggcctcgcgcacgtggcgtggacggcggccttcagcgcgcagtgggtgtcgctcttcacccgggagccgtcggtggtgctgctggcgtcggcggcgatgccgctgctggggctgtgcgagctgggcaactgcccgcagaccacggggtgcggcgtgctgcgcggcacagccaggcccgccgtgggcgcccgcatcaacctgctctccttctacctcgtcggcacgcccgtggcggtgctgctggcgttcgggcacgggccgctgtccgggttccgcgggctgtggtacgggctgctgtccgcgcaggccgcctgcgtggctctggtgctggtcgccgtcgtgtggcgcaccgactggcgcgtcgaggccatgcgcgcgcggaagctgaccggcaccggcgcggacacgacggcgacggccaccgagggggaggagcaggaggagatgaggcgcctcgtggccggcaacggcctggaggcggacgtcgacgtgtagcgagccgttcctttcggtggaaccacctagtttagctctacgtgcggtgcatcgcggtgacatgctaaaattaagccagactagccattccactcgtagggcaggcatagcatattgcagcaccgagtagctggctagctttagttattgtggtgagccacacagctcacagatttgctgctgcatgcatgcttgcagctgggcctaagcggtggtgtgttcgcattgaagtagtacggttgctgcttggagaaatgggctagctagctagcaagctaatcaagctagagatcttgatcgagctaagcaagttcattccaagttacacgcacttcattttctgtatgggctaaacaagttcattagcgcttgattttgggatt

SEQ ID NO: 31942 - protein, 567 aa, Triticum aestivum
LPETKHHSSLPRLPSARTSPSLPPPLLGRAPPLPCLGNDSKHRLASQERGADMAIPLQAKKQQENGSKGGQGSHVDGGDDNPSAAEELRELWRMAAPITALNCVVYLRAMVSVLCLGRLGPLDLAGGALAIGLTNITGHSVLFGLASGLEPLCAQAYGSRNYDLLTLSLHRAVLLLAIAAVPIALLWLNVGPILVALGQDPAISASAAAYAAWALPDLAALAVLQPLRVYLRSQGITKPMAACSAAAVALHIPLNFLLVFRMGFGVRGVAAAQALTNTNMVLFLLAYVRWAGACDDTWRGFARPAAVASGLGGLVRLAVPSCIGVCLEWWWYEVVTVLAGYLANPTAAVGAAGVLIQTTSLMYTVPMALAACVSTRVGNELGAGKPRRARMAATVALWCAAGVGLAHVAWTAAFSAQWVSLFTREPSVVLLASAAMPLLGLCELGNCPQTTGCGVLRGTARPAVGARINLLSFYLVGTPVAVLLAFGHGPLSGFRGLWYGLLSAQAACVALVLVAVVWRTDWRVEAMRARKLTGTGADTTATATEGEEQEEMRRLVAGNGLEADVDV

SEQ ID NO: 31943 - protein, 515 aa, Triticum aestivum
MAIPLQAKKQQENGSKGGQGSHVDGGDDNPSAAEELRELWRMAAPITALNCVVYLRAMVSVLCLGRLGPLDLAGGALAIGLTNITGHSVLFGLASGLEPLCAQAYGSRNYDLLTLSLHRAVLLLAIAAVPIALLWLNVGPILVALGQDPAISASAAAYAAWALPDLAALAVLQPLRVYLRSQGITKPMAACSAAAVALHIPLNFLLVFRMGFGVRGVAAAQALTNTNMVLFLLAYVRWAGACDDTWRGFARPAAVASGLGGLVRLAVPSCIGVCLEWWWYEVVTVLAGYLANPTAAVGAAGVLIQTTSLMYTVPMALAACVSTRVGNELGAGKPRRARMAATVALWCAAGVGLAHVAWTAAFSAQWVSLFTREPSVVLLASAAMPLLGLCELGNCPQTTGCGVLRGTARPAVGARINLLSFYLVGTPVAVLLAFGHGPLSGFRGLWYGLLSAQAACVALVLVAVVWRTDWRVEAMRARKLTGTGADTTATATEGEEQEEMRRLVAGNGLEADVDV

SEQ ID NO: 31944 - protein, 474 aa, Triticum aestivum
MAAPITALNCVVYLRAMVSVLCLGRLGPLDLAGGALAIGLTNITGHSVLFGLASGLEPLCAQAYGSRNYDLLTLSLHRAVLLLAIAAVPIALLWLNVGPILVALGQDPAISASAAAYAAWALPDLAALAVLQPLRVYLRSQGITKPMAACSAAAVALHIPLNFLLVFRMGFGVRGVAAAQALTNTNMVLFLLAYVRWAGACDDTWRGFARPAAVASGLGGLVRLAVPSCIGVCLEWWWYEVVTVLAGYLANPTAAVGAAGVLIQTTSLMYTVPMALAACVSTRVGNELGAGKPRRARMAATVALWCAAGVGLAHVAWTAAFSAQWVSLFTREPSVVLLASAAMPLLGLCELGNCPQTTGCGVLRGTARPAVGARINLLSFYLVGTPVAVLLAFGHGPLSGFRGLWYGLLSAQAACVALVLVAVVWRTDWRVEAMRARKLTGTGADTTATATEGEEQEEMRRLVAGNGLEADVDV

SEQ ID NO: 31945 - DNA, 1759 bp, Triticum aestivum
acaccccaagggcccagaagccaaaaacccaagcagagcaaactgcacacacaagcgcttccacacagaagcagccgtggccatggccatggcattcttcctccttgccgcggcggcgtcagcggctgtcgccggagcctcctggagcccgcggccagagggcgacctcgtcaccgggctccctgggcaaccagaggtcgggttcaagcactacgccggctacgtcgacgtcggaacgggcggcgacaaggcgctcttctactggttcttcgaggccgagcaggagccggagaagaagcccctcatgctgtggctcaacggagggcccgggtgctcgtccatcgcctacggcgcggcccaggagctgggcccgttcctggtcaggggctacggcgcgaacctcacccgcaacgcctacgcgtggaacaaagccgtgaacctgctgttcctggaggcgccggtgggcgtggggttctcctacaccaacaagacggcggacctgggccgcctcggcgaccgcgtgacggcgcaggactcgtacaccttcctcctcaactggctcgccaagttcccggagttcaagggccgcgacttctacatcgccggagagagctacgccgggcactacgtcccgcagctcgcagatctcatctacgaggggaacaaagcggcgggcagaggcagcatcatcaacctcaaaggcttcatgattggcaacgcggtgctgaacgacgagacggaccagctgggcatggtggagtacgcgtggagccacgccatcatctccgacgagctgcactcggcggtgacgcgggagtgcgactccttcaaggaggaggccgacggcggcaggcccgggaagggctgctcgtcggccgtccgcgccttcatgggcgccttcgacgacatcgacatctacagcatctacacgccgacgtgcctctccccctccgccggctccgcctccgccgcgccgcgcccgtccaggctcgtcaccgcgccccgcctcttctcccagcacgtactacgtcctactccctctctctctctgacatctctggtagtgcatacactgtgtgcgagaaagaaaataagtgtcttgtcgtggcggtggtgcgtacgcaggaggcatggcacatgatgaggcgtgcgccggcggggtacgacccgtgcacggaggcgtacgtgaccaggtatttcaaccgccaggacgtgcagcgggcgctgcacgccaaccggacgggcctcaagtacccatactcgccttgcagcgcggtgataagcaagtggaacgactcgccggcgaccgtactccccgtcctgaagaagctcatggccgccgggctgcgcgtctgggtctacagcggcgacacggacgggagggtgccggtgacgtcgacgcggtacagcgtcaacgcgatgaagctgcgggcgcgggcgaggagcgggtggcgggcgtggttctacaggcagcaggtagccgggtgggcggtggagtacgaggaggggctgacgctggtgacggtgcgcggggcggggcaccaggtgccgctcttcgcgcccgaccgctcgctcgccatgctctaccacttcctccggggccagcccctgccggccgccgctccacgctagcggaagtgtgtctggtccattcttctgctcagcaaagctacgagcaagtgcttcatcattgggtggtagcgttgtactatgcctgtaactgatgtgacgatatcaatgtgggattttcatgggaaac

SEQ ID NO: 31946 - protein, 543 aa, Triticum aestivum
TPQGPRSQKPKQSKLHTQALPHRSSRGHGHGILPPCRGGVSGCRRSLLEPAARGRPRHRAPWATRGRVQALRRLRRRRNGRRQGALLLVLRGRAGAGEEAPHAVAQRRARVLVHRLRRGPGAGPVPGQGLRREPHPQRLRVEQSREPAVPGGAGGRGVLLHQQDGGPGPPRRPRDGAGLVHLPPQLARQVPGVQGPRLLHRRRELRRALRPAARRSHLRGEQSGGQRQHHQPQRLHDWQRGAERRDGPAGHGGVRVEPRHHLRRAALGGDAGVRLLQGGGRRRQAREGLLVGRPRLHGRLRRHRHLQHLHADVPLPLRRLRLRRAAPVQARHRAPPLLPARTTSYSLSLSDISGSAYTVCEKENKCLVVAVVRTQEAWHMMRRAPAGYDPCTEAYVTRYFNRQDVQRALHANRTGLKYPYSPCSAVISKWNDSPATVLPVLKKLMAAGLRVWVYSGDTDGRVPVTSTRYSVNAMKLRARARSGWRAWFYRQQVAGWAVEYEEGLTLVTVRGAGHQVPLFAPDRSLAMLYHFLRGQPLPAAAPR

SEQ ID NO: 31947 - protein, 379 aa, Triticum aestivum
HPKGPEAKNPSRANCTHKRFHTEAAVAMAMAFFLLAAAASAAVAGASWSPRPEGDLVTGLPGQPEVGFKHYAGYVDVGTGGDKALFYWFFEAEQEPEKKPLMLWLNGGPGCSSIAYGAAQELGPFLVRGYGANLTRNAYAWNKAVNLLFLEAPVGVGFSYTNKTADLGRLGDRVTAQDSYTFLLNWLAKFPEFKGRDFYIAGESYAGHYVPQLADLIYEGNKAAGRGSIINLKGFMIGNAVLNDETDQLGMVEYAWSHAIISDELHSAVTRECDSFKEEADGGRPGKGCSSAVRAFMGAFDDIDIYSIYTPTCLSPSAGSASAAPRPSRLVTAPRLFSQHVLRPTPSLSLTSLVVHTLCARKKISVLSWRWCVRRRHGT

SEQ ID NO: 31948 - protein, 352 aa, Triticum aestivum
MAMAFFLLAAAASAAVAGASWSPRPEGDLVTGLPGQPEVGFKHYAGYVDVGTGGDKALFYWFFEAEQEPEKKPLMLWLNGGPGCSSIAYGAAQELGPFLVRGYGANLTRNAYAWNKAVNLLFLEAPVGVGFSYTNKTADLGRLGDRVTAQDSYTFLLNWLAKFPEFKGRDFYIAGESYAGHYVPQLADLIYEGNKAAGRGSIINLKGFMIGNAVLNDETDQLGMVEYAWSHAIISDELHSAVTRECDSFKEEADGGRPGKGCSSAVRAFMGAFDDIDIYSIYTPTCLSPSAGSASAAPRPSRLVTAPRLFSQHVLRPTPSLSLTSLVVHTLCARKKISVLSWRWCVRRRHGT

SEQ ID NO: 31949 - DNA, 1728 bp, Triticum aestivum
attcttttcttcccactcccccctgcccttccgccaaagcgtcagccgccgccttgccatacctcgtcgtcaccgccggcgccgcgacctcaatcccgcgccctccgccaccttcttggggacgcgcgtcgacgccgccgccgccgccgttccccttcttccccggcctccgggacatcctgctgctgcctccacctcgtcccagtctttggccactgggcctccttccttcgttcgagttggacatggcatcatctgctaccatcagttcagttggcgctcaggccgctctggtttcaaagccaaggaatcatggtatcagtggcttaaaggcatcctcatcaattagcttcgaattgggatcctcattcctgggcaagaccgggtctcttcgggcatctgtaaccacaagggttgcgccaaaggcgaagtccgcggctcggatactaccggaggcatcttacaaagtggcggtacttggtgctgctgggggcatcggccaaccattgggcttgttgatcaagatgtcccctctggtctcagaactgcgcctgtacgatattgcgaatgtcaagggagtcgccgctgatctcagccactgcaacacaccctctcaggttatggacttcactggccctgcagaattggccagctgcttgaaaggtgtggatgttgttgtcatccccgccggggtcccaagaaagccagggatgactcgtgacgaccttttcaacatcaatgcgggcatcgtcaagtcacttatcgaggctgttgcagacaattgccctggggcctttatccatattatcagcaacccagtcaactccacagtgccgattgctgctgagattctgaaaaagaagggtgtctacaatcccaagaagctttttggggtttccaccctagatgttgtccgggctaacacatttgtagctcagaagaagggcctcaagctcattgatgttgatgtcccagttgttggtggtcatgctggaattacaatcctgcctttgttgtcaaagacgagaccatctgtcaccttcacggacgaggaaactgaacagctgacgaagaggatacagaacgctgggacagaggtggtggaggcgaaagcgggtgctggatctgctaccctgtccatggcttatgctgctgccagatttgtcgagtcttcgctccgcgcactggctggtgatccagatgtttacgagtgcacgtatgttcagtctgagttaactgagctgccattctttgcgtccagagttaagcttgggaagaatggtgttgagtccatcatttcttctgacctggagggaataaccgagtatgaggccagtgcacttgaggcattgaagcctgagctgaaggccagcattgagaagggcattgagtttgcgcacaaacaacagggagctgctgcctctgtttgagtgaggagaatgataattccatatgaagaggacaaaggcaaactgattgtccttttctagttttgcagcctagagtgtggacatgtagcactatgccctggagcagctatatttctgaattgttggtcagtttattatgattccagtttacatgagggcgtgaagccccaaacgtgcaccctgttctgggtccttgttttgtttgacacataaattttggtcctgttccacctgctgttcttgtagcttcctaagttgacgaactgtggaataataataaagcccatctttgatcgtt

SEQ ID NO: 31950 - protein, 475 aa, Triticum aestivum
SFLPTPPCPSAKASAAALPYLVVTAGAATSIPRPPPPSWGRASTPPPPPFPFFPGLRDILLLPPPRPSLWPLGLLPSFELDMASSATISSVGAQAALVSKPRNHGISGLKASSSISFELGSSFLGKTGSLRASVTTRVAPKAKSAARILPEASYKVAVLGAAGGIGQPLGLLIKMSPLVSELRLYDIANVKGVAADLSHCNTPSQVMDFTGPAELASCLKGVDVVVIPAGVPRKPGMTRDDLFNINAGIVKSLIEAVADNCPGAFIHIISNPVNSTVPIAAEILKKKGVYNPKKLFGVSTLDVVRANTFVAQKKGLKLIDVDVPVVGGHAGITILPLLSKTRPSVTFTDEETEQLTKRIQNAGTEVVEAKAGAGSATLSMAYAAARFVESSLRALAGDPDVYECTYVQSELTELPFFASRVKLGKNGVESIISSDLEGITEYEASALEALKPELKASIEKGIEFAHKQQGAAASV

SEQ ID NO: 31951 - protein, 394 aa, Triticum aestivum
MASSATISSVGAQAALVSKPRNHGISGLKASSSISFELGSSFLGKTGSLRASVTTRVAPKAKSAARILPEASYKVAVLGAAGGIGQPLGLLIKMSPLVSELRLYDIANVKGVAADLSHCNTPSQVMDFTGPAELASCLKGVDVVVIPAGVPRKPGMTRDDLFNINAGIVKSLIEAVADNCPGAFIHIISNPVNSTVPIAAEILKKKGVYNPKKLFGVSTLDVVRANTFVAQKKGLKLIDVDVPVVGGHAGITILPLLSKTRPSVTFTDEETEQLTKRIQNAGTEVVEAKAGAGSATLSMAYAAARFVESSLRALAGDPDVYECTYVQSELTELPFFASRVKLGKNGVESIISSDLEGITEYEASALEALKPELKASIEKGIEFAHKQQGAAASV

SEQ ID NO: 31952 - protein, 301 aa, Triticum aestivum
MSPLVSELRLYDIANVKGVAADLSHCNTPSQVMDFTGPAELASCLKGVDVVVIPAGVPRKPGMTRDDLFNINAGIVKSLIEAVADNCPGAFIHIISNPVNSTVPIAAEILKKKGVYNPKKLFGVSTLDVVRANTFVAQKKGLKLIDVDVPVVGGHAGITILPLLSKTRPSVTFTDEETEQLTKRIQNAGTEVVEAKAGAGSATLSMAYAAARFVESSLRALAGDPDVYECTYVQSELTELPFFASRVKLGKNGVESIISSDLEGITEYEASALEALKPELKASIEKGIEFAHKQQGAAASV

SEQ ID NO: 31953 - DNA, 1573 bp, Triticum aestivum
gttaaccacacgcagcagccggagggaggagcgagcgaggaagccaccagtataaaaccaacgccgcgtccttggcagccagcgatcccgcgactcagccgacggttttctgttcccccctctgacctgtccctccatcctcctcaattctcctccccggcgcccgccgttgacgaggcctcggaggaggaggactcgagcgcgccgctgtctcctgctccgccggctgccctcgcgttgagtttcacagggttgagttaggaggactgcgaccatgaaggccctcattcttgtgggaggattcggcacccgcctgcggccgctgacgctcagcgtgcccaagccgctcgtcgatttcgccaacaagcccatgatcctgcatcagatcgaggctctgaaagatgtgggagttacagaagttgtcctagccatcaattaccagccagaggtcatgctcaactttctcaaggacttcgagagcaagcttggcatcaagatcacctgctcccaggagacagagccaatgggaaccgctggaccgctggccctggcccgcgacaagctcgacgacggatccggcgagcctttcttcgtcctcaacagtgacgtgatcagcgagtacccgttcgcagagctcatcgagttccacaagtcccatggcggcgaggccacgatcatggtcaccaaggtggagcggttcgtggagaagcccaaggtgttcgtgggcaacaagatcaacgccggcatctacctgctgagcccgtccgtgctggaccgcatcgagctgaagccgacgtccatcgagaaggaggtgttcccgcgcatcgccgccgacaagggcctgttcgccatggtgctgccggggttctggatggacatcgggcagccgagggactacatcacggggctgaggctctacctggagtccctgaggaagagggcgccggcgaggctggcggcgggcgcgcacgtgctgggcaacgtgctggtacacgagacggcgacgatcggggaggggtgcctgatcgggccggacgtggccgtcggccccgggtgcgtggtggaggccggggtgcggctgtcgaggtgcaccgtgatgcggggcgcccgcgtgaagaagcacgcgtgcatctccggcagcatcgtggggtggcactcgacggtgggcaagtgggcgcgcgtggagaacatgaccatcctcggcgaggacgtgcacgtctgcgacgaggtgtacagcaacggcggcgtcgtgctcccgcacaaggagatcaagtccagcatcctcaagcccgagatcgtcatgtgatcgggaccatcgcccgcgccacatggtgaaaaagggtcgtatatttcttcatgcgtttgttggtttatttgtctgtctgtctgcaagtgtaaccagaggtgtccaccaaactgccaagtgtctatcaagctctatgtatgtctagacgtgtcgcaagtttttttttctttcttttttgaagacaaaatgcgtctcggttaaatttaagccccgggcttcaatttgtagataggtgtcagatgcatgggaataaagcatcagttttac

SEQ ID NO: 31954 - protein, 343 aa, Triticum aestivum
MKALILVGGFGTRLRPLTLSVPKPLVDFANKPMILHQIEALKDVGVTEVVLAINYQPEVMLNFLKDFESKLGIKITCSQETEPMGTAGPLALARDKLDDGSGEPFFVLNSDVISEYPFAELIEFHKSHGGEATIMVTKVERFVEKPKVFVGNKINAGIYLLSPSVLDRIELKPTSIEKEVFPRIAADKGLFAMVLPGFWMDIGQPRDYITGLRLYLESLRKRAPARLAAGAHVLGNVLVHETATIGEGCLIGPDVAVGPGCVVEAGVRLSRCTVMRGARVKKHACISGSIVGWHSTVGKWARVENMTILGEDVHVCDEVYSNGGVVLPHKEIKSSILKPEIVM

SEQ ID NO: 31955 - protein, 311 aa, Triticum aestivum
MILHQIEALKDVGVTEVVLAINYQPEVMLNFLKDFESKLGIKITCSQETEPMGTAGPLALARDKLDDGSGEPFFVLNSDVISEYPFAELIEFHKSHGGEATIMVTKVERFVEKPKVFVGNKINAGIYLLSPSVLDRIELKPTSIEKEVFPRIAADKGLFAMVLPGFWMDIGQPRDYITGLRLYLESLRKRAPARLAAGAHVLGNVLVHETATIGEGCLIGPDVAVGPGCVVEAGVRLSRCTVMRGARVKKHACISGSIVGWHSTVGKWARVENMTILGEDVHVCDEVYSNGGVVLPHKEIKSSILKPEIVM

SEQ ID NO: 31956 - protein, 284 aa, Triticum aestivum
MLNFLKDFESKLGIKITCSQETEPMGTAGPLALARDKLDDGSGEPFFVLNSDVISEYPFAELIEFHKSHGGEATIMVTKVERFVEKPKVFVGNKINAGIYLLSPSVLDRIELKPTSIEKEVFPRIAADKGLFAMVLPGFWMDIGQPRDYITGLRLYLESLRKRAPARLAAGAHVLGNVLVHETATIGEGCLIGPDVAVGPGCVVEAGVRLSRCTVMRGARVKKHACISGSIVGWHSTVGKWARVENMTILGEDVHVCDEVYSNGGVVLPHKEIKSSILKPEIVM

SEQ ID NO: 31957 - DNA, 2913 bp, Triticum aestivum
aaaactctcctcctcctcctccgtctcccagaccaaacgccgcccctctcctccacctcctcccccctcatccatggcgatggcgacctctcacttgcccgactaaacaaacaagcaagctcacgcaagcgcgcacccagacccactgagagcccggacaaaggggtcaagaagacaaggaagaggcgccggtagccactagccactcgtccggcatcccgaggtcgaccatggagaagttcctgttcgaggagctggccggggacgccgtgcgggagctgctgcgcgcggtgcagggcaccttcctgtgccgctccaccgccgagcgcctgcgccggaacgtcgagccgctgctgcccctcgtgcagcagaacggccgccacgcgctccggagcaacgccgagctgggcgagctcgccgtgcagctcagggaggcgctcgacctcgcgcgccgcgccgccgccgccccgcgctggaacgtgtaccgcaccgcgcagctggcccgcaggatggaggccgccgacaagggcatcgagcgctggctggcgcgccacgcccccgcgcacgtgctcgacggcgtgcgccgcctccgcgacgaggccgaggcccgcatcggccgcctcgagcgccgcgtcgaggaggtcgccgcgctgcaggcagcccccacgatcccgcccgccatgtcccttcccgtcgcactgccgccgccgccctccaagggcatggcgatggcggtagaggtggcgccgccgaccaaggccatggggatgccgatggaggtggcgccaccgaccaagggcatggggattccgatggatttcgagttcccgtgcgaggaggagagcaaggacgccggcttggtgggaagcggcgtcaaggtgggcaaggagagagtgaaggagatggtgatgagcagcgggggcggctgggaggtcgtcggcatctgcggcatgggcggcagcggcaagaccacgctcgccatggagatctataaggatcaaaagatccaaggctacttcaacaacagggtcttctttgagacggtctcacagtccgcaaatctggagaccatcaagatgaagctgtgggagcagatcagcagcaatattgtgcttggtgcatataaccagataccggaatggcagctcaagttagggccgagggaccgaggaccagtccttgttatacttgatgatgtgtggtctctctcacagctcgaggagctggtcttcaagttccctggctgcaaaacccttgtcgtatcaaggttgaagttccccacgttagtctcccggacttacgaaatgaaattactcggcgaagaggaggctctctctgtcttctgcagtgctgccttcggtcaggagtctgttcctcagactgctgacaagaaactggttaagcaggttgctgccgagtgcagagggcttcctctagctctcaaggttatcggcgcatccttgcgtgatcagcctcctatgatatggttgagcgcgaagaaccgcttgtcacgaggagagtctatatcggactcacatgagaccaaactcctcgagagaatggcagcaagtgtcgagtgcttgtcgggaaaggttagggaatgtttccttgacctgggttgcttcccagaggataagaagatccctcttgatgtgttgatcaatatttggatggagatacatgatcttgacaagccagatgctttcgccatcctcatggagctatcgaacaagaacctgcttaccctagttaatgatgcacagaataaagctggagatttatacagtaactatcatgactactcagtgacgcaacatgatgtgttgcgtgatctggcacttcacatgagcggtcgtgattctctgaacaaaaggaggcggttagtgatgccaagaagagaagaatcgcttccgagagattggcagaggaataaggaccttccctttgaagctcagattgtttctattcatacaggtgagatgaaagaatctgactggttccagatgagcttccccaaggcagaagttcttatcctcaacttcgcctcaagtgtatactacctcccgtcgttcattgcaacaatgcagaacctgaaggccctggtgctgatcaactatggtactaccagtgcaacccttgacaatttatctgccttcaccacactgagtgacctgaggagtctttggctggaaaagattacgctcccgccactgccgaaaagcacgatcccactgaagaacctgcgcaagatatccctcgtcctttgtgagctgaacaacagtctaagaggatcaacaatggatctctccatgacgtttccgcgcttatccaacctcaccatcgaccattgcgtagatctgaaggagctgccacctagtgtatgtgaaatcagctctctggaaagcatctccttgtcaaactgccatgacctcacagagctgccatatgagctgggcaagctgcactgcctgagcatcttgcgggtgtacgcctgcccggcactgtggaagcttccaccgtcggtatgcagcctgaagaggctgaaatacctggacatatcgcagtgcattaaccttacagaccttccagaagagcttggccacctgacaaacctagagaagatcgacatgcgggaatgctcgcggttgaggagcctccctaggtcctcctcgtcgttgaagtccctcgggcacgtcgtgtgcgacgaggaaacggcgatgctgtggagggaagccgagcaggtcatcccggacctccgtgtgcaggtagcagaagagtgttacaacctggactggcttgtagactgatgttctggatgctctctgcctccaggctcaccatgtacaaatgatgtgtatatgtttccctgcttaaatgcaggatgggtagtcaatacactgttcagttttgacg

SEQ ID NO: 31958 - protein, 858 aa, Triticum aestivum
MEKFLFEELAGDAVRELLRAVQGTFLCRSTAERLRRNVEPLLPLVQQNGRHALRSNAELGELAVQLREALDLARRAAAAPRWNVYRTAQLARRMEAADKGIERWLARHAPAHVLDGVRRLRDEAEARIGRLERRVEEVAALQAAPTIPPAMSLPVALPPPPSKGMAMAVEVAPPTKAMGMPMEVAPPTKGMGIPMDFEFPCEEESKDAGLVGSGVKVGKERVKEMVMSSGGGWEVVGICGMGGSGKTTLAMEIYKDQKIQGYFNNRVFFETVSQSANLETIKMKLWEQISSNIVLGAYNQIPEWQLKLGPRDRGPVLVILDDVWSLSQLEELVFKFPGCKTLVVSRLKFPTLVSRTYEMKLLGEEEALSVFCSAAFGQESVPQTADKKLVKQVAAECRGLPLALKVIGASLRDQPPMIWLSAKNRLSRGESISDSHETKLLERMAASVECLSGKVRECFLDLGCFPEDKKIPLDVLINIWMEIHDLDKPDAFAILMELSNKNLLTLVNDAQNKAGDLYSNYHDYSVTQHDVLRDLALHMSGRDSLNKRRRLVMPRREESLPRDWQRNKDLPFEAQIVSIHTGEMKESDWFQMSFPKAEVLILNFASSVYYLPSFIATMQNLKALVLINYGTTSATLDNLSAFTTLSDLRSLWLEKITLPPLPKSTIPLKNLRKISLVLCELNNSLRGSTMDLSMTFPRLSNLTIDHCVDLKELPPSVCEISSLESISLSNCHDLTELPYELGKLHCLSILRVYACPALWKLPPSVCSLKRLKYLDISQCINLTDLPEELGHLTNLEKIDMRECSRLRSLPRSSSSLKSLGHVVCDEETAMLWREAEQVIPDLRVQVAEECYNLDWLVD

SEQ ID NO: 31959 - protein, 765 aa, Triticum aestivum
MEAADKGIERWLARHAPAHVLDGVRRLRDEAEARIGRLERRVEEVAALQAAPTIPPAMSLPVALPPPPSKGMAMAVEVAPPTKAMGMPMEVAPPTKGMGIPMDFEFPCEEESKDAGLVGSGVKVGKERVKEMVMSSGGGWEVVGICGMGGSGKTTLAMEIYKDQKIQGYFNNRVFFETVSQSANLETIKMKLWEQISSNIVLGAYNQIPEWQLKLGPRDRGPVLVILDDVWSLSQLEELVFKFPGCKTLVVSRLKFPTLVSRTYEMKLLGEEEALSVFCSAAFGQESVPQTADKKLVKQVAAECRGLPLALKVIGASLRDQPPMIWLSAKNRLSRGESISDSHETKLLERMAASVECLSGKVRECFLDLGCFPEDKKIPLDVLINIWMEIHDLDKPDAFAILMELSNKNLLTLVNDAQNKAGDLYSNYHDYSVTQHDVLRDLALHMSGRDSLNKRRRLVMPRREESLPRDWQRNKDLPFEAQIVSIHTGEMKESDWFQMSFPKAEVLILNFASSVYYLPSFIATMQNLKALVLINYGTTSATLDNLSAFTTLSDLRSLWLEKITLPPLPKSTIPLKNLRKISLVLCELNNSLRGSTMDLSMTFPRLSNLTIDHCVDLKELPPSVCEISSLESISLSNCHDLTELPYELGKLHCLSILRVYACPALWKLPPSVCSLKRLKYLDISQCINLTDLPEELGHLTNLEKIDMRECSRLRSLPRSSSSLKSLGHVVCDEETAMLWREAEQVIPDLRVQVAEECYNLDWLVD

SEQ ID NO: 31960 - protein, 708 aa, Triticum aestivum
MSLPVALPPPPSKGMAMAVEVAPPTKAMGMPMEVAPPTKGMGIPMDFEFPCEEESKDAGLVGSGVKVGKERVKEMVMSSGGGWEVVGICGMGGSGKTTLAMEIYKDQKIQGYFNNRVFFETVSQSANLETIKMKLWEQISSNIVLGAYNQIPEWQLKLGPRDRGPVLVILDDVWSLSQLEELVFKFPGCKTLVVSRLKFPTLVSRTYEMKLLGEEEALSVFCSAAFGQESVPQTADKKLVKQVAAECRGLPLALKVIGASLRDQPPMIWLSAKNRLSRGESISDSHETKLLERMAASVECLSGKVRECFLDLGCFPEDKKIPLDVLINIWMEIHDLDKPDAFAILMELSNKNLLTLVNDAQNKAGDLYSNYHDYSVTQHDVLRDLALHMSGRDSLNKRRRLVMPRREESLPRDWQRNKDLPFEAQIVSIHTGEMKESDWFQMSFPKAEVLILNFASSVYYLPSFIATMQNLKALVLINYGTTSATLDNLSAFTTLSDLRSLWLEKITLPPLPKSTIPLKNLRKISLVLCELNNSLRGSTMDLSMTFPRLSNLTIDHCVDLKELPPSVCEISSLESISLSNCHDLTELPYELGKLHCLSILRVYACPALWKLPPSVCSLKRLKYLDISQCINLTDLPEELGHLTNLEKIDMRECSRLRSLPRSSSSLKSLGHVVCDEETAMLWREAEQVIPDLRVQVAEECYNLDWLVD

SEQ ID NO: 31961 - DNA, 818 bp, Triticum aestivum
cccatccccaaactccagatcgatcgcaccgggagattgctgacgcccgcccgccgcgatggaggaggagaagaagatgaagctctgcttctccatcccctcgaaacccaaggtcaagcccgccacgcctcccgccgccttctccgtcgccgccgtggcccccggccccgccccgcggttcgtcaccgtgttcgatccctcggaaaccctcaccccagcgcccgccgcgcccgtcgtcattgcgccccttcccgactcgcgcaaaccctccccagctgctgccgcgccggccgcgcccgtcgtcatcgcgccccttcccaacacgcgcaagctcgccgaggcccccgccttcgtgctcggcgcctccgacagcccctcctccagcgcagcctacggcctcaccgtccgcaatacggattcgaagaggaagcttgatccccaggacgatgctgctagggagcagccgtcgcctccaggccccagcggcgaggacctgatgctgcggcggttcaaggaggacatggccgttctcccggaaatcgaaggtacggacgagtatgacgaggtgcctgtggaggggttcggtgctgctctcctcgctggctatggctggaaggaaggggattctattggaaagaaatacaagggcatgggcgctgtcaaggttcgtgagtacggccgccgccgctgcggcacgcagggtctaggctcgtagggttgccaggtcgtgacagtttctgtttcttgtttattttcttgatttcggttatctgtaactgtaagtatgtatggttcatcagactttgtctttgcctatc

SEQ ID NO: 31962 - protein, 218 aa, Triticum aestivum
MEEEKKMKLCFSIPSKPKVKPATPPAAFSVAAVAPGPAPRFVTVFDPSETLTPAPAAPVVIAPLPDSRKPSPAAAAPAAPVVIAPLPNTRKLAEAPAFVLGASDSPSSSAAYGLTVRNTDSKRKLDPQDDAAREQPSPPGPSGEDLMLRRFKEDMAVLPEIEGTDEYDEVPVEGFGAALLAGYGWKEGDSIGKKYKGMGAVKVREYGRRRCGTQGLGS

SEQ ID NO: 31963 - protein, 212 aa, Triticum aestivum
MKLCFSIPSKPKVKPATPPAAFSVAAVAPGPAPRFVTVFDPSETLTPAPAAPVVIAPLPDSRKPSPAAAAPAAPVVIAPLPNTRKLAEAPAFVLGASDSPSSSAAYGLTVRNTDSKRKLDPQDDAAREQPSPPGPSGEDLMLRRFKEDMAVLPEIEGTDEYDEVPVEGFGAALLAGYGWKEGDSIGKKYKGMGAVKVREYGRRRCGTQGLGS

SEQ ID NO: 31964 - protein, 144 aa, Triticum aestivum
PIPKLQIDRTGRLLTPARRDGGGEEDEALLLHPLETQGQARHASRRLLRRRRGPRPRPAVRHRVRSLGNPHPSARRARRHCAPSRLAQTLPSCCRAGRARRHRAPSQHAQARRGPRLRARRLRQPLLQRSLRPHRPQYGFEEEA

SEQ ID NO: 31965 - DNA, 1712 bp, Triticum aestivum
atcaggaaaaagaaaacccttcctccttcctccctccctcgctcgcacgcccaaaaagcccaaccaaccgcccggccccgacccccgaccaaacccgcaccggacgccgcgcgcgggcgctcgcgagagagggacgggagcggccgccgcgcctcgcgcctcgctcgctcgctcgccgacgcggtccggcggtggtgggggcctcgccgcgatggattgggcggcggtggcgtacacggcggccgcgctgctgtgcgccgcggcggccaccgtcatcacgctcggccacatctaccgccacctgctccactacgccgagcccatcttccagcgcttcatcgtccgcatcatcttcatggtcccggtctatgcagtgatgtcatttatttcccttatcctaccagacaatgcaatatattttacctctatccgagaaatctatgatgcttgggtcatctacaatttcttttcactctgcttggcatgggtgggaggacctggtgctgtggtggtgagtttgaatggccgaaccctgaaaccatcgtggtttctgatgacttgctgtttcccggctattcctctagatgggcgttttatacggagatgcaaacaaggctgtttgcagtttgttattcttaagcctatcctggtggttattaccttcatcctttatgctaaaggaaaatatgaagatggaaacttcagtgtcaaccaatcctatttatacatcactattatttacacaatctcatactcgatggcgttatatgctcttgcattgttctatgcggcatgcagagatctactccggccatataatcctgtcccaaagtttattataatcaaatcagttgtgtttctcacatactggcagggtgtcctggttttccttgctgccaagtctcgatttatcaagaatgctgaaaaagctgctgatctccagaactatgtattgtgcgttgagatgctcatagcagccattgggcacctatttgcctttccttacaaggagtatgcaggtgcaaatgctcgcccttcgggtggcttcagggaaagccttcttcatgctttaaaattcaacgatttctaccacgacactgttcaccagtttgctcctacctacaacgaatatgtgctgtacaaccacaatgagggagagagtgcaccaacaaagtttccttcagggagcgccgtgccaagtgtccgggatgtggagttggccggcatcaccgtgatgccgccctcaaatagtccagtgacctcaagcgtgtcatccaaccacgtagaccaggacgagtcaatgaccactccgatcaggaacaaagtggacccgcctggaggaatgtacgacctcacggacctgctcgacgtggacttgtctagctaccccgccaaggttcctgcgatctctgatgtaagaaaacaatgaccaggtgcgacagccaatgtgtctcggtagcgactgggggaaattgtggccttccattttgtcatagataacgctgtaaaaatgtgtgtgtactacttccggttccagcctttccccattgaagaaggggggtttattcatgactgcactgcagctgtgcgcacggcctctctcgccctactcttcgacatagttgttttggtgcgttgtgagctcaaggtgaactgttgtgacatgagactatgaataccatactaatagtttgctgatagcagttttggtg

SEQ ID NO: 31966 - protein, 475 aa, Triticum aestivum
SGKRKPFLLPPSLARTPKKPNQPPGPDPRPNPHRTPRAGARERGTGAAAAPRASLARSPTRSGGGGGLAAMDWAAVAYTAAALLCAAAATVITLGHIYRHLLHYAEPIFQRFIVRIIFMVPVYAVMSFISLILPDNAIYFTSIREIYDAWVIYNFFSLCLAWVGGPGAVVVSLNGRTLKPSWFLMTCCFPAIPLDGRFIRRCKQGCLQFVILKPILVVITFILYAKGKYEDGNFSVNQSYLYITIIYTISYSMALYALALFYAACRDLLRPYNPVPKFIIIKSVVFLTYWQGVLVFLAAKSRFIKNAEKAADLQNYVLCVEMLIAAIGHLFAFPYKEYAGANARPSGGFRESLLHALKFNDFYHDTVHQFAPTYNEYVLYNHNEGESAPTKFPSGSAVPSVRDVELAGITVMPPSNSPVTSSVSSNHVDQDESMTTPIRNKVDPPGGMYDLTDLLDVDLSSYPAKVPAISDVRKQ

SEQ ID NO: 31967 - protein, 405 aa, Triticum aestivum
MDWAAVAYTAAALLCAAAATVITLGHIYRHLLHYAEPIFQRFIVRIIFMVPVYAVMSFISLILPDNAIYFTSIREIYDAWVIYNFFSLCLAWVGGPGAVVVSLNGRTLKPSWFLMTCCFPAIPLDGRFIRRCKQGCLQFVILKPILVVITFILYAKGKYEDGNFSVNQSYLYITIIYTISYSMALYALALFYAACRDLLRPYNPVPKFIIIKSVVFLTYWQGVLVFLAAKSRFIKNAEKAADLQNYVLCVEMLIAAIGHLFAFPYKEYAGANARPSGGFRESLLHALKFNDFYHDTVHQFAPTYNEYVLYNHNEGESAPTKFPSGSAVPSVRDVELAGITVMPPSNSPVTSSVSSNHVDQDESMTTPIRNKVDPPGGMYDLTDLLDVDLSSYPAKVPAISDVRKQ

SEQ ID NO: 31968 - protein, 357 aa, Triticum aestivum
MVPVYAVMSFISLILPDNAIYFTSIREIYDAWVIYNFFSLCLAWVGGPGAVVVSLNGRTLKPSWFLMTCCFPAIPLDGRFIRRCKQGCLQFVILKPILVVITFILYAKGKYEDGNFSVNQSYLYITIIYTISYSMALYALALFYAACRDLLRPYNPVPKFIIIKSVVFLTYWQGVLVFLAAKSRFIKNAEKAADLQNYVLCVEMLIAAIGHLFAFPYKEYAGANARPSGGFRESLLHALKFNDFYHDTVHQFAPTYNEYVLYNHNEGESAPTKFPSGSAVPSVRDVELAGITVMPPSNSPVTSSVSSNHVDQDESMTTPIRNKVDPPGGMYDLTDLLDVDLSSYPAKVPAISDVRKQ

SEQ ID NO: 31969 - DNA, 1273 bp, Triticum aestivum
ctccactctaggaagcaatctagctagctatcaaggcgcctagccatgtccaacccgtacaccttcctcaggcctcatatagatcgtcctttcttccccttccaaagaagcctagtctctccatcctctcccccaaaacaagcactccctctcctaagccttctcccttcgagccatgatcacagcaagatccttggttgtgggtatgccggtgatgatgatcatcatcaacttaagaaggaagatgaggatgtgaacatctcactccaaattgggccgccgaatccgaaccccgcgcctaatcttttaaggagtactgtgagtgatggtggttgcgatgatgcaacaggaacaacacaggatcagtgtggtggtggcgatcacagcagggcggacgagcaggaggaagaggaagacgacgatgatgatgccgccggtgatggtctttgttcggagtactttgccgctggtaagcttaccaagggcaagtattggatccctacccccgctcagatcctcattgggcccactcacttcgcctgcccggtgtgctgcaagaccttcagcagatacaacaacctgcagatgcacatgtggggacacgggtcgcagtaccgccgcgggcctgactccctccgcggcacgcagccggcggcgatgctccggctgccgtgcttctgctgcgcgccggggtgccggagccacgtggaccacccgcgggcgcggccgctcaaggacttccggacgctgcagacgcactacaagcgcaggcactgtgccaagccattcctctgccgcaagtgcggcaaggcgctcgccgtgcgcggcgactggcgaactcacgagaagaactgcggccgccggtggcactgcacctgcggctctgacttcaagcacaagcgctcgctcaaggatcacattcgggccttcgggcaggaccacgtcgagcggccgcccgccgccaaaatgtgaccgtcgagagccacggacgataaatatgcatggccaaacggcctgccagtgattatacgattgcttgtgcaatattaggggaccgattgatttgggtatccatggtattctccttcgcataataagcattactatgttactagctgctagctgaactcagtttgattattacacttttttttaactattttgttcttattcaagtgctatgtgcgtattttagcgtgttaatcgtagacttgtaagttatggcaacttaatttgttcagtaatattcttattttgtatttgtttcatggtc

SEQ ID NO: 31970 - protein, 308 aa, Triticum aestivum
MSNPYTFLRPHIDRPFFPFQRSLVSPSSPPKQALPLLSLLPSSHDHSKILGCGYAGDDDHHQLKKEDEDVNISLQIGPPNPNPAPNLLRSTVSDGGCDDATGTTQDQCGGGDHSRADEQEEEEDDDDDAAGDGLCSEYFAAGKLTKGKYWIPTPAQILIGPTHFACPVCCKTFSRYNNLQMHMWGHGSQYRRGPDSLRGTQPAAMLRLPCFCCAPGCRSHVDHPRARPLKDFRTLQTHYKRRHCAKPFLCRKCGKALAVRGDWRTHEKNCGRRWHCTCGSDFKHKRSLKDHIRAFGQDHVERPPAAKM

SEQ ID NO: 31971 - protein, 232 aa, Triticum aestivum
MVVAMMQQEQHRISVVVAITAGRTSRRKRKTTMMMPPVMVFVRSTLPLVSLPRASIGSLPPLRSSLGPLTSPARCAARPSADTTTCRCTCGDTGRSTAAGLTPSAARSRRRCSGCRASAARRGAGATWTTRGRGRSRTSGRCRRTTSAGTVPSHSSAASAARRSPCAATGELTRRTAAAGGTAPAALTSSTSARSRITFGPSGRTTSSGRPPPKCDRREPRTINMHGQTACQ

SEQ ID NO: 31972 - protein, 228 aa, Triticum aestivum
MMQQEQHRISVVVAITAGRTSRRKRKTTMMMPPVMVFVRSTLPLVSLPRASIGSLPPLRSSLGPLTSPARCAARPSADTTTCRCTCGDTGRSTAAGLTPSAARSRRRCSGCRASAARRGAGATWTTRGRGRSRTSGRCRRTTSAGTVPSHSSAASAARRSPCAATGELTRRTAAAGGTAPAALTSSTSARSRITFGPSGRTTSSGRPPPKCDRREPRTINMHGQTACQ

SEQ ID NO: 31973 - DNA, 2315 bp, Triticum aestivum
atgttgagctagggtttagtcttgtagtactagatacagggtttaggatccgggaggagcccggctcccctcccaaaccgctctcatgtcgtcttcctcccaagtaagggttgggactctggttccctttgttgaaggcaaatctgggtcaccgagtgcgtcgtcgctgccaatgccaagcattcccatcttcaagggctccaatgtcgtcgggaggagtaatttggtggctgttgacaagagggtcagccgcaagcatttgagcctgcgcgccttgcctgatggctctctcgaagtcgttgtggaggggccaaatcccattgttgtccgatcagagggtcagagaagaaaagtttgtgctcagcagagagccaagattatgcacgatgatgtcctggagctgattcccggtgaatattttatgaagtatgtgaatatgagtgatgagcgtaaaagttccacatcagtcgaatcacatgacttaaagaaagggaagaggcatagcgaggaagatagtgtagttgcaaagagaaatcgacaagttatggaagatgaggctttggcaagaacatcgcaggaaagctttgcagaagagagtacatctgttactgaggtagtaagttcacttgatagtgctggttcttccgagagaaacaaagagagaacacattctgtcggccctttgaaagatgtacttccgttgacttttcgactcatgcgtgtccaacgtcttccatcatggactaacacttcaacagttaccattccggatgtcatacagggtgaagtgcttcttgctgtactctcaaattatatggtggacatggattggttgcttactgcatgtccaagtctaaggaaagttccacatgtcctagttctgcatggagaagatggtgcttcattggagcgcttgaagaaaacgaagcctgcaaattggatccttcacaagcccccgctcccaatatcatttggaacacatcattcgaaggccatgctgcttgtatatcctcaagggattcgtgttgttgttcacactgcaaatttgatacatgttgactggaataacaaaagtcagggattatggacgcaagattttccatggaagaaagcaaatgatacgagtacaaatattggttttgagaatgacctggttgattatctcagggcacttaagtggcctgagttcagggtaaatctcccagttgccggtgatgtcaacatcaatgcagcattctttcggaaatttgattatagtagctcaacggtcaggttgatcggatctgttcctggttatcatgtcggtcccaatatgaaaaagtggggccatatgaagcttaggagtgttcttgaagagtgcgtatttgaaaagcagttttgcaagtcaccacttatttatcagttttcgtccttggggtcacttgatgagaaatggatgagtgagtttgcatgttcgttatcagctggtaaagcagatgatggatcacagttgggtattgggaaaccactgattgtatggccaacagtggaggatgttaggtgctcaatagagggctatgcagctggcagttgcattccaagtcctcaaaagaatgttgagaaagatttcttgcgaaaatattggtccaggtggaaagcagaccacgtaggccgttgccgtgctatgccgcacataaaaacttttactcgctacaatggtcaaaatattgcatggtttctgcttacctcatcaaatttaagcaaagctgcttggggagcactgcagaagaacaatacacagctgacgatacgatcatatgagttaggtgtattgttcttgcccaaaactctccagtctgttccacaattttcatgcacagacaagagccgctcaaacctggataaacttgcccttggtaagaacatcaagaccaagctggtgacactttgctggaaaggtgatgaagaaaaggatccatctgcagaagttgtgagattgccagtgccatatcaagtccctccacaactctacggcccggaagatgtcccatggtcgtgggatcggaggtacacgaagaaggatgtgtatggttcagtctggccacgccatggctagcttagctgagctgcgtgccgatgattattaagcgtgttcaggtccacaggaacctggtgtatgttgattgatcactggtggaatcatcggttataggacctgattgctcgtgcaccctgtttctaggcctctcgctctcagccaactgtgggagaaaccataagcaatggaacgaacatttggttgacagaattatttggaacgttggatattttgagct

SEQ ID NO: 31974 - protein, 669 aa, Triticum aestivum
MSSSSQVRVGTLVPFVEGKSGSPSASSLPMPSIPIFKGSNVVGRSNLVAVDKRVSRKHLSLRALPDGSLEVVVEGPNPIVVRSEGQRRKVCAQQRAKIMHDDVLELIPGEYFMKYVNMSDERKSSTSVESHDLKKGKRHSEEDSVVAKRNRQVMEDEALARTSQESFAEESTSVTEVVSSLDSAGSSERNKERTHSVGPLKDVLPLTFRLMRVQRLPSWTNTSTVTIPDVIQGEVLLAVLSNYMVDMDWLLTACPSLRKVPHVLVLHGEDGASLERLKKTKPANWILHKPPLPISFGTHHSKAMLLVYPQGIRVVVHTANLIHVDWNNKSQGLWTQDFPWKKANDTSTNIGFENDLVDYLRALKWPEFRVNLPVAGDVNINAAFFRKFDYSSSTVRLIGSVPGYHVGPNMKKWGHMKLRSVLEECVFEKQFCKSPLIYQFSSLGSLDEKWMSEFACSLSAGKADDGSQLGIGKPLIVWPTVEDVRCSIEGYAAGSCIPSPQKNVEKDFLRKYWSRWKADHVGRCRAMPHIKTFTRYNGQNIAWFLLTSSNLSKAAWGALQKNNTQLTIRSYELGVLFLPKTLQSVPQFSCTDKSRSNLDKLALGKNIKTKLVTLCWKGDEEKDPSAEVVRLPVPYQVPPQLYGPEDVPWSWDRRYTKKDVYGSVWPRHG

SEQ ID NO: 31975 - protein, 640 aa, Triticum aestivum
MPSIPIFKGSNVVGRSNLVAVDKRVSRKHLSLRALPDGSLEVVVEGPNPIVVRSEGQRRKVCAQQRAKIMHDDVLELIPGEYFMKYVNMSDERKSSTSVESHDLKKGKRHSEEDSVVAKRNRQVMEDEALARTSQESFAEESTSVTEVVSSLDSAGSSERNKERTHSVGPLKDVLPLTFRLMRVQRLPSWTNTSTVTIPDVIQGEVLLAVLSNYMVDMDWLLTACPSLRKVPHVLVLHGEDGASLERLKKTKPANWILHKPPLPISFGTHHSKAMLLVYPQGIRVVVHTANLIHVDWNNKSQGLWTQDFPWKKANDTSTNIGFENDLVDYLRALKWPEFRVNLPVAGDVNINAAFFRKFDYSSSTVRLIGSVPGYHVGPNMKKWGHMKLRSVLEECVFEKQFCKSPLIYQFSSLGSLDEKWMSEFACSLSAGKADDGSQLGIGKPLIVWPTVEDVRCSIEGYAAGSCIPSPQKNVEKDFLRKYWSRWKADHVGRCRAMPHIKTFTRYNGQNIAWFLLTSSNLSKAAWGALQKNNTQLTIRSYELGVLFLPKTLQSVPQFSCTDKSRSNLDKLALGKNIKTKLVTLCWKGDEEKDPSAEVVRLPVPYQVPPQLYGPEDVPWSWDRRYTKKDVYGSVWPRHG

SEQ ID NO: 31976 - protein, 571 aa, Triticum aestivum
MHDDVLELIPGEYFMKYVNMSDERKSSTSVESHDLKKGKRHSEEDSVVAKRNRQVMEDEALARTSQESFAEESTSVTEVVSSLDSAGSSERNKERTHSVGPLKDVLPLTFRLMRVQRLPSWTNTSTVTIPDVIQGEVLLAVLSNYMVDMDWLLTACPSLRKVPHVLVLHGEDGASLERLKKTKPANWILHKPPLPISFGTHHSKAMLLVYPQGIRVVVHTANLIHVDWNNKSQGLWTQDFPWKKANDTSTNIGFENDLVDYLRALKWPEFRVNLPVAGDVNINAAFFRKFDYSSSTVRLIGSVPGYHVGPNMKKWGHMKLRSVLEECVFEKQFCKSPLIYQFSSLGSLDEKWMSEFACSLSAGKADDGSQLGIGKPLIVWPTVEDVRCSIEGYAAGSCIPSPQKNVEKDFLRKYWSRWKADHVGRCRAMPHIKTFTRYNGQNIAWFLLTSSNLSKAAWGALQKNNTQLTIRSYELGVLFLPKTLQSVPQFSCTDKSRSNLDKLALGKNIKTKLVTLCWKGDEEKDPSAEVVRLPVPYQVPPQLYGPEDVPWSWDRRYTKKDVYGSVWPRHG

SEQ ID NO: 31977 - DNA, 1458 bp, Triticum aestivum
ctccgtcattaccaaggtaattgcactgcccagcatgcatcttcgtcttaatccactctatcggtgcttcgtcttgcgtcccgtggcagcctgtgccgccatgcctgttgcctaatttcctactgatgcagtatcgcaatgcactcctgagctgacagttttagattttagcaagtgcctgtgcatctcccggcctgctcactcgcctctgttttgagttcctagctttcttttcgagaaattacaccctgctttgccgacagagattctcgctgctagtacgagattatttatttataaactgatgtctgcttcggcctctgcttttctgaattttgttgccacgcgtagtacagtagtactggaagattgcaagctctggttttctgaatattcgagctgcttcagatcgagttcagaagtttttctgaattccgtgccattattaatttggaagttgagagcgcaggaaggaagatgggctcgttggaggcgacgcgggcggagctggggctggcggtgctgtacctgaacaaggcggaggctcgggacaagatctgcagggccatccagtacggctccaagttcatcagcaacggccagcccggcaccgcgcagaacgtcgacaagtccaccaccttggctcgcaaggtcttccgcctcctcaagtgggtgaacgatctgcacgccctcatcagcccggccgccaaagggacccctctcacgctggtcttgcttgggaagtccaagaatgcgctgctgtcgactttcctgttcctggaccagttcgtgtggctaggaagatcggggatttaccagaacaaggagcgcacggaccgcatcgccaggatgtccctctactgctggatggcctcctccgtctgtgcaagtctagtcgagcttggtgagctcaagagactatcaaaggcgatgaggaagcgcgccaaggagcttaggggcgccgacaaatacgaggacgagcagtacctggggaagatgaagcagtcggacgaccggctgctggcgctggtgaaggcgggcatggacgtggtggtggccgtggggctgctgcagctggcgcccaagaagatcacccccagggtcaccggggccttcggcttcgtcacctccctcatctcctgctaccagcaactcccgtcccgcgctcccctggccaaactcaaggcgtgaggaacggacgctacaccatgcatgctagtccagatgctgcctccgcttaactcaagccgatgctgtgctccagcatggaatccgagatgttttattcctgtgtacgtagcagtatagaatgatgatgtcgattgtctgtacgtacggtttttatacatatacatgtacacggtatatgctatgaatagtagtaatggacatggtatgtctggtcgatcatgtgttggtgcatgctgcttatatatgccaacagtgttgccacttgcg

SEQ ID NO: 31978 - protein, 237 aa, Triticum aestivum
MGSLEATRAELGLAVLYLNKAEARDKICRAIQYGSKFISNGQPGTAQNVDKSTTLARKVFRLLKWVNDLHALISPAAKGTPLTLVLLGKSKNALLSTFLFLDQFVWLGRSGIYQNKERTDRIARMSLYCWMASSVCASLVELGELKRLSKAMRKRAKELRGADKYEDEQYLGKMKQSDDRLLALVKAGMDVVVAVGLLQLAPKKITPRVTGAFGFVTSLISCYQQLPSRAPLAKLKA

SEQ ID NO: 31979 - DNA, 557 bp, Triticum aestivum
tccggattaatatatgaggacgtcaaagttggtacaggcgattgcccaaaggatggtcagcaggttatatttcactatgtgggctacaacgaatcaggacgaaggatagatagcacctacatccagggttcgcctgccaaaattcgactaggcaacaaatcattagttccaggttttgaagaggggattcgggacatgaagccaggggggaagagaagactaattatacctcctgagcttggtcctcctgttgggccatcgacgttctttagcgcgaaacagtttgaagtattcgacgtcgagctactctcagtgcaggactgccagcggaggacaatagctttctactctgatgttgtctgcacttgatcatctggtctgttagtcccgaccggtgcagcattctcctcctacaaccctgtaggaaaaaattgttacctattgtttttcgagaaaacgcaggggacccatgcgtctcattccattgaaaagagagagtttgtaatttacaatcctcctaggaggtggtttcagacatcaagtagatgctagtgcac

SEQ ID NO: 31980 - protein, 122 aa, Triticum aestivum
SGLIYEDVKVGTGDCPKDGQQVIFHYVGYNESGRRIDSTYIQGSPAKIRLGNKSLVPGFEEGIRDMKPGGKRRLIIPPELGPPVGPSTFFSAKQFEVFDVELLSVQDCQRRTIAFYSDVVCT

SEQ ID NO: 31981 - protein, 57 aa, Triticum aestivum
MKPGGKRRLIIPPELGPPVGPSTFFSAKQFEVFDVELLSVQDCQRRTIAFYSDVVCT

SEQ ID NO: 31982 - DNA, 2552 bp, Triticum aestivum
aaagaaccggaaggagtaggacacacctttggtcttcgctccgccgctcagttcgacgaaatgccgcattcgctccctcctcaggcaggctgtctccgcgtacacatcccacccctccccccacccttcccttcatatggatacggtggagccgtggaggtcctccggcgagacactacgatggcgctcaaagaagctctgctgcgcgtgccgcgtgcgatatggccctgggtcctctgcgccgtattccaggagaaagtatgaggatagaggcctaggtcaaggcgaaagcgcccacctacgaggctgcactcttgcccagtgatcagggtactatcggtattgggcgaacgtttggttgggcgctgctcgcaaggtgctcgaccaaatgcccaggtagagtgtgtcgactgaaatattttttatcttcttctttatctcacaatggtattaagcttgatgttgaagtttttaggatctaaatcatctacttttcatatgataattctgtgaaaaatatcaaaaagtttctaagttttgtcatgatattctgccatttattttctacttctgatggatcactatttgaaggctgaattgtagttcattatcttgctgcttgatgtatatggattagttgtaagaattgcttgtttccagtggcaatttcaaatattgtatagcaggattagcactaaatataaattcaagtgcacagtcactgtaaataaaatgaaaaatctacgccactccaaaagaaaaggttgcttctgtgctgctttaaaatgtctgaatcccatgctgaacaatttaaccagatcagaataacaagtctgctaatctagaaataataatgcctctgctagtgacaggttgttaattttattatttccactggatcccatgctaaacaatgtaacccgatcagaagaacaagtctgctaatctaatctgcgagtgacaggtttagtattatatccggatctgaatttgaccaacctttcagcctttccattgtctggtccgaagatagaaaataagaaagcatgctggccctactattgctgctgataagcagccagaagcccagaaacgacatccccgttgatcatagacaaaagaagtattgaacttccggtactttttcagcgttgtcatcctaatttgattcctgcagatccaagatctggtgtttagccttgctccaagtaaagccatagcctccaaacagatggtgcatatgaatcaaggacaaggggaaacaagctatgcacacaactccagtatccagaacgctcagcagaacaggatgaagcccctgatagaagcggccatcattgacttgtgcggcagcaaaagcaccttgttccccgaaaagatgctgattgcggacttgggctgctcttatggcccaaatgcgctagcactggtatcgactgccgtcaaggccatcatcaaccactgccttcagttccagcaaccaccacccgaagtgtgtgtgctcctcaatgaccttcctgacaatgacttcaacacggtggtgaagagcctggccacgctccgtcaaaataacaacaagcttgttgttgtgactggtgtagcaccggggtcattttacgagaggctcttcactagtgactccttgcatcttgtctgctcgtccaacagcttgcattggctctccatggtgtgaatttatcacccttcaatggatctatccattgcattacttatttattttgtaaaagaaaccttatcctcgcaggctcccgaagatctgacaatgaaccagatccctgcgtacgacatggatgagcatgctaggcgtgaaagactccctacggtccgtgaagcatatgcacgccagttcaggaaagatttcatacttttcctggagctgagagccaaagaattggttccaggaggccgaatggttgtttctcttgtagggcggccttctaatgtaaaagcctccaaattctttcacctttgggaaactctagttcagattctaagtgtcatggccttagagggtgtgatcgacaaagcgaagtttgattctttctatgtgccggtgtatggaccctctggtgaagagctgagggagatcatccaagacgagggctccttttctatcagggatatgcgggtatatgacgctacaactgatatggacagcatgctcttcaccccaagctcgtttgtgaattatctgagagccatatttgagccgataatagtcgagcattttggagaggtcatggatgaatttgtgaggaccgcggagcggcgctggagcctcgagggcagcatgcaaaacgagcgtgctaggaatccatgagctatgctggctgtatcccttgtaaaggcatgattatcaggtactttatagtacatcacatttggttaggtttattgctttatttgaggtgacaatgtgtgccaacttcattgtgtaaactacatcctgtatggtgttctgcgaagatatcgacgctcaagagattaagaatgaactatcatttatatagattagcagactgttgttgccc

SEQ ID NO: 31983 - protein, 210 aa, Triticum aestivum
MDLSIALLIYFVKETLSSQAPEDLTMNQIPAYDMDEHARRERLPTVREAYARQFRKDFILFLELRAKELVPGGRMVVSLVGRPSNVKASKFFHLWETLVQILSVMALEGVIDKAKFDSFYVPVYGPSGEELREIIQDEGSFSIRDMRVYDATTDMDSMLFTPSSFVNYLRAIFEPIIVEHFGEVMDEFVRTAERRWSLEGSMQNERARNP

SEQ ID NO: 31984 - protein, 185 aa, Triticum aestivum
MNQIPAYDMDEHARRERLPTVREAYARQFRKDFILFLELRAKELVPGGRMVVSLVGRPSNVKASKFFHLWETLVQILSVMALEGVIDKAKFDSFYVPVYGPSGEELREIIQDEGSFSIRDMRVYDATTDMDSMLFTPSSFVNYLRAIFEPIIVEHFGEVMDEFVRTAERRWSLEGSMQNERARNP

SEQ ID NO: 31985 - protein, 177 aa, Triticum aestivum
MDEHARRERLPTVREAYARQFRKDFILFLELRAKELVPGGRMVVSLVGRPSNVKASKFFHLWETLVQILSVMALEGVIDKAKFDSFYVPVYGPSGEELREIIQDEGSFSIRDMRVYDATTDMDSMLFTPSSFVNYLRAIFEPIIVEHFGEVMDEFVRTAERRWSLEGSMQNERARNP

SEQ ID NO: 31986 - DNA, 1667 bp, Triticum aestivum
agaacatcctaatcgaaaaattacatatcgatatatcaccatctcttgccccttggaggttggtgcctgtctcaggtatagaaaacatttgcagtagttcaattgataacctaggtcttgaatcaagtaaggatgaggaatcaagcaatgctttgctaagcagggcttggtctcctggctggcgcaatgcggagaagacacttgaggatttcgtgtctcatggtctcctagattattcaaaagacagaatgaaggttgccggaactacaacatcgttattgtcaccatatcttcattatggtgaggtgagtgtaaggaaaatctatcaacttgtcagggtgcaacagatcaagtgggaaaatgaggggaaatccggagctggggagagtgttaacttgttcctgctgtcaattggtcttcgagaatattcacgttacttgtgtttcaactttccattcacacatgaaaggtcgctgctggggaacttgaaacactacccctggcgagcagacgaggaccggttcaaatcctggagacagggaatgacaggatacccgttagtagatgctggcatgagggagctatgggctactggctggacacataatcgtataagagtaatagtttcaagctttgctgtgaaatttctacaaattccgtggacttgggggatgaagtacttttgggatgtgctgttggatgctgatatagaaagtgatattcttggctggcagtacatatctgggtctttgcctgatggacacgagcttggtcgtcttgataatccagaggttcaaggtcaaaagtatgacccagatggtgaatacgtaagaacttggattccagagctagctagaatgccaggggaatggatccatcatccgtgggatgcaccgagctctatactagaagttgctggtgttgagctaggcttcaactatcctatgcccatagtagaacttcacacggctcgggagtgcttagatgatgccatctccacgatgtggcaattggatacagccgaaaaactagcagaattagatggtgaggttgttgaagacaacttgagccatatcaagagttttgatgtcccaaaagttgttttgaaggaactatctcctcactgtgatagagaagtgcccactgatgatggcaggaatcttgagttacaacctaaggaactgaagggcacaaataaacagaccatttgtgttgatgtaatcaaggcctcaaagatggaagacacaggctccatagcaaactctccgatatcaaggaaaagatccagcagtgggagtgtgtttaatgtcccatcttattcatcttcagtcgaagtgcactcacagaatcagcatcctggtggttatttagttgggtcgtcaaaatatatcctgcagaaagcagagaggaactgtgttggtaaggcagaagatgacgacagtgccgatagtggtacaaacacctcaagagcatccaagagacctgccgcctgacgagggtggttgtggatgacgtacacggctgaacaatggagcggacaagcgcaacactcggatcttcctgcaccccactctcatcctaagaaaaatttgtacattttgctgtctggttatttttgtcaaatctgttatatatatgtaacctataattagttgcaacacttggac

SEQ ID NO: 31987 - protein, 496 aa, Triticum aestivum
NILIEKLHIDISPSLAPWRLVPVSGIENICSSSIDNLGLESSKDEESSNALLSRAWSPGWRNAEKTLEDFVSHGLLDYSKDRMKVAGTTTSLLSPYLHYGEVSVRKIYQLVRVQQIKWENEGKSGAGESVNLFLLSIGLREYSRYLCFNFPFTHERSLLGNLKHYPWRADEDRFKSWRQGMTGYPLVDAGMRELWATGWTHNRIRVIVSSFAVKFLQIPWTWGMKYFWDVLLDADIESDILGWQYISGSLPDGHELGRLDNPEVQGQKYDPDGEYVRTWIPELARMPGEWIHHPWDAPSSILEVAGVELGFNYPMPIVELHTARECLDDAISTMWQLDTAEKLAELDGEVVEDNLSHIKSFDVPKVVLKELSPHCDREVPTDDGRNLELQPKELKGTNKQTICVDVIKASKMEDTGSIANSPISRKRSSSGSVFNVPSYSSSVEVHSQNQHPGGYLVGSSKYILQKAERNCVGKAEDDDSADSGTNTSRASKRPAA

SEQ ID NO: 31988 - protein, 414 aa, Triticum aestivum
MKVAGTTTSLLSPYLHYGEVSVRKIYQLVRVQQIKWENEGKSGAGESVNLFLLSIGLREYSRYLCFNFPFTHERSLLGNLKHYPWRADEDRFKSWRQGMTGYPLVDAGMRELWATGWTHNRIRVIVSSFAVKFLQIPWTWGMKYFWDVLLDADIESDILGWQYISGSLPDGHELGRLDNPEVQGQKYDPDGEYVRTWIPELARMPGEWIHHPWDAPSSILEVAGVELGFNYPMPIVELHTARECLDDAISTMWQLDTAEKLAELDGEVVEDNLSHIKSFDVPKVVLKELSPHCDREVPTDDGRNLELQPKELKGTNKQTICVDVIKASKMEDTGSIANSPISRKRSSSGSVFNVPSYSSSVEVHSQNQHPGGYLVGSSKYILQKAERNCVGKAEDDDSADSGTNTSRASKRPAA

SEQ ID NO: 31989 - protein, 316 aa, Triticum aestivum
MTGYPLVDAGMRELWATGWTHNRIRVIVSSFAVKFLQIPWTWGMKYFWDVLLDADIESDILGWQYISGSLPDGHELGRLDNPEVQGQKYDPDGEYVRTWIPELARMPGEWIHHPWDAPSSILEVAGVELGFNYPMPIVELHTARECLDDAISTMWQLDTAEKLAELDGEVVEDNLSHIKSFDVPKVVLKELSPHCDREVPTDDGRNLELQPKELKGTNKQTICVDVIKASKMEDTGSIANSPISRKRSSSGSVFNVPSYSSSVEVHSQNQHPGGYLVGSSKYILQKAERNCVGKAEDDDSADSGTNTSRASKRPAA

SEQ ID NO: 31990 - DNA, 759 bp, Triticum aestivum
caacgtgcttaccagaaatctcagggcccaagcttatgccgatcacttcaggatggcccttgactgtttcttcgccgtgtggtttgttgtggggaatgtgtgggtatttggtggacattcctctgcccatgacgctcccaacttatacaggttgtgtatagccttcctcacatttagctgcatcggctatgctatgcctttcattctgtgcgcattgatatgttgctgcctgccctgcataatctccctaatgagctttcgtgaagatctaaaccaaaacaaaggtgctactgcagaagcaatcaatgccttgagaacatacaagttcaaaacgaagaagtcccgtaacggcgaggggattgaagtcggcggccggagttgttgctgctggaacagacaaggagcggattgtttctgctgaagatgctatttgctgtatctgcctagcaagatactcgaacaatgatgatctccgagagcttccttgcacccacttcttccacaaagaatgcgtagacaaatggctcaagataaacgcactatgccccctctgcaaagctgagatagacagtggcccgacaactgctcctgccattggctttgggcgtcgccacagtgacaacagggtaggaaatgacatcgaatcacagctgtaactctgcattatccatcgagggtgcaacatgtccctgatgtggcttcgacagagcaatttgtaaattataaaatgaaatagttgacacaatgaacgggcccctc

SEQ ID NO: 31991 - protein, 139 aa, Triticum aestivum
NVLTRNLRAQAYADHFRMALDCFFAVWFVVGNVWVFGGHSSAHDAPNLYRLCIAFLTFSCIGYAMPFILCALICCCLPCIISLMSFREDLNQNKGATAEAINALRTYKFKTKKSRNGEGIEVGGRSCCCWNRQGADCFC

SEQ ID NO: 31992 - protein, 122 aa, Triticum aestivum
MALDCFFAVWFVVGNVWVFGGHSSAHDAPNLYRLCIAFLTFSCIGYAMPFILCALICCCLPCIISLMSFREDLNQNKGATAEAINALRTYKFKTKKSRNGEGIEVGGRSCCCWNRQGADCFC

SEQ ID NO: 31993 - protein, 75 aa, Triticum aestivum
MPFILCALICCCLPCIISLMSFREDLNQNKGATAEAINALRTYKFKTKKSRNGEGIEVGGRSCCCWNRQGADCFC

SEQ ID NO: 31994 - DNA, 742 bp, Triticum aestivum
tgtgttagctgtagatgttgaaagtgaagccttgtgcagtgttctttggatcttgtctaagccatgtgctacctttctgtggagatcgacaatgttgatgcccagtgtggtctgcagtggtattcaggaatcagggtgacgcatttatcttgtttgtatactgatgatggtcttttaattttgcagatgtgaaggatattaagtgtgtgattaattttgatttcccgacaactatcgaggattatattcataggataggtcgcactggccgtgccggtgctaccgggatggcattcacgttcttcacacattccaatgcaaaatattcaaggaatctcgttaagatcttgcgcgaagctgggcaggttgtgaatccagcgttagaagctatgtccaagtctgctggttctatgggaggaggaggtaatttccggtcaaggggccgaggtgggtttggtggtggtgggtatggtggtaaccgttctggatcaaattccattccagtacgtagaagatactaagacacaaacatgaaggtcaattctgatgctggaaaagacagagcgatgaagttttatctgtatacattaggcattaaattaaatgcatttttggggaatttctttgaaatccttctactgttagaagatcaaaacaaaagtcattcttgatatttttgtaccggagctcaaatggaaggaactcatgtatcagcgaccttggagattagaatagtcttgtc

SEQ ID NO: 31995 - protein, 77 aa, Triticum aestivum
MAFTFFTHSNAKYSRNLVKILREAGQVVNPALEAMSKSAGSMGGGGNFRSRGRGGFGGGGYGGNRSGSNSIPVRRRY

SEQ ID NO: 31996 - protein, 46 aa, Triticum aestivum
MKVNSDAGKDRAMKFYLYTLGIKLNAFLGNFFEILLLLEDQNKSHS

SEQ ID NO: 31997 - protein, 45 aa, Triticum aestivum
VLAVDVESEALCSVLWILSKPCATFLWRSTMLMPSVVCSGIQESG

SEQ ID NO: 31998 - DNA, 1041 bp, Triticum aestivum
aaatcccatgccagaaacgcggaacgacctgccgatggagccgtcgttcgggtccaactccgcgagcaccgaggaggcgtcgacccggcgcgtggccaaccgcatcatccgcgcgctgcagcaccacctccagctgctgcaccgcgccggcgcggacttcttcgtgctgggcgccacgggcaacgtgtacacggtgacgctggcgaccacgccggcgtgcacgtgccccgaccccggcgcgccctgcaagcacatcctcttcgtgctgctccgcgtcctcggcctgtccctcgacgaggcctgcgtgtggaggcagtcgctgcggccgtgccaggtcgcgcggctcgtcgccgcgcccacgtacccggaggtgctcgccggccctcgcgcccgggagaggttccaccagcagtgggcggcccacgcggcggctgcagccgcaaaggccgctgaccagcgccggcaggagtccgccggtccgtcgttgggccgcctcgacggcgccgcctgcccggtgtgcctcgaggagatggcgccgtcggcagaggcacaaggcggcgcggcggcaacggggccggcgccgctgctgacgtgcggcacctgccggaactcggtgcacgccgagtgcttcgcgcggtggaagcgcagccgcgcgaggcgggcggcgacgtgcgtcgtgtgccgcgcgaggtggcggaagccgagccgggaccgggagcaggaccagcagcagtacatgaacctgtcggcgtacatgaacgaggagaacgacgtggtggacatgcaggtcgaggacggggctccgtgtggcggatagaggaacttgttacggcggttcatatactgtatgaaatttaagaagctgtacagagggagtagcatcccaattcattcggactcgtgacatttctttcttatttttcttaggatctgacttattacatgcatgtacagaacttatatgtcaataaaatcactgtgttctgaagaaattatcgatgatgacagatatgccctctgtgataggaaacaatttttggg

SEQ ID NO: 31999 - protein, 271 aa, Triticum aestivum
NPMPETRNDLPMEPSFGSNSASTEEASTRRVANRIIRALQHHLQLLHRAGADFFVLGATGNVYTVTLATTPACTCPDPGAPCKHILFVLLRVLGLSLDEACVWRQSLRPCQVARLVAAPTYPEVLAGPRARERFHQQWAAHAAAAAAKAADQRRQESAGPSLGRLDGAACPVCLEEMAPSAEAQGGAAATGPAPLLTCGTCRNSVHAECFARWKRSRARRAATCVVCRARWRKPSRDREQDQQQYMNLSAYMNEENDVVDMQVEDGAPCGG

SEQ ID NO: 32000 - protein, 269 aa, Triticum aestivum
MPETRNDLPMEPSFGSNSASTEEASTRRVANRIIRALQHHLQLLHRAGADFFVLGATGNVYTVTLATTPACTCPDPGAPCKHILFVLLRVLGLSLDEACVWRQSLRPCQVARLVAAPTYPEVLAGPRARERFHQQWAAHAAAAAAKAADQRRQESAGPSLGRLDGAACPVCLEEMAPSAEAQGGAAATGPAPLLTCGTCRNSVHAECFARWKRSRARRAATCVVCRARWRKPSRDREQDQQQYMNLSAYMNEENDVVDMQVEDGAPCGG

SEQ ID NO: 32001 - protein, 260 aa, Triticum aestivum
MEPSFGSNSASTEEASTRRVANRIIRALQHHLQLLHRAGADFFVLGATGNVYTVTLATTPACTCPDPGAPCKHILFVLLRVLGLSLDEACVWRQSLRPCQVARLVAAPTYPEVLAGPRARERFHQQWAAHAAAAAAKAADQRRQESAGPSLGRLDGAACPVCLEEMAPSAEAQGGAAATGPAPLLTCGTCRNSVHAECFARWKRSRARRAATCVVCRARWRKPSRDREQDQQQYMNLSAYMNEENDVVDMQVEDGAPCGG

SEQ ID NO: 32002 - DNA, 1601 bp, Triticum aestivum
tttttttcttgtaaatttccgaatggaaaactagtttttcttcccaaaaaacccacgaacacgagggttttgcccccgtcgacccacggtcgccattggccactctgctccgccgctccatgctcctccctagcctcctccgcggcgcccacctgctgcggccgtgccaccctcctcgccgccacctctcccgcctcctagaccgctacggcttcgtgccgccggcctccctgacccccaccgcgaaagagatctcccacggcacaggcgccgccgccgaccagaagcgtcggaccaagaagcccccctaccggccgccctcttcgctggaccgcggagaccgcccggcctcccactccgacctccccttcgatttccgcttcagctacacggagagctccccggacgccaagcccatcgggctccgcgagcccaagtactcccctttcggccccggtcgcctcgaccgcccctggaccggcctctgcgcgcccgccgtcgacaccacgctccggagcgtcgacgccgaggaccccgcccccgccgccgagaaggacctggaggaggcccggcggcgcgagcgagagcgcgtgctcggcgagccgctcacccccgcggagcgctccttcttggtcgacaaatgccagaagaaccgcaccaagcggcagatcaatctcgggagagatgggctcactcataacatgctgaatgacattcacaaccactggaagcatggcgagggggtcagggtgaaatgccttggtgtgccgacggttgatatgcaaaatgtgtgccgtgagctcgaggataaaactggtggccttatcatccacaggcatggtggccagttaatactatacagagggaggcattatcatccaaagaaaagacctgttattccgttgatgttatggaagccagctgaaccgatctacccaaggctaattaaaacaacaatagaagggctgacagttcaggagacaaaggaaatgaggaagaagggcctacatgctcctgtcttgacaaagcttgcaaagaacgggtattatgctagtctcgtgtcgatggttcgagatggttttctggccgatgaattggttcgtatagattgtaaaggattgccaaagagtgattatcggaagattggagtcaagctcagggaccttgttccttgtattcttgtgtcttttgacaaggagcaaattattgtttggagggggaaagaccatgatgaaagcatacaggataatatgcacaaggcattcccttcagttcttcaattagagagtgcagcaggagagaatgaacaggaagaagcatcaagtgagagtgtagcaggagagaatgaacatggtgaaaaagaagaaacatcagttgactgttcttctgatgagtggtctgagatcagtagctctgacgatgtgccagatgataagtaggacatttccagggtagaatatctttagatcgatctgacatatccagaggactcaatctgccaccaggtgttcacaaagttggcatgtcatccaacaccaccaacttgtccattcttaccagtgatgattatgttctatcactagtcgcaaccaaatccagtt

SEQ ID NO: 32003 - protein, 439 aa, Triticum aestivum
MLLPSLLRGAHLLRPCHPPRRHLSRLLDRYGFVPPASLTPTAKEISHGTGAAADQKRRTKKPPYRPPSSLDRGDRPASHSDLPFDFRFSYTESSPDAKPIGLREPKYSPFGPGRLDRPWTGLCAPAVDTTLRSVDAEDPAPAAEKDLEEARRRERERVLGEPLTPAERSFLVDKCQKNRTKRQINLGRDGLTHNMLNDIHNHWKHGEGVRVKCLGVPTVDMQNVCRELEDKTGGLIIHRHGGQLILYRGRHYHPKKRPVIPLMLWKPAEPIYPRLIKTTIEGLTVQETKEMRKKGLHAPVLTKLAKNGYYASLVSMVRDGFLADELVRIDCKGLPKSDYRKIGVKLRDLVPCILVSFDKEQIIVWRGKDHDESIQDNMHKAFPSVLQLESAAGENEQEEASSESVAGENEHGEKEETSVDCSSDEWSEISSSDDVPDDK

SEQ ID NO: 32004 - protein, 245 aa, Triticum aestivum
MLNDIHNHWKHGEGVRVKCLGVPTVDMQNVCRELEDKTGGLIIHRHGGQLILYRGRHYHPKKRPVIPLMLWKPAEPIYPRLIKTTIEGLTVQETKEMRKKGLHAPVLTKLAKNGYYASLVSMVRDGFLADELVRIDCKGLPKSDYRKIGVKLRDLVPCILVSFDKEQIIVWRGKDHDESIQDNMHKAFPSVLQLESAAGENEQEEASSESVAGENEHGEKEETSVDCSSDEWSEISSSDDVPDDK

SEQ ID NO: 32005 - protein, 219 aa, Triticum aestivum
MQNVCRELEDKTGGLIIHRHGGQLILYRGRHYHPKKRPVIPLMLWKPAEPIYPRLIKTTIEGLTVQETKEMRKKGLHAPVLTKLAKNGYYASLVSMVRDGFLADELVRIDCKGLPKSDYRKIGVKLRDLVPCILVSFDKEQIIVWRGKDHDESIQDNMHKAFPSVLQLESAAGENEQEEASSESVAGENEHGEKEETSVDCSSDEWSEISSSDDVPDDK

SEQ ID NO: 32006 - DNA, 1147 bp, Triticum aestivum
gtcctcccggcaccgcacaccgcaacctctaagctcaaaccacaacgcgcacccacacaaagccgagagcgcgctctcgctcgctcgccggcggcgacagaggacaggcatggccgtgtacatccgcctggacgacgccgtgcgcgcgcgcctccgcggggacgggggtggcaccagcagcggcagcgaccacgacgcctccgcctgcctctccgacctcgtccaggccttcctcgagacggacgccgccggcaacggggacgacgcggccgggccggccccgaaaggacgtgacgggtacgactccgacgacgcggacggcgccgcggaggcggccgcgtccgtgcgggagctgctcgacccgccggccgcggaggaccccttccggatcaggctggcggccgccgtgtccgcggcgctggacgcggaggcgccgctgcgggggcacggcgcggcgttccggcgcgcggtgatgcggcggctgcgtgccgctgggtacgacgccggcgtgtgcaggtcgcgctgggagacgtgcggcaacctgacggccgggacgtacgagtacatcgacgtggtcgtgccggccgcggggaaggcggcgaggtacattgtggacgcggacttccgggcggggctggaggtggcgcgcgcgacggcggagtacgcggtcgtcgtggccgcggtgccggccaaggcggtggtcgcgcgggaggaggccgtggggcgcgccgtgcgcgtggccgccgacgccgcgcgccggtcgctccgggcgcacggcctgcacgtgccgccgtggcgcaagagccggtacatgctcgccaagtggctggggccctacaagcggtcgccgtcctcctcatcatcggcgtccggcgcaatgccggcgcccggcggccccgggatggacatcatcaagtgccgcgccgtcgggttcttcccgtcccagacggccgcgccggcggcgaggatcaagtaaaagctcctcggcaccgctaattctccgcgcgcgtctctggaagatgtcatagtctgataagtagatgtagagagatgatcgatgagttggagcgtgcctcgaattcgtttttgtacaaacatttttggtctacctagactatgaaaggagcaaattgttggtcaaaaaaac

SEQ ID NO: 32007 - protein, 324 aa, Triticum aestivum
SSRHRTPQPLSSNHNAHPHKAESALSLARRRRQRTGMAVYIRLDDAVRARLRGDGGGTSSGSDHDASACLSDLVQAFLETDAAGNGDDAAGPAPKGRDGYDSDDADGAAEAAASVRELLDPPAAEDPFRIRLAAAVSAALDAEAPLRGHGAAFRRAVMRRLRAAGYDAGVCRSRWETCGNLTAGTYEYIDVVVPAAGKAARYIVDADFRAGLEVARATAEYAVVVAAVPAKAVVAREEAVGRAVRVAADAARRSLRAHGLHVPPWRKSRYMLAKWLGPYKRSPSSSSSASGAMPAPGGPGMDIIKCRAVGFFPSQTAAPAARIK

SEQ ID NO: 32008 - protein, 288 aa, Triticum aestivum
MAVYIRLDDAVRARLRGDGGGTSSGSDHDASACLSDLVQAFLETDAAGNGDDAAGPAPKGRDGYDSDDADGAAEAAASVRELLDPPAAEDPFRIRLAAAVSAALDAEAPLRGHGAAFRRAVMRRLRAAGYDAGVCRSRWETCGNLTAGTYEYIDVVVPAAGKAARYIVDADFRAGLEVARATAEYAVVVAAVPAKAVVAREEAVGRAVRVAADAARRSLRAHGLHVPPWRKSRYMLAKWLGPYKRSPSSSSSASGAMPAPGGPGMDIIKCRAVGFFPSQTAAPAARIK

SEQ ID NO: 32009 - protein, 167 aa, Triticum aestivum
MRRLRAAGYDAGVCRSRWETCGNLTAGTYEYIDVVVPAAGKAARYIVDADFRAGLEVARATAEYAVVVAAVPAKAVVAREEAVGRAVRVAADAARRSLRAHGLHVPPWRKSRYMLAKWLGPYKRSPSSSSSASGAMPAPGGPGMDIIKCRAVGFFPSQTAAPAARIK

SEQ ID NO: 32010 - DNA, 1231 bp, Triticum aestivum
actcgacccagccacagcctggttgcttggcgtcctcgttgccttacccttccaaacgagctccatcgtctccactttccacagcccacctccacctaccgcagcagcaagggcccttgtcgcgcggcggcggcggggaggatgtcatcgccgccggcaccggtattcgagaggctggccgggatccggcccctcgccgagtccggccgcttcaaggcatggttcctggaccagttcggtgttcttcatgacgggaagaaaccctacccgggcgccattttggcattggagaagctcgctgggaatggcgccaagatggtgataatcagcaattcctcaaggcggtcgtctgtaaccatggagaagctgcagagccttgggtttgacacgtcttgtttcctcggggcgatcaccagcggggaactcacccatcagtaccttgacaagagggatgacccatggtttgcatctctgggaaggaagtgtgtccatctgacatggggcaatcgaggtgcaatttctctggagggacttggtttgcaagttgtgaacaatgttgacgatgcagagtttatactagcccatggtactgaagccctgggtttaccttctggtgatccactttcgaaaagtcttgaggagcttgagcagattctagtgcttggtatacaaaagcgacttccaatggtggtagctaatccagattatgtcactgttgaagctcgaaacctgcgtgtcatgcctggcaccctggcagcaaaatacgagagtcttggtggtgaagtaaaatggatggggaagcctgataaggttatctatacatcagcaatgtccctagcaggtgttgaagcacatgaatgtatcaccgtaggtgattcgctgcaccacgacatcaaaggcgcaaatggagccggaatggcatctgcattcatcactggaggtatccatgcggctgaacttggactcggtgaatttggagaaactgctggagatgatgccgtcagtgcgttgtgttgcaagcatagctcatacccatcttacgttttgccttcatttgcatggtagaaaacacggtttagattcaggcacaccgtttaaacgggattgcggtctaggataatgatgctcttttcagttgtcaaagtgagcatcaagaccgtggaggtgtttcagtgccgcgctaaattattagcgttatgcattttccggaaataaaatatctgttgaaatg

SEQ ID NO: 32011 - protein, 354 aa, Triticum aestivum
TRPSHSLVAWRPRCLTLPNELHRLHFPQPTSTYRSSKGPCRAAAAGRMSSPPAPVFERLAGIRPLAESGRFKAWFLDQFGVLHDGKKPYPGAILALEKLAGNGAKMVIISNSSRRSSVTMEKLQSLGFDTSCFLGAITSGELTHQYLDKRDDPWFASLGRKCVHLTWGNRGAISLEGLGLQVVNNVDDAEFILAHGTEALGLPSGDPLSKSLEELEQILVLGIQKRLPMVVANPDYVTVEARNLRVMPGTLAAKYESLGGEVKWMGKPDKVIYTSAMSLAGVEAHECITVGDSLHHDIKGANGAGMASAFITGGIHAAELGLGEFGETAGDDAVSALCCKHSSYPSYVLPSFAW

SEQ ID NO: 32012 - protein, 307 aa, Triticum aestivum
MSSPPAPVFERLAGIRPLAESGRFKAWFLDQFGVLHDGKKPYPGAILALEKLAGNGAKMVIISNSSRRSSVTMEKLQSLGFDTSCFLGAITSGELTHQYLDKRDDPWFASLGRKCVHLTWGNRGAISLEGLGLQVVNNVDDAEFILAHGTEALGLPSGDPLSKSLEELEQILVLGIQKRLPMVVANPDYVTVEARNLRVMPGTLAAKYESLGGEVKWMGKPDKVIYTSAMSLAGVEAHECITVGDSLHHDIKGANGAGMASAFITGGIHAAELGLGEFGETAGDDAVSALCCKHSSYPSYVLPSFAW

SEQ ID NO: 32013 - protein, 249 aa, Triticum aestivum
MVIISNSSRRSSVTMEKLQSLGFDTSCFLGAITSGELTHQYLDKRDDPWFASLGRKCVHLTWGNRGAISLEGLGLQVVNNVDDAEFILAHGTEALGLPSGDPLSKSLEELEQILVLGIQKRLPMVVANPDYVTVEARNLRVMPGTLAAKYESLGGEVKWMGKPDKVIYTSAMSLAGVEAHECITVGDSLHHDIKGANGAGMASAFITGGIHAAELGLGEFGETAGDDAVSALCCKHSSYPSYVLPSFAW

SEQ ID NO: 32014 - DNA, 1159 bp, Triticum aestivum
accgaacaagcgagtaagataagaaccgcttagctgcaattcgtagcacatcggcttccaagttccaacgatctcgtagacactctctcgtttcaattctcgagcgacttttaatctttcaaagtgcaatggctgctgcgaatgcccccttcgctctcagtcgcctctccccggccgcgcgcctgccgatccgtgcctggagagccgcgaggccggccccggtctggaccgggagaacccgcccgctctccgtggcctccgcggcgcaagagaatagggacaactccgtcgacgtccaagtcagccaggcccagaacggcggcaaccagcagggcaacgctgtccagcgccggccgcgccgcgccggatttgacatctccccgttcggtaagtcctcgttcccgatgttcttttacacgttattttgttgcaggtgtaggagaagcagagcatgagggtttactttaaagaatgcagggctagtggacccgatgtcgccgatgaggacgatgcggcagatgctggacacgatggaccggctgttcgatgacgccgtagggttccccacggcgcggcgctcgccggcggcggctagcgagatgccgcggatgccgtgggacatcatggaggacgacaaggaggtgaagatgcggttcgacatgcccgggctgtcgcggaaggaggtgaaggtgatggtggagggcgacgcgctcgtcatccgcggcgagcacaagaaggaggccggcgaagggcaggtcgaaggcggcgacgggtggtggaaggagcgcagcgtgagctcctacgacatgcgcctggctctgccagacgagtgcgacaagagccaggtgcgcgccgagctcaagaacggcgtgctgctcgtgtccgtgcccaagagggagaccgagcgcaaggtcatcgacgtgcaggtccagtgatgagtgtgtgtgagactctacccagtaccctgcatctgaggctttaagatttcagctgtccgaggtgtgaccgtgcgagtgcgtgctctttgtaggcgtagtgtgccgttcttctccgatcctctctgcgcgcacgttgcgcagaacatgtcgtgctgtatgtaaatgtacttggcaaatctatgaataaatgttcggctgcttgatcagctggatacacttcg

SEQ ID NO: 32015 - protein, 147 aa, Triticum aestivum
MSPMRTMRQMLDTMDRLFDDAVGFPTARRSPAAASEMPRMPWDIMEDDKEVKMRFDMPGLSRKEVKVMVEGDALVIRGEHKKEAGEGQVEGGDGWWKERSVSSYDMRLALPDECDKSQVRAELKNGVLLVSVPKRETERKVIDVQVQ

SEQ ID NO: 32016 - protein, 144 aa, Triticum aestivum
MRTMRQMLDTMDRLFDDAVGFPTARRSPAAASEMPRMPWDIMEDDKEVKMRFDMPGLSRKEVKVMVEGDALVIRGEHKKEAGEGQVEGGDGWWKERSVSSYDMRLALPDECDKSQVRAELKNGVLLVSVPKRETERKVIDVQVQ

SEQ ID NO: 32017 - protein, 141 aa, Triticum aestivum
MRQMLDTMDRLFDDAVGFPTARRSPAAASEMPRMPWDIMEDDKEVKMRFDMPGLSRKEVKVMVEGDALVIRGEHKKEAGEGQVEGGDGWWKERSVSSYDMRLALPDECDKSQVRAELKNGVLLVSVPKRETERKVIDVQVQ

SEQ ID NO: 32018 - DNA, 1330 bp, Triticum aestivum
aaattccaaaaccctcgcctggttcgctggttttcactcgaaggacgacaatgatggcggcgcagccgacggctaacccgggggtccgcctcggctggaaggcccccggcgctctagcatccccgccgcgcctggctctgtctcgctccgccgcggccccgctcgcgtcacacagggttggcagaggaaagttttcagctgcggccatcactactgatgattatcttccaatgcgaagtactgaagtgaaaaatcggacatcagtagatggaatcaaaagtctcagactaatcacagcggtcaaaaccccctatttgccagatggaagatttgatcttgaagcatatgattctttgataaacacgcaaataaacgggggcgccgaaggtgtaattgttggtggaacaacaggagaaggtcatcttatgagctgggatgaacacatcatgctcatcgggcacactgttaactgctttggaactaacattaaagtgataggcaacacgggaagtaactcaactagagaagcgattcacgcttcagagcagggatttgctgttggcatgcatgcagctctccatgtcaatccttactatgggaagacctcaactgcaggactgatctctcatttcgacgaagtcctcccgatgggtccaacaatcatttacaatgtgccatccaggactggtcaggacatacctcctgcagtcattgaggcactctcaagttatccaaacatggcaggagtgaaagaatgtgttggacatgaacgagtgaagtgctacacagacaaaggtataacaatatggagtggcaatgatgacgaatgccatgattcaaggtggaagtatggtgctactggagtcatttctgtgactagcaaccttgttcctggtctcatgcgcagtctcatgtttgaaggggagaatgcggccctaaatgagaagctactgcctctgatgaaatggttattttctgagcctaatccgattggtctcaacactgccctggctcagctcggtgtagtgaggcctgttttcaggagaccgtatgcccctctctctcttgaaaagaggaccgagtttgtccggattgttgaagcaatcgggcgggagaactttgtgggacagaaagaggtgcgggttctggatgatgatgattttgtgttgatcagtaggtattaaataagtgagttcattgtgcgctatgtacgttacgaacagcggcggttctccttttagacatttcatcagttgttcaacagccatatgttttatcttttctgtgattggaagttaacttggaaccctgtggggtttctttgcaccct

SEQ ID NO: 32019 - protein, 393 aa, Triticum aestivum
IPKPSPGSLVFTRRTTMMAAQPTANPGVRLGWKAPGALASPPRLALSRSAAAPLASHRVGRGKFSAAAITTDDYLPMRSTEVKNRTSVDGIKSLRLITAVKTPYLPDGRFDLEAYDSLINTQINGGAEGVIVGGTTGEGHLMSWDEHIMLIGHTVNCFGTNIKVIGNTGSNSTREAIHASEQGFAVGMHAALHVNPYYGKTSTAGLISHFDEVLPMGPTIIYNVPSRTGQDIPPAVIEALSSYPNMAGVKECVGHERVKCYTDKGITIWSGNDDECHDSRWKYGATGVISVTSNLVPGLMRSLMFEGENAALNEKLLPLMKWLFSEPNPIGLNTALAQLGVVRPVFRRPYAPLSLEKRTEFVRIVEAIGRENFVGQKEVRVLDDDDFVLISRY

SEQ ID NO: 32020 - protein, 377 aa, Triticum aestivum
MMAAQPTANPGVRLGWKAPGALASPPRLALSRSAAAPLASHRVGRGKFSAAAITTDDYLPMRSTEVKNRTSVDGIKSLRLITAVKTPYLPDGRFDLEAYDSLINTQINGGAEGVIVGGTTGEGHLMSWDEHIMLIGHTVNCFGTNIKVIGNTGSNSTREAIHASEQGFAVGMHAALHVNPYYGKTSTAGLISHFDEVLPMGPTIIYNVPSRTGQDIPPAVIEALSSYPNMAGVKECVGHERVKCYTDKGITIWSGNDDECHDSRWKYGATGVISVTSNLVPGLMRSLMFEGENAALNEKLLPLMKWLFSEPNPIGLNTALAQLGVVRPVFRRPYAPLSLEKRTEFVRIVEAIGRENFVGQKEVRVLDDDDFVLISRY

SEQ ID NO: 32021 - protein, 376 aa, Triticum aestivum
MAAQPTANPGVRLGWKAPGALASPPRLALSRSAAAPLASHRVGRGKFSAAAITTDDYLPMRSTEVKNRTSVDGIKSLRLITAVKTPYLPDGRFDLEAYDSLINTQINGGAEGVIVGGTTGEGHLMSWDEHIMLIGHTVNCFGTNIKVIGNTGSNSTREAIHASEQGFAVGMHAALHVNPYYGKTSTAGLISHFDEVLPMGPTIIYNVPSRTGQDIPPAVIEALSSYPNMAGVKECVGHERVKCYTDKGITIWSGNDDECHDSRWKYGATGVISVTSNLVPGLMRSLMFEGENAALNEKLLPLMKWLFSEPNPIGLNTALAQLGVVRPVFRRPYAPLSLEKRTEFVRIVEAIGRENFVGQKEVRVLDDDDFVLISRY

SEQ ID NO: 32022 - DNA, 610 bp, Triticum aestivum
acataggattttatttgtgaattttaccgatggctgacttctttcaaattctttcagatgccatcactgtggtactaatgcacataatacacctatgatgcgtcgtggacctgaagggccaagaacattatgcaatgcttgcggcctcatgtgggcaaataagggcatgttgagggacctatcaaagtctactcccccatctcttcaaatggtgtcaacaggtccaaatgatagtcagaatggaaacaccctctctcagcagaatggaaacaccctctctcagcagaatggaagcaccctctctcagcagaatggaaatgctgccatagtgccctttgccgagcaacaaaacccagcaccagcgaccgatgccaacggtcacgaccatggttcttcgacatgatgagcgggattgctgcttgtttttaatggtggatggatgaaggagcgccatcctctttgagagtgaacttcctgtgtaggcgaaaactgcttgtaatataacctgagagttaggctgtcggtattagtgtcgtctagggtttaaagagctgctgtttttatctgatggaatcgtgcttaccgctgttgttgtggctatataacaatt

SEQ ID NO: 32023 - protein, 102 aa, Triticum aestivum
MMRRGPEGPRTLCNACGLMWANKGMLRDLSKSTPPSLQMVSTGPNDSQNGNTLSQQNGNTLSQQNGSTLSQQNGNAAIVPFAEQQNPAPATDANGHDHGSST

SEQ ID NO: 32024 - protein, 101 aa, Triticum aestivum
MRRGPEGPRTLCNACGLMWANKGMLRDLSKSTPPSLQMVSTGPNDSQNGNTLSQQNGNTLSQQNGSTLSQQNGNAAIVPFAEQQNPAPATDANGHDHGSST

SEQ ID NO: 32025 - protein, 84 aa, Triticum aestivum
MWANKGMLRDLSKSTPPSLQMVSTGPNDSQNGNTLSQQNGNTLSQQNGSTLSQQNGNAAIVPFAEQQNPAPATDANGHDHGSST

SEQ ID NO: 32026 - DNA, 1323 bp, Triticum aestivum
acacacatcccacccacacacatcatccatccacccgtagaaacatcgagcatacacttggcgacatccagctagctagctctcgtcggcgtcgacgatggcggggaggcggcaggcagcctggtgcctggtggtcatcgctctggcagtgacgctggcggtggcgtcggcgcagcccgtgcagccgagggtgggcgggccggggaagaaaggcggcaagatgccgccgggcaagttcgagacggtgaccttcgccaagaacaacaagcgcaagtacgaggtggcctgcaccgacaaccgcggcccgccctgcgtcgtctcctgccccaagacctgccccaacaagtgcctcgccttctgcgagtactgcatgaccttctgcatgtgcgacatgttcccgggcacgtcgtgcggggacccgcgcttcacgggcggcgacggcaacaccttctacttccacggaaagaaggaccaggacttttgcatcgtctctgacaaggacctccacatcaacgcgcacttcattggcaaccacaaccctgatatgaagcgtgacttcacgtgggtgcaggccctcggtgtcaccttcgtccatggcggcgccgaccaccgcctctacgtgggtgccaagaaggtcgtcgagtgggacgaggaggaggaccatgttcaaatcaccctcgatggggtgcccgtggaggtggaggccggcaagaatgcccaatgggtctctagggccatgccggggctctccgtcactcgcaccgacacggtgaacaccgtcgtcgtggagctcgacggcgtgttcagcatctcggccaacgccgtgcccatcactgacgaggactcccggatccacaactacgggaagaccaaggacagcctcatgcacctcgacctagggttcaagttccacacccttactaacggcgtcgacggcgtgctcggccagacctaccgcttagactacatcagcaaggtcaacgtcacggccaagatgcccatcatgggcggcgcgcccaagtacctctcggccagcctcttctccacagactgcgccgtctccagcttccaccgtaacggtgacgccgccatcgagacgttcgcctcataaaccattggttcatggaacctacacgagaaataaacaaatatcaaccggaagggagtgatatcatctccatcatgttgttgtggagtatatatgtgtgcatctcacacgattgaggttgtgaaataagtttcaagtcaataattgaagcaaagtgtgtaccatgttagtaacttaacatttttttaagaaaagaagcatcgtgcttacatagt

SEQ ID NO: 32027 - protein, 337 aa, Triticum aestivum
MAGRRQAAWCLVVIALAVTLAVASAQPVQPRVGGPGKKGGKMPPGKFETVTFAKNNKRKYEVACTDNRGPPCVVSCPKTCPNKCLAFCEYCMTFCMCDMFPGTSCGDPRFTGGDGNTFYFHGKKDQDFCIVSDKDLHINAHFIGNHNPDMKRDFTWVQALGVTFVHGGADHRLYVGAKKVVEWDEEEDHVQITLDGVPVEVEAGKNAQWVSRAMPGLSVTRTDTVNTVVVELDGVFSISANAVPITDEDSRIHNYGKTKDSLMHLDLGFKFHTLTNGVDGVLGQTYRLDYISKVNVTAKMPIMGGAPKYLSASLFSTDCAVSSFHRNGDAAIETFAS

SEQ ID NO: 32028 - protein, 296 aa, Triticum aestivum
MPPGKFETVTFAKNNKRKYEVACTDNRGPPCVVSCPKTCPNKCLAFCEYCMTFCMCDMFPGTSCGDPRFTGGDGNTFYFHGKKDQDFCIVSDKDLHINAHFIGNHNPDMKRDFTWVQALGVTFVHGGADHRLYVGAKKVVEWDEEEDHVQITLDGVPVEVEAGKNAQWVSRAMPGLSVTRTDTVNTVVVELDGVFSISANAVPITDEDSRIHNYGKTKDSLMHLDLGFKFHTLTNGVDGVLGQTYRLDYISKVNVTAKMPIMGGAPKYLSASLFSTDCAVSSFHRNGDAAIETFAS

SEQ ID NO: 32029 - protein, 246 aa, Triticum aestivum
MTFCMCDMFPGTSCGDPRFTGGDGNTFYFHGKKDQDFCIVSDKDLHINAHFIGNHNPDMKRDFTWVQALGVTFVHGGADHRLYVGAKKVVEWDEEEDHVQITLDGVPVEVEAGKNAQWVSRAMPGLSVTRTDTVNTVVVELDGVFSISANAVPITDEDSRIHNYGKTKDSLMHLDLGFKFHTLTNGVDGVLGQTYRLDYISKVNVTAKMPIMGGAPKYLSASLFSTDCAVSSFHRNGDAAIETFAS

SEQ ID NO: 32030 - DNA, 1482 bp, Triticum aestivum
gttgatgctcgacacctttgtatcttgtgtttggtgtgtgctgtgtgcgatggtagtgtgtgtttgttcggctttcggttgtaatcgatggttgtaatcggtgatggttactttataatactccagcctgtggacaacaacgcttgcttgctctgattttgatgtgataaatttgagccagcctagagctgcgggagctgctccccgctgaatcctaggccgctgcgaggtgtcgtcaggccatggccaccaagatgcgcaagctgccgagcgccgttttgctgctcctcttggtcgcgaacctgggatgggcatgggcgctgatcccttcctcccccgcaggcctctccgccaggcgctacgactccatcttcagcttcggcgactcctacgccgaaaccggcaacaaccccgtcgtcttcgccgccaactccgtcttcaaccttgtcacgcgcccaccctacggctccaccttcttcggccgccccaccggccgcaactccgacggccgcctcatcatcgacttcatcgctcagcgcctcggcctgccgctcgtcccgccgtccctggcgcacaacgggagcttccgccaaggcgccaacttcgccgtcgggggcgccaccgctctggacgccgctttcttccacgacgggtccgatcccggcaacaagttccctctcaacaccagcttgggcgtccagctgcagtggttcgaggctctcaagccttccctctgccgcacgacccaagagtgcgaggccttcttcggcagatccctcttcttcgtgggcgaattcggggtcaacgactaccacttctccttccccaccaagagcctgcaagagatcacggcgttcgttccggaagtgatcagggccatctcaatggcaatcgagaggctgatcaagcacggggccacgagtttcgtcgttcccgggacaatcccgtcgggatgcacgccgcacattctcagctccttcgccaaagacgaccccgcggaatacaactccaccaccgactgcctggaagattacaacaagctagggatgcaccacaacctgctgctgcaggaggccctggagaagcttcggggcaggcacccggacgccatgatcgtctacgccgacctcttcggccccatcattgacatggttgagtcacctcgcaagtatgggtttgaagatgttcttaccaactgttgcggagggcctggggcacttatctgcggcgaccaaggtgcacatgtatgtgagaaaccggctgctcgtctgttctgggatgtcgcgcacttgacggaggcggcttaccgctacatcgccgatggctggctgggcagcatagactcccctgcaactgcaagagagagcaggtatcagttagtgaggtagcagaagctgccctgattcatggactgatagctatctgaagtctggcctgtctgaactgaaaaacactggaattgaaatggaagcatgcaagttt

SEQ ID NO: 32031 - protein, 381 aa, Triticum aestivum
MATKMRKLPSAVLLLLLVANLGWAWALIPSSPAGLSARRYDSIFSFGDSYAETGNNPVVFAANSVFNLVTRPPYGSTFFGRPTGRNSDGRLIIDFIAQRLGLPLVPPSLAHNGSFRQGANFAVGGATALDAAFFHDGSDPGNKFPLNTSLGVQLQWFEALKPSLCRTTQECEAFFGRSLFFVGEFGVNDYHFSFPTKSLQEITAFVPEVIRAISMAIERLIKHGATSFVVPGTIPSGCTPHILSSFAKDDPAEYNSTTDCLEDYNKLGMHHNLLLQEALEKLRGRHPDAMIVYADLFGPIIDMVESPRKYGFEDVLTNCCGGPGALICGDQGAHVCEKPAARLFWDVAHLTEAAYRYIADGWLGSIDSPATARESRYQLVR

SEQ ID NO: 32032 - protein, 377 aa, Triticum aestivum
MRKLPSAVLLLLLVANLGWAWALIPSSPAGLSARRYDSIFSFGDSYAETGNNPVVFAANSVFNLVTRPPYGSTFFGRPTGRNSDGRLIIDFIAQRLGLPLVPPSLAHNGSFRQGANFAVGGATALDAAFFHDGSDPGNKFPLNTSLGVQLQWFEALKPSLCRTTQECEAFFGRSLFFVGEFGVNDYHFSFPTKSLQEITAFVPEVIRAISMAIERLIKHGATSFVVPGTIPSGCTPHILSSFAKDDPAEYNSTTDCLEDYNKLGMHHNLLLQEALEKLRGRHPDAMIVYADLFGPIIDMVESPRKYGFEDVLTNCCGGPGALICGDQGAHVCEKPAARLFWDVAHLTEAAYRYIADGWLGSIDSPATARESRYQLVR

SEQ ID NO: 32033 - protein, 279 aa, Triticum aestivum
MGMGADPFLPRRPLRQALRLHLQLRRLLRRNRQQPRRLRRQLRLQPCHAPTLRLHLLRPPHRPQLRRPPHHRLHRSAPRPAARPAVPGAQRELPPRRQLRRRGRHRSGRRFLPRRVRSRQQVPSQHQLGRPAAVVRGSQAFPLPHDPRVRGLLRQIPLLRGRIRGQRLPLLLPHQEPARDHGVRSGSDQGHLNGNREADQARGHEFRRSRDNPVGMHAAHSQLLRQRRPRGIQLHHRLPGRLQQARDAPQPAAAGGPGEASGQAPGRHDRLRRPLRPHH

SEQ ID NO: 32034 - DNA, 1877 bp, Triticum aestivum
attttccgtccgtccgccaaaccttcctcctctcccagggagcctcccaagcggccaccgtgcgcaccggaaatggccaagccgagagcggtggtgaccgccgccgcgccgtccacgtcctacgcgtcggcgttcctgccgccgcccgcgtcgccgtgcgacggcgacctgctccgctcgctgcaccgcctggcgcgcgacctctcggccgccgacgcgcccgcgcccttcctgcgcgccgccttcgcgtccgtctcgcggcgcgccaggctgctcgccgccgccttcgacgacctgctgctgtgcgccgcgggcgagggcggcctgccgcggtcggcctcgctgtgcctccgcgaggtgctcctcgtgctgcagcgcttcaaggccgtcgtggccgactgcgccgcgcggagccgcacgctgctgctgctgcagtccgacgagacggacgccgagctgcgcgacctgcaccacgacctcgccacgctgctcgacctgctgcccgtcgtcgagctcggcctcgccgacgacgtcatggacctcctcgccctcgcctcgcgccagtgccgccgctgcgcgtcggccgccgagccggagccggcgctcaaggccaccgtgctgtcgctgatcgaggagatcgagcgggagatcgtgccggagcgggagaggctcgaggagatcctggaggaggttggcatcaacgacccggccagctgcagcgacgagatcgagagcctcgagcgggagatcggcgaccgggcgtccgagagatggactgccgccatgatcgccctcgtcggcctgctccggtacgccaagtgcgtcctgttcagtgccacgccccggccgtcggattccaaggcggacgtcgatgtcgaagacgacggggagtcgccggcgcccccgccggacctccggtgccccatctccctcgatctaatgcgcgaccccgtcgtcgccgctagcggtcagacctacgaccgcgagtcgatcgaccggtggttcagctccggcaagtcaacgtgtcccaagacggggcaggtcttggccaatctggagctggtgcccaacaagtctctcaagaacctcatctccaagtggtgccgggagaacggcgtggccatggaggtgtgcgaggccagcaagagcgagcaggcccaggcggtggccgccaacaaggcggcgctcgaggtggcgcgcatgacggcgtcgtttctggtgaagaagctctccgtctcattctcccccgacgcggccaaccgcgtcgtccacgagatccggctgctctccaagtccggctcagacaaccgcgcgttcgtcggggaggccggcgccgtgccgatgctggtacccctgctctactccgaggacgccgggctccagctcaacgccgtgaccgcgctgctcaacctctccatcctcgaggccaacaagaagcgcatcatgcacgccgacggcgccgtggaggcggtgacccacatcatgagctccggcacgacgtggcgcgccaaggagaacgccgcggcggccgtgctcagcttggcgtctgtgcacacgtaccgccgcaggctcggccggaacccgtccgtcgtggaaaagctggtccatctcgtgcgcaccgggcccacgagcacgaagaaggacgcgctggcggcgctgctgtcgctggcgggcgagagggagaacgtggggaagctcagaggcggagccagcgttgtagcgttgggttcaagtgaacccaacgaatttttgctgccacgtgcatgtatgtacgtaatcgtgtgtgtgaacccagtagaaaatcaagtctgcacccatcgaaagttggaatgcacgagttaaaagacttttactgaaagctaaaagccttttagtcc

SEQ ID NO: 32035 - protein, 613 aa, Triticum aestivum
IFRPSAKPSSSPREPPKRPPCAPEMAKPRAVVTAAAPSTSYASAFLPPPASPCDGDLLRSLHRLARDLSAADAPAPFLRAAFASVSRRARLLAAAFDDLLLCAAGEGGLPRSASLCLREVLLVLQRFKAVVADCAARSRTLLLLQSDETDAELRDLHHDLATLLDLLPVVELGLADDVMDLLALASRQCRRCASAAEPEPALKATVLSLIEEIEREIVPERERLEEILEEVGINDPASCSDEIESLEREIGDRASERWTAAMIALVGLLRYAKCVLFSATPRPSDSKADVDVEDDGESPAPPPDLRCPISLDLMRDPVVAASGQTYDRESIDRWFSSGKSTCPKTGQVLANLELVPNKSLKNLISKWCRENGVAMEVCEASKSEQAQAVAANKAALEVARMTASFLVKKLSVSFSPDAANRVVHEIRLLSKSGSDNRAFVGEAGAVPMLVPLLYSEDAGLQLNAVTALLNLSILEANKKRIMHADGAVEAVTHIMSSGTTWRAKENAAAAVLSLASVHTYRRRLGRNPSVVEKLVHLVRTGPTSTKKDALAALLSLAGERENVGKLRGGASVVALGSSEPNEFLLPRACMYVIVCVNPVENQVCTHRKLECTS

SEQ ID NO: 32036 - protein, 589 aa, Triticum aestivum
MAKPRAVVTAAAPSTSYASAFLPPPASPCDGDLLRSLHRLARDLSAADAPAPFLRAAFASVSRRARLLAAAFDDLLLCAAGEGGLPRSASLCLREVLLVLQRFKAVVADCAARSRTLLLLQSDETDAELRDLHHDLATLLDLLPVVELGLADDVMDLLALASRQCRRCASAAEPEPALKATVLSLIEEIEREIVPERERLEEILEEVGINDPASCSDEIESLEREIGDRASERWTAAMIALVGLLRYAKCVLFSATPRPSDSKADVDVEDDGESPAPPPDLRCPISLDLMRDPVVAASGQTYDRESIDRWFSSGKSTCPKTGQVLANLELVPNKSLKNLISKWCRENGVAMEVCEASKSEQAQAVAANKAALEVARMTASFLVKKLSVSFSPDAANRVVHEIRLLSKSGSDNRAFVGEAGAVPMLVPLLYSEDAGLQLNAVTALLNLSILEANKKRIMHADGAVEAVTHIMSSGTTWRAKENAAAAVLSLASVHTYRRRLGRNPSVVEKLVHLVRTGPTSTKKDALAALLSLAGERENVGKLRGGASVVALGSSEPNEFLLPRACMYVIVCVNPVENQVCTHRKLECTS

SEQ ID NO: 32037 - protein, 435 aa, Triticum aestivum
MDLLALASRQCRRCASAAEPEPALKATVLSLIEEIEREIVPERERLEEILEEVGINDPASCSDEIESLEREIGDRASERWTAAMIALVGLLRYAKCVLFSATPRPSDSKADVDVEDDGESPAPPPDLRCPISLDLMRDPVVAASGQTYDRESIDRWFSSGKSTCPKTGQVLANLELVPNKSLKNLISKWCRENGVAMEVCEASKSEQAQAVAANKAALEVARMTASFLVKKLSVSFSPDAANRVVHEIRLLSKSGSDNRAFVGEAGAVPMLVPLLYSEDAGLQLNAVTALLNLSILEANKKRIMHADGAVEAVTHIMSSGTTWRAKENAAAAVLSLASVHTYRRRLGRNPSVVEKLVHLVRTGPTSTKKDALAALLSLAGERENVGKLRGGASVVALGSSEPNEFLLPRACMYVIVCVNPVENQVCTHRKLECTS

SEQ ID NO: 32038 - DNA, 1758 bp, Triticum aestivum
acacgacgcctctctcccgttcacccgtcccgattccggatcactccctctcctctcctctcttctccactcccccgccgagatatttcacgcggcccgcccgccatgtcgctgctcgccgtcgtcaccagccgcgccgcgcccgtgcgcccgctccgcgcctcggcggcctcgggagaggcggcggcggccgccgcggaccagccgggggagcggaggccggtcaagataatactgcccaagaagaagccgcagaagtggtccacggggatggagccggggtcgtacggcggcggcccgaccaccatcaagccgcgcaagtactggatggggaaggaggaccgcgaccccattggcaacaccgacgacttcatctggaacaagaacttcctcccccacatggagcgcgtcatcgccaacggcggtacggacacgcccgccaccatcccccgcgtcacgccggcggacgaggactcagggtttctaagcttcaaccgcgcaatggaccttgacagtgtggatgttgatctgagcaaggagcttatggcaccggccaagtcaatcttgcagacgcagctcaaggctgcccgccgtggtcgatccactagcgttgaggctgtcaatagacccacctacattagatggaagctagctccgactcgacgggagcaggagcaatgggaccgagcgaccagggcaaccaccggtggcattgatgtcatactaagggagtcgcagcagaaagtgcagctgaaaggggaccctaaggtggtggcagctgaggccagagagcaatacctgaagttgaaagaaaggttgcagctgcttactttaggtattggtggcgtcggggtggtttctgcttatgtttcatacactcctgaaattgctgcgagctttagtgcagggctgattggatctctggtgtatctccgcatgcttggaaccagtgtggattctttagcgggtggaactaaagcagctgccaagggcgctgcggcacagccaagattgcttattccaatggttcttgtgatgatgtacaatcgatggaatgcgtaagtagatcaagtcttttaaaatacttcctctgcctcttgaactgcaaaaacgtcttatatttagaggcagagggagtattttctgctgaaatattttcgtaatatgtcaaacaaacaaaaaaaaacgtacatgcatgtttgcctttgctttttctgatgcaggatactggttccagagtacggcttcatgcacctggagttgatacccatgctccttgggttctttacctacaagattgctatgtttactcaagcgattcaggaatcagtacctgatgctggaaaccgcgaagtttgaacactgttttggctaatagaaaaacaaagagaaggtcttattaaaggttttagaagagtctaatctggggcctggagatgccgccaggtacgtagatgagatgcacgctgaggctgaggatactgtctgaacatattaccaacattccgcggagaaagtttactttgttgactgtacaaaagggagttggccaacacaaattcaagttccgtgtagtgtacacctttgaacttttggtgcactgaccccgactcctatggttgagctggcatctaacattatttacgcaaggaggtcggcaggattcggatcagtacagaatgtaaatagcgcgagctgtcaatatactagctcgggaagctctatattttacaaagtgctaaaaaaatgatatattac

SEQ ID NO: 32039 - protein, 353 aa, Triticum aestivum
TRRLSPVHPSRFRITPSPLLSSPLPRRDISRGPPAMSLLAVVTSRAAPVRPLRASAASGEAAAAAADQPGERRPVKIILPKKKPQKWSTGMEPGSYGGGPTTIKPRKYWMGKEDRDPIGNTDDFIWNKNFLPHMERVIANGGTDTPATIPRVTPADEDSGFLSFNRAMDLDSVDVDLSKELMAPAKSILQTQLKAARRGRSTSVEAVNRPTYIRWKLAPTRREQEQWDRATRATTGGIDVILRESQQKVQLKGDPKVVAAEAREQYLKLKERLQLLTLGIGGVGVVSAYVSYTPEIAASFSAGLIGSLVYLRMLGTSVDSLAGGTKAAAKGAAAQPRLLIPMVLVMMYNRWNA

SEQ ID NO: 32040 - protein, 318 aa, Triticum aestivum
MSLLAVVTSRAAPVRPLRASAASGEAAAAAADQPGERRPVKIILPKKKPQKWSTGMEPGSYGGGPTTIKPRKYWMGKEDRDPIGNTDDFIWNKNFLPHMERVIANGGTDTPATIPRVTPADEDSGFLSFNRAMDLDSVDVDLSKELMAPAKSILQTQLKAARRGRSTSVEAVNRPTYIRWKLAPTRREQEQWDRATRATTGGIDVILRESQQKVQLKGDPKVVAAEAREQYLKLKERLQLLTLGIGGVGVVSAYVSYTPEIAASFSAGLIGSLVYLRMLGTSVDSLAGGTKAAAKGAAAQPRLLIPMVLVMMYNRWNA

SEQ ID NO: 32041 - protein, 263 aa, Triticum aestivum
MEPGSYGGGPTTIKPRKYWMGKEDRDPIGNTDDFIWNKNFLPHMERVIANGGTDTPATIPRVTPADEDSGFLSFNRAMDLDSVDVDLSKELMAPAKSILQTQLKAARRGRSTSVEAVNRPTYIRWKLAPTRREQEQWDRATRATTGGIDVILRESQQKVQLKGDPKVVAAEAREQYLKLKERLQLLTLGIGGVGVVSAYVSYTPEIAASFSAGLIGSLVYLRMLGTSVDSLAGGTKAAAKGAAAQPRLLIPMVLVMMYNRWNA

SEQ ID NO: 32042 - DNA, 1515 bp, Triticum aestivum
acgaccttccattccacccgagcagccgcgccgcctccccgatagatgaagcttctcccgcgcctctgcatggccaccagcagcgccgccgccgcgggcgacagcgacgccagcagcaacaagctcgcctcggtcgcctccacctcctcctccaccgtctcaacctcctcctccgccgccgcggccgcggtctccgaggcgtcctcctccacgtccctcccttcgctctccaccgccacgtcgaatgccgcctccttcgcccacgtcgccacgctcctccctccgcccacggcggcgtcgacggcagcggccgtcgcggtggtggacgtctcccgcggcttcgtcgtcgccaggccggcgtccgtcgcccttcacgacctcggcaccctcgagccgacgtccacctccgacccgggccacgacaccgcgaccgccggctcggtcaagtgcgtggcgcacgtccacggtggcaaggccgtgacgggccaccaggacgggaggctgcgcctgtggcgggtctcttcgcgcgcgcccgcccggatccgcctcgccgccgcgctccccacggtctccgaccgcctccgccggttcccgctcccgtccaaccacgtcgccgtccgacgccaccaccgccggctctggatagagcatgccgacaccgtgtccggcgtcgccgcgtccacggacggccgcctcctcttctccgtctcctgggacaagacgctcaaggtctgggccatcccgtccctccgctgcttgcagtccttgccggcgcacgacgatgccgtcaacgcggtcgccgtcgcccccgacggcacggtgtacaccggctccgctgacaggcgcgttcgtgtctgggcgcccaggcccgcgtccgacaagaccaccaagcgtcagagcaagaagccggtttactacctggcggccaccctctcccgccacacggcggcggtgaacgccgtggccgtcgggtgcggggggcaggtgctctactccggcggcaacgatcgctgcgtggtggtgtgggagcgggaggacagcgcgagccacatggtcgcgatcggggcgcttcgggggcaccgcaaggcggtgctctccatcgcgagcacggggggcgggctggttgtgagcgggtcggcggatcacacggttcgggcctggcggcgcgagacggacggacgtggccacacgtgcgtcgccgtgatcgacgggcacggcagcgccgtccgttcggtggcggtggctctcgttccgggcaagaagcagctgcaggggggagaagacggcgatgacggcggcgaggaatggagggtgtgcagcgccagctttgacggcgaggtgcgggtctggtcgttgcgggtgacgacgggtttgtagtaggttggatttgctacgatttttgacgttggaaagagtgttttcctgatttttgatctgatcttgatagctgagatagagatacgtacggtcgtgtacatacaggaaagaggtaatttatctacctgtattttttgg

SEQ ID NO: 32043 - protein, 443 aa, Triticum aestivum
MKLLPRLCMATSSAAAAGDSDASSNKLASVASTSSSTVSTSSSAAAAAVSEASSSTSLPSLSTATSNAASFAHVATLLPPPTAASTAAAVAVVDVSRGFVVARPASVALHDLGTLEPTSTSDPGHDTATAGSVKCVAHVHGGKAVTGHQDGRLRLWRVSSRAPARIRLAAALPTVSDRLRRFPLPSNHVAVRRHHRRLWIEHADTVSGVAASTDGRLLFSVSWDKTLKVWAIPSLRCLQSLPAHDDAVNAVAVAPDGTVYTGSADRRVRVWAPRPASDKTTKRQSKKPVYYLAATLSRHTAAVNAVAVGCGGQVLYSGGNDRCVVVWEREDSASHMVAIGALRGHRKAVLSIASTGGGLVVSGSADHTVRAWRRETDGRGHTCVAVIDGHGSAVRSVAVALVPGKKQLQGGEDGDDGGEEWRVCSASFDGEVRVWSLRVTTGL

SEQ ID NO: 32044 - protein, 435 aa, Triticum aestivum
MATSSAAAAGDSDASSNKLASVASTSSSTVSTSSSAAAAAVSEASSSTSLPSLSTATSNAASFAHVATLLPPPTAASTAAAVAVVDVSRGFVVARPASVALHDLGTLEPTSTSDPGHDTATAGSVKCVAHVHGGKAVTGHQDGRLRLWRVSSRAPARIRLAAALPTVSDRLRRFPLPSNHVAVRRHHRRLWIEHADTVSGVAASTDGRLLFSVSWDKTLKVWAIPSLRCLQSLPAHDDAVNAVAVAPDGTVYTGSADRRVRVWAPRPASDKTTKRQSKKPVYYLAATLSRHTAAVNAVAVGCGGQVLYSGGNDRCVVVWEREDSASHMVAIGALRGHRKAVLSIASTGGGLVVSGSADHTVRAWRRETDGRGHTCVAVIDGHGSAVRSVAVALVPGKKQLQGGEDGDDGGEEWRVCSASFDGEVRVWSLRVTTGL

SEQ ID NO: 32045 - protein, 278 aa, Triticum aestivum
DLPFHPSSRAASPIDEASPAPLHGHQQRRRRGRQRRQQQQARLGRLHLLLHRLNLLLRRRGRGLRGVLLHVPPFALHRHVECRLLRPRRHAPPSAHGGVDGSGRRGGGRLPRLRRRQAGVRRPSRPRHPRADVHLRPGPRHRDRRLGQVRGARPRWQGRDGPPGREAAPVAGLFARARPDPPRRRAPHGLRPPPPVPAPVQPRRRPTPPPPALDRACRHRVRRRRVHGRPPPLLRLLGQDAQGLGHPVPPLLAVLAGARRCRQRGRRRPRRHGVHRLR

SEQ ID NO: 32046 - DNA, 1731 bp, Triticum aestivum
acctcacctcacctcaccgcccgcatatgaaaccccgcgcgcgcgcgcacacgcacgtacggtagataaaaagcaggtagcgccgccgtcacgtcgtgctcgtcatgggcgtcgacgccgcgctgcatggggcggcggcggaggcggcgctgcatggggcgctctcgctgcagccgcacgtggccggcgccttcttcgcgctcgcggcgtgcaccgtggcgctcgccgccctgctggccgtggcgcgcacgcgcccgccgtggtggtgcgactgcgccgtctgcgaggcctacctcacggcgtcctgggccggcgagttcgacaacctctgcgactggtatgcgcacctgctgcgccgctcgccgtcgcagaccgtgcacgtccacgtgctccgcaacgtgctcaccgccaaccccgtcaccgtcgatcacatgctgcgcgcgcgcttcgataactaccccaagggcaagcccttctccgccatcctcgccgacctgctcggccgcgggatcttcaacgtcgacggggacgcgtggctgttccagcggaagctcgccgcggctgagctggcctccccggcgctcagggctttcgcctccggcgtcgtggcctccgagctgcggggccgtctcgttcccctgcttgactctgcatgttcccacgacgacgacgacgacgacgacgacggtggcaaggtgctggacctgcaggacgtcttccgtcgcttcgccttcgactgcatatgcaagatctccttcggcctcgacccgggctgcctcgagctgtccatgccggtatcggcgttcgtggacgcgttcgacacggcgtccatgctctctgcgaggcgcgccaccgcgccgttgcagatcatatggcgcctgaagcggttcttcaacgtcggggacgagagaaagctccgggaatccgtgcgcctcgtcgacgggttcgccgcggaggtcacgcggcaacgacacaagctcggcggcgccgcgtccggcagcgacctcctgtcgcggttcatgggctccatcagcgacgagaagtacctcagggacatcgtcgtcagcttcatgctcgccggccgcgacaccatcgcctcagcgctgaccgccttcttcctgctcctctccgatcacccggaggtcgccgcggccatccgggacgaggtgtcacgcgtcgcgggcgacgacgacaacggccggccgagcttcagcaagctcaaggacatgcactacgtgcacgcggcgctgtacgagagcatgcggctgttcccgccggtgcagttcgactccaagttcgcggcgggcgacgacacgctcccggacggcacggccgtggccaagggcacgcgggtcacctaccacgcctacgccatggggcggatggagtccgtgtggggccccgactgctccgagttccggcccgagcggtggctccgcgacgggcagttcgtcccggtgagcccgtaccggtacccggtgttccaggccggcgtgcgcgtctgcgtcggcaaggacctcgcgctcatggagatgaaggccgtcatcgtcgccgtcgtccggggcttcgacatcgaggcgatcgaccggagctcgcgccggcccaagttcgcgccggggctgacggccacgttcgccggcgggttgccggtcagggttcgccggcgagggcgtccggcgagcgggcacagcccaccaacctgatacggaataaacaactgttggtgccctg

SEQ ID NO: 32047 - protein, 532 aa, Triticum aestivum
MGVDAALHGAAAEAALHGALSLQPHVAGAFFALAACTVALAALLAVARTRPPWWCDCAVCEAYLTASWAGEFDNLCDWYAHLLRRSPSQTVHVHVLRNVLTANPVTVDHMLRARFDNYPKGKPFSAILADLLGRGIFNVDGDAWLFQRKLAAAELASPALRAFASGVVASELRGRLVPLLDSACSHDDDDDDDDGGKVLDLQDVFRRFAFDCICKISFGLDPGCLELSMPVSAFVDAFDTASMLSARRATAPLQIIWRLKRFFNVGDERKLRESVRLVDGFAAEVTRQRHKLGGAASGSDLLSRFMGSISDEKYLRDIVVSFMLAGRDTIASALTAFFLLLSDHPEVAAAIRDEVSRVAGDDDNGRPSFSKLKDMHYVHAALYESMRLFPPVQFDSKFAAGDDTLPDGTAVAKGTRVTYHAYAMGRMESVWGPDCSEFRPERWLRDGQFVPVSPYRYPVFQAGVRVCVGKDLALMEMKAVIVAVVRGFDIEAIDRSSRRPKFAPGLTATFAGGLPVRVRRRGRPASGHSPPT

SEQ ID NO: 32048 - protein, 423 aa, Triticum aestivum
MLRARFDNYPKGKPFSAILADLLGRGIFNVDGDAWLFQRKLAAAELASPALRAFASGVVASELRGRLVPLLDSACSHDDDDDDDDGGKVLDLQDVFRRFAFDCICKISFGLDPGCLELSMPVSAFVDAFDTASMLSARRATAPLQIIWRLKRFFNVGDERKLRESVRLVDGFAAEVTRQRHKLGGAASGSDLLSRFMGSISDEKYLRDIVVSFMLAGRDTIASALTAFFLLLSDHPEVAAAIRDEVSRVAGDDDNGRPSFSKLKDMHYVHAALYESMRLFPPVQFDSKFAAGDDTLPDGTAVAKGTRVTYHAYAMGRMESVWGPDCSEFRPERWLRDGQFVPVSPYRYPVFQAGVRVCVGKDLALMEMKAVIVAVVRGFDIEAIDRSSRRPKFAPGLTATFAGGLPVRVRRRGRPASGHSPPT

SEQ ID NO: 32049 - protein, 359 aa, Triticum aestivum
MFPRRRRRRRRRWQGAGPAGRLPSLRLRLHMQDLLRPRPGLPRAVHAGIGVRGRVRHGVHALCEARHRAVADHMAPEAVLQRRGREKAPGIRAPRRRVRRGGHAATTQARRRRVRQRPPVAVHGLHQRREVPQGHRRQLHARRPRHHRLSADRLLPAPLRSPGGRRGHPGRGVTRRGRRRQRPAELQQAQGHALRARGAVREHAAVPAGAVRLQVRGGRRHAPGRHGRGQGHAGHLPRLRHGADGVRVGPRLLRVPARAVAPRRAVRPGEPVPVPGVPGRRARLRRQGPRAHGDEGRHRRRRPGLRHRGDRPELAPAQVRAGADGHVRRRVAGQGSPARASGERAQPTNLIRNKQLLVP

SEQ ID NO: 32050 - DNA, 1713 bp, Triticum aestivum
cccagagaatctttcccccccttccttcctcactccctttctctttcctgacctcaccctacctcatccccctttctttatccccctccctctctccctctgctgacaggggagtgagtgagtgagtgaggcgagcgagtgatggcacggggaggagctcgcgccgtcgcgccggcggctctgctgctcctgcttctcctcgcggcaggcggcggtgtgcattgcctgaggtcaagggcggagagcggcgccacggtcctggagctgcggcaccacgccagcctcggctcaggcggcaggagcggcagcgcggaggaggcccgcggcgtcctggcctccgacgccgccagggtctcgtcgctgcagcggcgcatcggcagctacggcctgatcaggtcgtcggacgcggcgtccaagctggcgcaggtgcccgtcacctctggcgccaggctgcggacgctcaactacgtggccaccgtgggcatcggcggcggcgaggccacggtgatcgtggacacggccagcgagctcacctgggtgcagtgcaagccctgcgacgcctgccacgaccagcaggagccgctcttcgacccgtcggcgtcgccgtcctacgccgccgtgccgtgcaactcctcctcctgcgacgcgctgcgggtggccaccgggatgtccggcggccaggcgtgcgaccagccggcggcctgcagctacgcgctcagctaccgcgacgggtcctactcccgcggcgtgctggcgcacgacaggctgagcctggccggcgaggacatcgagggcttcgtgttcggctgcggcaccagcaaccagggcccgttcgggggcacgtcggggctgatggggctcggccggagcccgctctcgctgatatcccagaccacggagcagttcggcggcgtgttctcctactgcctgccgccgaaggagtccggctcgtcgggctccctcgtcctcggcgacgacgcctcggcgtaccgcaactccacgccgatcgtgtacaccgcgatggtcaccgacccgctgcaggggcccttctacatggtcaacctgaccgggatcagcgtgggcggcgaggaggtgcagtccccgggcttctcggccggcggcggcggcggcgggagggccatcgtggactcgggcacgatcatcacgagcctggtgccgtcggtgtacgcggcggtgcggggcgagttcgtgaggcagctggcggagtacccgcgggcgccggccttctccatcctggacacctgcttcgacctgacggggctgagggaggtgcaggtgccgagcctgaggctggcgttcgacggcggcgcggaggtggaggtggactccaagggcgtgctgtacgtggtcgccggcgacgcctcccaggtgtgcctggccctggccgccctcgggtccgaggacgacaccccgatcatcggcaactaccagcagaagaacctgcgggtggtcttcgacaccgccgcgtcccagatcgggttcgcgcaggagacctgtgattacatttgatttgaccgtggatcatcgggagctgcgtgtgcgtgtgtgcgcgtgtgaatatcctatagttggggatttgttttggaatcacctctggtgattggcttttttatttttatttttttgagttgtggtgatcggcaattggcaatacggtatttagttattggcaaatgtacaagcgtttgtagc

SEQ ID NO: 32051 - protein, 462 aa, Triticum aestivum
MARGGARAVAPAALLLLLLLAAGGGVHCLRSRAESGATVLELRHHASLGSGGRSGSAEEARGVLASDAARVSSLQRRIGSYGLIRSSDAASKLAQVPVTSGARLRTLNYVATVGIGGGEATVIVDTASELTWVQCKPCDACHDQQEPLFDPSASPSYAAVPCNSSSCDALRVATGMSGGQACDQPAACSYALSYRDGSYSRGVLAHDRLSLAGEDIEGFVFGCGTSNQGPFGGTSGLMGLGRSPLSLISQTTEQFGGVFSYCLPPKESGSSGSLVLGDDASAYRNSTPIVYTAMVTDPLQGPFYMVNLTGISVGGEEVQSPGFSAGGGGGGRAIVDSGTIITSLVPSVYAAVRGEFVRQLAEYPRAPAFSILDTCFDLTGLREVQVPSLRLAFDGGAEVEVDSKGVLYVVAGDASQVCLALAALGSEDDTPIIGNYQQKNLRVVFDTAASQIGFAQETCDYI

SEQ ID NO: 32052 - protein, 287 aa, Triticum aestivum
MSGGQACDQPAACSYALSYRDGSYSRGVLAHDRLSLAGEDIEGFVFGCGTSNQGPFGGTSGLMGLGRSPLSLISQTTEQFGGVFSYCLPPKESGSSGSLVLGDDASAYRNSTPIVYTAMVTDPLQGPFYMVNLTGISVGGEEVQSPGFSAGGGGGGRAIVDSGTIITSLVPSVYAAVRGEFVRQLAEYPRAPAFSILDTCFDLTGLREVQVPSLRLAFDGGAEVEVDSKGVLYVVAGDASQVCLALAALGSEDDTPIIGNYQQKNLRVVFDTAASQIGFAQETCDYI

SEQ ID NO: 32053 - DNA, 1523 bp, Triticum aestivum
acctctctcgacacaccaccgcaacccaacccaccccaccccaccccaccccaccccttcccgtctcaaaaccctaatcccaacgccgccgcggcgccgccgatcaagccgacgacaggcagcccccctatccggccgctccgtacgcacgcccctgcccgtcgcgcgcagatcggcggccgtccaccgcgaccgtgggccgccgcggggctagatttagattccgatttcggggcccctagccgccgggatttcctcgcgtccccgggcaaggtaggagagactatggtgggcggaggcaggaggggaggcgcggcggacgaggccaagctcaacaccggcaacgtgttcgcggcgctcgagaccctcaagaagaagaagaagggcgacaaggccaaggggggctcctccaagggagggaagcagggggacgagcccacgccgcagcagcagaaggagctcttctgggcgcccgccccgctcaacaccaagtcgtgggccgacgtcgaggacgacgacgacgacgactacttcgccaccaccgcgccccccgcgcccatctgggggaacgaccacgccgccgccaaaacggccaaggaggaggaggaggacgaggtcgatgctgtccacgccgccctgccggaggaaattgaaagtgaggatgaggagcatgatgatgaggctgaggatggtgctgaggatgaacctgagcatgaagtggaagctgctgatcctgatgtgaagaaagttgcagcagcacctaaagagacagaaaggcagctgtccaaaaaggagttgaaaaagaaggagctggctgaacttgatgctgtgttagctgagttgggaatttctgaaaacacaagcgatgctgcgcaagatggaaacaacaatgctgagaagaaaggtgcgagccaagctggtgatggagagagaaaggaagacgcacctgcccctttagagagcaagaatgccaagaagaagaagaacaagaaggacaagagcgcaaaggaggcaaaggaagctgaagtgtcggaggaggctgccagtgcagaacccgaggaagacacggctgtggatgtcaaggagcgcctaaagaagatggcgtcgatgaagaagaagaagtcgggcaaggagacggacacagctgcaaagatcgccgcggcagaggcggcagccaggaccgccaggctcgcggcggcaaagaagaaggagaagagccattacaaccagcaacccgtgcggtaaaaacgcgacgggccgcccaagttttgagatgctcctgagtttcgataatgaatgatccccttgttcgttttggacccgtcgcaataaactttttccccatccagtcctccccagagttgtgtatttatggtgaccatggagcgcctttctgatattcggtttcggaattctggaaggccttcgtggtcaccagaacggtcgttgtaattgtgttttgaattgtgttgatccggttgaacttatgatagacaacaacatggccaacagggcctcttggg

SEQ ID NO: 32054 - protein, 414 aa, Triticum aestivum
TSLDTPPQPNPPHPTPPHPFPSQNPNPNAAAAPPIKPTTGSPPIRPLRTHAPARRAQIGGRPPRPWAAAGLDLDSDFGAPSRRDFLASPGKVGETMVGGGRRGGAADEAKLNTGNVFAALETLKKKKKGDKAKGGSSKGGKQGDEPTPQQQKELFWAPAPLNTKSWADVEDDDDDDYFATTAPPAPIWGNDHAAAKTAKEEEEDEVDAVHAALPEEIESEDEEHDDEAEDGAEDEPEHEVEAADPDVKKVAAAPKETERQLSKKELKKKELAELDAVLAELGISENTSDAAQDGNNNAEKKGASQAGDGERKEDAPAPLESKNAKKKKNKKDKSAKEAKEAEVSEEAASAEPEEDTAVDVKERLKKMASMKKKKSGKETDTAAKIAAAEAAARTARLAAAKKKEKSHYNQQPVR

SEQ ID NO: 32055 - protein, 319 aa, Triticum aestivum
MVGGGRRGGAADEAKLNTGNVFAALETLKKKKKGDKAKGGSSKGGKQGDEPTPQQQKELFWAPAPLNTKSWADVEDDDDDDYFATTAPPAPIWGNDHAAAKTAKEEEEDEVDAVHAALPEEIESEDEEHDDEAEDGAEDEPEHEVEAADPDVKKVAAAPKETERQLSKKELKKKELAELDAVLAELGISENTSDAAQDGNNNAEKKGASQAGDGERKEDAPAPLESKNAKKKKNKKDKSAKEAKEAEVSEEAASAEPEEDTAVDVKERLKKMASMKKKKSGKETDTAAKIAAAEAAARTARLAAAKKKEKSHYNQQPVR

SEQ ID NO: 32056 - DNA, 1542 bp, Triticum aestivum
cccggcctctccaacgagtctcaacttccttatccaacgatccgctggacgggactaactaggctgtcacatcccttccatctaccacaaccaacggcgtcggcgataatggccgccttgccgcagctgcttctgatcctcttccccgcggaggttgccgtcctgaccctgctgctggcctcggcggcgggagcgcgggctcacgcctcctcgtcctcgtcatcggcgacgtaccgctgcggctggtgcccgcgcaggtccaccgcgtccatcctccctcccggcgccggcgcactgaccggtgccgcctgcgggtatggtggccaggcggcggagatggccgtcgacggggggttccacattgcggccgtcagcgccagtttcttccgcggtggccgggcctgcggcgcctgctaccagctgatgtgcaggggacggagcgcgtgcgcggcgggcggcgtcaaggtcgtcgtcgtcgccgacgtggcagagacgaacatgaccggtggtggtgccggtgggcggtttctgctcagcaaggacgccttcgccgccttggcgacgccagaccgtaacgccgagctcgcggacgcagacgtcgacgtggacttcaggaggattccctgcgtgtacaagagcaagaacttggcggttaaagtggaggagacgagcagcagggaccggggttacctcgccctccgcttcctctaccagggcggccagaccgacatcgccgccgtcgaggtcgcgcaggcggtcaccggttccagcggcaccaacaacgacgcagcaccgttgcagacatcctggcagtacatgacccggcgcgaggcgtccccgtcgatgtggcgcacgtcgcgcgtgccggccggtctgctgcagctccggcttgtggtcaccgcgggctccggcggcaagtggctgcgcgccgacggggcggtgctccccgcgaattggcagcccggcgcggtctacgacaccggcctgcgcgtcaccgacgtcgccgcaagcacctgcggcggcgcctcctgttcctccacggacgagggcgacgacgccgagcagctccgatgacacgcttcccggcatgcatgatgcatccaccacggaccgatcgatggtccattggagccggcccgcacgtcaacggcgacgccgcgcatgcagatctgcaccggccagccgccggaatatcggtcgatgctgcatgtacactgtacagagacgtgtacatcgcaacgtacgacatgcatgcatgtgtgcacggccgacgacgagttccggttaggacaaaacctccatggtcccgctctaaacagaggatgttggcgcgtagcttcacgtgtggagggaagggactaatgcagagaagaacatgtagatggctctgttcaggtcttggaatcacatgacagcactactgttttggctgctcgtcctcttcctctttggaatagtaggagagtattattgtaggttgattgcatgggctgattaagattgatcagttgccgactaagactaagttaactgtattgcatt

SEQ ID NO: 32057 - protein, 357 aa, Triticum aestivum
PGLSNESQLPYPTIRWTGLTRLSHPFHLPQPTASAIMAALPQLLLILFPAEVAVLTLLLASAAGARAHASSSSSSATYRCGWCPRRSTASILPPGAGALTGAACGYGGQAAEMAVDGGFHIAAVSASFFRGGRACGACYQLMCRGRSACAAGGVKVVVVADVAETNMTGGGAGGRFLLSKDAFAALATPDRNAELADADVDVDFRRIPCVYKSKNLAVKVEETSSRDRGYLALRFLYQGGQTDIAAVEVAQAVTGSSGTNNDAAPLQTSWQYMTRREASPSMWRTSRVPAGLLQLRLVVTAGSGGKWLRADGAVLPANWQPGAVYDTGLRVTDVAASTCGGASCSSTDEGDDAEQLR

SEQ ID NO: 32058 - protein, 321 aa, Triticum aestivum
MAALPQLLLILFPAEVAVLTLLLASAAGARAHASSSSSSATYRCGWCPRRSTASILPPGAGALTGAACGYGGQAAEMAVDGGFHIAAVSASFFRGGRACGACYQLMCRGRSACAAGGVKVVVVADVAETNMTGGGAGGRFLLSKDAFAALATPDRNAELADADVDVDFRRIPCVYKSKNLAVKVEETSSRDRGYLALRFLYQGGQTDIAAVEVAQAVTGSSGTNNDAAPLQTSWQYMTRREASPSMWRTSRVPAGLLQLRLVVTAGSGGKWLRADGAVLPANWQPGAVYDTGLRVTDVAASTCGGASCSSTDEGDDAEQLR

SEQ ID NO: 32059 - protein, 245 aa, Triticum aestivum
MAVDGGFHIAAVSASFFRGGRACGACYQLMCRGRSACAAGGVKVVVVADVAETNMTGGGAGGRFLLSKDAFAALATPDRNAELADADVDVDFRRIPCVYKSKNLAVKVEETSSRDRGYLALRFLYQGGQTDIAAVEVAQAVTGSSGTNNDAAPLQTSWQYMTRREASPSMWRTSRVPAGLLQLRLVVTAGSGGKWLRADGAVLPANWQPGAVYDTGLRVTDVAASTCGGASCSSTDEGDDAEQLR

SEQ ID NO: 32060 - DNA, 1560 bp, Triticum aestivum
ctacaacatctatggaggaaaccagtacccgttttacggaggagcaggaactggcatggtgaccggaaccagtcccttctatccatacttccagtttgggcagtccggaagcactacgcccaactatgcaactggacagggctacaacatgcaattcccacagatgtttcccttctcaactgtggcttctacagctgctgctgtaactggctttgcacagcaatatggagggccattgtcacttgcagccagtcctcaagcccaagcagtgtgtatccccattaaacaggcatgactatggctctcacagcaccaaccttgccaagtccaactcaggctgctcatccttaccggctcgtcccctcgcactttgctgtgtctgctgctccagagcaatccttggcctaaccatggtctccatcctcatcgtcaccgtctcttttttatttcctatgtgttagtccatgcatccatctctaacaccaaagggtgtcaccaatgttgatcccatgtggatcacgtaagtgcccctctctccatatcccacatggttatgtgatgattgcagaccagcttgagccccaggatgggctcaaagcttgatgccccaaggaaggggatgtactaacagtcgggcgcaaaccagccatttaaccagtccaaggaaggacttcatccaagagagttaatttgagccctagcaagagatggctacggtaaaaggcaaccctaacaatcaagcatgaccccagggagggttcatgctgatacaatccaaattggacaaaactgacatgtagacaaccaattgagctagcatgccactccaaaacttcatcagtggaattcatactgtatttagcttaggccaagtgcttctggctgaagcatgaggcatttagcagatcctaatattctattcatgggtgttatctagagcaaataaaatttgacatctgaccagtctataacttcatttccacacatactcacaccccccctcccatcaccaccagcaacttcacaacaacatcctgtgataacttcttgtgtaaccaaccactctaacttttctatgcactgagtagatgcaccaactaacagttctttatccttcagtttatagctttgcatctaggtggctcaggctctaaggagagcctgtgcccctcatcagagacaggttcaggagtgctaatgttagtttttggcacttggcactacctcctgccatttgtaacacagtgatgggactccaaagaaggctttggagataccaaagcactgctgtgcaactcaataaccccaatggacccaggcatatttttattgtcttgggtcacccactcatctagatgttcatcttccccaatgtcattaccatggttaggtccaggacccactctctttctctctctgggcagagaggctttgatgctttttaatgtaatattatcggtcacagtgattgtaataataaagtagtactatgccacttctagggcaggaactctttactgttttatcagtcggatctagctaaatattctgtcaacctac

SEQ ID NO: 32061 - protein, 97 aa, Triticum aestivum
YNIYGGNQYPFYGGAGTGMVTGTSPFYPYFQFGQSGSTTPNYATGQGYNMQFPQMFPFSTVASTAAAVTGFAQQYGGPLSLAASPQAQAVCIPIKQA

SEQ ID NO: 32062 - protein, 94 aa, Triticum aestivum
LQHLWRKPVPVLRRSRNWHGDRNQSLLSILPVWAVRKHYAQLCNWTGLQHAIPTDVSLLNCGFYSCCCNWLCTAIWRAIVTCSQSSSPSSVYPH

SEQ ID NO: 32063 - protein, 79 aa, Triticum aestivum
MVTGTSPFYPYFQFGQSGSTTPNYATGQGYNMQFPQMFPFSTVASTAAAVTGFAQQYGGPLSLAASPQAQAVCIPIKQA

SEQ ID NO: 32064 - DNA, 1773 bp, Triticum aestivum
cttccacgcgcttgtctgccggccgaatcgattccaagtccaactctgagctgttccccatcgccattttccgtctccatttctccccaccttccccgacccccaaatccccacgcgaatccgcccccgccgccatggcctccccgccgggcgccgcccgcctcgccgccctgctgctcctcgcgctcctcgccgggcccgccgcgtcccgcttcgccccggcggacaaccacctcatcgcctgcggcgcgacggccccggccgtcctccccgacggccgccgcttcgtcccggactccggctgcgcgtccatgaccctccgctccgcggcccccgccctcccgtccgccgcccccgctgcgcccgcgcacgagccgccctcccctctccacgccgccgcgcgcgtcttctcctgccacgcctcctacgacctcgccgtgcgccgccgcgggcgccacgtcctgcgcctccacttctaccccttcagccccgccctcgcctccgcgcgcttccacgtcggcgccgggggcttcctcctcctccacaacttcaccgcctcgtcccccgtcgtcaaggacttcctgctccccgtcgacgccgacgtcctcgtcctcaccttcgtccccgaggccggatccgccgccttcgtcaacgccatcgagctcttctcggcgcccgaggagctcgtcggcgacatcgccaccctcgtcgccgctgacggcgtcaaccgcaccgacgggctctcctcgcaggtcttcgagacgctctaccgggtcaacgtcgccggccgcaaggtcaccccgttcaacgacacgctgtggcggacatgggtcaacgacgagggcttcctcgtcaacaaggaatcatccagcagcaaggcatggtcattcggtggccggattgcttaccccaaggacagcaggttgatgacccgagaggtggctccggacaacgtctacaactcggcgaggtcggtgaggtcagacggcaatctgacatggggtttccctgtgcccgctcgcaaccggtacctcgtgcgcatgcacttctgtgacattgtgagcaaggcactgtatcagctctacttcagtatctatgtcaatggtcatctcgcagtgaaggattttgacatttccagcaccactggatacttggcctatccgtattacatcgactatgttgtggacgttgaggatgaagggatgctgaaactggccattggtggctccaagatgagccagcctggagaagcgagtggtttcctgaatgggctcgagataatgaggatgaacaaaacgggtggcggcatggacggggatttccctgttgttctggacatggggtacctggtcagtaaggggtttggggaattcgctcgctcactgctgtgtggtttagtcttcgccgggctgtttttggttttggtcatgctggtgctgaggttgaggaccgagctgaaaaacaatggaacgctttggttcagccagtcagtggattctggtgaggggaagttggctaaagcatatcagcttgtgcccaccaagacagactattaagcagcatgagatctgagaagcttcaacttgtgtctgttatctgtatcccatggcctaatcttgtgcttcgtttgtaagtattgtagttttctagttctacatttctatgcctttcatggttgaagtttcaattgtttgagcttggccagtgcagagcacaactattgtgtgtacttaagaattaagacgtgtttgtattgctactacttcgctaaat

SEQ ID NO: 32065 - protein, 517 aa, Triticum aestivum
STRLSAGRIDSKSNSELFPIAIFRLHFSPPSPTPKSPRESAPAAMASPPGAARLAALLLLALLAGPAASRFAPADNHLIACGATAPAVLPDGRRFVPDSGCASMTLRSAAPALPSAAPAAPAHEPPSPLHAAARVFSCHASYDLAVRRRGRHVLRLHFYPFSPALASARFHVGAGGFLLLHNFTASSPVVKDFLLPVDADVLVLTFVPEAGSAAFVNAIELFSAPEELVGDIATLVAADGVNRTDGLSSQVFETLYRVNVAGRKVTPFNDTLWRTWVNDEGFLVNKESSSSKAWSFGGRIAYPKDSRLMTREVAPDNVYNSARSVRSDGNLTWGFPVPARNRYLVRMHFCDIVSKALYQLYFSIYVNGHLAVKDFDISSTTGYLAYPYYIDYVVDVEDEGMLKLAIGGSKMSQPGEASGFLNGLEIMRMNKTGGGMDGDFPVVLDMGYLVSKGFGEFARSLLCGLVFAGLFLVLVMLVLRLRTELKNNGTLWFSQSVDSGEGKLAKAYQLVPTKTDY

SEQ ID NO: 32066 - protein, 473 aa, Triticum aestivum
MASPPGAARLAALLLLALLAGPAASRFAPADNHLIACGATAPAVLPDGRRFVPDSGCASMTLRSAAPALPSAAPAAPAHEPPSPLHAAARVFSCHASYDLAVRRRGRHVLRLHFYPFSPALASARFHVGAGGFLLLHNFTASSPVVKDFLLPVDADVLVLTFVPEAGSAAFVNAIELFSAPEELVGDIATLVAADGVNRTDGLSSQVFETLYRVNVAGRKVTPFNDTLWRTWVNDEGFLVNKESSSSKAWSFGGRIAYPKDSRLMTREVAPDNVYNSARSVRSDGNLTWGFPVPARNRYLVRMHFCDIVSKALYQLYFSIYVNGHLAVKDFDISSTTGYLAYPYYIDYVVDVEDEGMLKLAIGGSKMSQPGEASGFLNGLEIMRMNKTGGGMDGDFPVVLDMGYLVSKGFGEFARSLLCGLVFAGLFLVLVMLVLRLRTELKNNGTLWFSQSVDSGEGKLAKAYQLVPTKTDY

SEQ ID NO: 32067 - protein, 414 aa, Triticum aestivum
MTLRSAAPALPSAAPAAPAHEPPSPLHAAARVFSCHASYDLAVRRRGRHVLRLHFYPFSPALASARFHVGAGGFLLLHNFTASSPVVKDFLLPVDADVLVLTFVPEAGSAAFVNAIELFSAPEELVGDIATLVAADGVNRTDGLSSQVFETLYRVNVAGRKVTPFNDTLWRTWVNDEGFLVNKESSSSKAWSFGGRIAYPKDSRLMTREVAPDNVYNSARSVRSDGNLTWGFPVPARNRYLVRMHFCDIVSKALYQLYFSIYVNGHLAVKDFDISSTTGYLAYPYYIDYVVDVEDEGMLKLAIGGSKMSQPGEASGFLNGLEIMRMNKTGGGMDGDFPVVLDMGYLVSKGFGEFARSLLCGLVFAGLFLVLVMLVLRLRTELKNNGTLWFSQSVDSGEGKLAKAYQLVPTKTDY

SEQ ID NO: 32068 - DNA, 2009 bp, Triticum aestivum
agcaattattctcctccgctacctccgcggtggccagcacaccacaccacaccacgcttcccttgccttgctcccccacctccacacccatctcattcccccctctccccatccccaatggcgccgacctccgagccctagatagatcccccgcgcgcagccgcatggcggagcacgccgcccgccacctccgccgccgcggccccgtcgccggctggtgctgctccttcgccggcgtcccgcccagccccgaccaccgcctccacccccaccgcaccctctcccacgccgccgcgccgccaaccgcaggatctgtgtgcaccggcggcgagggcccgcggaagcaaccacagctgccgcccaaatccccctcctccttccacggctctccctcctccaagctggcgggcctcatcgactacccgcgccggatcctctccccgggccgcgtctcccccatcgaccccgacgcccacccccctcctcctccgacccccaaccccaccgaccagccgcagcacccggagcagcagcagccgccgccgatggccccgttcgtcgcggtgcgggaggaggaggaggaggggcagggggacgggctggatctgaggctctgcctccgcgggagggacggcgccaccggctgcgtcatggacctcgactccgccgtgctctgcgggagcagcgccttcttcgccgccatggcgcccgagcccaacgcctctggtgccggggcccggaggatcgaggtcgacggggtcgacaacgtcgccgccttcagggacgccgtcgagctcatgttccatgccgacgctccgcggtggctcgccagggccggcgtctcgcgagccatcgccgtcctcgaggtggcttcctcgattatgtttgacaaaggaatcagatcatgtttggagtacattgaagcagttccatggaatgagaatgaggaagagaagctaaagcacctctttgctagatgcactttcgatgaagcgttatcaaaagatgtattggcaagattgcaaacacaaccgtctagcagctcggaagacctgactggtcagctcatccaatctgtcaccagcagcacaaacaacagtgcaagaaaagatatgcagtctttgatcaatggtcttctaagcaagagctcagtatatcaaaaggatttgtctggattaaacaaaaggagcctataccagatttgctgctcgtgtctaaacctactggtggaactttttaaggaagactcggagccaaaatgcggcacagaccaggcactgaaagttaggcacaataataaacccatgattgaaagagtgagcaagcaaagtgagaacctcagctggctatttgagatcctggtcaacaatgatatggcagagaatttcgtcgtgctgtgggccggacaagacgatctcatcaggatgcacgagcaagcatcgccaatgttcaggtacgagctaagccggatatcagcgggcgtgttcatcgctctcgggcaagggaaagtgcagtgcccgagcgatctgaggagccaactgttccggggatggttcacgccgatgttaaccgatttcggttggctccaaaggtgctccaaggggctggatgcgagagcgctggaggatagcctggggcaagcccttctcaccctcccgctccgggagcagcagagcctgttcgaggaatggttccagtgcttcgcgtctagtggcgcggaatgcccgaaccttagccgagccttccaggtatggtggcgaaggtcattcgctagatagatttgtcggtagagcccctgcagcagcagaagcctatgagatattgcttggtccgcgtgagttatatcggtatttgtagtgtgtgtatgaatgtaagataagatgaattcctgttagcctgtagagttgaatttttgtttatgatcttggctcggttcttcccagtgtatgcactacttgacaaaaccacaattcccagagtcagcaatagaattgttgtagaattgcttc

SEQ ID NO: 32069 - protein, 591 aa, Triticum aestivum
QLFSSATSAVASTPHHTTLPLPCSPTSTPISFPPLPIPNGADLRALDRSPARSRMAEHAARHLRRRGPVAGWCCSFAGVPPSPDHRLHPHRTLSHAAAPPTAGSVCTGGEGPRKQPQLPPKSPSSFHGSPSSKLAGLIDYPRRILSPGRVSPIDPDAHPPPPPTPNPTDQPQHPEQQQPPPMAPFVAVREEEEEGQGDGLDLRLCLRGRDGATGCVMDLDSAVLCGSSAFFAAMAPEPNASGAGARRIEVDGVDNVAAFRDAVELMFHADAPRWLARAGVSRAIAVLEVASSIMFDKGIRSCLEYIEAVPWNENEEEKLKHLFARCTFDEALSKDVLARLQTQPSSSSEDLTGQLIQSVTSSTNNSARKDMQSLINGLLSKSSVYQKDLSGLNKRSLYQICCSCLNLLVELFKEDSEPKCGTDQALKVRHNNKPMIERVSKQSENLSWLFEILVNNDMAENFVVLWAGQDDLIRMHEQASPMFRYELSRISAGVFIALGQGKVQCPSDLRSQLFRGWFTPMLTDFGWLQRCSKGLDARALEDSLGQALLTLPLREQQSLFEEWFQCFASSGAECPNLSRAFQVWWRRSFAR

SEQ ID NO: 32070 - protein, 537 aa, Triticum aestivum
MAEHAARHLRRRGPVAGWCCSFAGVPPSPDHRLHPHRTLSHAAAPPTAGSVCTGGEGPRKQPQLPPKSPSSFHGSPSSKLAGLIDYPRRILSPGRVSPIDPDAHPPPPPTPNPTDQPQHPEQQQPPPMAPFVAVREEEEEGQGDGLDLRLCLRGRDGATGCVMDLDSAVLCGSSAFFAAMAPEPNASGAGARRIEVDGVDNVAAFRDAVELMFHADAPRWLARAGVSRAIAVLEVASSIMFDKGIRSCLEYIEAVPWNENEEEKLKHLFARCTFDEALSKDVLARLQTQPSSSSEDLTGQLIQSVTSSTNNSARKDMQSLINGLLSKSSVYQKDLSGLNKRSLYQICCSCLNLLVELFKEDSEPKCGTDQALKVRHNNKPMIERVSKQSENLSWLFEILVNNDMAENFVVLWAGQDDLIRMHEQASPMFRYELSRISAGVFIALGQGKVQCPSDLRSQLFRGWFTPMLTDFGWLQRCSKGLDARALEDSLGQALLTLPLREQQSLFEEWFQCFASSGAECPNLSRAFQVWWRRSFAR

SEQ ID NO: 32071 - protein, 410 aa, Triticum aestivum
MAPFVAVREEEEEGQGDGLDLRLCLRGRDGATGCVMDLDSAVLCGSSAFFAAMAPEPNASGAGARRIEVDGVDNVAAFRDAVELMFHADAPRWLARAGVSRAIAVLEVASSIMFDKGIRSCLEYIEAVPWNENEEEKLKHLFARCTFDEALSKDVLARLQTQPSSSSEDLTGQLIQSVTSSTNNSARKDMQSLINGLLSKSSVYQKDLSGLNKRSLYQICCSCLNLLVELFKEDSEPKCGTDQALKVRHNNKPMIERVSKQSENLSWLFEILVNNDMAENFVVLWAGQDDLIRMHEQASPMFRYELSRISAGVFIALGQGKVQCPSDLRSQLFRGWFTPMLTDFGWLQRCSKGLDARALEDSLGQALLTLPLREQQSLFEEWFQCFASSGAECPNLSRAFQVWWRRSFAR

SEQ ID NO: 32072 - DNA, 1217 bp, Triticum aestivum
tcacgagattttctaggctgaactgtacatgatatggcagaattagtagctcattagaagtacccttgtgattagagcaacactagcttcaaatgcatctttttctcaatcttttgtgcatagtaattaatgatgcaaaggccagggcccaaccttttctctaaaaaaatacataaaagaattctggggaacaaaaaattatcccattaaagtgcatctgaaccccattgtagtactactggttaatgaaactatcccattataataattatcacaagagctttacacacacacaaagagggctgattccttagacttatttccatcgaaacacatgaattaaaacttgcacgtaccagcttactagtatatataggatatcgcttggctgcagctttgcttttcccccggtttttataggctgtttctgggacagaaatgaccatctttgcattgcattgcattgcattgcattgcatactgaaatgaaatgaaacagggttcgatgtggaggagacttcggttgacggccccgacgacgtccaagggctggacgcatccgccgcacacatagcaaacctgctatcgtccgagccctctgatgtgaggcttgggataggcggtttcagcatgggagccgccactgcgctccactctgccgcatgttatgctcatggaaggttctcaaacggtgttgcctaccctattaccctcagcgctatcattgggttgagcggctggcttccctgctccaggaccctgaggaccaagattgagagctcacagactgctttcaggagggctgctgccttgccgataatgcttggccatggaagaggcgacgaggtagtcacgtacaggaacggcgagaggtcgtccgagtttctgcggaattcgggcttttcgtacctgaatttcaaagcctacaacggactgggccatcacaccatccctgaggaaatggacgatgtctccaagtggctcagggcaaggctcgggcttgatcgctcttgcggctaattaagtggagaagcttgtgccttggtggctgacacatgacatgagagaaatgtattgacactatagaggaggagaaggttgatatatataggttaatcatatgaagagatcacgaccggcatgtgttgatatataactcctcactactgaatttcatgttacacttatattgtactactaagagttgtaccccagct

SEQ ID NO: 32073 - protein, 129 aa, Triticum aestivum
MGAATALHSAACYAHGRFSNGVAYPITLSAIIGLSGWLPCSRTLRTKIESSQTAFRRAAALPIMLGHGRGDEVVTYRNGERSSEFLRNSGFSYLNFKAYNGLGHHTIPEEMDDVSKWLRARLGLDRSCG

SEQ ID NO: 32074 - protein, 66 aa, Triticum aestivum
MLGHGRGDEVVTYRNGERSSEFLRNSGFSYLNFKAYNGLGHHTIPEEMDDVSKWLRARLGLDRSCG

SEQ ID NO: 32075 - DNA, 1342 bp, Triticum aestivum
attattcgatcttttttccttttgcccttgtcttcttcctcgccgctcgtccccttaaaccctcccatggcggcccgcccatgctcccgcggctgccccaagctccggcgcctcctctcctccgccgccgccgcgaacctccccctcctgtgatcctagaggcgcacggccaagggctccctggcggatttggatgaatgccaccggccggccgccccatctcctctccccagcgagatctaggctgcagccccaaagagaactaaatattctccctctccaactcgcgcgagcttcgatccggtgccctgcggccggcgtccccgagaccggccccggccccaaacgcggttcccaacccgacgcccccctcccgcacgcttgcggcctccgggagcatcgcgcggtcctacatttcgttgcgggtgactcctttccgctcagtgtttatggtgccgcctgtgtaccaggagcctagtatcatgccgatcaatacaagaacggagaaggagttggaagaaaaggaggtgttatgcacgcacaaaaagcccaaagctacagggtgtgttgcccaaccgcagcaggaaactgaactcgccattgagagtgagaataaagggcatggtgatccttcaccaaaagagtctgcttgtgttgtgctgagcaatggtgaagcaaatggttgcagtgaggggcatgttcttggcaaatgtcatgtccaaattccgaagacatgactcgggtagaaaggatcattacagttcaaatattccatacaggcggtgcaaatgaagaaccagaagcaaggtcgagactggctcaactctgcagtgcaattggctggaagagtccaacatatgagtttcaagaacatggacatggccatacaaaactgttcacatgcaaggtgagtgttcttgtggagacgttcacagacactgttgtggagtgcatcagtgagcccaaaccccagaagagagctgcccaggaacaaggtgctgaaggtgtgttatggaccctcaagcgccttggtcatgtgaaatagctctagacgtcctccatcaggcgtggcgcgacgtctgtgtaccctcttgttaccatccgatccatcataagagcggtatctgatctttcttgaatccatgactcaacctgcgatcatgttgtcagctgatgcttatgcacggttaaacttgttgctctgtcggtcgtgttctaattttatattgctttagatctctatacaaacgagtgaagtgaacccatctccaatagtccaataattcttatctttagaccattctgagccatttacgaacattacagcgaatatgatcaagac

SEQ ID NO: 32076 - protein, 111 aa, Triticum aestivum
MSCPNSEDMTRVERIITVQIFHTGGANEEPEARSRLAQLCSAIGWKSPTYEFQEHGHGHTKLFTCKVSVLVETFTDTVVECISEPKPQKRAAQEQGAEGVLWTLKRLGHVK

SEQ ID NO: 32077 - protein, 103 aa, Triticum aestivum
MTRVERIITVQIFHTGGANEEPEARSRLAQLCSAIGWKSPTYEFQEHGHGHTKLFTCKVSVLVETFTDTVVECISEPKPQKRAAQEQGAEGVLWTLKRLGHVK

SEQ ID NO: 32078 - protein, 95 aa, Triticum aestivum
MVPPVYQEPSIMPINTRTEKELEEKEVLCTHKKPKATGCVAQPQQETELAIESENKGHGDPSPKESACVVLSNGEANGCSEGHVLGKCHVQIPKT

SEQ ID NO: 32079 - DNA, 1975 bp, Triticum aestivum
cttttgaagccccgccctccttccacaggcccatgacgaagccaacctagctagcttgcaccacgtaccgtgtggcattatatatacgcccaccggccctccgtgccatcccggtctccatcgccatggcgacgacggggagggtgaggccttctcctctcctcgcggcgtggctggctctcggctttgcgtggcattgcgcgcttcaccatgctccggcggcggccgtgacgctgtcgacggcgtcccggtgggtcgtggacgaggccggggaccgcgtgaagctggcgtgcgtgaactggccgtcgcacctggagccgatgctggcggaggggctgggcaagcggcccgtgggcgccatcgccggggacgtggccaccatggggttcaactgcgtccggctcacctggcccacgttcctggtgaccaacgcctcctactcgtccctcaccgtcgagcagtccttccagaggctcaacctcaccgagtcgctcgccggcatcagggccaacaaccccgccgtcgtcgacctcaagctcatcgacgcgttcaaggccgtggtgagcagcctcggtgagaacaacgtcatggtgatcctggacaaccacgtgagcaagcccgggtggtgctgcgacaacgcggacggcaacgggttcttcggcgacggctacttcgagccggacgtctgggtcgacggcctcaccaagatggccaccatgttcgccggcgtcccccacgtcgtcggcatgagcctcaggaacgagctccgaggccccaggcagaactcaaacgactggtacaagtacatgcagcgcggcgcggaggcggtgcacgcggcgaacccgcgggtgctggtgatcctctcgggcctcagcttcgacaacgacctggcgttcctcaactcgcggcaggtgagcctgagcttcgcccggaaggcggcgttcgaggtgcactggtacagcttctccaacggccaggagtgggcggcggggaaccccaacgaggtgtgcgcgcggatcggggccagcgtgtcccgccgcgcgctctacctgctcgactagggctggccggtcttcctcagcgagttcggcgtcgacaaccgcggcgggaacgccaacgacaaccgctactacggctgcgccgccgccgtcgccgccgacctcgacctcgactgggcgctctggacgctgcaggggagctactacctccgccagggcgtgctggacctcgacgaggtctacggcgtgctcgaccgggcctggtccaggccacgcaacgtcaccgcgctccgcagggtccagcccctgcagcgcccgctccgagggcctggctacgcggaggcggcgccgtacacggtgctgttccacccggcgacggggctgtgcgtgctgcggcggtcgctggcgcagccactggagctgggcgcgtgcgccgggacggaggcctgggagtacgcgccgcagcaggggcggctggcgctgcgggacggcccgctgatgtgcctccacgcgcagggcgccggccggcccgtgcgcctcggcacgccttgcgacgacgacatgtcccggtggcgcctcgtgtcggactccaagctgcacgtcgccgtcaacgcatcgtcttcgtcgtcatccggctccggcgatggccgtggcatgctctgcctggacgtcggcgcggacggccagagcgtggtcaccaacccgtgccgctgcctgagcgcggacaacagctgcgacccggagagccagtggttcaagatggtgagcagcacgaggagcgtcgccgccaatagcatgctcgcggagctgcctgtgaagctcgggagctcgaagattcgctcgctttgatcggcgccagtaggaccgacatatataattgtataggtgcacgcatccgttgtactagctgcaaaggcgccgggatggacgagagaagctgctctagaaccggaataatatccttcagagttcagatg

SEQ ID NO: 32080 - protein, 311 aa, Triticum aestivum
MATTGRVRPSPLLAAWLALGFAWHCALHHAPAAAVTLSTASRWVVDEAGDRVKLACVNWPSHLEPMLAEGLGKRPVGAIAGDVATMGFNCVRLTWPTFLVTNASYSSLTVEQSFQRLNLTESLAGIRANNPAVVDLKLIDAFKAVVSSLGENNVMVILDNHVSKPGWCCDNADGNGFFGDGYFEPDVWVDGLTKMATMFAGVPHVVGMSLRNELRGPRQNSNDWYKYMQRGAEAVHAANPRVLVILSGLSFDNDLAFLNSRQVSLSFARKAAFEVHWYSFSNGQEWAAGNPNEVCARIGASVSRRALYLLD

SEQ ID NO: 32081 - protein, 246 aa, Triticum aestivum
MLAEGLGKRPVGAIAGDVATMGFNCVRLTWPTFLVTNASYSSLTVEQSFQRLNLTESLAGIRANNPAVVDLKLIDAFKAVVSSLGENNVMVILDNHVSKPGWCCDNADGNGFFGDGYFEPDVWVDGLTKMATMFAGVPHVVGMSLRNELRGPRQNSNDWYKYMQRGAEAVHAANPRVLVILSGLSFDNDLAFLNSRQVSLSFARKAAFEVHWYSFSNGQEWAAGNPNEVCARIGASVSRRALYLLD

SEQ ID NO: 32082 - protein, 226 aa, Triticum aestivum
MGFNCVRLTWPTFLVTNASYSSLTVEQSFQRLNLTESLAGIRANNPAVVDLKLIDAFKAVVSSLGENNVMVILDNHVSKPGWCCDNADGNGFFGDGYFEPDVWVDGLTKMATMFAGVPHVVGMSLRNELRGPRQNSNDWYKYMQRGAEAVHAANPRVLVILSGLSFDNDLAFLNSRQVSLSFARKAAFEVHWYSFSNGQEWAAGNPNEVCARIGASVSRRALYLLD

SEQ ID NO: 32083 - DNA, 1454 bp, Triticum aestivum
ttttttcttggagggagacttatttttgggcctgatgtgaggtcactcatagccacagtatgtttaattgtcatcccagtgatcatctttgctgccgttgtttctccacagcttgcccatgggtaccaaaatcaaattggaggttgggtggcatctgtatctatcatctttacagcatatattctcgttcttctgcttctcacgtctggacgtgatcctggaattgttccgcgtaattctcatcctccggaaccagaagacattggtgaatcctccaacttatcagattggccaggtggtcaacatggctcagctggtttaccactcaccaaggacgttattgtcaatggtgttttagttaaggtcaaatattgccatacatgtatgctttatcgtccaccaaggtgctcccattgctcaatctgcaataactgtgtcgaacgttttgatcaccactgtccttgggtagggcagtgtattggaaagagaaactaccgcttcttccttatgtttgtatcttcagcaactgtgctatgcatatacgtgttcacattctgctgggtcaacatcgggaaaataatggacacccatgagtgcacatttggtagagctatcttgaagtcgcccatctccgccattctcatgttatacacattcgttgctgtgtggtttgtcggaggattgacctcattccacctctacttgatttccaccaatcagactacttatgagaacttccggtaccgctacaataggagaagcaatccttacaaccgtgggctggtccaaaatttcatcgagatcctatgctcaaggattcccagctccagaaacaatttcagggctaaagctaacgaggattctgcagccttcgcctcaacacttagcatggggtgggtcctaagcccgccgaagatgagcgtggaccttgagatgggcacgaagaggcaagctgtgggtgcagaagacatggaggacttacacagccagattggcagttctatggggcttgagcgatgcggcacagaacccccacattttgtcggtcgaaagggttgctctgaaattgcatctgacatcgagacgtttgcagaagagtttggcatggacaacaagttcactgagaggaaaaagactgtgcggcatacaaatgataatccttaaggcacttacctcacaaaccctctatccctagctcagagcggcatagctcagaaagaaaaaaagaaagtagggcaaatggtagaacagattcgctattttggcttaatctaggtgttatttgtagatcaactgattagcaatataggcatgatggaacacgaattgatggaccagatggtttcactggatccatcttggtttagaatgggttgtactgctagtgatatggactgtacctgttaattcatatgttgtaggttgcgtacgtttgtgtgtgccacagttatcac

SEQ ID NO: 32084 - protein, 387 aa, Triticum aestivum
FFLGGRLIFGPDVRSLIATVCLIVIPVIIFAAVVSPQLAHGYQNQIGGWVASVSIIFTAYILVLLLLTSGRDPGIVPRNSHPPEPEDIGESSNLSDWPGGQHGSAGLPLTKDVIVNGVLVKVKYCHTCMLYRPPRCSHCSICNNCVERFDHHCPWVGQCIGKRNYRFFLMFVSSATVLCIYVFTFCWVNIGKIMDTHECTFGRAILKSPISAILMLYTFVAVWFVGGLTSFHLYLISTNQTTYENFRYRYNRRSNPYNRGLVQNFIEILCSRIPSSRNNFRAKANEDSAAFASTLSMGWVLSPPKMSVDLEMGTKRQAVGAEDMEDLHSQIGSSMGLERCGTEPPHFVGRKGCSEIASDIETFAEEFGMDNKFTERKKTVRHTNDNP

SEQ ID NO: 32085 - protein, 259 aa, Triticum aestivum
MLYRPPRCSHCSICNNCVERFDHHCPWVGQCIGKRNYRFFLMFVSSATVLCIYVFTFCWVNIGKIMDTHECTFGRAILKSPISAILMLYTFVAVWFVGGLTSFHLYLISTNQTTYENFRYRYNRRSNPYNRGLVQNFIEILCSRIPSSRNNFRAKANEDSAAFASTLSMGWVLSPPKMSVDLEMGTKRQAVGAEDMEDLHSQIGSSMGLERCGTEPPHFVGRKGCSEIASDIETFAEEFGMDNKFTERKKTVRHTNDNP

SEQ ID NO: 32086 - protein, 218 aa, Triticum aestivum
MFVSSATVLCIYVFTFCWVNIGKIMDTHECTFGRAILKSPISAILMLYTFVAVWFVGGLTSFHLYLISTNQTTYENFRYRYNRRSNPYNRGLVQNFIEILCSRIPSSRNNFRAKANEDSAAFASTLSMGWVLSPPKMSVDLEMGTKRQAVGAEDMEDLHSQIGSSMGLERCGTEPPHFVGRKGCSEIASDIETFAEEFGMDNKFTERKKTVRHTNDNP

SEQ ID NO: 32087 - DNA, 1657 bp, Triticum aestivum
atcaacagcaaacaagaagctgtccctttcgctctcctctcttcttccgttaccactcaccctcccgctcctcgccctttaaggcatacccctctccaatcctccttgaaccttagagagagagagaccaagaatggctcgtgagatgaatggctacttcagccaccctccgcctccgcctccggttccggcgccgtaccaggaggaggcggccgcggacgtggacgacgcggaggacggcagcggcgggcaggggaagctctgctccaggggccactggaggcccgccgaggacgccaggctcaaggaactcgtcggccagtacggcccccagaactggaacctcatcgccgagaagctcgacggcagatcaggtaataagaaaaataaaacaacctctaatatgtggagttcctccgatgcaatgctgtttcatttcggattcgaagatgcattgaatgcgcaaacggaactactcctactactggtttcttttactgcaaccatcttccgtttcgtgtggataacttcttttctttctttctttcttgtaaaagtaaaaacatgcattttagtattaatttggagtgtgttgcggttaacgcaatggtgatcgtgggttgtgcctgattcgttcgtggtttattttgtggtgatgtcggccaacagggaaaagctgccgtctgcggtggttcaaccagctggacccgcggatcaaccgccgggcgttcacggaggaggaggaggaccggctgatggcggcgcaccgcgcctacggcaacaagtgggccctcatcgcccgcctcttccccggccgcactgacaacgccgtcaagaaccactggcacgtcctcatggcccgcaggcagcgggagcagtccggggccttccgccgccgcaccaagcccgcctcctcctcctcctcctccatcgccccggcgccgcactacccaggcgtctttctccagcaccagcaccagcaccagcaccactaccagcaccacggggcttctcccattcccatgccgctccagccgttcgccatgggggtggccatagcaaccggggtgtacagcaaggccgccacggccacggccagccgcgcctacagcggcggcgagtccgacgagtcggcgtccacctgcaccaccgacctctccctcagctccggcagcgccgccgtcccctgcttctaccaccaccagggctacgacatggctccgcaagctcacgccgtgacccaggcgttctcgccgagcgcgcgctccgccttctccgccccgtcgtcctcgtcggcgcggcaacagcagcgcaggcagcagcagcacgaggagcaggatggcgacaagctcagcctgcccttcttcgacttcctgggcgtgggctcgacatgaccgggcggggcggtgcggtgtacaggtggaggccgatatcatcatcatcgtcgtcgtcctaagggaggcggccaatccttcctagctagttaagcaaggttagagtctagaagaaccagactaggagaagatgaggaggatgaggagttaagtagttttatttatggcgatgaatgtgacctctctggtttcactcctcctcagttttgctgctgattacagtacttattcagatggaaaagaagtcgcatgtcatgtaatgc

SEQ ID NO: 32088 - protein, 212 aa, Triticum aestivum
MAAHRAYGNKWALIARLFPGRTDNAVKNHWHVLMARRQREQSGAFRRRTKPASSSSSSIAPAPHYPGVFLQHQHQHQHHYQHHGASPIPMPLQPFAMGVAIATGVYSKAATATASRAYSGGESDESASTCTTDLSLSSGSAAVPCFYHHQGYDMAPQAHAVTQAFSPSARSAFSAPSSSSARQQQRRQQQHEEQDGDKLSLPFFDFLGVGST

SEQ ID NO: 32089 - protein, 179 aa, Triticum aestivum
MARRQREQSGAFRRRTKPASSSSSSIAPAPHYPGVFLQHQHQHQHHYQHHGASPIPMPLQPFAMGVAIATGVYSKAATATASRAYSGGESDESASTCTTDLSLSSGSAAVPCFYHHQGYDMAPQAHAVTQAFSPSARSAFSAPSSSSARQQQRRQQQHEEQDGDKLSLPFFDFLGVGST

SEQ ID NO: 32090 - protein, 159 aa, Triticum aestivum
MAREMNGYFSHPPPPPPVPAPYQEEAAADVDDAEDGSGGQGKLCSRGHWRPAEDARLKELVGQYGPQNWNLIAEKLDGRSGNKKNKTTSNMWSSSDAMLFHFGFEDALNAQTELLLLLVSFTATIFRFVWITSFLSFFLVKVKTCILVLIWSVLRLTQW

SEQ ID NO: 32091 - DNA, 1529 bp, Triticum aestivum
ctttaacagcataccctaaactggttacctatattcatcccattgcatctatctctattcaagggtgccaacacactccaaataaattgtagtacaatgcatcaaacaatgattcaaatactttccataatccaccacaggttaggttaattttttaggaatacattgcatgtcaaatgattcaaatattatcagagctctttatggtgaatgctgatagttatgcaagttagtttaagtaattttaccacatgcatggagatggtagcatcagctgcatgacgcataccttctgaattatgtaattcctccattgcggttgtcccctagttcttttagatatttcataccttattttgttgtccagccattttttgtattaagatctcattagttgttagggtttagttggtacctcaacacaaagtcggtcagcactgagtaaagttcatcatatcatcaattggcttgttaactgccactgttttgattgtttagaatgctgtatcgctgtcttttattcactcttcaccgcttgcaggtacctgagaaacatggcagtggtggccatttaagttactttcttgttgtatgcgcaattggtggagtggtaactgtctattgtatgcttgaaaaaactcagtatgtggatgttgatgaagatgtagtacttcctgactttgttgactggtctgctgcgcctgcatttgttgatatggttcatccaagctacaatttccattgcggttccttctgggctgtcgttgctgttaaatccattgaggcggagtatgccataaaaaatggtgtggttttgaatttgtcagttcaacaagttatagactgtgctgccattgagggctgcaaaggttcttcccttatgaaggcctatagatacatcaaggttgctggcttgaccactgaagagtcatatcctggcccaccatccccaggcaggtcatttttgcatggtctgtttcgtggttattgccggatggagggcaagcctgttgctgtgagaattgaaggtgttcagagggtacgggccacggaggatcacttgatgagagctcttcaatcttcccctgttgctgtgtatgttaacgtaaatgaccgatttagaaaataccgcggggagggttatcttgatatcaatgactgcccacctcgttctgtaaagcctgggggaaggcatgttcttttgctagtaggctatggcaccgacagcgatggcaccaaatactggaaggtaatgaatacttgggggacatggtggggtaagcatggttacggcaagtttatcagggatggtcacccacacggtgtggcaggtatcaccgagtacaatgggtttaggcccgtgctcagcaagagctgttgcaagtaggttggttttaggcaagtagtttggttttaggcctgtgctcagcaagagctgttgcaagtagtttggttttaggtgcaaccctagaagtctgaatatgtaactctgacagccttttactgtgagcggcaaatataacctgctg

SEQ ID NO: 32092 - protein, 295 aa, Triticum aestivum
MLYRCLLFTLHRLQVPEKHGSGGHLSYFLVVCAIGGVVTVYCMLEKTQYVDVDEDVVLPDFVDWSAAPAFVDMVHPSYNFHCGSFWAVVAVKSIEAEYAIKNGVVLNLSVQQVIDCAAIEGCKGSSLMKAYRYIKVAGLTTEESYPGPPSPGRSFLHGLFRGYCRMEGKPVAVRIEGVQRVRATEDHLMRALQSSPVAVYVNVNDRFRKYRGEGYLDINDCPPRSVKPGGRHVLLLVGYGTDSDGTKYWKVMNTWGTWWGKHGYGKFIRDGHPHGVAGITEYNGFRPVLSKSCCK

SEQ ID NO: 32093 - protein, 253 aa, Triticum aestivum
MLEKTQYVDVDEDVVLPDFVDWSAAPAFVDMVHPSYNFHCGSFWAVVAVKSIEAEYAIKNGVVLNLSVQQVIDCAAIEGCKGSSLMKAYRYIKVAGLTTEESYPGPPSPGRSFLHGLFRGYCRMEGKPVAVRIEGVQRVRATEDHLMRALQSSPVAVYVNVNDRFRKYRGEGYLDINDCPPRSVKPGGRHVLLLVGYGTDSDGTKYWKVMNTWGTWWGKHGYGKFIRDGHPHGVAGITEYNGFRPVLSKSCCK

SEQ ID NO: 32094 - protein, 223 aa, Triticum aestivum
MVHPSYNFHCGSFWAVVAVKSIEAEYAIKNGVVLNLSVQQVIDCAAIEGCKGSSLMKAYRYIKVAGLTTEESYPGPPSPGRSFLHGLFRGYCRMEGKPVAVRIEGVQRVRATEDHLMRALQSSPVAVYVNVNDRFRKYRGEGYLDINDCPPRSVKPGGRHVLLLVGYGTDSDGTKYWKVMNTWGTWWGKHGYGKFIRDGHPHGVAGITEYNGFRPVLSKSCCK

SEQ ID NO: 32095 - DNA, 1582 bp, Triticum aestivum
atttcgagacaattatgctgtgctggtccgtcgcactcgcacggaagaaaaggcccggagcgcagagacggccaaatgagttgctcataattccgtctcgctgctggttcgtttagcgccattctcccaggctgctacgaaactcagggccgcgtccgcgtcaatggcttcttgctgctgcccaatcattgcctggttcgtctctttcctcctcgtcttccccgtcctcgtctcctccgcgacggcgggcaatggcagcacattcggggaggagcagctcgggctccggcggatgaaggcccggctcgccagggtcagggaagcctctgtcaagacgatccagagccccgacggcgacgtcatagactgcgtgccctctcacctgcagcccgcgttcgatcatcccaggctgagaggccagaaaccagaggacgaacctgcggcgcggccagggaatgccggcgccgtggcagacgacgaggaggaggtcttgccgcagacgtggaggagctccggcgagtggtgccccaaggggacgataccggttaggcgggcgacggagggcgacctgctcagggccagctccgtccggaggttcgggatgaagccccggagtgccgcggcacggcgggactccaccagcaacggccatgagcacgcggtggggtacgtgagcggcgggcagttctacggcgccaaggcgagcctgaacgtgtggccggcgcacgtgtcgtcgccggcggagttcagcctgtcccagatctgggtcatctccggctccttcggcaacgacctcaacaccatcgaggccggctggcaggtcagccctgagctgtacggggacaacagccccaggttcttcacctactggaccaacgacgcgtaccaggagacggggtgctacaacctgcactgcgcggggttcgtgcagaccaacggccgggtggtgatcggcgccgccatcacgccggtgtcggcctacggcggccggcagttcgacatcacgctcatgatctggaaggaccccaagaagggcaactggtggctgcagctgggcccgtcgggcgcgctcgtgggctactggccgtcctccctcttcacccacctgggcgcgcgcggccgcggcggcgccgacatggtgcagttcggcggcgaggcggtcaacacgcggccgtccgggtcgcacacgcccacgcagatgggcagcggccggttccccggcgaagggtacggccgcgcggcctacttccggaacgtgcaggtcgtggactgggacaacaacctcatcccggcggccgggctacggctcctcgccgaccacccggggtgctacgacatcgccggcggccagggcggcgcgtggggcagctacttctactacggcgggcctggcaggaacgtccggtgcccctagaaccgatactgcttactcaggccacagatgctaattccagcaaaattaatataccacaaaagtctttagttataatttctttgcatgcatgcttgtttatgatcatagatagagtttttttgcactcgaatttatttgaaaggagggacattgactcgcattgcacgc

SEQ ID NO: 32096 - protein, 416 aa, Triticum aestivum
MASCCCPIIAWFVSFLLVFPVLVSSATAGNGSTFGEEQLGLRRMKARLARVREASVKTIQSPDGDVIDCVPSHLQPAFDHPRLRGQKPEDEPAARPGNAGAVADDEEEVLPQTWRSSGEWCPKGTIPVRRATEGDLLRASSVRRFGMKPRSAAARRDSTSNGHEHAVGYVSGGQFYGAKASLNVWPAHVSSPAEFSLSQIWVISGSFGNDLNTIEAGWQVSPELYGDNSPRFFTYWTNDAYQETGCYNLHCAGFVQTNGRVVIGAAITPVSAYGGRQFDITLMIWKDPKKGNWWLQLGPSGALVGYWPSSLFTHLGARGRGGADMVQFGGEAVNTRPSGSHTPTQMGSGRFPGEGYGRAAYFRNVQVVDWDNNLIPAAGLRLLADHPGCYDIAGGQGGAWGSYFYYGGPGRNVRCP

SEQ ID NO: 32097 - protein, 373 aa, Triticum aestivum
MKARLARVREASVKTIQSPDGDVIDCVPSHLQPAFDHPRLRGQKPEDEPAARPGNAGAVADDEEEVLPQTWRSSGEWCPKGTIPVRRATEGDLLRASSVRRFGMKPRSAAARRDSTSNGHEHAVGYVSGGQFYGAKASLNVWPAHVSSPAEFSLSQIWVISGSFGNDLNTIEAGWQVSPELYGDNSPRFFTYWTNDAYQETGCYNLHCAGFVQTNGRVVIGAAITPVSAYGGRQFDITLMIWKDPKKGNWWLQLGPSGALVGYWPSSLFTHLGARGRGGADMVQFGGEAVNTRPSGSHTPTQMGSGRFPGEGYGRAAYFRNVQVVDWDNNLIPAAGLRLLADHPGCYDIAGGQGGAWGSYFYYGGPGRNVRCP

SEQ ID NO: 32098 - protein, 270 aa, Triticum aestivum
MKPRSAAARRDSTSNGHEHAVGYVSGGQFYGAKASLNVWPAHVSSPAEFSLSQIWVISGSFGNDLNTIEAGWQVSPELYGDNSPRFFTYWTNDAYQETGCYNLHCAGFVQTNGRVVIGAAITPVSAYGGRQFDITLMIWKDPKKGNWWLQLGPSGALVGYWPSSLFTHLGARGRGGADMVQFGGEAVNTRPSGSHTPTQMGSGRFPGEGYGRAAYFRNVQVVDWDNNLIPAAGLRLLADHPGCYDIAGGQGGAWGSYFYYGGPGRNVRCP

SEQ ID NO: 32099 - DNA, 1789 bp, Triticum aestivum
atcgacgatccatcccgtgtgcggccgcccacaccagtttcctcgtccccacaagcagcggcacggctaaaaacggggggacgcttccctttcatctcgcgactataaaaaagaacgggcggccctgcctaaagccccctctcctcgccttctccgccctccgctccattcgtttcgatctatttcggcttcttcctctccaagctacagccccggccatggcggcgacgatccagtccgtgaaggcccgccagatcttcgacagccgcggcaaccccaccgtcgaggttgatgtgtgctgctcagatggaaccttcgccagggccgctgttcccagcggtgcatcaactggtgtttatgaagctttggaactgagagacggtggatctgactacttgggaaagggtgtttccaaggctgttgacaatgtgaacttgattatcgcaccagctttgattggcaaggaccctacagctcaaactgagctcgacaactttatggttcagcagcttgatggaaccaaaaacgaatggggttggtgcaagcagaagcttggtgctaatgcaatcctggctgtgtcactagctatttgcaaagctggagccagcatcaagaagattccgctgtaccagcacattgccaaccttgctggcaacaagcaattggttttgcctgttcctgcattcaatgtcatcaatggtggatcccatgctggaaacaagcttgctatgcaggagttcatgatccttcctactggagctgcctcattcaaggaggcaatgaagatgggcgttgaagtgtaccacaacttgaagtctgttatcaagaagaagtacgggcaagatgccaccaatgttggagatgaaggtggttttgctcctaacattcaggagaataaggagggccttgagctcttgaagactgcaattgaaaaggctggatacaccggcaaggttgtcattggaatggatgttgctgcttcagagttctacaatgacaaggacaaaacatatgacctcaacttcaaggaagagaacaacgatggttcccagaagatatctggagatagcctgaagaatgtatacaagtcattcgtgagtgagtaccccattgtgtcgattgaggacccatttgaccaggatgactgggtgcactatgctaagatgactgaagaatgtggagagcaagttcagattgttggtgatgaccttctagtcaccaacccaaccagagttgcgaaggcaatcaaggagaagtcatgcaatgctcttctgctgaaggttaaccaaattggatccgtcactgaaagtatcgaggccgtgaagatgtcgaaacatgctggctggggtgtgatgaccagtcacaggagtggtgagactgaggacacattcattgctgatttggctgttggtttgtccacgggtcagatcaagactggggctccctgccgctcagagcggcttgccaagtacaaccagcttctgaggatcgaggaagagctgggcgctgccgctgtgtatgccggcctcaagttccgcgcaccggtggagccatactagatgggacctgcatccgagacatgatcactctgcacttgtttttgtgaaagtgggcgtgtcttaacttgtggaatgaactatggttgaagctcttaggactagtcgagcaataatgtaccgcatgttgctgtgaacgggacggatatgtacctacgtgctccaaacttgctccaattttggtctttgtggtgagcgagcaagcacgcctgattaccttttggatctctagc

SEQ ID NO: 32100 - protein, 518 aa, Triticum aestivum
RRSIPCAAAHTSFLVPTSSGTAKNGGTLPFHLATIKKNGRPCLKPPLLAFSALRSIRFDLFRLLPLQATAPAMAATIQSVKARQIFDSRGNPTVEVDVCCSDGTFARAAVPSGASTGVYEALELRDGGSDYLGKGVSKAVDNVNLIIAPALIGKDPTAQTELDNFMVQQLDGTKNEWGWCKQKLGANAILAVSLAICKAGASIKKIPLYQHIANLAGNKQLVLPVPAFNVINGGSHAGNKLAMQEFMILPTGAASFKEAMKMGVEVYHNLKSVIKKKYGQDATNVGDEGGFAPNIQENKEGLELLKTAIEKAGYTGKVVIGMDVAASEFYNDKDKTYDLNFKEENNDGSQKISGDSLKNVYKSFVSEYPIVSIEDPFDQDDWVHYAKMTEECGEQVQIVGDDLLVTNPTRVAKAIKEKSCNALLLKVNQIGSVTESIEAVKMSKHAGWGVMTSHRSGETEDTFIADLAVGLSTGQIKTGAPCRSERLAKYNQLLRIEEELGAAAVYAGLKFRAPVEPY

SEQ ID NO: 32101 - protein, 446 aa, Triticum aestivum
MAATIQSVKARQIFDSRGNPTVEVDVCCSDGTFARAAVPSGASTGVYEALELRDGGSDYLGKGVSKAVDNVNLIIAPALIGKDPTAQTELDNFMVQQLDGTKNEWGWCKQKLGANAILAVSLAICKAGASIKKIPLYQHIANLAGNKQLVLPVPAFNVINGGSHAGNKLAMQEFMILPTGAASFKEAMKMGVEVYHNLKSVIKKKYGQDATNVGDEGGFAPNIQENKEGLELLKTAIEKAGYTGKVVIGMDVAASEFYNDKDKTYDLNFKEENNDGSQKISGDSLKNVYKSFVSEYPIVSIEDPFDQDDWVHYAKMTEECGEQVQIVGDDLLVTNPTRVAKAIKEKSCNALLLKVNQIGSVTESIEAVKMSKHAGWGVMTSHRSGETEDTFIADLAVGLSTGQIKTGAPCRSERLAKYNQLLRIEEELGAAAVYAGLKFRAPVEPY

SEQ ID NO: 32102 - protein, 353 aa, Triticum aestivum
MVQQLDGTKNEWGWCKQKLGANAILAVSLAICKAGASIKKIPLYQHIANLAGNKQLVLPVPAFNVINGGSHAGNKLAMQEFMILPTGAASFKEAMKMGVEVYHNLKSVIKKKYGQDATNVGDEGGFAPNIQENKEGLELLKTAIEKAGYTGKVVIGMDVAASEFYNDKDKTYDLNFKEENNDGSQKISGDSLKNVYKSFVSEYPIVSIEDPFDQDDWVHYAKMTEECGEQVQIVGDDLLVTNPTRVAKAIKEKSCNALLLKVNQIGSVTESIEAVKMSKHAGWGVMTSHRSGETEDTFIADLAVGLSTGQIKTGAPCRSERLAKYNQLLRIEEELGAAAVYAGLKFRAPVEPY

SEQ ID NO: 32103 - DNA, 2231 bp, Triticum aestivum
acctcgctcactccccaagctcactctcacacccacttcaaacccctccaccccaaaccccagccacccacccaccatggccgcccaccccaccgggaccaagaagcggagcggcagcggccatggggccgccgcggccctcgtcgtcgccgccctcctcgtcctctgctccaccgcgtccatggcgctcaccccggacggcgaggcgctgctggagctcaagctggcattcaacgccacggcggggcagcggctgggcagctggcgggccgccgaccccaacccctgcggctgggagggcgtctcctgctccttcccggacctcagggtccatgccataaatctgccctacatgcagctcgggggcatcatctcgcccagcatcggcaggctcaccaagctgcagagactagctctgcaccagaacagcctgcacggccccatccccgccgagatcaggaactgcaccgagctcagagccatttacctgagagccaactacctgcaaggcggcatccctccggggatcggcgacctcactcacctcaccatcctggacctgtccagcaatctgctgcggggtgcaataccggcgacgatcgggagcctaactcatttgcggttcctgaacctctccaccaacttcttctcgggagagatcccgaatgtcggcgtcctcggaaccttcaagagcagctcgtatgtcggaaatctggagctttgtgggctgcccatacagaaaggttgccgcggaaccctcgggttccctgcggtgctgccgcactctgaccccctctcctcctctggtgtttctccaatcaccaacaataataaaacctcacactttctgaatggcgttgtgatcggttcaatgtcaaccatggccatcgcgctggtcgcggtgctaggcttcctctgggtatgcttgctgtccaggaagaagaatggtgtgaactatgagaaaatggacaagcaaactgtcccggatggtgcaaagcttgtgacataccagtggaaccttccgtattcgtcgggcgagatcattagaaggctggagctgcttgatgaagaggatgtggttggttgcggcgggtttggtacggtgtacaagatggtgatggatgatggcacggcgtttgccgtcaagagggttgacctcaatcgagagaggcgagacaagacttttgagaaggagctcgagatcctgggcagcattaggcatatcaaccttgtcaatctgcaaggatactgccggctctccacggccaaactactcatatatgatttcatggagctgggcagcttggatagctacctccatggagatgcacaggaggatcagccattgaactggaatgcgcgtatgaagatcgccctgggctctgcccgcggtttggcatatctgcaccatgattgctcgccggggatcgtccaccgggacatcaaagccagcaacatccttctggacagatgcttggagccgcgcgtgtctgatttcggcctcgcgaggctgctggtggacaatgagacccatgtaaccactgtcgtggcgggtaccttcgggtacctagcaccagagtacctgcaaaatgggcattcgaccgagaaatcagacgtgtatagctttggggtgcttttgctggaactggtgaccggaaagaggcctacggattcttgcttcctcaacaagggtctcaacatcgtcggctggctgaacacgctgagcggggagcatcgcctggaggagatcctggactcgcggtcgggcgacgcggaggtggaggcggtggaggggatcctggacatcgcggccatgtgcacggacgcggacccggggcagcggccgtccatgggcgcggtgctcaagatgctggaggaggagatcctgtcgccctgcctcagcgagctctactacgagcagcacctggagctctgagagccttgagtgtaggtgagtgagtggacagtgccagttgtgcaggtactgctgctcatgatcgaccgatgatggcctggatctggattgaagaagctcaagttttgtagatacgcttgatgatgaaccaccaccgtgtgtgtaggatggactgtgttggcatctctagactagcgagtggttcttgggtcagaaccaggaccaatgcagcaatcggctgtgctttttgtacatagggttggagacctttgagccttttctttcatcccctttttccgacgtggttgcttcttcg

SEQ ID NO: 32104 - protein, 644 aa, Triticum aestivum
PRSLPKLTLTPTSNPSTPNPSHPPTMAAHPTGTKKRSGSGHGAAAALVVAALLVLCSTASMALTPDGEALLELKLAFNATAGQRLGSWRAADPNPCGWEGVSCSFPDLRVHAINLPYMQLGGIISPSIGRLTKLQRLALHQNSLHGPIPAEIRNCTELRAIYLRANYLQGGIPPGIGDLTHLTILDLSSNLLRGAIPATIGSLTHLRFLNLSTNFFSGEIPNVGVLGTFKSSSYVGNLELCGLPIQKGCRGTLGFPAVLPHSDPLSSSGVSPITNNNKTSHFLNGVVIGSMSTMAIALVAVLGFLWVCLLSRKKNGVNYEKMDKQTVPDGAKLVTYQWNLPYSSGEIIRRLELLDEEDVVGCGGFGTVYKMVMDDGTAFAVKRVDLNRERRDKTFEKELEILGSIRHINLVNLQGYCRLSTAKLLIYDFMELGSLDSYLHGDAQEDQPLNWNARMKIALGSARGLAYLHHDCSPGIVHRDIKASNILLDRCLEPRVSDFGLARLLVDNETHVTTVVAGTFGYLAPEYLQNGHSTEKSDVYSFGVLLLELVTGKRPTDSCFLNKGLNIVGWLNTLSGEHRLEEILDSRSGDAEVEAVEGILDIAAMCTDADPGQRPSMGAVLKMLEEEILSPCLSELYYEQHLEL

SEQ ID NO: 32105 - protein, 619 aa, Triticum aestivum
MAAHPTGTKKRSGSGHGAAAALVVAALLVLCSTASMALTPDGEALLELKLAFNATAGQRLGSWRAADPNPCGWEGVSCSFPDLRVHAINLPYMQLGGIISPSIGRLTKLQRLALHQNSLHGPIPAEIRNCTELRAIYLRANYLQGGIPPGIGDLTHLTILDLSSNLLRGAIPATIGSLTHLRFLNLSTNFFSGEIPNVGVLGTFKSSSYVGNLELCGLPIQKGCRGTLGFPAVLPHSDPLSSSGVSPITNNNKTSHFLNGVVIGSMSTMAIALVAVLGFLWVCLLSRKKNGVNYEKMDKQTVPDGAKLVTYQWNLPYSSGEIIRRLELLDEEDVVGCGGFGTVYKMVMDDGTAFAVKRVDLNRERRDKTFEKELEILGSIRHINLVNLQGYCRLSTAKLLIYDFMELGSLDSYLHGDAQEDQPLNWNARMKIALGSARGLAYLHHDCSPGIVHRDIKASNILLDRCLEPRVSDFGLARLLVDNETHVTTVVAGTFGYLAPEYLQNGHSTEKSDVYSFGVLLLELVTGKRPTDSCFLNKGLNIVGWLNTLSGEHRLEEILDSRSGDAEVEAVEGILDIAAMCTDADPGQRPSMGAVLKMLEEEILSPCLSELYYEQHLEL

SEQ ID NO: 32106 - protein, 584 aa, Triticum aestivum
MALTPDGEALLELKLAFNATAGQRLGSWRAADPNPCGWEGVSCSFPDLRVHAINLPYMQLGGIISPSIGRLTKLQRLALHQNSLHGPIPAEIRNCTELRAIYLRANYLQGGIPPGIGDLTHLTILDLSSNLLRGAIPATIGSLTHLRFLNLSTNFFSGEIPNVGVLGTFKSSSYVGNLELCGLPIQKGCRGTLGFPAVLPHSDPLSSSGVSPITNNNKTSHFLNGVVIGSMSTMAIALVAVLGFLWVCLLSRKKNGVNYEKMDKQTVPDGAKLVTYQWNLPYSSGEIIRRLELLDEEDVVGCGGFGTVYKMVMDDGTAFAVKRVDLNRERRDKTFEKELEILGSIRHINLVNLQGYCRLSTAKLLIYDFMELGSLDSYLHGDAQEDQPLNWNARMKIALGSARGLAYLHHDCSPGIVHRDIKASNILLDRCLEPRVSDFGLARLLVDNETHVTTVVAGTFGYLAPEYLQNGHSTEKSDVYSFGVLLLELVTGKRPTDSCFLNKGLNIVGWLNTLSGEHRLEEILDSRSGDAEVEAVEGILDIAAMCTDADPGQRPSMGAVLKMLEEEILSPCLSELYYEQHLEL

SEQ ID NO: 32107 - DNA, 1618 bp, Triticum aestivum
cccaccaccccgcgcatttattcccctcccgtcctccccccgcgccatgccgtcgcgcccctcctctcctcccacgcccgcctccccgcccgtccgacaccgcccgtcccacgctggcgccgccccccgccgccgtcgccgtcgccgcaacgatgccggagcctgacgacgagggggcggggcagcagcagccaaaggcggggcccgcgctcgagggcctcgtggtggggagctactgccacgacgtgctcctccagggcggccgcgtcgtgggcgagacgctcggcggggcggcggccttcgtctccaccgtgctcgacgccgcctcgcccccggaggcctccttctccgtcgtgtccaaggtcgggcccgacttcgcctacgcctccgcgccggcgcccgcgcggcaccccccgctgctctgccccgcgcggcccaccacctccttccacgcccggttctccgacgccgccgcgtccgcgcacgcgcccgacaggcagctcaggcgcgtccacgcctgcgatccgatctaccccgatgacctccccgaccgccgcttcgcctacggcctcgccgtcggcgtcgccggggaggtgctgccggagacgctcgagcggatgattcggctctgccgcgcggtgctcgtggacgcgcaggcgctgatccgggccttcggcgccgagggcgacggcagcggcgctgccgtccgccacgtggcgctggagggcacgccgtacgcgcggcttctgcagcgggtggcgttcctcaaggcgtcgtcggaggaggcgccgtacgtgggggtggagacggcgagacggcgctgctgcgtgatcgtgacggaggggagggacgggtgccggctttattgggacggcggggaggcacgcgtggcgccgttccccgccgtccaggtggatcctacaggtgccggagacagctatctcgccggtttcgcggccggtctgctttgggggctctcagctacggacgccgcgctgcttggtaacttcttcggcgcagctgctgtctcccaagtcggcgttcccaccttccatcccaagatgttgcaggctgtcaaacggatactcgaggacaaggcgataccatggtctagtccatgtataaacggcaccaccttcaccttccagagatcgattatgcacgatgagctacacgcgtccctggaagaagcggcgaggctgatgcgcgagcagtcaccaccagcaactgagaatggtgatggtattctctcggcacaagagccgacttcaccgccaagtggatgctgacctgaagttcactgcgaaataatgggaaactgccctcccagattttacattgagatctgtacagccaacagacgaaatagattgctcggccagagcttacactcatgaactgtgttgaatagggttctactcagacagtttctcatttgtcaggcaaagcaaaagagcgagttagcatatggagcaccattctgtaatactgagattgagcttgtttcggctgggctgtacataccgccccttcaagttccccctataattttgtagttcatgagatccaacaaaagtactcgtattatggaggcaaatttacacatggttttaaagtt

SEQ ID NO: 32108 - protein, 428 aa, Triticum aestivum
HHPAHLFPSRPPPAPCRRAPPLLPRPPPRPSDTARPTLAPPPAAVAVAATMPEPDDEGAGQQQPKAGPALEGLVVGSYCHDVLLQGGRVVGETLGGAAAFVSTVLDAASPPEASFSVVSKVGPDFAYASAPAPARHPPLLCPARPTTSFHARFSDAAASAHAPDRQLRRVHACDPIYPDDLPDRRFAYGLAVGVAGEVLPETLERMIRLCRAVLVDAQALIRAFGAEGDGSGAAVRHVALEGTPYARLLQRVAFLKASSEEAPYVGVETARRRCCVIVTEGRDGCRLYWDGGEARVAPFPAVQVDPTGAGDSYLAGFAAGLLWGLSATDAALLGNFFGAAAVSQVGVPTFHPKMLQAVKRILEDKAIPWSSPCINGTTFTFQRSIMHDELHASLEEAARLMREQSPPATENGDGILSAQEPTSPPSGC

SEQ ID NO: 32109 - protein, 378 aa, Triticum aestivum
MPEPDDEGAGQQQPKAGPALEGLVVGSYCHDVLLQGGRVVGETLGGAAAFVSTVLDAASPPEASFSVVSKVGPDFAYASAPAPARHPPLLCPARPTTSFHARFSDAAASAHAPDRQLRRVHACDPIYPDDLPDRRFAYGLAVGVAGEVLPETLERMIRLCRAVLVDAQALIRAFGAEGDGSGAAVRHVALEGTPYARLLQRVAFLKASSEEAPYVGVETARRRCCVIVTEGRDGCRLYWDGGEARVAPFPAVQVDPTGAGDSYLAGFAAGLLWGLSATDAALLGNFFGAAAVSQVGVPTFHPKMLQAVKRILEDKAIPWSSPCINGTTFTFQRSIMHDELHASLEEAARLMREQSPPATENGDGILSAQEPTSPPSGC

SEQ ID NO: 32110 - protein, 223 aa, Triticum aestivum
MIRLCRAVLVDAQALIRAFGAEGDGSGAAVRHVALEGTPYARLLQRVAFLKASSEEAPYVGVETARRRCCVIVTEGRDGCRLYWDGGEARVAPFPAVQVDPTGAGDSYLAGFAAGLLWGLSATDAALLGNFFGAAAVSQVGVPTFHPKMLQAVKRILEDKAIPWSSPCINGTTFTFQRSIMHDELHASLEEAARLMREQSPPATENGDGILSAQEPTSPPSGC

SEQ ID NO: 32111 - DNA, 1029 bp, Triticum aestivum
tactgcaacaattcttggtgctggttttgggaggggtggaactagcttgccattttgggaaaatgtgtatggctttgatatgtcatgtattggcaaagaagtaacagggagttcagccagatttcctgtagttgatgtacttgattccaaggatgttgtgacagatactgctgtgctccattacttcgatctggcaactatgaaggaaagtgaaatggatttcaccgcgagcttggagctcaggcttcctgaaagtggcgcagctgctgtagcaggagtaacctggtgccatggcattgtcttgtggtttgacactggcttcaccgacagattctgcaaggacaagcctgtggttctgtccacctctcctttctccacaccaactcactggtcgcaaacaatcttcacctttgaagagcccatagcgattacaaatgagaaatcagtcgttggctcatctgcatcagttggctcagcggagtgcccagctgggacgatcagatcccgcatcagcattgtgagggcctctgagcaccgcagcatagacatatcattcgaaaccacgggaatcagctcagatggccggaagcgcagctggccagctcagatcttcaacctttgagcgaagtgctgcccttgtgatgaaattttgcccttgcccttttccaccgccgaagctgttcggtcacccacagcgattcttcgtatcttttggtggatttgaaaactttctatgctgaagggagtgcttggtccaacaagttctggtgaagatggtggactgaaggtagacttattaattgccagtagtatgagttagtgtcctgtgagatgcatgtacccgtgaaatgaagccgggcaaacttcaatatggatccaccgatgttagatggtcacatgatgagtggaaatgtttcattttcttagtagcagtacattatcatcgttgctccttccttggctgcatgatgaactggaaaatgtagagtttaatagcgttatgtgcaatttcttatgtgatgagctttt

SEQ ID NO: 32112 - protein, 206 aa, Triticum aestivum
TATILGAGFGRGGTSLPFWENVYGFDMSCIGKEVTGSSARFPVVDVLDSKDVVTDTAVLHYFDLATMKESEMDFTASLELRLPESGAAAVAGVTWCHGIVLWFDTGFTDRFCKDKPVVLSTSPFSTPTHWSQTIFTFEEPIAITNEKSVVGSSASVGSAECPAGTIRSRISIVRASEHRSIDISFETTGISSDGRKRSWPAQIFNL

SEQ ID NO: 32113 - protein, 180 aa, Triticum aestivum
MSCIGKEVTGSSARFPVVDVLDSKDVVTDTAVLHYFDLATMKESEMDFTASLELRLPESGAAAVAGVTWCHGIVLWFDTGFTDRFCKDKPVVLSTSPFSTPTHWSQTIFTFEEPIAITNEKSVVGSSASVGSAECPAGTIRSRISIVRASEHRSIDISFETTGISSDGRKRSWPAQIFNL

SEQ ID NO: 32114 - protein, 140 aa, Triticum aestivum
MKESEMDFTASLELRLPESGAAAVAGVTWCHGIVLWFDTGFTDRFCKDKPVVLSTSPFSTPTHWSQTIFTFEEPIAITNEKSVVGSSASVGSAECPAGTIRSRISIVRASEHRSIDISFETTGISSDGRKRSWPAQIFNL

SEQ ID NO: 32115 - DNA, 1582 bp, Triticum aestivum
ctggccagaccgagctgctcttcctcctccagttcagacgtggcggtttgactttctgacctcggaaacgatcgaaggcgccttccgtgggaaaaatcccggggcgattcctggagaagaagccgcggattcaggggcggtagaggagagcgcgcctcgccgttaccaggattttcgcccccgccctcgctccgatcgaggagaactttattaactactgaagataactggtagcggaatgaaggcaccatcactgcttgttcagtgtttccctggcttgcttccaagcaaggccactagttgtgtgccgattatatcagagagggatctgcatctaccatcaccagctgttgaactaatcccttcaaagagtgctcatccttacaaatatgctggagagaaggtcgatgtccaaggtcttgatgttttcaaggggaaggtcagtgtagcagatatgatagccttttccccttctgaagtagcatcatcaaagcatgatggtagtctcaaatattgggagagttccatcactattgtgaatattattaagaatgagatccgtgatgggcagctgagcttcaggggcaagcgagttctagagcttggatgtggatctggccttgctgggatttttgcctgcttgaagggtgcgtctatagttcacttccaggacacaaatgcagaaaccataagatgcagaacaatgcccaatgtgcttgcgaatcttgagcaggctcgggacagacagaacagaccatcagagagcccagttacaccatccagacagttgttagctcccgttgtccatttctatgccggggagtgggatgagctccccacaattctctcagttgtgcatccacctgcacaaccaacaaaccttagcttctctgaggatgattttatggatggctgcagtagccatgacggaagcagtatagttggtcaggaccccaggcgatcgaggaagctttctggcagccgtgcatgggagagggccagtgagactgacccagcagatggaggatacgatgtaattttgatttctgagatccctaatgcggtgaactctctaaggaagctctatgcccttatcactaagtgcctacgccctccttatggagtcttgtatgtggcttcaaagaagaacttggttggttcaaacggcggcgcaaggcagcttaaaagtttgatggaggaggaaggtgtccttggtggtcacttcttgactgagatatctgaccgggagatatggaagttctttttcaagtaaaccggcaaatgttggagctgaaaaagatgatcctggccatggcctcgtatacaaaaagaattcgtttgtctactcgcagcgctgtacataccgcgaagcttagttcgattaattctttggtgataggtccaagtatgcgtctcagttgttaaacctgcaaatgtgttggcattttaacccttttgtagatctcctatctcctaggtaactgttgagcttttgcataccgaatctatggtgctggcctatcacagcacgctatcagcaatatgtacaaatggaaatggttactgtacttgcttgtcggcc

SEQ ID NO: 32116 - protein, 344 aa, Triticum aestivum
MKAPSLLVQCFPGLLPSKATSCVPIISERDLHLPSPAVELIPSKSAHPYKYAGEKVDVQGLDVFKGKVSVADMIAFSPSEVASSKHDGSLKYWESSITIVNIIKNEIRDGQLSFRGKRVLELGCGSGLAGIFACLKGASIVHFQDTNAETIRCRTMPNVLANLEQARDRQNRPSESPVTPSRQLLAPVVHFYAGEWDELPTILSVVHPPAQPTNLSFSEDDFMDGCSSHDGSSIVGQDPRRSRKLSGSRAWERASETDPADGGYDVILISEIPNAVNSLRKLYALITKCLRPPYGVLYVASKKNLVGSNGGARQLKSLMEEEGVLGGHFLTEISDREIWKFFFK

SEQ ID NO: 32117 - protein, 272 aa, Triticum aestivum
MIAFSPSEVASSKHDGSLKYWESSITIVNIIKNEIRDGQLSFRGKRVLELGCGSGLAGIFACLKGASIVHFQDTNAETIRCRTMPNVLANLEQARDRQNRPSESPVTPSRQLLAPVVHFYAGEWDELPTILSVVHPPAQPTNLSFSEDDFMDGCSSHDGSSIVGQDPRRSRKLSGSRAWERASETDPADGGYDVILISEIPNAVNSLRKLYALITKCLRPPYGVLYVASKKNLVGSNGGARQLKSLMEEEGVLGGHFLTEISDREIWKFFFK

SEQ ID NO: 32118 - protein, 189 aa, Triticum aestivum
MPNVLANLEQARDRQNRPSESPVTPSRQLLAPVVHFYAGEWDELPTILSVVHPPAQPTNLSFSEDDFMDGCSSHDGSSIVGQDPRRSRKLSGSRAWERASETDPADGGYDVILISEIPNAVNSLRKLYALITKCLRPPYGVLYVASKKNLVGSNGGARQLKSLMEEEGVLGGHFLTEISDREIWKFFFK

SEQ ID NO: 32119 - DNA, 1114 bp, Triticum aestivum
atttatcaccgccctcgctgcgtgtgccactcccatcgtaaagccacacaaagaaagagaggcagtcagagcagagcagagccgagccttcgccctcgccctcgccccagagagcgaacgcacacacacagccgcaatggcgcgcgccggcgctctctgcctcgcgctgctctgcctcctcgcggcgcactccgccgtcgcccagaaggccacggccccggccgccgcgcccaccaccaccacccccacgccggcggctcccgccaagaagacgaccgcgcccgccgcggcgccgaccaccacgcccgtcgccgccaccccaccgaccgcagcggctcccaccacccccgcaacccccgcccccgccgcggcgccacccaccaaggccaccccggcaccagccaaggctcccgccgcagcgccgcccaccaaggccgcctcctcgccccctgccccggctcccaaggccagcactccgccggtcgaggctcccgtcgccgctcctcctgctcccgtcgccgaggcacccgccaccatccccaccaagcccgacgcccccgcgcccgccccggccaagaagaagaagaagtcgtcctccaagaagaagaagagcaaggccccggcccccgctcccgtcgccgccgaggcccccaccaagtccaagaaggccaaggcccccgcggcctccgacgactccgaagcccccggccccgcactcgatgccgccgccgacgacaccgcgggcgcgatccagagcatggcagggagcatcatgtcggcgtgcgcgatggcgctgggcctcctcgccctcctcgcctagacgagcaaagccggtgagcgcgggaggccagccggccccgtcgagacccggcacgagaacacgcaatcatgcggcggccgctgcgccgcgccttttgacgagctgtctgtgtccgtgtctgtgcatgccaccacattttgcgctgtatctcgtgtctattttttctaactggctggacgggccggcatctcctcctcctccttcctgtgtagtcccattactcacgcacgtccgcctcggattctttcttcctgtgtaccaaattgatgagatttgatttatatttttattact

SEQ ID NO: 32120 - protein, 278 aa, Triticum aestivum
IYHRPRCVCHSHRKATQRKRGSQSRAEPSLRPRPRPRERTHTHSRNGARRRSLPRAALPPRGALRRRPEGHGPGRRAHHHHPHAGGSRQEDDRARRGADHHARRRHPTDRSGSHHPRNPRPRRGATHQGHPGTSQGSRRSAAHQGRLLAPCPGSQGQHSAGRGSRRRSSCSRRRGTRHHPHQARRPRARPGQEEEEVVLQEEEEQGPGPRSRRRRGPHQVQEGQGPRGLRRLRSPRPRTRCRRRRHRGRDPEHGREHHVGVRDGAGPPRPPRLDEQSR

SEQ ID NO: 32121 - protein, 272 aa, Triticum aestivum
FITALAACATPIVKPHKEREAVRAEQSRAFALALAPESERTHTAAMARAGALCLALLCLLAAHSAVAQKATAPAAAPTTTTPTPAAPAKKTTAPAAAPTTTPVAATPPTAAAPTTPATPAPAAAPPTKATPAPAKAPAAAPPTKAASSPPAPAPKASTPPVEAPVAAPPAPVAEAPATIPTKPDAPAPAPAKKKKKSSSKKKKSKAPAPAPVAAEAPTKSKKAKAPAASDDSEAPGPALDAAADDTAGAIQSMAGSIMSACAMALGLLALLA

SEQ ID NO: 32122 - protein, 227 aa, Triticum aestivum
MARAGALCLALLCLLAAHSAVAQKATAPAAAPTTTTPTPAAPAKKTTAPAAAPTTTPVAATPPTAAAPTTPATPAPAAAPPTKATPAPAKAPAAAPPTKAASSPPAPAPKASTPPVEAPVAAPPAPVAEAPATIPTKPDAPAPAPAKKKKKSSSKKKKSKAPAPAPVAAEAPTKSKKAKAPAASDDSEAPGPALDAAADDTAGAIQSMAGSIMSACAMALGLLALLA

SEQ ID NO: 32123 - DNA, 1740 bp, Triticum aestivum
ccatatctccgactcctctgccctgccgcgcgggcccaactcggcgccaaaaaatccatctcgcatctcacgctcttctagctctctccccccgccatggaagaccggcaagccaccggcggcgccggcgccgcgaccaaggtccgcgtgaacggcacgacggccgaagcgacactctccaccacaggcggctgccccgagctccggtggcgctgcgctagggccacggcggagaggagcctctcgctggaggccgacgtgctcggagccgaggcgagcggcaaggaggtcgtcgtcagggccttcgtggcggaggatgccgcgagaccgccgtcgcgcgccaaggcgagagggaagaggcgcaggagggagtacgtcttcgagatggccgacggcgagggcgcggccgcggcctggggcgagacgctacggggctgcttggactcgatagggcggcccaagagattgttcgtcctcatcaacccctacggaggcaaaagacgggcgagcaagatctacgaggcagaaatcaaacccctgttcgaagccgccggcgtcgaagtcacaatgcaagagacccggtaccgggggcatgcccgggaggtggcgtcctctctcgaccttgcaagatacgacgggatcgtctgcgtcagcggcgatggcgtcctcgtggagcttgtgaatgggattctgcaaagatcagactgggaggaagcaataaagatgccaattggcatagttccagctggcacaggaaacggcatggccaaatcacttctccatgctgccagcgagacgtgctcagtttcagacgccgtatttgccattatcacaggtcacaagcaggccttggatgtctgcaccatagtgcaaggggaaaaaaccgttttcagcgtgctgtcaactacttggggtttggtggccgatgttgacatcgagtctgagaaatacaggtggatggggagcgcacggttcgacttttatgctctggttcgcataatgaacttgcgccgataccgcggaagcgtccactttgtgcctgccccgggctacgaggcatacggagatcctgtcaagcaagccgagactcccatcgtggagcgaaacggggaatctcaggtgtgctcttatcaaggccctacggccgagtttcaatgttcagactggagatccatcgatggcccatttgtgggtgtgtgcgtctacaacgtgccatgggctgctgaaaacgccatggcagctcctgaagccaagttctcagatggctacatggacgcggtcatactgaaagactgtccgaaggccgatcttttggctctgctgctgaagatgagcgatgggagctacgtgaaatcgccacatgttacatatttcaaggtgaaatccttccggttatcgccggggcagctcatggaggatcccaaaaggggcggcatcgtagacgtggacggcgaggtggttgccagaggagaaggaacgtacggcatgaaccaggatcaagatttgatggcctatggcccttctgttcagctgaccgtgcaccagggcttggccactgtatactgtcccaaatgatcctaccttgccttctcctctcaccagagattgtccctttgtgtcaattgctttattcttgttcatatttaaaaaagtactctattgtattcaaaacaagattctttcaagaaaaggtcacacgtctctgagcaaaaaaaaaaaaaaaaaaaaaaaaaaaaaaat

SEQ ID NO: 32124 - protein, 492 aa, Triticum aestivum
MEDRQATGGAGAATKVRVNGTTAEATLSTTGGCPELRWRCARATAERSLSLEADVLGAEASGKEVVVRAFVAEDAARPPSRAKARGKRRRREYVFEMADGEGAAAAWGETLRGCLDSIGRPKRLFVLINPYGGKRRASKIYEAEIKPLFEAAGVEVTMQETRYRGHAREVASSLDLARYDGIVCVSGDGVLVELVNGILQRSDWEEAIKMPIGIVPAGTGNGMAKSLLHAASETCSVSDAVFAIITGHKQALDVCTIVQGEKTVFSVLSTTWGLVADVDIESEKYRWMGSARFDFYALVRIMNLRRYRGSVHFVPAPGYEAYGDPVKQAETPIVERNGESQVCSYQGPTAEFQCSDWRSIDGPFVGVCVYNVPWAAENAMAAPEAKFSDGYMDAVILKDCPKADLLALLLKMSDGSYVKSPHVTYFKVKSFRLSPGQLMEDPKRGGIVDVDGEVVARGEGTYGMNQDQDLMAYGPSVQLTVHQGLATVYCPK

SEQ ID NO: 32125 - protein, 396 aa, Triticum aestivum
MADGEGAAAAWGETLRGCLDSIGRPKRLFVLINPYGGKRRASKIYEAEIKPLFEAAGVEVTMQETRYRGHAREVASSLDLARYDGIVCVSGDGVLVELVNGILQRSDWEEAIKMPIGIVPAGTGNGMAKSLLHAASETCSVSDAVFAIITGHKQALDVCTIVQGEKTVFSVLSTTWGLVADVDIESEKYRWMGSARFDFYALVRIMNLRRYRGSVHFVPAPGYEAYGDPVKQAETPIVERNGESQVCSYQGPTAEFQCSDWRSIDGPFVGVCVYNVPWAAENAMAAPEAKFSDGYMDAVILKDCPKADLLALLLKMSDGSYVKSPHVTYFKVKSFRLSPGQLMEDPKRGGIVDVDGEVVARGEGTYGMNQDQDLMAYGPSVQLTVHQGLATVYCPK

SEQ ID NO: 32126 - protein, 335 aa, Triticum aestivum
MQETRYRGHAREVASSLDLARYDGIVCVSGDGVLVELVNGILQRSDWEEAIKMPIGIVPAGTGNGMAKSLLHAASETCSVSDAVFAIITGHKQALDVCTIVQGEKTVFSVLSTTWGLVADVDIESEKYRWMGSARFDFYALVRIMNLRRYRGSVHFVPAPGYEAYGDPVKQAETPIVERNGESQVCSYQGPTAEFQCSDWRSIDGPFVGVCVYNVPWAAENAMAAPEAKFSDGYMDAVILKDCPKADLLALLLKMSDGSYVKSPHVTYFKVKSFRLSPGQLMEDPKRGGIVDVDGEVVARGEGTYGMNQDQDLMAYGPSVQLTVHQGLATVYCPK

SEQ ID NO: 32127 - DNA, 2019 bp, Triticum aestivum
tttttttccttcttccctttctctgggtttcaagctctggttcgttctcgtcaggctcaggggtcagggcaagaggaagcaactggttggctggctgctgctgatccatgaacgtcccggtgggcttcatcgccaagctctggagcctcgtgtcattcttgcccttcttcgtcctcctcctgctgctcggctccgccaaagctcttttgatcggcccggtcgtcgcggccatcgttttcctcggcgattcagccgtcatcatcggcctgtggcctgcgcatttcgtctggacgtactgctgcgtgctagccacgaagcgaattgggccggttctgaagatccttgccgtggtattcctgccactgccgttgctcctgttgccggtgcttggcattgtagggagccttctggttggtatcggttatggagtgttcactcccctcatggcgacttttgaggctgttggcgagggtgtcgcggacaagctctctcattgctttttggatggtactgctagcacaataaggggagcttgtatggtggtgcgtgatgttaccgacttctgcttccactcatacttctccttcatggacgagctttccgagaaaatgggggatgacgaagaacctactgacatcaagttgtcttatctaccgcggagcttccttgttgcgctggttgccgttcctctggatgtattgatgattactggggtggcattgtggaaaagcccctgcatgttgttgaaaggatggcaaagactctgcgaggatctagtagggagggaagggccttttctagagactgtttgtgtccctttcgctggtttggccattatattgtggccgcttgccgtcattgcaggagtgattgcatcatttcttagcagcttcttctttggcctccatgctggattaattgcttatcaggaggcttcatttcaaatggggctatcatacatgatctctgcagtagcattgtatgatgaatacacaaatgatcttctttatttgagagaaggttcttgtttgccaaggcccaagtaccggaaagcgggttctgcgaagtatgagaccggccgcaacaaagatgagcacaacgttacagctgcatctgcagagaagcaacatcaaggccagcgtaagcataggagggttctacaccggtcaaagacattcatggaaactatccaaagactaagacccattcaaatatgggattggctcttccgatcttgcgagataaatgggaggatattactgagcgagggactgataagctctgaagatatagaggaatttataaccaaaggaaagggaaagaagctgagcataaaactacctgcctggtgcatccttcactgtctgatacgatccgcgaaacacgacacgcacggtttgctcatatctgatgacgttgaggtgaccaacttcaattggccaaaggacaaggtgttcgactggatgctcggaccactgctggttctgaaggagcagatgaagaaactggagctcaccgaagacgaggagctgtgcttgcagaagctcatcatgacgaacgcgaacgaaaaaccgtcggattgggacgactgcggtttcccgtcaagcgacggcgtgaagagagctcagctacaggcgatcatcagaaggttgcaagggatcgtggccaatatgtcccggataccgagcttcaggagacggttcatgagcctggccagggcactgtacctggaggcgatcgacgcgggcaccatcgacgggtcgcggaaggtggagcgcaaggtcaaggctgacatcgcctccgaggaacttcagagcagagatgtcggagatacgaagggttcatcgaatgggacgtctgtggacgttgacatggtctgatgttgttgtgctgtgcaaacatattcttttgcagaactctctacctgctgcgatgtgcattagttgttttattagacgttggtaacacacatcacgcaacgcgtggacacgatggatgactgtgcctgctgggatcaag

SEQ ID NO: 32128 - protein, 590 aa, Triticum aestivum
MNVPVGFIAKLWSLVSFLPFFVLLLLLGSAKALLIGPVVAAIVFLGDSAVIIGLWPAHFVWTYCCVLATKRIGPVLKILAVVFLPLPLLLLPVLGIVGSLLVGIGYGVFTPLMATFEAVGEGVADKLSHCFLDGTASTIRGACMVVRDVTDFCFHSYFSFMDELSEKMGDDEEPTDIKLSYLPRSFLVALVAVPLDVLMITGVALWKSPCMLLKGWQRLCEDLVGREGPFLETVCVPFAGLAIILWPLAVIAGVIASFLSSFFFGLHAGLIAYQEASFQMGLSYMISAVALYDEYTNDLLYLREGSCLPRPKYRKAGSAKYETGRNKDEHNVTAASAEKQHQGQRKHRRVLHRSKTFMETIQRLRPIQIWDWLFRSCEINGRILLSEGLISSEDIEEFITKGKGKKLSIKLPAWCILHCLIRSAKHDTHGLLISDDVEVTNFNWPKDKVFDWMLGPLLVLKEQMKKLELTEDEELCLQKLIMTNANEKPSDWDDCGFPSSDGVKRAQLQAIIRRLQGIVANMSRIPSFRRRFMSLARALYLEAIDAGTIDGSRKVERKVKADIASEELQSRDVGDTKGSSNGTSVDVDMV

SEQ ID NO: 32129 - protein, 478 aa, Triticum aestivum
MATFEAVGEGVADKLSHCFLDGTASTIRGACMVVRDVTDFCFHSYFSFMDELSEKMGDDEEPTDIKLSYLPRSFLVALVAVPLDVLMITGVALWKSPCMLLKGWQRLCEDLVGREGPFLETVCVPFAGLAIILWPLAVIAGVIASFLSSFFFGLHAGLIAYQEASFQMGLSYMISAVALYDEYTNDLLYLREGSCLPRPKYRKAGSAKYETGRNKDEHNVTAASAEKQHQGQRKHRRVLHRSKTFMETIQRLRPIQIWDWLFRSCEINGRILLSEGLISSEDIEEFITKGKGKKLSIKLPAWCILHCLIRSAKHDTHGLLISDDVEVTNFNWPKDKVFDWMLGPLLVLKEQMKKLELTEDEELCLQKLIMTNANEKPSDWDDCGFPSSDGVKRAQLQAIIRRLQGIVANMSRIPSFRRRFMSLARALYLEAIDAGTIDGSRKVERKVKADIASEELQSRDVGDTKGSSNGTSVDVDMV

SEQ ID NO: 32130 - protein, 447 aa, Triticum aestivum
MVVRDVTDFCFHSYFSFMDELSEKMGDDEEPTDIKLSYLPRSFLVALVAVPLDVLMITGVALWKSPCMLLKGWQRLCEDLVGREGPFLETVCVPFAGLAIILWPLAVIAGVIASFLSSFFFGLHAGLIAYQEASFQMGLSYMISAVALYDEYTNDLLYLREGSCLPRPKYRKAGSAKYETGRNKDEHNVTAASAEKQHQGQRKHRRVLHRSKTFMETIQRLRPIQIWDWLFRSCEINGRILLSEGLISSEDIEEFITKGKGKKLSIKLPAWCILHCLIRSAKHDTHGLLISDDVEVTNFNWPKDKVFDWMLGPLLVLKEQMKKLELTEDEELCLQKLIMTNANEKPSDWDDCGFPSSDGVKRAQLQAIIRRLQGIVANMSRIPSFRRRFMSLARALYLEAIDAGTIDGSRKVERKVKADIASEELQSRDVGDTKGSSNGTSVDVDMV

SEQ ID NO: 32131 - DNA, 1572 bp, Triticum aestivum
acacaaacttgttttcgattcctgctgctgtaggctgtagctcccccaaatctcatccaccggccggccctaatggcgctcccagatgaacttctggaggagatcttcctccgcctccccgcggccgccgacctcgcccgcgcctccacggcctgcgtctccttccgccgcgtcatcaccggccatcccttcctccgccggttccgcaccctccacccgccgtccctcctcggcatcctctgcggcggcctcatccccgcccagccgccccacccttccgccgcagcggcagccacctacgccgacgccgacttgtcgtgctcctttatgcccccaccccgcgaccgctggcgccaccgcgacggccgcgcccttttctcccccgccctcgaggggatcggcggcgactacagccctagccacctggtcacggagttcgccgtctgcgaccccctgcaccgtcgttacctcctgctgcctgccctccccgaccttctagtcggtcaagtccataggccggacatcgtggactgcgaggccttcctcgctcctcctggccctgacgacgttggggctgactggtcgtcattcagagtcatgtacttggtgcgttgcacagccaagctcttgctcttcgtcttctccacctgcgccggacaatggctcgctaatcctgttacagttgacgtgtttcgatgcggggcggcgttgcaccgcttctacgcccatggctgcttctattgggaggttttccggtctaacaagttgctcgtgctcgatgcgcgcaggatagagttctccactgttgacctcccgcctccacctggccctgatgtgcgaaagatggccattgtagaggcaggaggaggaaggcttgggatgcttactatctctgagcatcctgaacctggtgcagatcatctcctgtatgccgtacagtctaaggatgtgaatggcagaaaccagtggcaatccaagtcagtaatttatttgccggaaaattatcgctatggcatcatgggtgtagctggtggatacttactcctaactgggtatccagaagacgacatgccaatcagctatttttcactgaatctccagaattttcaggttgagtgcttctgtcagactggtgataaagtcatttttggtgacctgtatgccgatctcccaccgtccttgtccccaccaactctttgaactggacctcccagagaatgcgctgatggcaaagactcgcaagcgtgactaatgtcatgttaaggagaataaatgtaagaacttttgaaagggtgaaagtggtttgcactcgacagcaacttgcagctaagagaagaagaaggcagaagttgttgatgaccggcgcatccaccattttttcttgttaaaattctcacgacgtttctgctttttgttgcagtacttttatgcctggcaagagactagactatcttattatgccgctttgtttgaactgagtgctaggtaagctttgcggcttcagcaaccctggaaatagtttgcttttggtggtgtatgattctagtatcagtatgtatgtatggcataccc

SEQ ID NO: 32132 - protein, 375 aa, Triticum aestivum
MALPDELLEEIFLRLPAAADLARASTACVSFRRVITGHPFLRRFRTLHPPSLLGILCGGLIPAQPPHPSAAAAATYADADLSCSFMPPPRDRWRHRDGRALFSPALEGIGGDYSPSHLVTEFAVCDPLHRRYLLLPALPDLLVGQVHRPDIVDCEAFLAPPGPDDVGADWSSFRVMYLVRCTAKLLLFVFSTCAGQWLANPVTVDVFRCGAALHRFYAHGCFYWEVFRSNKLLVLDARRIEFSTVDLPPPPGPDVRKMAIVEAGGGRLGMLTISEHPEPGADHLLYAVQSKDVNGRNQWQSKSVIYLPENYRYGIMGVAGGYLLLTGYPEDDMPISYFSLNLQNFQVECFCQTGDKVIFGDLYADLPPSLSPPTL

SEQ ID NO: 32133 - protein, 290 aa, Triticum aestivum
MPPPRDRWRHRDGRALFSPALEGIGGDYSPSHLVTEFAVCDPLHRRYLLLPALPDLLVGQVHRPDIVDCEAFLAPPGPDDVGADWSSFRVMYLVRCTAKLLLFVFSTCAGQWLANPVTVDVFRCGAALHRFYAHGCFYWEVFRSNKLLVLDARRIEFSTVDLPPPPGPDVRKMAIVEAGGGRLGMLTISEHPEPGADHLLYAVQSKDVNGRNQWQSKSVIYLPENYRYGIMGVAGGYLLLTGYPEDDMPISYFSLNLQNFQVECFCQTGDKVIFGDLYADLPPSLSPPTL

SEQ ID NO: 32134 - protein, 200 aa, Triticum aestivum
MYLVRCTAKLLLFVFSTCAGQWLANPVTVDVFRCGAALHRFYAHGCFYWEVFRSNKLLVLDARRIEFSTVDLPPPPGPDVRKMAIVEAGGGRLGMLTISEHPEPGADHLLYAVQSKDVNGRNQWQSKSVIYLPENYRYGIMGVAGGYLLLTGYPEDDMPISYFSLNLQNFQVECFCQTGDKVIFGDLYADLPPSLSPPTL

SEQ ID NO: 32135 - DNA, 1673 bp, Triticum aestivum
aaaaaacaaaccgagtctgcagttgcaattcctatacgacctcgatccccctcctcccccaacaagtcgaatccgcccgcgttgaggaaggatgtgctcccaagcccccaaatccctagacctagacctcgacctcgacccctccccagtccccagatccctagacctcgaccccgaatcccaaccctgccccggcgtgacgacgacggccgagctccccgacgaagcggagaacccctgcttgtcgcggtttcgccaccggcgactcctcgccttcctctcgcgccagcgctacgatgtcgccttcaacgggctgatgctacaggcgagtgagcccttctgcttggagcgtctgcaggggctcgtgaggaagggcctgtgggaggatgccatcgactaccttgatggcttcctgcctgccggccccaggagcctccacgcccacgccttccgcaacttcctcttgatgcaccactacttggccagcatcgccgccggggatgagtccgccatggacaagctccgggcccaccattggatgcaacacgtcgttgatgcctggaaaacgaaagcgaaccacacatttcctcgtgtcatggcccaagccctgctctcgtcggagcagctccgggcgtccatggactgggatggagtgaggagggaggctgcgtacatcctctccaggttagcttcgaggaccccagagctcaacaggccgctcacattgccgacttgctacaccaagccgcaccaagtgcttcccattgacgttgcctctggattgtgcaggcggcggcgcgtgaaggaacagcgtccccatctacaaccagctgctgttgccagggccatccttttcagggggagtcagcgttacacaagatctctagccaactcaagtttcgaattcattgagaatgcaaaggaatggtttgcgactatcatggatgaaagcttacgagctggttcaggtaaagcgacttccctgctccaacaaattatgaaggaaggtgctcctgttgctccagtttcactgataagtcctgctaaaagttctggtacctcgtcattgacaaatgcaggtgctcctgtttcttcagtgtgccagactctgaacatgacaagagacgctgaaaactatggtatctcatcagtgacaagtccaggcccagaaaagagtcaagaaggtgcctgcggtggtttcaatcccagaaagaatccacgggcagaattggcaactattgatgaatatttggattcaaaaaggcaacgtactactgggacttttggggaagcaagtatggtgccggtgaatgaagtttgggctgaagctcactagctggctggtgaagtcaaccacctagattcataaccgagatatggtgacaatggtggtggtggtggtgtacctgctaactcgcacttcatttatgctttgaacttggatgttaattatacaactttgtttccaagtgcctactatgagctagtacttcataagtaattctgctagtgttggttaatcaggctgcttactgccagcattttctatcactgaaatgaaaattaatcagattattggatcatatcattcagtaacagtattgccaaaagatacacgtaagtgtgacctcaagcattgctttatgaagttgctcagaaaaaaaaaaaaaaac

SEQ ID NO: 32136 - protein, 414 aa, Triticum aestivum
MCSQAPKSLDLDLDLDPSPVPRSLDLDPESQPCPGVTTTAELPDEAENPCLSRFRHRRLLAFLSRQRYDVAFNGLMLQASEPFCLERLQGLVRKGLWEDAIDYLDGFLPAGPRSLHAHAFRNFLLMHHYLASIAAGDESAMDKLRAHHWMQHVVDAWKTKANHTFPRVMAQALLSSEQLRASMDWDGVRREAAYILSRLASRTPELNRPLTLPTCYTKPHQVLPIDVASGLCRRRRVKEQRPHLQPAAVARAILFRGSQRYTRSLANSSFEFIENAKEWFATIMDESLRAGSGKATSLLQQIMKEGAPVAPVSLISPAKSSGTSSLTNAGAPVSSVCQTLNMTRDAENYGISSVTSPGPEKSQEGACGGFNPRKNPRAELATIDEYLDSKRQRTTGTFGEASMVPVNEVWAEAH

SEQ ID NO: 32137 - protein, 339 aa, Triticum aestivum
MLQASEPFCLERLQGLVRKGLWEDAIDYLDGFLPAGPRSLHAHAFRNFLLMHHYLASIAAGDESAMDKLRAHHWMQHVVDAWKTKANHTFPRVMAQALLSSEQLRASMDWDGVRREAAYILSRLASRTPELNRPLTLPTCYTKPHQVLPIDVASGLCRRRRVKEQRPHLQPAAVARAILFRGSQRYTRSLANSSFEFIENAKEWFATIMDESLRAGSGKATSLLQQIMKEGAPVAPVSLISPAKSSGTSSLTNAGAPVSSVCQTLNMTRDAENYGISSVTSPGPEKSQEGACGGFNPRKNPRAELATIDEYLDSKRQRTTGTFGEASMVPVNEVWAEAH

SEQ ID NO: 32138 - protein, 289 aa, Triticum aestivum
MHHYLASIAAGDESAMDKLRAHHWMQHVVDAWKTKANHTFPRVMAQALLSSEQLRASMDWDGVRREAAYILSRLASRTPELNRPLTLPTCYTKPHQVLPIDVASGLCRRRRVKEQRPHLQPAAVARAILFRGSQRYTRSLANSSFEFIENAKEWFATIMDESLRAGSGKATSLLQQIMKEGAPVAPVSLISPAKSSGTSSLTNAGAPVSSVCQTLNMTRDAENYGISSVTSPGPEKSQEGACGGFNPRKNPRAELATIDEYLDSKRQRTTGTFGEASMVPVNEVWAEAH

SEQ ID NO: 32139 - DNA, 1170 bp, Triticum aestivum
atttccgtacctgtctgctccgtccgcctcccaagctttgcggctccagggtttagctagggttctacccacgaccaccgccgccgcccgccccgccgccgccgcagccatggccggcgccggcgccggagaggaggacgcggcgtgggagcgcgccatcagcgcggccgtcaagagcgcgccgctctcccccttctccgcccccaaaaccctaaccctcgacggcgccatcaagtcctccaccggccgcctcccctcgccggcgctcttcgaccgcttcccctcgctcgaggagctctccgtcgcgggcgcccgcctctcctcgctcgccggcctgccccgcctcccggccctccgccgcctctccctccccgacaaccgcctcgcgggggccggctccctcgccgccgtcgccgagtcctgcggcgggaccatccgccacctcgacctcggcaacaaccgcttcgccgcggtcgaggagctcgccccgctcgcaccgctcggggtcgagtcgctggacctgtaccagtgccccgtcaccaagctcaaggggtacagggagaaggtgtttgcgctggtccccagcttgaagtacctggatggcgtcgatgccgagggcaatgaccgcctggagtccgatgaggacgaggaggaggatgaggatgaggatgaggaaggggatgaagagggggcggaggacggcgaaggggaaggggacgaagaggaagaggaaggagatgaagaagaagatggcgaggaagaggagggagatgaagaggaagaggaaggcgacgaggctgaagacgaagaggatgaggctgaggacgacgaaccggagtcaggcgcggccgagaaaagcgaggtggtcaacggaaacaagtccgcaggatctgccctgccaagcaagaggaaaagggacaatgaagatggggccaacggcgacaactgaatttgatctcgatttaaggtttgttggttcgtctttgcacgcttttcagagggttccgtgcgggaggtgtagtagaagcaagcaacctttgtactagttttgtgcaaggattttctgagaggttttcaaattttattcaagacgcgcggtggatcctcggacctgctccttcatgtgaaatttctggtactataaaccgaggcgctggctcggatcatgac

SEQ ID NO: 32140 - protein, 315 aa, Triticum aestivum
FPYLSAPSASQALRLQGLARVLPTTTAAARPAAAAAMAGAGAGEEDAAWERAISAAVKSAPLSPFSAPKTLTLDGAIKSSTGRLPSPALFDRFPSLEELSVAGARLSSLAGLPRLPALRRLSLPDNRLAGAGSLAAVAESCGGTIRHLDLGNNRFAAVEELAPLAPLGVESLDLYQCPVTKLKGYREKVFALVPSLKYLDGVDAEGNDRLESDEDEEEDEDEDEEGDEEGAEDGEGEGDEEEEEGDEEEDGEEEEGDEEEEEGDEAEDEEDEAEDDEPESGAAEKSEVVNGNKSAGSALPSKRKRDNEDGANGDN

SEQ ID NO: 32141 - protein, 279 aa, Triticum aestivum
MAGAGAGEEDAAWERAISAAVKSAPLSPFSAPKTLTLDGAIKSSTGRLPSPALFDRFPSLEELSVAGARLSSLAGLPRLPALRRLSLPDNRLAGAGSLAAVAESCGGTIRHLDLGNNRFAAVEELAPLAPLGVESLDLYQCPVTKLKGYREKVFALVPSLKYLDGVDAEGNDRLESDEDEEEDEDEDEEGDEEGAEDGEGEGDEEEEEGDEEEDGEEEEGDEEEEEGDEAEDEEDEAEDDEPESGAAEKSEVVNGNKSAGSALPSKRKRDNEDGANGDN

SEQ ID NO: 32142 - DNA, 2068 bp, Triticum aestivum
accaaaccagcacacgtcaacggaacagcttagcaaaatccccaccaaggtgtagaatattccccaaaaccccacgtcccctccctctgccgccgctcccactccaccagtgtgccacccggatcgatcgatcgattgacagcgatggacacccacatcggctccgtcgacgggccgtcgccggcggcggtgaacggcgcggtcggctgcccggcgtccgcgccggggtgcccgatcatgtcctcccaccccgtggtcttcgccgtgcccggggacttcaacctcacgctgctcgaccacctcgtcgacgagcccgggctgcgcctcgtcggctgctgcaacgagctcaacgctggctacgcggccgacggctacgcgcgggcccgcggcgtcggcgcctgcgcggtcaccttcaccgtcggcggcctcagcgtgctcaacgccatcgccggcgcctacagcgagaacctgcccgtcatctgcatcgccggcgggcccaactccaacgactacggcaccaaccgcatcctccaccacaccatcggcatcccggacttctcgcaggagctgcgctgcttccagaccgtcacctgccaccaggcggtggtgaccaacctggacgacgcgcacgagcagatcgacacggccatcgccacggcgctcagggagagcaagccggtgtacctcagcatcagctgcaacctccccgggctacctcaccccaccttcacccgtgacccagtccctttcttcctcgcccccaagatgagcaacaagatggggctcgaggctgcagtggaggcaaccgtcgagttcctgaacaaggcggtgaagccagtgcttgtcgccggccccaaactgcgcgtggccaaggcggggaaggccttcgtcgaccttgtggacgccagtggctatgcctatgctataatgccatcggccaagggctttgtgccagagacgcacccccacttcctcggcacctactggggcgccgtcagcacggccttctgcgccgagatcgtcgagtcggccgacgcctacctcttcgcaggccccatcttcaacgactacagctctgttggctactcgttcctgctcaagaaggacaaggccatcatcgtgcagcctgagcgtgtcatcgtcgggaacggcccggcattcggctgcgtcatgatgaaggagtacctgtctgcattggccaagcgggttcagaagaacaccaccgcctacgagaactacaagaggatcttcgtgcctgagggccatccgctgaagggcgaggcgaacgagccgctgcgtgtcaatgtgctcttcaagcacatccaggacatgctgacgggtgatagtgcagtgctcgctgagaccggtgactcctggttcaactgccagaagctcaagctgcccgagggctgcgggtatgaattccaaatgcagtatggctcgattggatggtcagtgggtgcattgctcgggtacgcgcaaggggcgagtgacaagcgtgtcatagcctgcattggtgatgggagcttccaggtgacagcacaggatgtgtcaactatgctgcggtgcgaacagaacagcataatcttcctgatcaacaatggcgggtacacgatcgaggtggagatccacgacgggccttacaatgtcatcaagaactggaactacaccgcccttgtggaggccatccacaacggggagggcaaatgctggactgccaaggtgaagtgcgaggaggagctgacggcggcgatagagacggcgctgggggagaagaaggactctctgtgcttcatcgaggtgatcgcgcacaaggacgacaccagcaaagagcttctggaatggggctccagggtctctgctgccaactccaggccacccaacccccagtagaccaagcacgcctgcatcactagtagtcgcatccagcagcacgttgccatcaaataatgttgaacagtttatctttgctcttctgttatgttcttagttttgtgcctactagttacttgtgagctgtggccatcgcctgtgttctatcctgccaatgctaagaagatcatgagat

SEQ ID NO: 32143 - protein, 582 aa, Triticum aestivum
MDTHIGSVDGPSPAAVNGAVGCPASAPGCPIMSSHPVVFAVPGDFNLTLLDHLVDEPGLRLVGCCNELNAGYAADGYARARGVGACAVTFTVGGLSVLNAIAGAYSENLPVICIAGGPNSNDYGTNRILHHTIGIPDFSQELRCFQTVTCHQAVVTNLDDAHEQIDTAIATALRESKPVYLSISCNLPGLPHPTFTRDPVPFFLAPKMSNKMGLEAAVEATVEFLNKAVKPVLVAGPKLRVAKAGKAFVDLVDASGYAYAIMPSAKGFVPETHPHFLGTYWGAVSTAFCAEIVESADAYLFAGPIFNDYSSVGYSFLLKKDKAIIVQPERVIVGNGPAFGCVMMKEYLSALAKRVQKNTTAYENYKRIFVPEGHPLKGEANEPLRVNVLFKHIQDMLTGDSAVLAETGDSWFNCQKLKLPEGCGYEFQMQYGSIGWSVGALLGYAQGASDKRVIACIGDGSFQVTAQDVSTMLRCEQNSIIFLINNGGYTIEVEIHDGPYNVIKNWNYTALVEAIHNGEGKCWTAKVKCEEELTAAIETALGEKKDSLCFIEVIAHKDDTSKELLEWGSRVSAANSRPPNPQ

SEQ ID NO: 32144 - protein, 551 aa, Triticum aestivum
MSSHPVVFAVPGDFNLTLLDHLVDEPGLRLVGCCNELNAGYAADGYARARGVGACAVTFTVGGLSVLNAIAGAYSENLPVICIAGGPNSNDYGTNRILHHTIGIPDFSQELRCFQTVTCHQAVVTNLDDAHEQIDTAIATALRESKPVYLSISCNLPGLPHPTFTRDPVPFFLAPKMSNKMGLEAAVEATVEFLNKAVKPVLVAGPKLRVAKAGKAFVDLVDASGYAYAIMPSAKGFVPETHPHFLGTYWGAVSTAFCAEIVESADAYLFAGPIFNDYSSVGYSFLLKKDKAIIVQPERVIVGNGPAFGCVMMKEYLSALAKRVQKNTTAYENYKRIFVPEGHPLKGEANEPLRVNVLFKHIQDMLTGDSAVLAETGDSWFNCQKLKLPEGCGYEFQMQYGSIGWSVGALLGYAQGASDKRVIACIGDGSFQVTAQDVSTMLRCEQNSIIFLINNGGYTIEVEIHDGPYNVIKNWNYTALVEAIHNGEGKCWTAKVKCEEELTAAIETALGEKKDSLCFIEVIAHKDDTSKELLEWGSRVSAANSRPPNPQ

SEQ ID NO: 32145 - protein, 375 aa, Triticum aestivum
MSNKMGLEAAVEATVEFLNKAVKPVLVAGPKLRVAKAGKAFVDLVDASGYAYAIMPSAKGFVPETHPHFLGTYWGAVSTAFCAEIVESADAYLFAGPIFNDYSSVGYSFLLKKDKAIIVQPERVIVGNGPAFGCVMMKEYLSALAKRVQKNTTAYENYKRIFVPEGHPLKGEANEPLRVNVLFKHIQDMLTGDSAVLAETGDSWFNCQKLKLPEGCGYEFQMQYGSIGWSVGALLGYAQGASDKRVIACIGDGSFQVTAQDVSTMLRCEQNSIIFLINNGGYTIEVEIHDGPYNVIKNWNYTALVEAIHNGEGKCWTAKVKCEEELTAAIETALGEKKDSLCFIEVIAHKDDTSKELLEWGSRVSAANSRPPNPQ

SEQ ID NO: 32146 - DNA, 1715 bp, Triticum aestivum
agacgcttttaaattcgagattttattgtccgccttccccgacgcgcagctgcctcgctgccccggtgctgctgctcccctcccacccgccgcgccccgccgacgcctccgccgatggaccgggaagaaggtaaggcagcggcgagcctgccggatttgggagcgactgtggctaattttggggacgattcccgttggtgtgcagtgacggagttcctgggccaggtgcccctcctgcagtgcctccccggctcctccatccgcaggatcgccgaggccgtccaggtcaagcactacgaacctggtgattatgttgcccgtgaaggtgaacccgtagatggcctttgcatcatattggatgggcaggctgaagtttctgctcctgcaaacacagaagaagcaaaccgtccagactatgtgttaaataagtatgactactttggttacgggaccaatagttctgtacatcaagtaaatgttattgccgtgacaaagctgtcctgctttgtattgccgagtcaatatggacatctgctgcaaaccaagacaatttggaatgcagaagaaacacctgaaagccattcattgatggaacaaattttacatttagagaaattagaggttgatatatttcgtggatttactttgccagaagctccaacttttaatcaagtttttggaggacaattgattgggcaggcactagcagcagcatccaagactgtcgattgcctgaaacttgtgcatagtctgcatgcaatttttctaatagcaggagacaataatatgccaataatatatcaagtgcatcgggagcgtgatggaaccagctttgccaccagaaaagtggaggcaaagcagaaaggccttgttatgttcactttaattgtttctttccagaaggaagaattagggtttgagcatcaggctgcaatcatgcctgtcgttcctcctccagaacagctcctgaatatggaggagatacgggaaagaagactcactgatccacggtttccgatgcaatataggaactcagctgccaagaaaaagtttgtaccttggcccattgaaatgaggttctgccaagattctaaatctcagcatgaaccaagcctgcattattggtttagagctagaggaaaactttcggatgatccagctctgcatagatgcgttgtagcatatgcttcggatctactatattcaggcgtcagcctaaatccgcaccgtaagaggggtttgaagacatactctctcagtcttgatcactcgatgtggttccacaagcctgtgaaagctgatgactggttgttatatgtgatcgacagcccatccgcacatggtggcaggggattcgtcaccggacgtatgttcaaccggcaaggagagcttattgtgtcgctgacccaagaggcgttgattaggagggccaagacacccgggcaaaccccaaggccgaagctttgagatgtgcagaagagccatggctgtactttaatattttctttccccttgctgttccgtatttttatcttatatagtacacggagacaatggtgagatttatgtataggagtacagcttacagcttgaatttggcacacatgtgaacgattgtatcctcgcatgctgattcacattcaggttttcctttgcatatgtggatggcaattgccatccaacacgcggcacatgaatgtagacagatgtacctc

SEQ ID NO: 32147 - protein, 450 aa, Triticum aestivum
MDREEGKAAASLPDLGATVANFGDDSRWCAVTEFLGQVPLLQCLPGSSIRRIAEAVQVKHYEPGDYVAREGEPVDGLCIILDGQAEVSAPANTEEANRPDYVLNKYDYFGYGTNSSVHQVNVIAVTKLSCFVLPSQYGHLLQTKTIWNAEETPESHSLMEQILHLEKLEVDIFRGFTLPEAPTFNQVFGGQLIGQALAAASKTVDCLKLVHSLHAIFLIAGDNNMPIIYQVHRERDGTSFATRKVEAKQKGLVMFTLIVSFQKEELGFEHQAAIMPVVPPPEQLLNMEEIRERRLTDPRFPMQYRNSAAKKKFVPWPIEMRFCQDSKSQHEPSLHYWFRARGKLSDDPALHRCVVAYASDLLYSGVSLNPHRKRGLKTYSLSLDHSMWFHKPVKADDWLLYVIDSPSAHGGRGFVTGRMFNRQGELIVSLTQEALIRRAKTPGQTPRPKL

SEQ ID NO: 32148 - protein, 292 aa, Triticum aestivum
MEQILHLEKLEVDIFRGFTLPEAPTFNQVFGGQLIGQALAAASKTVDCLKLVHSLHAIFLIAGDNNMPIIYQVHRERDGTSFATRKVEAKQKGLVMFTLIVSFQKEELGFEHQAAIMPVVPPPEQLLNMEEIRERRLTDPRFPMQYRNSAAKKKFVPWPIEMRFCQDSKSQHEPSLHYWFRARGKLSDDPALHRCVVAYASDLLYSGVSLNPHRKRGLKTYSLSLDHSMWFHKPVKADDWLLYVIDSPSAHGGRGFVTGRMFNRQGELIVSLTQEALIRRAKTPGQTPRPKL

SEQ ID NO: 32149 - protein, 226 aa, Triticum aestivum
MPIIYQVHRERDGTSFATRKVEAKQKGLVMFTLIVSFQKEELGFEHQAAIMPVVPPPEQLLNMEEIRERRLTDPRFPMQYRNSAAKKKFVPWPIEMRFCQDSKSQHEPSLHYWFRARGKLSDDPALHRCVVAYASDLLYSGVSLNPHRKRGLKTYSLSLDHSMWFHKPVKADDWLLYVIDSPSAHGGRGFVTGRMFNRQGELIVSLTQEALIRRAKTPGQTPRPKL

SEQ ID NO: 32150 - DNA, 1938 bp, Triticum aestivum
atatattcccactctctccgtcggcatcctcttatttttagttatcatctatcacatccgccttcttcttcccctacacgccttacgtgcaccgcgtatataatggaagcaagttaacggagggagcaccaccgggcaacacaccacgtacggcgcttcaccgaggacaagcttggaagagggatcgatcgacaatggcgtctgctgcgctcccggcggcggcggcggcagcggtcgagcccaagaagaagagcaacttcaagtacgcctgcacctgcgccctctccgcttccatggccaccgtcgtcctcggctatgacgtcggggtgatgagcggggcgtcgctctacatcaaggaggacctgcggctgacggacgtgcaggtggagatcatgatgggcatcctcagcgtctacgcgctcctcggctcgttcgccggggccaggacgtccgactggatcggccgccgctacaccgtcatcatcgccgccgccatcttcttcgccggctccttggtcatgggcttcgccgtcaactacgtcatgttcatgttcggccgcttcgtctgcggcatgggcgtcggcttcgccatcatggtcgcgcccgtctacaccgccgaggtcgccccggcctccacccgcggcctcctcacctccttcaccgaggtcttcatcaacgtcggcatcctcctcggctacgtctccaacttcgccttcgcgcgcctcccgcaccacatcaactggcgcatcatgctcggcatcggcgccgtcccctcggccttgctcgcgctcatggtgctcggcatgccggagtcgccccggtggctcgtgatgaagggccgcctcgccgacgccagggtcgtgctcgagaagacctccgacacgccagaggaggccgtggagcgccttgaccaaatcaaggctgccgccggcatcccccgcgaccttgacggcgacgtggtcgccgtgcccaagagaaaaggcggtgacgagaagcaggtgtggaaggagctcatcttttcgcccaccccggtcatgcgccgcatactgctcgcggcgctcggcgtccatttcttccagcaggcgactggctccgactcggtcgtgctctacagcccacgcgtgttcaagagcgccggcatcaccggcgacaaccacctgctcggcgtcacatgcgccatgggggtcaccaagactctcttcatccttttggccaccttccaaatcgaccgtgtcggccggcggccgctgctgctcaccagcaccgccggcatgctcgtctgtctcatcggcctcggcacgggcctcaccgtcgtgggccagcacccggacgagaagatcacgtgggcagtcggcctgtgcatcgcctccaccttggcctacgtgtccttcttctccatgggcctcggccccatcaccagcgtctacgtctccgaggtcttcccgctgcgggtgcgcgcgctcggcttcgcgctcggcgtcgcctgcaaccgcgtcaccagcgccgccatctccatgaccttcctctccttgtccaaggccatcaccatcggcggcagcttcttcctctacgccggcctcgctgcgctcggctggctttacttctacgccttcgttcccgagacgcgcgggcagccgcttgaggacatagggaagcttttcggcatgaaggacgccgccgtcgaagacgacgacaccgccaccaaagacaagcaggtgaaagcagctgtggagatgaactagctaacgtacggccggagagtgggtttcctcctaacatgcatgcatgcatgcaagggatggatcaccatccattgggggttcttttgagtttcctgctacttctttcttgggtttttgatcaaattcgtcctgttttcgggatgtttcattgtgtcttttatttttccaccaaagtgtatcagaatgtttcgtcgcc

SEQ ID NO: 32151 - protein, 515 aa, Triticum aestivum
MASAALPAAAAAAVEPKKKSNFKYACTCALSASMATVVLGYDVGVMSGASLYIKEDLRLTDVQVEIMMGILSVYALLGSFAGARTSDWIGRRYTVIIAAAIFFAGSLVMGFAVNYVMFMFGRFVCGMGVGFAIMVAPVYTAEVAPASTRGLLTSFTEVFINVGILLGYVSNFAFARLPHHINWRIMLGIGAVPSALLALMVLGMPESPRWLVMKGRLADARVVLEKTSDTPEEAVERLDQIKAAAGIPRDLDGDVVAVPKRKGGDEKQVWKELIFSPTPVMRRILLAALGVHFFQQATGSDSVVLYSPRVFKSAGITGDNHLLGVTCAMGVTKTLFILLATFQIDRVGRRPLLLTSTAGMLVCLIGLGTGLTVVGQHPDEKITWAVGLCIASTLAYVSFFSMGLGPITSVYVSEVFPLRVRALGFALGVACNRVTSAAISMTFLSLSKAITIGGSFFLYAGLAALGWLYFYAFVPETRGQPLEDIGKLFGMKDAAVEDDDTATKDKQVKAAVEMN

SEQ ID NO: 32152 - protein, 482 aa, Triticum aestivum
MATVVLGYDVGVMSGASLYIKEDLRLTDVQVEIMMGILSVYALLGSFAGARTSDWIGRRYTVIIAAAIFFAGSLVMGFAVNYVMFMFGRFVCGMGVGFAIMVAPVYTAEVAPASTRGLLTSFTEVFINVGILLGYVSNFAFARLPHHINWRIMLGIGAVPSALLALMVLGMPESPRWLVMKGRLADARVVLEKTSDTPEEAVERLDQIKAAAGIPRDLDGDVVAVPKRKGGDEKQVWKELIFSPTPVMRRILLAALGVHFFQQATGSDSVVLYSPRVFKSAGITGDNHLLGVTCAMGVTKTLFILLATFQIDRVGRRPLLLTSTAGMLVCLIGLGTGLTVVGQHPDEKITWAVGLCIASTLAYVSFFSMGLGPITSVYVSEVFPLRVRALGFALGVACNRVTSAAISMTFLSLSKAITIGGSFFLYAGLAALGWLYFYAFVPETRGQPLEDIGKLFGMKDAAVEDDDTATKDKQVKAAVEMN

SEQ ID NO: 32153 - protein, 470 aa, Triticum aestivum
MSGASLYIKEDLRLTDVQVEIMMGILSVYALLGSFAGARTSDWIGRRYTVIIAAAIFFAGSLVMGFAVNYVMFMFGRFVCGMGVGFAIMVAPVYTAEVAPASTRGLLTSFTEVFINVGILLGYVSNFAFARLPHHINWRIMLGIGAVPSALLALMVLGMPESPRWLVMKGRLADARVVLEKTSDTPEEAVERLDQIKAAAGIPRDLDGDVVAVPKRKGGDEKQVWKELIFSPTPVMRRILLAALGVHFFQQATGSDSVVLYSPRVFKSAGITGDNHLLGVTCAMGVTKTLFILLATFQIDRVGRRPLLLTSTAGMLVCLIGLGTGLTVVGQHPDEKITWAVGLCIASTLAYVSFFSMGLGPITSVYVSEVFPLRVRALGFALGVACNRVTSAAISMTFLSLSKAITIGGSFFLYAGLAALGWLYFYAFVPETRGQPLEDIGKLFGMKDAAVEDDDTATKDKQVKAAVEMN

SEQ ID NO: 32154 - DNA, 1342 bp, Triticum aestivum
accaaaccctcgtcgcgctcgtctctcccctctcgtgctctcaccccggccagcggcatctgagattcgcgcctcgccggcggccatgggcggcgactggcaggagctggcccagtcggcggtcatcggcctcatcttcgccttcctcgtcgccaagctcatctccgtcgtcctcgccttcaaggaggacaacctccgcatcacccgctccgcccccgcccccgccccctcgcccgacgccactgcccccgcgctcgacggcggcacgagcggcggcgacggcgacagcgacggcgactgggagggcgtggagagcacggagctcgacgaggacttcagcgccgcctccgccttcgtcgcggcctccgccgccggcgtccccgaggaggcgcagctccgcctctacggcctctacaagatcgccaccgagggcccctgcaccgcgccgcagccctccgccctcaagctcaaggcccgcgccaagtggaatgcttggaataaattgggtgctatgccaacagaagaagctatggaggagtacataacaattgttgatgagatattccctaactgggctgatggctcgaaaaagaaagatggggaaaccacaatgtctgcatcaggttcgaagggaccaatgggacctgtatttagcagtttaatgtacgaggaagatcaaggaaatgaatcagaacttggtgacatccatgtttctgcaagggaaggagcaatcgaagacgttaaaaagcatcttgctgctggtgtacaaatcaacttaagagatagcgaagagagaactccgttgcactgggctgtggaccggggtcatctagatgctgttgaggttcttgtcaactcaaatgcggacgtgaatgctcaggacaacgaagggcagacagcgctccactacgccgtcctctgcgagagggaggacatcgccgaactgctcgtcaagcaccacgcggatctccagatcaaggacggcgacgggaacaccgcccgggacttgtgctcctcggcctggccgttcatgaagccggcaaactgacggcacaatgaacccgatgatacagagttgacgcctgctgctgctactaccactagtgccgagaaactatacacaccgtgcttggttagctgaatcggatgagccgttttaccaacctcatcgaatacactgtcaaaaggtaactcagcgcagggtagacatcttgtagtggtattttgcctgtttcatagtgtgtttgtgctgcaggccaactgtttggcaggaaatatatcagtgtcaggattcaggcctcgcggcctcatactgtcaatatgcatacatgttaagagcatc

SEQ ID NO: 32155 - protein, 348 aa, Triticum aestivum
PNPRRARLSPLVLSPRPAASEIRASPAAMGGDWQELAQSAVIGLIFAFLVAKLISVVLAFKEDNLRITRSAPAPAPSPDATAPALDGGTSGGDGDSDGDWEGVESTELDEDFSAASAFVAASAAGVPEEAQLRLYGLYKIATEGPCTAPQPSALKLKARAKWNAWNKLGAMPTEEAMEEYITIVDEIFPNWADGSKKKDGETTMSASGSKGPMGPVFSSLMYEEDQGNESELGDIHVSAREGAIEDVKKHLAAGVQINLRDSEERTPLHWAVDRGHLDAVEVLVNSNADVNAQDNEGQTALHYAVLCEREDIAELLVKHHADLQIKDGDGNTARDLCSSAWPFMKPAN

SEQ ID NO: 32156 - protein, 320 aa, Triticum aestivum
MGGDWQELAQSAVIGLIFAFLVAKLISVVLAFKEDNLRITRSAPAPAPSPDATAPALDGGTSGGDGDSDGDWEGVESTELDEDFSAASAFVAASAAGVPEEAQLRLYGLYKIATEGPCTAPQPSALKLKARAKWNAWNKLGAMPTEEAMEEYITIVDEIFPNWADGSKKKDGETTMSASGSKGPMGPVFSSLMYEEDQGNESELGDIHVSAREGAIEDVKKHLAAGVQINLRDSEERTPLHWAVDRGHLDAVEVLVNSNADVNAQDNEGQTALHYAVLCEREDIAELLVKHHADLQIKDGDGNTARDLCSSAWPFMKPAN

SEQ ID NO: 32157 - protein, 180 aa, Triticum aestivum
QTLVALVSPLSCSHPGQRHLRFAPRRRPWAATGRSWPSRRSSASSSPSSSPSSSPSSSPSRRTTSASPAPPPPPPPRPTPLPPRSTAARAAATATATATGRAWRARSSTRTSAPPPPSSRPPPPASPRRRSSASTASTRSPPRAPAPRRSPPPSSSRPAPSGMLGINWVLCQQKKLWRST

SEQ ID NO: 32158 - DNA, 1416 bp, Triticum aestivum
gaaaaaaaaaaagactagacggtggcggaaaatggcgtgcggtctcctgccgctgctccacggccccctctcctctccgcctcgtcccctcgtcccctcccgctccccctccctcctcgcgcccgggaccctgcccctagcccctcgccggagcagggtttcgcgtcacctgtcccctgcccctccgcgcgcgctcccggacattgccgcggcggcggcgggcctccgggacgcggtcgccggcgccttccaggcgtccccgcctacgtggagctcggctgccacaaccaacgtcgccatcttcgtcgcgggcacgccgctgctcctctccggcctctccgcctccggcatcgcggccgcctacgtcctcggcaccctcacgtggcgcgcatttggggcccgggcttacctcctcgtcgccgcctacttcgtggtgggcacagcagtgaccaagttaaagataaaacaaaaagaagctttgggagtggctgagaaaaaaggaggaaggagaggtcctggtagtgttattggttctagtgctgctggttgtgtctgtgctctcctatcagtatataatgtgggcaggggagcattcgcggaactctggacacttggctttgttgcaagtttctgtactaaactcagtgatacagtttccagtgaaatagggaaggcatatggaagaacaacttacctagtgacaacatttaagattgttccaagaggtacagaaggtgcagtcagtgttgagggcactcttgctggaattgtagcatcaacgtttctggcagggattggttatattttggggcaggtaaatctaccacagggtgtgctatgtgttcttgcatcccagattgcaaattttggcgagagtttgattggcgcaacgctgcaggataaggaaggttttgaatggctgaacaatgatgttgtcaacgtggtcaatatctcggccggcgccgttttggctgctctaatgcagcagctgctagtgagctggcgctcatgatctttgtttcctgacttttctccagtgcatccgctctcgtagtttcttagcggtataagcagctggcatttgcttgtggaactctcaagtcgcaattgagtggatgcacgtgcttctcctttgtgacacatcttcctgtacttctaattctagcttaaggcctgttcccgttcgctccactccgcggagctccaggagctcggtttgagctgctccgtggaaataagctgcagtttcctccgctccgggggcgcagtccagggatcggagaggaaccgaacaggcctttagtaacattgatttgtggaagtaaaacactctctgccagagcatcatatgttcaagaaatactgagctggctggcgtgctactagctactactccaaacaatgatcattctacac

SEQ ID NO: 32159 - protein, 336 aa, Triticum aestivum
KKKKTRRWRKMACGLLPLLHGPLSSPPRPLVPSRSPSLLAPGTLPLAPRRSRVSRHLSPAPPRALPDIAAAAAGLRDAVAGAFQASPPTWSSAATTNVAIFVAGTPLLLSGLSASGIAAAYVLGTLTWRAFGARAYLLVAAYFVVGTAVTKLKIKQKEALGVAEKKGGRRGPGSVIGSSAAGCVCALLSVYNVGRGAFAELWTLGFVASFCTKLSDTVSSEIGKAYGRTTYLVTTFKIVPRGTEGAVSVEGTLAGIVASTFLAGIGYILGQVNLPQGVLCVLASQIANFGESLIGATLQDKEGFEWLNNDVVNVVNISAGAVLAALMQQLLVSWRS

SEQ ID NO: 32160 - protein, 326 aa, Triticum aestivum
MACGLLPLLHGPLSSPPRPLVPSRSPSLLAPGTLPLAPRRSRVSRHLSPAPPRALPDIAAAAAGLRDAVAGAFQASPPTWSSAATTNVAIFVAGTPLLLSGLSASGIAAAYVLGTLTWRAFGARAYLLVAAYFVVGTAVTKLKIKQKEALGVAEKKGGRRGPGSVIGSSAAGCVCALLSVYNVGRGAFAELWTLGFVASFCTKLSDTVSSEIGKAYGRTTYLVTTFKIVPRGTEGAVSVEGTLAGIVASTFLAGIGYILGQVNLPQGVLCVLASQIANFGESLIGATLQDKEGFEWLNNDVVNVVNISAGAVLAALMQQLLVSWRS

SEQ ID NO: 32161 - DNA, 1568 bp, Triticum aestivum
aatataatttcgtaatcgccgaccgttgcctctcctccccccttccccgctccaccctgcccagccaacggctaccgtctccacgagagaaaagggggagatggcggcggagagccctagatccgcgccacggcggacaccggccgccaagagcggcgcgggcctgctcagcccccggttccgctcggcggcggagctggccggctgggacgaggagtccatcctcctcgctgcgctcgtcgtcgaggacaccccggtccgcgagtcccgccgcaagaggcggccctccggctcctccaccgcgggcggcagcgccggatctaacaccaggaagcggaggtcgcggaggcagtcggcggatgaggcaccgataccgcccgtggcgcttgtgctcgacgacgacgagaagccgaatgacaatgaagttgccaagaaggaggtgaagcaggcggaggaggagaaggagaaggtttctgtcgtggagggaaaggagaagtccggatctaccaaggaaggagaagcagcggcgaccggcgagctgccgtgcatggatcggctaagggaggagctatcttgcgctatttgcttggatgtctgctttcagccaagtaccacgccttgtggtcacagcttttgcatgcaatgcttaaaacatgccgcctctaagtgtggaaagcggtgcccaaaatgccgtcagttaatcagtaattcaagatcttgcactatcaacacagtactttggaacaccatccaactcctatttcctagcgaagttgaggcgaggaagagctccatggcctcatcctcagcaagcaaggacgatgtgaagcaaagcctgccaagaagcaacaactatacacaagttggcattaggaacaccagtggcagtagcagcttcaccacacaggactacactagaataggcaacagcaccaggagctccttagcagcagacggcagaagaagtatgccggtcccaggaaccatgaacaccagcagtgggagctttgacacacagggtaggagcacaagaagcagagacagtggcagaggctttgtccgggcgtcagagttggttggcaccaggagttcagcgcggtcaggccaatctgacgacgcttcacttgcatacaggttgcagcaggaggagttcatgacggctttcgataatgatgggggagagaggcagccacagaacaccatatctactgcccgagcaaatttgagagctatggcttcccgggccgagagggcagttctccttcgtgctcgtggctggcctctttagttttgactgattttcagtttcccagtacctgaatctttctctggaagaatgtagcataagtaccatggtgtgatcaatcacttgtattgtgtgaaagtaaaacgatgacaagccagccatatgtgtttcctgtaatacacacaaatttagattgctttactagataatggtcgtatagccctgcattttctctagctggattaaggaatttctcgatccggtagttagatcaaagaactcttttacatttttggaattataaaggaagctatttttttgg

SEQ ID NO: 32162 - protein, 395 aa, Triticum aestivum
MAAESPRSAPRRTPAAKSGAGLLSPRFRSAAELAGWDEESILLAALVVEDTPVRESRRKRRPSGSSTAGGSAGSNTRKRRSRRQSADEAPIPPVALVLDDDEKPNDNEVAKKEVKQAEEEKEKVSVVEGKEKSGSTKEGEAAATGELPCMDRLREELSCAICLDVCFQPSTTPCGHSFCMQCLKHAASKCGKRCPKCRQLISNSRSCTINTVLWNTIQLLFPSEVEARKSSMASSSASKDDVKQSLPRSNNYTQVGIRNTSGSSSFTTQDYTRIGNSTRSSLAADGRRSMPVPGTMNTSSGSFDTQGRSTRSRDSGRGFVRASELVGTRSSARSGQSDDASLAYRLQQEEFMTAFDNDGGERQPQNTISTARANLRAMASRAERAVLLRARGWPL

SEQ ID NO: 32163 - protein, 246 aa, Triticum aestivum
MDRLREELSCAICLDVCFQPSTTPCGHSFCMQCLKHAASKCGKRCPKCRQLISNSRSCTINTVLWNTIQLLFPSEVEARKSSMASSSASKDDVKQSLPRSNNYTQVGIRNTSGSSSFTTQDYTRIGNSTRSSLAADGRRSMPVPGTMNTSSGSFDTQGRSTRSRDSGRGFVRASELVGTRSSARSGQSDDASLAYRLQQEEFMTAFDNDGGERQPQNTISTARANLRAMASRAERAVLLRARGWPL

SEQ ID NO: 32164 - protein, 216 aa, Triticum aestivum
MQCLKHAASKCGKRCPKCRQLISNSRSCTINTVLWNTIQLLFPSEVEARKSSMASSSASKDDVKQSLPRSNNYTQVGIRNTSGSSSFTTQDYTRIGNSTRSSLAADGRRSMPVPGTMNTSSGSFDTQGRSTRSRDSGRGFVRASELVGTRSSARSGQSDDASLAYRLQQEEFMTAFDNDGGERQPQNTISTARANLRAMASRAERAVLLRARGWPL

SEQ ID NO: 32165 - DNA, 1211 bp, Triticum aestivum
actttggtcttccacgcccacttccagttccccacactcgcctccatcttcttctcttcgagatgcttcttaggattgcgtcgtctccggccgccgtcgccgcggctagccagctctctgcgtcaagcccggcccacggttatgcgaggctgccgccgttagcgaaagtgtcgtcgacggcgtgcagggccgcggggaaggggaaaaaagaggaggtactcctcagcggtgtgatgttccagccgttcgaggagctcaagggggagctttcgctcgtgccgcaggccgagggccagtcgctcgccaggcaaaagttcgtcgacgaatgcgaggccgccatcaacgagcagatcaatgtggagtacaatgcctcgtacgcgtaccactccctctacgcctacttcgaccgggacaatgttgctctcaagggctttgccaagttctttagggaatcgagcgacgaggagagggaacacgcggagatgcttatggagtaccagaacagacgtggagggcgggtgaggctccagtctatcgtgaccccattgacagagttcgaccactctgagaaaggggatgctctgtatgcaatggagttggctctagctcttgaaaagctcgtgaatgagaagctgcacaacctgcactctgtggcaacaaggtgcaacgatcctcagctgagcgactttgttgagagtcaatttcttcaggagcaggttgtcgccgtgaagaagatctccgagtacgtgacgcagcttaggagaatcggcaaagggcacggggtgtggcactttgatcggatgctgctcgaagaagaggcctagagatcaggccatgaatatgcattgctgctcaggggaagatgcatgtaggtcacaactcacaactgtcaagtagtggatcagccaaccactgtggatgtgtttcttgggtttttcagtgggtttattgagtcgtatgtaaggttttgcgtcctccaaaagaacatggcgcactgaaagtacttcctccgttccaaactactcgtcgcagaaatggatgtatttagaactaaaatacatctagatacacccatacctgcgacaagtaattcggaacggagggagtagtaagtagtagaacatgtgaactatgttacttctgtgcatgtgctgccagtggatacatttgaaattcgcaataaagccaggactatatgtagggtcttgggt

SEQ ID NO: 32166 - protein, 273 aa, Triticum aestivum
FGLPRPLPVPHTRLHLLLFEMLLRIASSPAAVAAASQLSASSPAHGYARLPPLAKVSSTACRAAGKGKKEEVLLSGVMFQPFEELKGELSLVPQAEGQSLARQKFVDECEAAINEQINVEYNASYAYHSLYAYFDRDNVALKGFAKFFRESSDEEREHAEMLMEYQNRRGGRVRLQSIVTPLTEFDHSEKGDALYAMELALALEKLVNEKLHNLHSVATRCNDPQLSDFVESQFLQEQVVAVKKISEYVTQLRRIGKGHGVWHFDRMLLEEEA

SEQ ID NO: 32167 - protein, 253 aa, Triticum aestivum
MLLRIASSPAAVAAASQLSASSPAHGYARLPPLAKVSSTACRAAGKGKKEEVLLSGVMFQPFEELKGELSLVPQAEGQSLARQKFVDECEAAINEQINVEYNASYAYHSLYAYFDRDNVALKGFAKFFRESSDEEREHAEMLMEYQNRRGGRVRLQSIVTPLTEFDHSEKGDALYAMELALALEKLVNEKLHNLHSVATRCNDPQLSDFVESQFLQEQVVAVKKISEYVTQLRRIGKGHGVWHFDRMLLEEEA

SEQ ID NO: 32168 - protein, 196 aa, Triticum aestivum
MFQPFEELKGELSLVPQAEGQSLARQKFVDECEAAINEQINVEYNASYAYHSLYAYFDRDNVALKGFAKFFRESSDEEREHAEMLMEYQNRRGGRVRLQSIVTPLTEFDHSEKGDALYAMELALALEKLVNEKLHNLHSVATRCNDPQLSDFVESQFLQEQVVAVKKISEYVTQLRRIGKGHGVWHFDRMLLEEEA

SEQ ID NO: 32169 - DNA, 1734 bp, Triticum aestivum
acggtttccaccagatgtgtactcgtgcggtgtgtgcccgcgcacttctggcagcactgcgcacagcgcacgtagagcgtcgttcatcggcacatcaacttttcatggctctgtatgtctccggaatctaccatggcacactgtcacagaagatcaacatcctctgattgcccgatccagcgtgccagcaaaagagcaaagcgtcatcctaggtacaggcgtacagccattagccagacaccactccttgcttccagttccaccccgcgctcgtagaagcacctcccaacggagaccgatggccgctgctaagccagcctgctccgctcccgccaattccgccgacgcagccaaaccggcggcggcgccagaacccgagcagcagctgctggaggtggcggaggaggaggtggtcgtctacttcaagcccaacgccaagtgccgcgtcgacctccgcctccgctcgctgcacccgacgctccccgtcgccttcaaggtgcagacctcctccccgctcaagttcctcgtcagcccgccgcgcggcgccctgcagccgctctccacggccaccatccgcgtcgtgctccgcccgcagccgcacgcgccgccgtccttcccgcgctcccgcgccgaccgcttcctcgtcctctcctccctctccgccgcgcacctcgactccgcggcctccgtgcccggcggcgccggcgtcggcatcggcgccatccgcctccgcgtgttcttcggcgggccctacctgctccgcctcgccgcggacgccggggactccgcggccgtgcgcctcatcctgcgccggcagccgcacctcctgccggttctcgaccccgaggcggccgtgccggacgccgagccgtgggcgccgctgcacgcggctgccgcgcggggcgactgcggagaggtgaggaggctggggcaggaggcgctcgcggcgcgcgacaaggacggcaggacggctctgcacgttgcggccgccgccggggaagcagaggccgtggcagagctggtggacatgggcgccgactccgccgcggccgacgcgcgcgggcggactccgctggacgtggcacgagagaagggctacaaggaggtggtggacgtgctgcagcggtgggagcaggtgatgacggcggcgaggcggggcgacctccggagcctggagttcctcctcagcaagcgcacgggcctccgcggccgcgaccagtacgggctgacggcgctccacgtggccgccatcaagggccactgcgacgccatcgccctgctggcggggtcggggtgcatggacgtggagtgcgaggacgtggaagggcaccggccgctgcacctcgccgtcgagggcggctgcgccgacgccgtcgacctgctgctcgacatgggcgccgacgcccacgccaggaccaagcggggcgccacgccgctccagatggccgacaccatgggctatgacgacatctcgaagctgctgcgcgcccggggcgccgacgaggcggcggcggcggcggcggcaggtgacgcgcagctgtgcatcgcgtcgtcgtcttcctcgtcgatatcctgtgcataaggcctggtttgcgtctcccattcagagttgatcgcaaagacaatgttaatactgcactgtataggtgacagaagtgattactgttttttttctgtggctgttgatatggacttaacaataagatgggactttgcgttcccctgagcagttct

SEQ ID NO: 32170 - protein, 526 aa, Triticum aestivum
RFPPDVYSCGVCPRTSGSTAHSARRASFIGTSTFHGSVCLRNLPWHTVTEDQHPLIARSSVPAKEQSVILGTGVQPLARHHSLLPVPPRARRSTSQRRPMAAAKPACSAPANSADAAKPAAAPEPEQQLLEVAEEEVVVYFKPNAKCRVDLRLRSLHPTLPVAFKVQTSSPLKFLVSPPRGALQPLSTATIRVVLRPQPHAPPSFPRSRADRFLVLSSLSAAHLDSAASVPGGAGVGIGAIRLRVFFGGPYLLRLAADAGDSAAVRLILRRQPHLLPVLDPEAAVPDAEPWAPLHAAAARGDCGEVRRLGQEALAARDKDGRTALHVAAAAGEAEAVAELVDMGADSAAADARGRTPLDVAREKGYKEVVDVLQRWEQVMTAARRGDLRSLEFLLSKRTGLRGRDQYGLTALHVAAIKGHCDAIALLAGSGCMDVECEDVEGHRPLHLAVEGGCADAVDLLLDMGADAHARTKRGATPLQMADTMGYDDISKLLRARGADEAAAAAAAGDAQLCIASSSSSSISCA

SEQ ID NO: 32171 - protein, 427 aa, Triticum aestivum
MAAAKPACSAPANSADAAKPAAAPEPEQQLLEVAEEEVVVYFKPNAKCRVDLRLRSLHPTLPVAFKVQTSSPLKFLVSPPRGALQPLSTATIRVVLRPQPHAPPSFPRSRADRFLVLSSLSAAHLDSAASVPGGAGVGIGAIRLRVFFGGPYLLRLAADAGDSAAVRLILRRQPHLLPVLDPEAAVPDAEPWAPLHAAAARGDCGEVRRLGQEALAARDKDGRTALHVAAAAGEAEAVAELVDMGADSAAADARGRTPLDVAREKGYKEVVDVLQRWEQVMTAARRGDLRSLEFLLSKRTGLRGRDQYGLTALHVAAIKGHCDAIALLAGSGCMDVECEDVEGHRPLHLAVEGGCADAVDLLLDMGADAHARTKRGATPLQMADTMGYDDISKLLRARGADEAAAAAAAGDAQLCIASSSSSSISCA

SEQ ID NO: 32172 - DNA, 1412 bp, Triticum aestivum
gacaccactccccctgagctcgctcgcacgccgcggccgggtaacaccaccaccgggcaccatggcctcctccttcctctccctacggctccctaccccctccccgcccaccgcgacgtcgtccccgttcttcccgaatcccctagtccggtccggaaggtgcagtccgctgtcctctaccctcgtggcgcgtgttgccgggccggcggcgggggctccgtcgccgttgttcaacccgaggggcgacccgttcctatccacgctagcagctgcttctccagagcagctcgcggcagctgcgggtggcgaacgccgcggcgaggaccacctgccgttcctcgagatcttccagaacgccaagctcatgtcctcgcccgcgcaggtggaacgttctagcagctcttacagtcagcacagtcctagaaggcctcccccggatttgccgtcgttgcttctacatggccggattgtttatattggcatgccgttggtgccagcagttaccgagcttattgttgcccagttgatgtaccttgattggatgaatagtagtgagcctgcatatatatacatcaactcaacaggaacggctcgtgatgatggtgaaccagttggaatggagacggaaggttttgctatctatgatgccatgatgcggatgaaaactgaggttcacacactttgtataggagctgcagcaggtcatgcctgccttgtccttgcagcagggaagaaaggcaaacgatatatgtttccccatgccaaagctttgattcagcaacctcgtattccttcatatgggatgatgcaagcttctgatgttgttattcgtgcgaaagaggtagtgcacaacaggaataccctggtcaaacttttagcaaggcacactggaaatccaccggagaaaatagataaggtgatgagaggaccattttatatggactctttgaaagccaaggagtttggggtaattgacaagatcctttggcgcggtcaggagaagtacatgtctgacatgctctcccctgaggattgggacaaggttgctggagtcagaggccccggtggaatgtgaagttgtgcactggaactcgaatacttagttaggtctttgagctcgcagtcgcaggggttgaacgaacaatcttgcctgttgacaggttgtcagagccgagggtacctgttgtacggactatggagaagctagattagaacttggacgatcatgttagtgcgtatgctcccgggattggagctagcgagtgttttgggtggagctattgttgttagtccgatcgtttgccagtccaggttttggtactctgctcactgtaggtgcatagtgtacaccggagttaaaagcaaaaaacaaccacatttgaggcttcgtttgcgaaaaaatacctagtccc

SEQ ID NO: 32173 - protein, 357 aa, Triticum aestivum
TPLPLSSLARRGRVTPPPGTMASSFLSLRLPTPSPPTATSSPFFPNPLVRSGRCSPLSSTLVARVAGPAAGAPSPLFNPRGDPFLSTLAAASPEQLAAAAGGERRGEDHLPFLEIFQNAKLMSSPAQVERSSSSYSQHSPRRPPPDLPSLLLHGRIVYIGMPLVPAVTELIVAQLMYLDWMNSSEPAYIYINSTGTARDDGEPVGMETEGFAIYDAMMRMKTEVHTLCIGAAAGHACLVLAAGKKGKRYMFPHAKALIQQPRIPSYGMMQASDVVIRAKEVVHNRNTLVKLLARHTGNPPEKIDKVMRGPFYMDSLKAKEFGVIDKILWRGQEKYMSDMLSPEDWDKVAGVRGPGGM

SEQ ID NO: 32174 - protein, 337 aa, Triticum aestivum
MASSFLSLRLPTPSPPTATSSPFFPNPLVRSGRCSPLSSTLVARVAGPAAGAPSPLFNPRGDPFLSTLAAASPEQLAAAAGGERRGEDHLPFLEIFQNAKLMSSPAQVERSSSSYSQHSPRRPPPDLPSLLLHGRIVYIGMPLVPAVTELIVAQLMYLDWMNSSEPAYIYINSTGTARDDGEPVGMETEGFAIYDAMMRMKTEVHTLCIGAAAGHACLVLAAGKKGKRYMFPHAKALIQQPRIPSYGMMQASDVVIRAKEVVHNRNTLVKLLARHTGNPPEKIDKVMRGPFYMDSLKAKEFGVIDKILWRGQEKYMSDMLSPEDWDKVAGVRGPGGM

SEQ ID NO: 32175 - protein, 236 aa, Triticum aestivum
MSSPAQVERSSSSYSQHSPRRPPPDLPSLLLHGRIVYIGMPLVPAVTELIVAQLMYLDWMNSSEPAYIYINSTGTARDDGEPVGMETEGFAIYDAMMRMKTEVHTLCIGAAAGHACLVLAAGKKGKRYMFPHAKALIQQPRIPSYGMMQASDVVIRAKEVVHNRNTLVKLLARHTGNPPEKIDKVMRGPFYMDSLKAKEFGVIDKILWRGQEKYMSDMLSPEDWDKVAGVRGPGGM

SEQ ID NO: 32176 - DNA, 1720 bp, Triticum aestivum
acttgctatccagctcctgctaccctaacaatggcagtggctggtgccccacctgttctccagctcctgccccaacaatggcagctgattctagccatcctcctcgtcccactcggcttcctcctccttcggggaaggtcgggctccggcctgaagctcccaccgggccccatgaggctgcctttcgtgggcaacctgcaccagatcgggccactgccgcaccggagcctggctgcgctggcccggcggcatgggcctgtgatgatgctgcggctgggcatggtgccgacggtggtgctgacatcgccagaggcggcccgggaagccctcaagaccaaggatgatgactgcagcagccgtcccctgtcggcagggccagggctgctgtcttacggctacaaggacgtggccttctcgccgtggagcgactacgtccgcgagatgcgcaagttgttcatcatcgagctgctcagcaggcggcgcgtgcagtctgcctactacgcgagggatgcacagatcgacaagctgattgagaccctcaccgtggtggggccgaacccggtacccctggaggcccacatcttcgccaccatggaccggattgtgggcttgttcgcgttcggcgagagctacgcgggggagcagttcaaggggcagtttgtgcccttactcaacgcaaccatggacatgttgggtagcttctctgcccaagacttcttccccaacgccgttggccgcctcatcgaccgcatcaccggcgtcaaagcccaccgccagagggtctttcgtcagctcgaccgcttctttgagcatatcatcgagcagtgcgatgggagaaaggccaccggcggcggcggatcggacctggtgcaggagctgctggacatcatgaaaaggcccgccgcctccgctgcaggaaccttcaccagagatcatgtcaaggccattctcatgaacacattcattggtagcattgacaccaccacagtgaccataacctgggcaatggcagagctgatccggaaaccaagggttctgcaaagggcacaacttgagattaggactgccgctggaggaggcagcagagtgcaccaagctgacatgcccaaaatgagctacctgaggatggtgctgtccgagaccctacggctgcatcccccagcaacactactcgtaccgagagagacgctgcggccgatccaggtggctggctacgacatcccagccaagacccaggtcattgtcaatgcgtgggccatcagcagggacccttccgcgtggaaggaccccgaggagtttaacccggagcggttccaggacactgacgtggacttcaacggcagccacttcgagttcatccccttcggcgcgggccgccggatctgccccgggctggccatgggggtggcaaacgccgagtacatccttgccaacttgctctactgcttcaactgggcgctgcccaacggggtgagccgggagggtgtgaacatggaggaggaaggggtgctcacttaccggaagaagacctcactcatgctcgtgccaacaccttaccacccagcccaggagaaagaggaggagtattagtactcacttatttttctatatattctgttcctcgtgcattatcatttgttgttgttgttgttgttgttgttgttgtttattttaataaatcaatatgaataaaattctcaaattccgttccccgtacatc

SEQ ID NO: 32177 - protein, 529 aa, Triticum aestivum
TCYPAPATLTMAVAGAPPVLQLLPQQWQLILAILLVPLGFLLLRGRSGSGLKLPPGPMRLPFVGNLHQIGPLPHRSLAALARRHGPVMMLRLGMVPTVVLTSPEAAREALKTKDDDCSSRPLSAGPGLLSYGYKDVAFSPWSDYVREMRKLFIIELLSRRRVQSAYYARDAQIDKLIETLTVVGPNPVPLEAHIFATMDRIVGLFAFGESYAGEQFKGQFVPLLNATMDMLGSFSAQDFFPNAVGRLIDRITGVKAHRQRVFRQLDRFFEHIIEQCDGRKATGGGGSDLVQELLDIMKRPAASAAGTFTRDHVKAILMNTFIGSIDTTTVTITWAMAELIRKPRVLQRAQLEIRTAAGGGSRVHQADMPKMSYLRMVLSETLRLHPPATLLVPRETLRPIQVAGYDIPAKTQVIVNAWAISRDPSAWKDPEEFNPERFQDTDVDFNGSHFEFIPFGAGRRICPGLAMGVANAEYILANLLYCFNWALPNGVSREGVNMEEEGVLTYRKKTSLMLVPTPYHPAQEKEEEY

SEQ ID NO: 32178 - protein, 519 aa, Triticum aestivum
MAVAGAPPVLQLLPQQWQLILAILLVPLGFLLLRGRSGSGLKLPPGPMRLPFVGNLHQIGPLPHRSLAALARRHGPVMMLRLGMVPTVVLTSPEAAREALKTKDDDCSSRPLSAGPGLLSYGYKDVAFSPWSDYVREMRKLFIIELLSRRRVQSAYYARDAQIDKLIETLTVVGPNPVPLEAHIFATMDRIVGLFAFGESYAGEQFKGQFVPLLNATMDMLGSFSAQDFFPNAVGRLIDRITGVKAHRQRVFRQLDRFFEHIIEQCDGRKATGGGGSDLVQELLDIMKRPAASAAGTFTRDHVKAILMNTFIGSIDTTTVTITWAMAELIRKPRVLQRAQLEIRTAAGGGSRVHQADMPKMSYLRMVLSETLRLHPPATLLVPRETLRPIQVAGYDIPAKTQVIVNAWAISRDPSAWKDPEEFNPERFQDTDVDFNGSHFEFIPFGAGRRICPGLAMGVANAEYILANLLYCFNWALPNGVSREGVNMEEEGVLTYRKKTSLMLVPTPYHPAQEKEEEY

SEQ ID NO: 32179 - protein, 472 aa, Triticum aestivum
MRLPFVGNLHQIGPLPHRSLAALARRHGPVMMLRLGMVPTVVLTSPEAAREALKTKDDDCSSRPLSAGPGLLSYGYKDVAFSPWSDYVREMRKLFIIELLSRRRVQSAYYARDAQIDKLIETLTVVGPNPVPLEAHIFATMDRIVGLFAFGESYAGEQFKGQFVPLLNATMDMLGSFSAQDFFPNAVGRLIDRITGVKAHRQRVFRQLDRFFEHIIEQCDGRKATGGGGSDLVQELLDIMKRPAASAAGTFTRDHVKAILMNTFIGSIDTTTVTITWAMAELIRKPRVLQRAQLEIRTAAGGGSRVHQADMPKMSYLRMVLSETLRLHPPATLLVPRETLRPIQVAGYDIPAKTQVIVNAWAISRDPSAWKDPEEFNPERFQDTDVDFNGSHFEFIPFGAGRRICPGLAMGVANAEYILANLLYCFNWALPNGVSREGVNMEEEGVLTYRKKTSLMLVPTPYHPAQEKEEEY

SEQ ID NO: 32180 - DNA, 1184 bp, Triticum aestivum
ttttttcttcttgctcagcctcggacgcaatggccgccgttggtcttctcggcgtgcgtccagctccggcgaccggccgccttgagaggcaggcgagggcttcacctgacgcggttagctggggctggcgtgcccgcgcgcgcccccttcggtccgttccgccgcccgggcgagcggggaggggcggggcaagggcggcgaggcccttgcgcgccgcgatgggcggcggcgacctgtacgccctcgacttcgacggcgtcttctgcgacagctgcggcgagagctccctctccgccgtcaaggccgccaaggtgaggtggccgtgggcgtttgagcaggtcgacgccgccatggaagagtggatagtggagcagatgcacacccttcgtccagtgatagaaacaggatatgagaacctgttgcttgtaaggttgcttgttgagatccagataccctctgctcgaaagtcatcagttgcagatgggcttagcatccaagaaatattggacaactggtcaaaactgttgcccactctcatggacgagtggcaagaagatagggaatctcttgtagatctctttggccgtgtaagggatgactggcttgaaaatgatttgtctggctggataggtgctaacaggttttatcctgggacggctgatgcattaaagctttcaagctctgaactttacatagtcacaacaaaacagagtagatttactggagcactacttaaagaattggctggagtagattttccctctgaaaggatatatggccttggcactggtccgaaggtaaaagttctccagcagttgcaggaaatgccacagcaccaaggtcttacacttcatttcgtcgaggaccgactagcaactctgaagaacgtgataaaagaaccagcgctggacaaatggaacctctacctggtgaaatggggatacaacacgcaagaagagagggaagaagcaggggccatatcgaggatccagctcatcgatctcccagatttcagtaagcagctgaaataagtaactggcagacctagatgcagccttcgaaactttgtttttgttggacgcgctcgtaaacagcaacggatttacttgacttttatttattattgtttgcatatttgtgaagtggtttatttcgtcagttctcctagagactgactttaccag

SEQ ID NO: 32181 - protein, 342 aa, Triticum aestivum
FSSCSASDAMAAVGLLGVRPAPATGRLERQARASPDAVSWGWRARARPLRSVPPPGRAGRGGARAARPLRAAMGGGDLYALDFDGVFCDSCGESSLSAVKAAKVRWPWAFEQVDAAMEEWIVEQMHTLRPVIETGYENLLLVRLLVEIQIPSARKSSVADGLSIQEILDNWSKLLPTLMDEWQEDRESLVDLFGRVRDDWLENDLSGWIGANRFYPGTADALKLSSSELYIVTTKQSRFTGALLKELAGVDFPSERIYGLGTGPKVKVLQQLQEMPQHQGLTLHFVEDRLATLKNVIKEPALDKWNLYLVKWGYNTQEEREEAGAISRIQLIDLPDFSKQLK

SEQ ID NO: 32182 - protein, 333 aa, Triticum aestivum
MAAVGLLGVRPAPATGRLERQARASPDAVSWGWRARARPLRSVPPPGRAGRGGARAARPLRAAMGGGDLYALDFDGVFCDSCGESSLSAVKAAKVRWPWAFEQVDAAMEEWIVEQMHTLRPVIETGYENLLLVRLLVEIQIPSARKSSVADGLSIQEILDNWSKLLPTLMDEWQEDRESLVDLFGRVRDDWLENDLSGWIGANRFYPGTADALKLSSSELYIVTTKQSRFTGALLKELAGVDFPSERIYGLGTGPKVKVLQQLQEMPQHQGLTLHFVEDRLATLKNVIKEPALDKWNLYLVKWGYNTQEEREEAGAISRIQLIDLPDFSKQLK

SEQ ID NO: 32183 - protein, 270 aa, Triticum aestivum
MGGGDLYALDFDGVFCDSCGESSLSAVKAAKVRWPWAFEQVDAAMEEWIVEQMHTLRPVIETGYENLLLVRLLVEIQIPSARKSSVADGLSIQEILDNWSKLLPTLMDEWQEDRESLVDLFGRVRDDWLENDLSGWIGANRFYPGTADALKLSSSELYIVTTKQSRFTGALLKELAGVDFPSERIYGLGTGPKVKVLQQLQEMPQHQGLTLHFVEDRLATLKNVIKEPALDKWNLYLVKWGYNTQEEREEAGAISRIQLIDLPDFSKQLK

SEQ ID NO: 32184 - DNA, 1684 bp, Triticum aestivum
caccctcccccgctcctcctcctcgggctccgccgcccccgcctccgcctccccgaatcccagccctagcggccggcgagcgcggcgatgggcgccgtcgcctccacggtggcggcgcgcttcgccttcttcccgccctccccgccgtcgtacggcgtcgagcccccgccctcgccggccgcggccgccgcggacggcgcggtggtggagctcagcggggtgccccggcggggcggcgtggaggcgcggcggctgccgaccaagcgcggctcggaggtggtggccatgtacgtgcgccagcccggggcgcgcctcacgctgctctactcccacggcaacgcggccgacctgggccagatgtacgagctcttcgtcgagctcagctcgcacctcaacgtcaacctcatgggttatgattattctggatatgggcaatcatctgggaagccaagtgagcagaacacttatgcagacatagaggccgcttataggtgtctcatagaaacttatggggcctccgaggaaaacatcattctgtatggtcaatcagttggcagtggccctactttagatttggcatctcgtttgcctcatttgagagcagtggttctacatagcccaatttcgtctggcttgagagtaatgtatcctgtgaaacatacatactggtttgacatatataagaacattgacaaagttgcattggtcaaatgccccgtgttagtaatccatggtacggctgatgatgttgttgactgttctcatgggagagcactgtgggaactatccaaagtgaagtatgagcctttgtgggtcaaaggtgggaaccattgtaatttggaactctatcccgaatacattaagcacctaaagaagttcatcacagccatagagaagtccccaccactgaaagatgattctccagaaagttcaggcccttcagatcttgaaacaggatctgaaagtatggagagttcaagaaaaagcacggatgtgagggacaaatcaaggtcaagcactgatcacaggcggagtacagatcgacgggagaaaccaaggagcagcatagataggaaggataaaggcagaaagagtgtagatcatcctgacaaaccacgggctagtgtggatcaatctgataagccacggaaaagcattgaccgctttggagggatgatgaggtcggttaaattgtgcaatattgactgcttcaaagtaacttccacttccgggagctgaaaatagtggaaggttagttttgatagtatctgtatttatttcatctgtataatctattcaattgggtgtttttagttttgctgtggaaggtgtattgatttgggtgagggttatgcacactgaattgtttcgtgagaagaaatgatcattcattcccgaccccctgagttttcaaagccattcatttggcacatcaacaatgctactcccacggagtatgaagcaacaccattgttacactgtacataagttgttgtatcattacactgtcttagtttttctttttcatagaaacatttgatagataactaaactgggaatttgtgtcttccctctggaaagaagttctcttcaaaaatggatttctgtcacttgattgctttgtcatggagcttgaacttgaaatgaatcactggatcattcaatgtaatcatcatctttgttc

SEQ ID NO: 32185 - protein, 383 aa, Triticum aestivum
MGAVASTVAARFAFFPPSPPSYGVEPPPSPAAAAADGAVVELSGVPRRGGVEARRLPTKRGSEVVAMYVRQPGARLTLLYSHGNAADLGQMYELFVELSSHLNVNLMGYDYSGYGQSSGKPSEQNTYADIEAAYRCLIETYGASEENIILYGQSVGSGPTLDLASRLPHLRAVVLHSPISSGLRVMYPVKHTYWFDIYKNIDKVALVKCPVLVIHGTADDVVDCSHGRALWELSKVKYEPLWVKGGNHCNLELYPEYIKHLKKFITAIEKSPPLKDDSPESSGPSDLETGSESMESSRKSTDVRDKSRSSTDHRRSTDRREKPRSSIDRKDKGRKSVDHPDKPRASVDQSDKPRKSIDRFGGMMRSVKLCNIDCFKVTSTSGS

SEQ ID NO: 32186 - protein, 317 aa, Triticum aestivum
MYVRQPGARLTLLYSHGNAADLGQMYELFVELSSHLNVNLMGYDYSGYGQSSGKPSEQNTYADIEAAYRCLIETYGASEENIILYGQSVGSGPTLDLASRLPHLRAVVLHSPISSGLRVMYPVKHTYWFDIYKNIDKVALVKCPVLVIHGTADDVVDCSHGRALWELSKVKYEPLWVKGGNHCNLELYPEYIKHLKKFITAIEKSPPLKDDSPESSGPSDLETGSESMESSRKSTDVRDKSRSSTDHRRSTDRREKPRSSIDRKDKGRKSVDHPDKPRASVDQSDKPRKSIDRFGGMMRSVKLCNIDCFKVTSTSGS

SEQ ID NO: 32187 - protein, 293 aa, Triticum aestivum
MYELFVELSSHLNVNLMGYDYSGYGQSSGKPSEQNTYADIEAAYRCLIETYGASEENIILYGQSVGSGPTLDLASRLPHLRAVVLHSPISSGLRVMYPVKHTYWFDIYKNIDKVALVKCPVLVIHGTADDVVDCSHGRALWELSKVKYEPLWVKGGNHCNLELYPEYIKHLKKFITAIEKSPPLKDDSPESSGPSDLETGSESMESSRKSTDVRDKSRSSTDHRRSTDRREKPRSSIDRKDKGRKSVDHPDKPRASVDQSDKPRKSIDRFGGMMRSVKLCNIDCFKVTSTSGS

SEQ ID NO: 32188 - DNA, 933 bp, Triticum aestivum
attcttccagctcccggccaccatccattgtcagcctctcaagatccaagaagtcctccctcactagcggtgtacggtgccgtgtgtgtagtaagttggtacgtacgtgatgggcgacgacggcgccaaggcggtcaccacgacgatcgtgcggctgcgggagctgctgcacaagtgggcgctcggtgccagaggcgacgccgacgacggcgaggaggaggaggagacgcacgcgccggcggcgggggcgggagcgggagcgggaggtgcgccgccgtcgatcccgccgttcgtgctgcggcggctaacgaggacggtgacggtggactcggacgacgagagctgccacagcccggaggcggcgccggacgtgcccaggggttactgcccggtgtacgtggggccggagcagcggcggttcgtgatcccgaccggctacctggggcaccccgtgttccggctcctcctggagaaggccgaggaggagttcgggttccggcacgagggcgcgctggccatcccctgcgacaccgaggccttcaagtacatcctccagtgcgtcgagcgccacgacaagggcctcgccgccgacgacgtcgacgtcgacggtatgttgcccgtcgtcgactagctcccgagacgcttgcatcctacagtagcagaggatggatcatttaaccgtgtgatggattcatctgtaacagtgttctgaattatgttcgtttgcgttttattttcagaagaagggaacctgcgcactgtgctagagccagcgtcgtcagttcgtgatgtttcgtagatagtgtctgtaatgctgtaatttctgtctattttttctaaggaaagacctaaatatacgatcaagaattaaattgatccgtcaaagtagtttgggtgtaactggttgtgatctaagtatgttagtacagtttg

SEQ ID NO: 32189 - protein, 225 aa, Triticum aestivum
ILPAPGHHPLSASQDPRSPPSLAVYGAVCVVSWYVRDGRRRRQGGHHDDRAAAGAAAQVGARCQRRRRRRRGGGGDARAGGGGGSGSGRCAAVDPAVRAAAANEDGDGGLGRRELPQPGGGAGRAQGLLPGVRGAGAAAVRDPDRLPGAPRVPAPPGEGRGGVRVPARGRAGHPLRHRGLQVHPPVRRAPRQGPRRRRRRRRRYVARRRLAPETLASYSSRGWII

SEQ ID NO: 32190 - protein, 173 aa, Triticum aestivum
MGDDGAKAVTTTIVRLRELLHKWALGARGDADDGEEEEETHAPAAGAGAGAGGAPPSIPPFVLRRLTRTVTVDSDDESCHSPEAAPDVPRGYCPVYVGPEQRRFVIPTGYLGHPVFRLLLEKAEEEFGFRHEGALAIPCDTEAFKYILQCVERHDKGLAADDVDVDGMLPVVD

SEQ ID NO: 32191 - DNA, 1353 bp, Triticum aestivum
attaccagttgccgaagagtgagagtgagtaccgagcagttggtgcgctgctctgtcctgacattgcacgcgcttgccaccgagctctgcattgcgtctactagcagctatcctcgatggggctgccgggatgcatcgccgtcattgtgctccttctgatttcatggagagagggggaggcggcgatgttcacgttcgtcaaccggtgcgccgacacggtgtggccgggcgtcctgtccaacgctggcacggctcggctcggcaccacggggttcgagctcccgccgggcgcgtcgcgcgctgtgccggcgccctcggcctggtccggccgcctctgggcccgcaccggatgcgcgcaggacggcgccacggggcggctcgtctgcgccaccggcgactgcggctccggcacggccgagtgcgccggggccggcgcggcgcccccagcgacgctggccgagttcacgctcgacggcacgggcgggctggacttctacgacgtcagcctggtggacgggtacaacctgccggtgctggtggagccgtcctccggggagcgccccggcggcgcgtcgaccgctgggtcctgcgcttcggcggggtgcgcggcggacctgaacgcgatgtgccccgccgagctccggtccggcggcggcgcggcctgccggagcgcgtgcgacgcgttcgggcggcccgagtactgctgcagcggcgcctacgccaaccccgggacgtgccggccgacgtcctactcgcaggtgttcaagatggcctgcccgcgctcctacagctacgccttcgacgaccccacctccaccttcacctgcgccggcggccccgactacaccgtcaccttctgccccggcgccaccccgagccagaagtcgaccacggtgccggcggccacaacgccgacgcaaacgacccccacgccgacgacggtgcctgtgacggatacgccggcgatgatgccggggatgacgttcacggacgccaaccaggacagcatgccgatgccgatgggcggcgaggccgggactggtggtggcggcagcatccaggggcagggcgtgatcctcgggggcaccagcagcgacgcctggctcgccaacatggccaccggcgacgcgacgggcgcggcagcggcagcggcagcctccgggcggctagtcgccgcgccattggtactgctcgcgctccatctgctgcgatagatggaggtcggcggagcactgattgatcggtgcaatgtgtacgggtgaaaagagagattggttgtagggttagattcggagaaaaccattgtaacattccgtgttgatgggattttgttgtacgtagattgttggttag

SEQ ID NO: 32192 - protein, 369 aa, Triticum aestivum
MHRRHCAPSDFMERGGGGDVHVRQPVRRHGVAGRPVQRWHGSARHHGVRAPAGRVARCAGALGLVRPPLGPHRMRAGRRHGAARLRHRRLRLRHGRVRRGRRGAPSDAGRVHARRHGRAGLLRRQPGGRVQPAGAGGAVLRGAPRRRVDRWVLRFGGVRGGPERDVPRRAPVRRRRGLPERVRRVRAARVLLQRRLRQPRDVPADVLLAGVQDGLPALLQLRLRRPHLHLHLRRRPRLHRHLLPRRHPEPEVDHGAGGHNADANDPHADDGACDGYAGDDAGDDVHGRQPGQHADADGRRGRDWWWRQHPGAGRDPRGHQQRRLARQHGHRRRDGRGSGSGSLRAASRRAIGTARAPSAAIDGGRRSTD

SEQ ID NO: 32193 - protein, 365 aa, Triticum aestivum
MGLPGCIAVIVLLLISWREGEAAMFTFVNRCADTVWPGVLSNAGTARLGTTGFELPPGASRAVPAPSAWSGRLWARTGCAQDGATGRLVCATGDCGSGTAECAGAGAAPPATLAEFTLDGTGGLDFYDVSLVDGYNLPVLVEPSSGERPGGASTAGSCASAGCAADLNAMCPAELRSGGGAACRSACDAFGRPEYCCSGAYANPGTCRPTSYSQVFKMACPRSYSYAFDDPTSTFTCAGGPDYTVTFCPGATPSQKSTTVPAATTPTQTTPTPTTVPVTDTPAMMPGMTFTDANQDSMPMPMGGEAGTGGGGSIQGQGVILGGTSSDAWLANMATGDATGAAAAAAASGRLVAAPLVLLALHLLR

SEQ ID NO: 32194 - protein, 358 aa, Triticum aestivum
MERGGGGDVHVRQPVRRHGVAGRPVQRWHGSARHHGVRAPAGRVARCAGALGLVRPPLGPHRMRAGRRHGAARLRHRRLRLRHGRVRRGRRGAPSDAGRVHARRHGRAGLLRRQPGGRVQPAGAGGAVLRGAPRRRVDRWVLRFGGVRGGPERDVPRRAPVRRRRGLPERVRRVRAARVLLQRRLRQPRDVPADVLLAGVQDGLPALLQLRLRRPHLHLHLRRRPRLHRHLLPRRHPEPEVDHGAGGHNADANDPHADDGACDGYAGDDAGDDVHGRQPGQHADADGRRGRDWWWRQHPGAGRDPRGHQQRRLARQHGHRRRDGRGSGSGSLRAASRRAIGTARAPSAAIDGGRRSTD

SEQ ID NO: 32195 - DNA, 1786 bp, Triticum aestivum
acccgacagtgaacagacagcgcacggcaacgacgcaccatcagtcacgcaccctccacccaagtcgccgactcccgccgtcgcgatcgcggcggccgccggcaatgtcttggctcgcgcgctccatcgccaactccctcctatcccccgacagccccgaggccgacggcgaagacccccgcgcctccgactccacctccccgggctcaccccctcgcggcgtccgcgaggatctctcggagctcactgacgccctcgcccaccggttccagggccttgcctccttcctcgcggcgcccactcccgcaggaagcggcggcgcaccccgcgggctgaacccgtccgagattgcggggcgcttccgcctggggctcgcgcggctcccgggccgccaggccgtggcagatctcgccaagaacgcgtcctctctactgcacccggacgaatactggggcgggtcggaggccgccggggctaccgaggacgtggtcgccttcgcgcgggacgccgccatgcggcccgagctctggctggacttcccccttctccccgacgacgcggactcggacgattttgacattagtgatgcgcagcaagatcacgcgctggccgtcgagagcatggcgccggagctggcagatctgaggatcgaactctgcccaagccacatgagcgagggctgcttctggaagatatactttgtgctactgcaccctaagctcacaaaggaggaagccgagcttctttctactcctcagattttggaagctagagggaagttgtcacaaaattcgcaacatcggacaaagctagagagcaacgaagacacagtggctctgactttcagtaatggagatggtactgtacctatacctgtagaggtggtcagcgtagtaaaagatcaagatgcttccggcaggcccacagctttgggcaatgtagattatggtatacttgaatcgattcctctggaagagctagcaaaagatacagtcagtgatgctggagctgttccttcagataaaatcagcagtggcgtgcctgtacagctattgccggtattaagagatgccactgagttctcagtctcacaatcaaggatgggagaaaccattcacactccctctaaagaacatcccactgggttctcacaatctagcattgaagaaagaacacccgactcaattacagatgatgttgtagcaaatgagcagtgtgtaccatttgtagacagtgctccatcggaagaagatcaacataaatggtcattgagtgacctcagcgagcaatcaagagttgtcactcaaaagtcccataacgatggcactgatgatgatggggatgaatggctggaagaggacacggctggtccaggaagcacgcacattccaatagtaggcgacgatgaggatatatctttcagtgatctggaggaagatgactgatgtagcatgatatcaatggcgagcttggtcatcaccgtcttggtgcttctggttcgaagcgatatgtatatgtgggtttgggttctgtccactgtatggtctcatggatctgctatgatcaatgcccactgcagcaggattgttcaccttctgctcatatctctgtgccgccaagatcagttttgcggtctagttctcccttgtggcaactatgcctgttgtacagtgtgtagagagcacatacttgtgcatgtggttgtttggatcaacactttgattcttggatcaagcgtgtgtcctgacaatgatgatgggaactcgagtattcttatgtttcggtg

SEQ ID NO: 32196 - protein, 480 aa, Triticum aestivum
PTVNRQRTATTHHQSRTLHPSRRLPPSRSRRPPAMSWLARSIANSLLSPDSPEADGEDPRASDSTSPGSPPRGVREDLSELTDALAHRFQGLASFLAAPTPAGSGGAPRGLNPSEIAGRFRLGLARLPGRQAVADLAKNASSLLHPDEYWGGSEAAGATEDVVAFARDAAMRPELWLDFPLLPDDADSDDFDISDAQQDHALAVESMAPELADLRIELCPSHMSEGCFWKIYFVLLHPKLTKEEAELLSTPQILEARGKLSQNSQHRTKLESNEDTVALTFSNGDGTVPIPVEVVSVVKDQDASGRPTALGNVDYGILESIPLEELAKDTVSDAGAVPSDKISSGVPVQLLPVLRDATEFSVSQSRMGETIHTPSKEHPTGFSQSSIEERTPDSITDDVVANEQCVPFVDSAPSEEDQHKWSLSDLSEQSRVVTQKSHNDGTDDDGDEWLEEDTAGPGSTHIPIVGDDEDISFSDLEEDD

SEQ ID NO: 32197 - protein, 446 aa, Triticum aestivum
MSWLARSIANSLLSPDSPEADGEDPRASDSTSPGSPPRGVREDLSELTDALAHRFQGLASFLAAPTPAGSGGAPRGLNPSEIAGRFRLGLARLPGRQAVADLAKNASSLLHPDEYWGGSEAAGATEDVVAFARDAAMRPELWLDFPLLPDDADSDDFDISDAQQDHALAVESMAPELADLRIELCPSHMSEGCFWKIYFVLLHPKLTKEEAELLSTPQILEARGKLSQNSQHRTKLESNEDTVALTFSNGDGTVPIPVEVVSVVKDQDASGRPTALGNVDYGILESIPLEELAKDTVSDAGAVPSDKISSGVPVQLLPVLRDATEFSVSQSRMGETIHTPSKEHPTGFSQSSIEERTPDSITDDVVANEQCVPFVDSAPSEEDQHKWSLSDLSEQSRVVTQKSHNDGTDDDGDEWLEEDTAGPGSTHIPIVGDDEDISFSDLEEDD

SEQ ID NO: 32198 - protein, 310 aa, Triticum aestivum
MRPELWLDFPLLPDDADSDDFDISDAQQDHALAVESMAPELADLRIELCPSHMSEGCFWKIYFVLLHPKLTKEEAELLSTPQILEARGKLSQNSQHRTKLESNEDTVALTFSNGDGTVPIPVEVVSVVKDQDASGRPTALGNVDYGILESIPLEELAKDTVSDAGAVPSDKISSGVPVQLLPVLRDATEFSVSQSRMGETIHTPSKEHPTGFSQSSIEERTPDSITDDVVANEQCVPFVDSAPSEEDQHKWSLSDLSEQSRVVTQKSHNDGTDDDGDEWLEEDTAGPGSTHIPIVGDDEDISFSDLEEDD

SEQ ID NO: 32199 - DNA, 1752 bp, Triticum aestivum
agttgtcgttccaaaggaaaaggaaaattggcagctggttgtggtgttcgctgctcgccaccgactttcccggcgccaccgcaccgtgcaccggccccaccggcggcgacgatgggtaactcacaggcctctcccttgtccgcctcctctgccagcttcgtcatggcctccagggccttctcgaagcaggcgctggacgaactgcgcgcgcacttctcctcgctcgccgcgcagtcggggacccaggggcgcgccatatcccgccccgttttccttgattatttcggggtacgtggggcgctcggcgataggctattccagttggtggcgaaggagagcagcgtggaagatggagtcaccttcgagggtttgattatcaccaaagcaacatatgaaaggggaactaaagatgaagccgatgagttcatttttcaactgtgcgatgtgatgggagatagtatcttaacaaggtctgatctggaagctgtatttgtgtccattcatgaaaccatatttgcagataataatgaagccaaggaaggttctaacaagagtacatttgaagcatttctcaactctgcggtattttcgaaggatgctgaaggggtctctgagaagtctatgtcattatcagactttagaaactggtgtattgtcatgccaaaactgaggaaattccttggaagtttgttgatgccccctgactcaggcagagccggcttccagatacctctacttcattatccagaaaacatctcctccgagttgctactcttaaataaagagtatgcttggcatataggaggtggcttctctcaacatgatgtgcaagagtggaagcttctatatcacagttctcttcatggacaaagcttcaacactttcttaggcaatgtgacgaatggagatgtacagactgttttggttattaaagatgcagaaggttccatttatggtgcatatgcatcacaaccatgggaaaggcacagtgatttttatggtgacatgaagacattccttttcaagttatatcccgaagcgtccatattttgccctacaggagcaaacaaaagtttgcaatggtgtgctgtaaacttcacctctgagaacattccaaatggcatcggctttggaggcaagccacatcactttggcctcttcctctctgcgggtttcgatcaagggcactcatttacctccagcacattcaccaatcctcccctttccaacacgagcaggttcagaccagaagttattgaatgttgggggatacaagtgaagggatcaaatgatgaaaagccggagcttgtcaaggggacggtccttgagagattcaaggaggatcggaacatgctgaagctgattggtatggcgagtgcgagtgactgagcactgaaaaaaatcacaatagcagatatttggaggttgtgtacagcactctttttatgggaaataataccttacttgtatctggttgctactcttgagttttatttagctcttggagcttttttgtttcacatccagagtgatacaaggttagctgcatggagttgttggtttatactgtatggatccaggacgtcattttctgcccagttcgagagcagggagtaactgtctgttcatttgtcaagatggatcttcgaaagctggctgctgattaaaggatgtatgaaatgtgttctaaaactaaatcagtgtagcatgtattggggtggataaagtaatgagtggatacagttcagttcg

SEQ ID NO: 32200 - protein, 462 aa, Triticum aestivum
SCRSKGKGKLAAGCGVRCSPPTFPAPPHRAPAPPAATMGNSQASPLSASSASFVMASRAFSKQALDELRAHFSSLAAQSGTQGRAISRPVFLDYFGVRGALGDRLFQLVAKESSVEDGVTFEGLIITKATYERGTKDEADEFIFQLCDVMGDSILTRSDLEAVFVSIHETIFADNNEAKEGSNKSTFEAFLNSAVFSKDAEGVSEKSMSLSDFRNWCIVMPKLRKFLGSLLMPPDSGRAGFQIPLLHYPENISSELLLLNKEYAWHIGGGFSQHDVQEWKLLYHSSLHGQSFNTFLGNVTNGDVQTVLVIKDAEGSIYGAYASQPWERHSDFYGDMKTFLFKLYPEASIFCPTGANKSLQWCAVNFTSENIPNGIGFGGKPHHFGLFLSAGFDQGHSFTSSTFTNPPLSNTSRFRPEVIECWGIQVKGSNDEKPELVKGTVLERFKEDRNMLKLIGMASASD

SEQ ID NO: 32201 - protein, 425 aa, Triticum aestivum
MGNSQASPLSASSASFVMASRAFSKQALDELRAHFSSLAAQSGTQGRAISRPVFLDYFGVRGALGDRLFQLVAKESSVEDGVTFEGLIITKATYERGTKDEADEFIFQLCDVMGDSILTRSDLEAVFVSIHETIFADNNEAKEGSNKSTFEAFLNSAVFSKDAEGVSEKSMSLSDFRNWCIVMPKLRKFLGSLLMPPDSGRAGFQIPLLHYPENISSELLLLNKEYAWHIGGGFSQHDVQEWKLLYHSSLHGQSFNTFLGNVTNGDVQTVLVIKDAEGSIYGAYASQPWERHSDFYGDMKTFLFKLYPEASIFCPTGANKSLQWCAVNFTSENIPNGIGFGGKPHHFGLFLSAGFDQGHSFTSSTFTNPPLSNTSRFRPEVIECWGIQVKGSNDEKPELVKGTVLERFKEDRNMLKLIGMASASD

SEQ ID NO: 32202 - protein, 408 aa, Triticum aestivum
MASRAFSKQALDELRAHFSSLAAQSGTQGRAISRPVFLDYFGVRGALGDRLFQLVAKESSVEDGVTFEGLIITKATYERGTKDEADEFIFQLCDVMGDSILTRSDLEAVFVSIHETIFADNNEAKEGSNKSTFEAFLNSAVFSKDAEGVSEKSMSLSDFRNWCIVMPKLRKFLGSLLMPPDSGRAGFQIPLLHYPENISSELLLLNKEYAWHIGGGFSQHDVQEWKLLYHSSLHGQSFNTFLGNVTNGDVQTVLVIKDAEGSIYGAYASQPWERHSDFYGDMKTFLFKLYPEASIFCPTGANKSLQWCAVNFTSENIPNGIGFGGKPHHFGLFLSAGFDQGHSFTSSTFTNPPLSNTSRFRPEVIECWGIQVKGSNDEKPELVKGTVLERFKEDRNMLKLIGMASASD

SEQ ID NO: 32203 - DNA, 1529 bp, Triticum aestivum
atctgcgccttctggtgagagtacgtgtgttggttgttcttgcaggcacttgcacgcgtggtcaccatggagctgccccacgccgcgctcgcgctgatcgtcgccgcggccgccacgctctccgtcgcagtggcctacgacccgctggatcccaacgggaacatcaccatcaaatgggacgttctctcgtggacgccagacggatacgtcgcgacggtgacgatcaacaacttccagacgtaccggcagatcatggcgccggggtggacggtggggtggacgtgggcgaagcgggaggtgatctggtccatggtgggcgcgcaggccacggagcagggcgactgctccaagttcaaggccaacctcccgcactcgtgcaagcgcacccccgccgtcgtcgacctgctcccgggcgtgccctacaaccagcagatcgccaactgctgccgcggcggcgtcgtctccgcctacggccaggacccgtccggcgccgtgtcctccttccaggtcagcgtcggccaggccggcaccaccaaccgcaccgtcaaggtccccaagaacttcaccctcctcggccccggcccaggctacacctgcggccccgccaaggtcgtcccctccaccgtcttcctcaccgccgaccaccgccgcaagacccaggccctcatgacgtggaacgtgacgtgcacctactcgcagcacctggcgtccaagtacccgacctgctgcgtctccttctcctccttctacaacgacaccatcgtgccctgcgccaagtgcgcgtgcggctgcgagcacaagacctgcgcccgcagcgagcgggactcgaagcggctcatgtcggcgtcggggaagagcagcgcgcacgcggtcaccgcggtgcgcgggcacgtgaaccggcagagcgcggcgccgctgctgcagtgcacgacccacatgtgccccgtgcgcgtccactggcacgtcaagctcaactaccacgactactggcgcgccaaggtgaccgtcaccaacttcaactaccgcaccaactacaccggctggacgctcgtcgcccagcaccccaacctcgacaacatcaccgaggtcttcagcttcgactacaagcccgtcgtctcctacggctccatcaatgatacggcgctgttctacgggatgaagttcttcaacgaccagctcatggaggcggggccgtacgggaacgtgcagtcggaggtgctgatgcgcaaggacgccagcacattcacgttcaggcaggggtgggcgttcccgcggaagatctacttcaacggcgacgagtgccggatgccgccgccggactcctacccttacctgcccaactccgcgccggcgtcgctcgtgagctccgcctccgtcgtcgtcgccttcttggttctactcatggcatgagcgtcggaggcggccatgatgttttgcctgtagatcataggagaacgttttgggcttcaaggttgagatcggtggtgttttaatctggatataattaaacgcaagtttttccccattac

SEQ ID NO: 32204 - protein, 447 aa, Triticum aestivum
MELPHAALALIVAAAATLSVAVAYDPLDPNGNITIKWDVLSWTPDGYVATVTINNFQTYRQIMAPGWTVGWTWAKREVIWSMVGAQATEQGDCSKFKANLPHSCKRTPAVVDLLPGVPYNQQIANCCRGGVVSAYGQDPSGAVSSFQVSVGQAGTTNRTVKVPKNFTLLGPGPGYTCGPAKVVPSTVFLTADHRRKTQALMTWNVTCTYSQHLASKYPTCCVSFSSFYNDTIVPCAKCACGCEHKTCARSERDSKRLMSASGKSSAHAVTAVRGHVNRQSAAPLLQCTTHMCPVRVHWHVKLNYHDYWRAKVTVTNFNYRTNYTGWTLVAQHPNLDNITEVFSFDYKPVVSYGSINDTALFYGMKFFNDQLMEAGPYGNVQSEVLMRKDASTFTFRQGWAFPRKIYFNGDECRMPPPDSYPYLPNSAPASLVSSASVVVAFLVLLMA

SEQ ID NO: 32205 - protein, 385 aa, Triticum aestivum
MAPGWTVGWTWAKREVIWSMVGAQATEQGDCSKFKANLPHSCKRTPAVVDLLPGVPYNQQIANCCRGGVVSAYGQDPSGAVSSFQVSVGQAGTTNRTVKVPKNFTLLGPGPGYTCGPAKVVPSTVFLTADHRRKTQALMTWNVTCTYSQHLASKYPTCCVSFSSFYNDTIVPCAKCACGCEHKTCARSERDSKRLMSASGKSSAHAVTAVRGHVNRQSAAPLLQCTTHMCPVRVHWHVKLNYHDYWRAKVTVTNFNYRTNYTGWTLVAQHPNLDNITEVFSFDYKPVVSYGSINDTALFYGMKFFNDQLMEAGPYGNVQSEVLMRKDASTFTFRQGWAFPRKIYFNGDECRMPPPDSYPYLPNSAPASLVSSASVVVAFLVLLMA

SEQ ID NO: 32206 - protein, 377 aa, Triticum aestivum
LRLLVRVRVLVVLAGTCTRGHHGAAPRRARADRRRGRHALRRSGLRPAGSQREHHHQMGRSLVDARRIRRDGDDQQLPDVPADHGAGVDGGVDVGEAGGDLVHGGRAGHGAGRLLQVQGQPPALVQAHPRRRRPAPGRALQPADRQLLPRRRRLRLRPGPVRRRVLLPGQRRPGRHHQPHRQGPQELHPPRPRPRLHLRPRQGRPLHRLPHRRPPPQDPGPHDVERDVHLLAAPGVQVPDLLRLLLLLLQRHHRALRQVRVRLRAQDLRPQRAGLEAAHVGVGEEQRARGHRGARAREPAERGAAAAVHDPHVPRARPLARQAQLPRLLARQGDRHQLQLPHQLHRLDARRPAPQPRQHHRGLQLRLQARRLLRLHQ

SEQ ID NO: 32207 - DNA, 1773 bp, Triticum aestivum
aaaaaaaaaaatccgaattcccgaatcccccacctccaccccctcccccgcaaccaccaccaccggaccaccgtcaccggcggcgaaggcacgatgagggagatcctgcacatacagggcgggcagtgcgggaaccagatcggggccaagttctgggaggtgatctgcgacgagcacgggatcgacgggacggggcgctacgcgggggactcggacctgcagctggagcggatcaacgtctactacaacgaggcgagcgggggccggttcgtgccccgcgccgtgctcatggacctcgagccggggaccatggactcggtgcgctccggccccttcggccagatcttccgccccgacaacttcgtcttcggccagtccggcgccggcaacaactgggccaagggacactacaccgagggcgccgagctcatcgattccgtcctcgacgtcgtccgcaaggaggccgagaactgcgactgcctccagggattccaagtttgccattccttgggaggaggcactggatctgggatgggcacccttcttatttctaagattagggaggagtaccctgaccgaatgatgctgacattctctgtcttcccatcaccaaaggtctccgacaccgttgttgagccatacaatgctacactttctgttcaccaacttgttgagaacgctgatgagtgtatggtgcttgacaatgaagctctatacgacatatgcttccgcacactaaagcttgccaccccttcctttggtgacctgaaccatcttatctctgctaccatgagcggtgtcacatgctgcctgaggttccctggacaactcaactccgatcttcgcaagcttgctgtgaatctcatcccattcccccgcctccacttcttcatggttggcttcgcaccactgacgtcgcgtgggtcacaaatgtaccgtgctctcacagtccctgagctgacccagcaaatgtgggatgccaagaacatgatgtgcgccgcagacccccgccatggccgctacctcaccgcctcggcctgcttccgagggaagatgagcaccaaggaggtggacgagcagatgctcaacgtccagaacaagaactcgtcgtactttgtggagtggatccccaacaacgtcaagtcgagcgtgtgcgacatgccgcccagggggctgaagatggcgggcaccttcgtcggcaactccacgtccatccaggagatgttccgcagggtgagcgagcagttcacggccatgttcaggaggaaggccttcctgcactggtacacgggcgagggcatggacgagatggagttcaccgaggccgagagcaacatgaacgacctcgtcgccgagtaccagcagtaccaggacgcgaccgccgacgaggagtacgacgaggaggaggaagaggaacgcgacgcggagtagtggcgccgtgccctgctccaccccagctatatgtcccccggttcaggtctgtcgccatgtccaggtcgcgtttcctccggtgagggtttgtgtggtttcctcctgtggcttggatgagtcgaggttgcgtcttgtgctccgttttgtaatttgctacggctagtagtgcgttgcagtctgtcgtgttcagcatcatttggtcagtcggtccatagctgacgatggcctgaactgtcgagtgctctccttgagctagtcgtcgccttgtaagttctgacaagtattattgttagtcgttcgcttcagcaaccaaaaaatgagtattggtagtggtttctcatt

SEQ ID NO: 32208 - protein, 476 aa, Triticum aestivum
KKKNPNSRIPHLHPLPRNHHHRTTVTGGEGTMREILHIQGGQCGNQIGAKFWEVICDEHGIDGTGRYAGDSDLQLERINVYYNEASGGRFVPRAVLMDLEPGTMDSVRSGPFGQIFRPDNFVFGQSGAGNNWAKGHYTEGAELIDSVLDVVRKEAENCDCLQGFQVCHSLGGGTGSGMGTLLISKIREEYPDRMMLTFSVFPSPKVSDTVVEPYNATLSVHQLVENADECMVLDNEALYDICFRTLKLATPSFGDLNHLISATMSGVTCCLRFPGQLNSDLRKLAVNLIPFPRLHFFMVGFAPLTSRGSQMYRALTVPELTQQMWDAKNMMCAADPRHGRYLTASACFRGKMSTKEVDEQMLNVQNKNSSYFVEWIPNNVKSSVCDMPPRGLKMAGTFVGNSTSIQEMFRRVSEQFTAMFRRKAFLHWYTGEGMDEMEFTEAESNMNDLVAEYQQYQDATADEEYDEEEEEERDAE

SEQ ID NO: 32209 - protein, 445 aa, Triticum aestivum
MREILHIQGGQCGNQIGAKFWEVICDEHGIDGTGRYAGDSDLQLERINVYYNEASGGRFVPRAVLMDLEPGTMDSVRSGPFGQIFRPDNFVFGQSGAGNNWAKGHYTEGAELIDSVLDVVRKEAENCDCLQGFQVCHSLGGGTGSGMGTLLISKIREEYPDRMMLTFSVFPSPKVSDTVVEPYNATLSVHQLVENADECMVLDNEALYDICFRTLKLATPSFGDLNHLISATMSGVTCCLRFPGQLNSDLRKLAVNLIPFPRLHFFMVGFAPLTSRGSQMYRALTVPELTQQMWDAKNMMCAADPRHGRYLTASACFRGKMSTKEVDEQMLNVQNKNSSYFVEWIPNNVKSSVCDMPPRGLKMAGTFVGNSTSIQEMFRRVSEQFTAMFRRKAFLHWYTGEGMDEMEFTEAESNMNDLVAEYQQYQDATADEEYDEEEEEERDAE

SEQ ID NO: 32210 - protein, 380 aa, Triticum aestivum
MDLEPGTMDSVRSGPFGQIFRPDNFVFGQSGAGNNWAKGHYTEGAELIDSVLDVVRKEAENCDCLQGFQVCHSLGGGTGSGMGTLLISKIREEYPDRMMLTFSVFPSPKVSDTVVEPYNATLSVHQLVENADECMVLDNEALYDICFRTLKLATPSFGDLNHLISATMSGVTCCLRFPGQLNSDLRKLAVNLIPFPRLHFFMVGFAPLTSRGSQMYRALTVPELTQQMWDAKNMMCAADPRHGRYLTASACFRGKMSTKEVDEQMLNVQNKNSSYFVEWIPNNVKSSVCDMPPRGLKMAGTFVGNSTSIQEMFRRVSEQFTAMFRRKAFLHWYTGEGMDEMEFTEAESNMNDLVAEYQQYQDATADEEYDEEEEEERDAE

SEQ ID NO: 32211 - DNA, 1504 bp, Triticum aestivum
aaaactacatttcatttcaggacaagaatttaggctcctttgattggcacaagggtagaagatccattcattctaggcgatggccatggacgagtcaccccagctgttcctgtgcccgatctccatggagctgatggaggaccccgtcacggtgtccaccggcgtcacctacgaccgccggagcatcgagcggtggttcttcaagtacggcaagaccacgtgcccggccaccatgcagcgcgtcgcctccctcgacctcacgcccaaccacaccctcaagcgcgtcatcgcctcctggcaggaccgcgcctccacctcctcctccccctccagccccgcgggcgcgttcaagccgatggcgcgggagcggctgccgtcggtgctcgccggcattgagggcacgcccttcaaggtcaccgcgctcaagggcctgaggctctgcatggccggggaccaggcggcgcgggacgacttcgtggcctgcgacggcatccaggtgctcggccgcgtcatggcgcaggcgctggcggagagcggcgccggcggggacttctcggcgttccggacgtgcgaggaggccgccgccgtcctcgccacgctcccgctctcggacgaggagtcggtggacctggtactgaggcccgagtgcatgaggcccatggtcgcgctggtccagcgcggcagcgccgacgcgaggctgcacgccatgtccatcctcgccaaggtctccgaggccagcggcgcccgcaactggaccgaggacgtagacgtcgacgacatggtcaagtccctcctcgacctgctctctgacggggcctcctccaagctcagctcccgcgcgctcgacgtgctcatcgacgtcacggcgcgctcgcgctccaggggcggcgcccggcgcggcaagggcgtggtggaggtgggcgccgtgcgggtgctcgtggagctcctcccgggaagccgaccgacacgtcaccgagcgggcgctcctgctcctgaagcggctgtgcaagtgccccgagggccggctcgcgttcgcggagcacgggctcgccgtggcggccgtggtgcggaccgtgctgcgggtgtccggcctggccacgaggctggcggtcaacgtgctgtggctggtgtcgtgcgcggcgcggcccacggagagggtgctcgacgacatggtggcgagcggcggcgtggcgaagctgctggcgctgctgcaggcggacagctcgccgtcgaccaaggagaaggtggcgaggatgctcagggtgcacggcgccttctggaggcagtacccttgcatccccgccgacctcaaggactacctcaagtttctcaagtgacctgtctgcgtgctcgatcagttgatctgcaagtgtacagagaagtgaggggatggagtgaatatattgtttgttagggaagattgaaatccgatccatgcgttgagcatgaggatgtgtgtacagattaaaggttcaaaattgaattgatagtggttttttgatcc

SEQ ID NO: 32212 - protein, 444 aa, Triticum aestivum
MAMDESPQLFLCPISMELMEDPVTVSTGVTYDRRSIERWFFKYGKTTCPATMQRVASLDLTPNHTLKRVIASWQDRASTSSSPSSPAGAFKPMARERLPSVLAGIEGTPFKVTALKGLRLCMAGDQAARDDFVACDGIQVLGRVMAQALAESGAGGDFSAFRTCEEAAAVLATLPLSDEESVDLVLRPECMRPMVALVQRGSADARLHAMSILAKVSEASGARNWTEDVDVDDMVKSLLDLLSDGASSKLSSRALDVLIDVTARSRSRGGARRGKGVVEVGAVRVLVELLPGSRPTRHRAGAPAPEAAVQVPRGPARVRGARARRGGRGADRAAGVRPGHEAGGQRAVAGVVRGAAHGEGARRHGGERRRGEAAGAAAGGQLAVDQGEGGEDAQGARRLLEAVPLHPRRPQGLPQVSQVTCLRARSVDLQVYREVRGWSEYIVC

SEQ ID NO: 32213 - protein, 442 aa, Triticum aestivum
MDESPQLFLCPISMELMEDPVTVSTGVTYDRRSIERWFFKYGKTTCPATMQRVASLDLTPNHTLKRVIASWQDRASTSSSPSSPAGAFKPMARERLPSVLAGIEGTPFKVTALKGLRLCMAGDQAARDDFVACDGIQVLGRVMAQALAESGAGGDFSAFRTCEEAAAVLATLPLSDEESVDLVLRPECMRPMVALVQRGSADARLHAMSILAKVSEASGARNWTEDVDVDDMVKSLLDLLSDGASSKLSSRALDVLIDVTARSRSRGGARRGKGVVEVGAVRVLVELLPGSRPTRHRAGAPAPEAAVQVPRGPARVRGARARRGGRGADRAAGVRPGHEAGGQRAVAGVVRGAAHGEGARRHGGERRRGEAAGAAAGGQLAVDQGEGGEDAQGARRLLEAVPLHPRRPQGLPQVSQVTCLRARSVDLQVYREVRGWSEYIVC

SEQ ID NO: 32214 - protein, 429 aa, Triticum aestivum
MELMEDPVTVSTGVTYDRRSIERWFFKYGKTTCPATMQRVASLDLTPNHTLKRVIASWQDRASTSSSPSSPAGAFKPMARERLPSVLAGIEGTPFKVTALKGLRLCMAGDQAARDDFVACDGIQVLGRVMAQALAESGAGGDFSAFRTCEEAAAVLATLPLSDEESVDLVLRPECMRPMVALVQRGSADARLHAMSILAKVSEASGARNWTEDVDVDDMVKSLLDLLSDGASSKLSSRALDVLIDVTARSRSRGGARRGKGVVEVGAVRVLVELLPGSRPTRHRAGAPAPEAAVQVPRGPARVRGARARRGGRGADRAAGVRPGHEAGGQRAVAGVVRGAAHGEGARRHGGERRRGEAAGAAAGGQLAVDQGEGGEDAQGARRLLEAVPLHPRRPQGLPQVSQVTCLRARSVDLQVYREVRGWSEYIVC

SEQ ID NO: 32215 - DNA, 1860 bp, Triticum aestivum
aacccagcccagccattgtaggcttcctgatcagttgtgtggaccacatggctcttgaagcagcgaaccactacctgcagctcgccggcctccatggcgcatccacgccggcagtactgctcaccgtcctcctgctactcatcattcgactagcatgggtgaggaccacaaccgcgtcaacaagattcggcaagcagcaacagctcccgccttcacctccaggcaagctgcccatcatcggccacctccacctcctcggctcccagacacacatatccatccgggacctcgatgccaagcatggccgcaatggcctcttgctcctccgcatcggtgccgtacccaccttgttcgtgtcctcgccgagcgccgccgaggccgtcctgcgcacccacgaccaaatctttgcgtcgcggccgccatccatggccgccaacatcattcgctatgggccaacagacatcgcgtttgcaccctatggcgagtactggcggcaggccaggaagctcttaaccacacatatgctcagcgccaaggtggtgcactccttccgccatggtcgtcaagaagaggtgcgcctcattatcaacaagatccgtgcggcggccaccagaggcacggcggtggacatgagcgagctcctgtccggctacaccaatgacgtcgtatgccgtgcggtcctaggagaatcccaccgcaaggaaggccggaacaggcttttcagcgagctcacagagatcaatgtctcccttcttggtgggttcagcctcgagaattacatccccccaaatatggtaatggcggatgcgctcttgaggctggtttccgtcaaggctcagcgactcaacaagaggtgggacgacttgttcaacgagatcatcgaggaacacctacaccccagcaaaccatcatctggcgagcagcaagcagcagatttcatagatcttctgctctctctcaaggaagagtacggtctcactactgataacatcaaggccattttggtggacatgtttgaggcaggcatagaaacatcttatctgacgttggaatacggcatggctgagctcatgaacaacagacacattctgacaaaattacaggaggaggtaagatcccaaggcaaaaagttagacatgataacggaggaggaccttagcagcatggcctacctaagggcaaccatcaaggagacgctgcgcatgcacccaccagcacccttcctcctcccacacttctccaccgctgactgcaagatcgacggatacttgatacccgccaacacacgtgtccttgtgaatgcttgggccctagggagggatccatcgtcttgggagaggccagaggatttctggcctgagaggtttctgcaggatcaagatggtgatgtggacacccaaatgaggggtaaggatcttaggttcctgccatttgggttcgggcggaggatttgtccagggatgaattttgggttcgccaccatggaggttatgttagcaaatctcatgtaccattttgattgggatgttccaaatatggtgggtaccggcgcaggggttgatatggctgagtcgttcgggttaacgcttcgccgaaaggagaagcttcaacttgttcctcagattccctaaacctactatgtgtaagtttatttcgaatgagcacaagaataaaggcaaggaataaaatgactaataatgtagtactgtttatcagttattattactatgtactccctccatctcaaaataagtgtctaaactttgttctagctctagatggatgagaagttaatttattacacagatcatatatgatgtaccacaggtgcatacataaagaataaagcaatttgcatac

SEQ ID NO: 32216 - protein, 542 aa, Triticum aestivum
PSPAIVGFLISCVDHMALEAANHYLQLAGLHGASTPAVLLTVLLLLIIRLAWVRTTTASTRFGKQQQLPPSPPGKLPIIGHLHLLGSQTHISIRDLDAKHGRNGLLLLRIGAVPTLFVSSPSAAEAVLRTHDQIFASRPPSMAANIIRYGPTDIAFAPYGEYWRQARKLLTTHMLSAKVVHSFRHGRQEEVRLIINKIRAAATRGTAVDMSELLSGYTNDVVCRAVLGESHRKEGRNRLFSELTEINVSLLGGFSLENYIPPNMVMADALLRLVSVKAQRLNKRWDDLFNEIIEEHLHPSKPSSGEQQAADFIDLLLSLKEEYGLTTDNIKAILVDMFEAGIETSYLTLEYGMAELMNNRHILTKLQEEVRSQGKKLDMITEEDLSSMAYLRATIKETLRMHPPAPFLLPHFSTADCKIDGYLIPANTRVLVNAWALGRDPSSWERPEDFWPERFLQDQDGDVDTQMRGKDLRFLPFGFGRRICPGMNFGFATMEVMLANLMYHFDWDVPNMVGTGAGVDMAESFGLTLRRKEKLQLVPQIP

SEQ ID NO: 32217 - protein, 527 aa, Triticum aestivum
MALEAANHYLQLAGLHGASTPAVLLTVLLLLIIRLAWVRTTTASTRFGKQQQLPPSPPGKLPIIGHLHLLGSQTHISIRDLDAKHGRNGLLLLRIGAVPTLFVSSPSAAEAVLRTHDQIFASRPPSMAANIIRYGPTDIAFAPYGEYWRQARKLLTTHMLSAKVVHSFRHGRQEEVRLIINKIRAAATRGTAVDMSELLSGYTNDVVCRAVLGESHRKEGRNRLFSELTEINVSLLGGFSLENYIPPNMVMADALLRLVSVKAQRLNKRWDDLFNEIIEEHLHPSKPSSGEQQAADFIDLLLSLKEEYGLTTDNIKAILVDMFEAGIETSYLTLEYGMAELMNNRHILTKLQEEVRSQGKKLDMITEEDLSSMAYLRATIKETLRMHPPAPFLLPHFSTADCKIDGYLIPANTRVLVNAWALGRDPSSWERPEDFWPERFLQDQDGDVDTQMRGKDLRFLPFGFGRRICPGMNFGFATMEVMLANLMYHFDWDVPNMVGTGAGVDMAESFGLTLRRKEKLQLVPQIP

SEQ ID NO: 32218 - protein, 401 aa, Triticum aestivum
MAANIIRYGPTDIAFAPYGEYWRQARKLLTTHMLSAKVVHSFRHGRQEEVRLIINKIRAAATRGTAVDMSELLSGYTNDVVCRAVLGESHRKEGRNRLFSELTEINVSLLGGFSLENYIPPNMVMADALLRLVSVKAQRLNKRWDDLFNEIIEEHLHPSKPSSGEQQAADFIDLLLSLKEEYGLTTDNIKAILVDMFEAGIETSYLTLEYGMAELMNNRHILTKLQEEVRSQGKKLDMITEEDLSSMAYLRATIKETLRMHPPAPFLLPHFSTADCKIDGYLIPANTRVLVNAWALGRDPSSWERPEDFWPERFLQDQDGDVDTQMRGKDLRFLPFGFGRRICPGMNFGFATMEVMLANLMYHFDWDVPNMVGTGAGVDMAESFGLTLRRKEKLQLVPQIP

SEQ ID NO: 32219 - DNA, 1624 bp, Triticum aestivum
cataagcgcccagccatcggtcagctcacaccaccctagctctccggcgaacgaccgataagtacccgtcgggatgggcgaggcaagctccgacgccgccgccaaggctgcggccgtgcgggctgtcgcagtctcccgggtcgcgccctcggtgctgggggaggtgcagcgcgttgaactttccttcttcgattcgccgtgggtcgtgctgccgccgatccagcgggtgttcctgtacgagcttggggatgccgacggcttcccgacggtggtggagcggctcaagcgcgctctcgcggacaccctggcgcactacctgcccctggcggggatgctcgagtacgcggtggagaccggggacgccttcgtggactgcactcacgccggggtcgccttcctggaggccgagggcgatatggacgtgcagcgtctagccggcgacgaggcgcacgacatcctggcattcctgagcctggtgccggagctggatgcccgggtgctcccggcgcccgtgctgtcagtgcaggccactcgtctaagcggcggcctggcggtgggcctgtccgtgcaccacgtagtcgcggacggacgcgccgtttggcgattcatggaggcctggtcttccgcttcccgcgagggctccccggtcaccaaggtcctcggcccgccgcactacggccgggaggtcatccagcaccccaacggcgacgagctcgcccgcgacatgctaaagaccgtcgcgcccaatctccctgtggtgagggggcagtacgatttcagccagcggttcctgcgggcgcgccggacattctacctcggcgccgacgacatccagtcgctcaggcggcggatcgacgacctcgcctcggacgagtctgctaccggtggcgacgcgcccaagccgaaaccggtgtcgacgttcgtggcgctggcggcactgagctggacggcgttcgttcgatccaaggggctcggcgcaggggacgacacgtacctcatgttcctcgccgacctgcgctcccgcctcgacccgccagtcagcgaggcttacctgggcaactgcgtgcgcgcgtgcctggcgagctgcgccgacgcggcggacctcctcggccagtccggcatcctccgcgcggcgcgggccgtgcaggcggcggtggccgagatggaggcggcgccgctgtccgggacggacaaggggtggatgcagatgctgatgcggctgccgtttcagcggatgaccaacgtggcggcgagccctcggttccgggcctacgaggcggccgacttcgggttcgggaagcccgcgcgcgtggagctggtgtccatgaaccacgacggcgagatggtgctagtcggcggccggcgcgacggcgaggtgcaagcctccgtgtccatcgacccggcgcacatggacgcattcaaggcctgcatcctcggctagacaaactcaaaaaattagctagtagccacgtccgtacgccgtcgaacttgcatagatccaataaatacaacaagtagcatgagtcatgcaccaattctgtttccattcctgtaatgatcgatcgtttatcgtcgtttcgactatttgggttctagttcaccggatgaattgtcacaagaaagg

SEQ ID NO: 32220 - protein, 455 aa, Triticum aestivum
MGEASSDAAAKAAAVRAVAVSRVAPSVLGEVQRVELSFFDSPWVVLPPIQRVFLYELGDADGFPTVVERLKRALADTLAHYLPLAGMLEYAVETGDAFVDCTHAGVAFLEAEGDMDVQRLAGDEAHDILAFLSLVPELDARVLPAPVLSVQATRLSGGLAVGLSVHHVVADGRAVWRFMEAWSSASREGSPVTKVLGPPHYGREVIQHPNGDELARDMLKTVAPNLPVVRGQYDFSQRFLRARRTFYLGADDIQSLRRRIDDLASDESATGGDAPKPKPVSTFVALAALSWTAFVRSKGLGAGDDTYLMFLADLRSRLDPPVSEAYLGNCVRACLASCADAADLLGQSGILRAARAVQAAVAEMEAAPLSGTDKGWMQMLMRLPFQRMTNVAASPRFRAYEAADFGFGKPARVELVSMNHDGEMVLVGGRRDGEVQASVSIDPAHMDAFKACILG

SEQ ID NO: 32221 - protein, 369 aa, Triticum aestivum
MLEYAVETGDAFVDCTHAGVAFLEAEGDMDVQRLAGDEAHDILAFLSLVPELDARVLPAPVLSVQATRLSGGLAVGLSVHHVVADGRAVWRFMEAWSSASREGSPVTKVLGPPHYGREVIQHPNGDELARDMLKTVAPNLPVVRGQYDFSQRFLRARRTFYLGADDIQSLRRRIDDLASDESATGGDAPKPKPVSTFVALAALSWTAFVRSKGLGAGDDTYLMFLADLRSRLDPPVSEAYLGNCVRACLASCADAADLLGQSGILRAARAVQAAVAEMEAAPLSGTDKGWMQMLMRLPFQRMTNVAASPRFRAYEAADFGFGKPARVELVSMNHDGEMVLVGGRRDGEVQASVSIDPAHMDAFKACILG

SEQ ID NO: 32222 - protein, 341 aa, Triticum aestivum
MDVQRLAGDEAHDILAFLSLVPELDARVLPAPVLSVQATRLSGGLAVGLSVHHVVADGRAVWRFMEAWSSASREGSPVTKVLGPPHYGREVIQHPNGDELARDMLKTVAPNLPVVRGQYDFSQRFLRARRTFYLGADDIQSLRRRIDDLASDESATGGDAPKPKPVSTFVALAALSWTAFVRSKGLGAGDDTYLMFLADLRSRLDPPVSEAYLGNCVRACLASCADAADLLGQSGILRAARAVQAAVAEMEAAPLSGTDKGWMQMLMRLPFQRMTNVAASPRFRAYEAADFGFGKPARVELVSMNHDGEMVLVGGRRDGEVQASVSIDPAHMDAFKACILG

SEQ ID NO: 32223 - DNA, 1501 bp, Triticum aestivum
agtttgttaagttaggagcttgtgatcaaggcagcaaggcgagaagctgaagctctagctagctctggcgggcatgtttccggcggaggcgtcgttcgccggcgcggaagcggccatgctgccgcccttcttcgtgggctccatgtggcagtcggcgccaggcggcggcgcggctgccttgtccgaggaggacgaggtagccgccgctgcggctgccgaggcagcgcacgaccgcgcggtggcggcgacgcggaaccaccgcgaggccgagaagcgccgccgcgagcggatcaagtcgcacctcgaccgcctccgcgccgtcctcgcctgcgaccccaagatagacaaggcaacgctgctggccaaggcggtggagagggtgcgggagctgaagcagcgcatggacggcgtcgttggcgaggcggcggcgccggcgagccacctgttccccacggagcacgacgagatcgtggtgctcgcgtcgggaggcggcgccggcggcgcggcggccgtgtttgaggcctccgtctgctgcgacgaccgctccgacctcctcccgggcctcatcgacacgctgcgcgcgctccgcctccgcacgctccgcgccgagatggccaccctcggcggccgcgtccgcaacgtgctcgtcctcgcgcgcgacgccggaggacacgccgacgacgactactccacatcctccgaggacggcggcgccgacttcctcaaggaggccctgagggccctcgtggagaggcagggggctgccgccggcgaccggcccaagaggagacgcgtcgccgacatgaacatgcaagcggctgcttaatgaatcagctagccggccggcggccatagctcatagtatctggtcgatatgattgcatatggcgatggatctcatgcatgccatggtaatggtactactactactactatacagcgtgttaatttgctttcaaggttaattagttttgtgtgatggttaattagttccaattctccatatataccactatatggctagctaactctccttggtgatgccaatatgccatgtataattagggatatatatattactactcttttaccattagggtttgcttgagctttaatcaaatgttgcttcaaagccatggcaaacccagcccctaaaataacagttaatgtcagaatatatgcacaatgcaaagttccagacttgattgccatatgctacatatacattggataactctggaagcatttctgtttacaagatcccacaagtccatttttgatcatgtcagggcatgcagctagctagctagccttatatgcatgcatgcatgtaagacaagtcttcggatcaaacaaagatgtttgcatgcatacatgtagcaatgcatggcaagtcctaagatcaaaacaaagatggttgttccaacgcattgcatagcaatgtagcagcatgcttcctgtctgtccggtcttgtgaatgaatgaaaaaagaatgaatgtc

SEQ ID NO: 32224 - protein, 250 aa, Triticum aestivum
MFPAEASFAGAEAAMLPPFFVGSMWQSAPGGGAAALSEEDEVAAAAAAEAAHDRAVAATRNHREAEKRRRERIKSHLDRLRAVLACDPKIDKATLLAKAVERVRELKQRMDGVVGEAAAPASHLFPTEHDEIVVLASGGGAGGAAAVFEASVCCDDRSDLLPGLIDTLRALRLRTLRAEMATLGGRVRNVLVLARDAGGHADDDYSTSSEDGGADFLKEALRALVERQGAAAGDRPKRRRVADMNMQAAA

SEQ ID NO: 32225 - protein, 236 aa, Triticum aestivum
MLPPFFVGSMWQSAPGGGAAALSEEDEVAAAAAAEAAHDRAVAATRNHREAEKRRRERIKSHLDRLRAVLACDPKIDKATLLAKAVERVRELKQRMDGVVGEAAAPASHLFPTEHDEIVVLASGGGAGGAAAVFEASVCCDDRSDLLPGLIDTLRALRLRTLRAEMATLGGRVRNVLVLARDAGGHADDDYSTSSEDGGADFLKEALRALVERQGAAAGDRPKRRRVADMNMQAAA

SEQ ID NO: 32226 - protein, 227 aa, Triticum aestivum
MWQSAPGGGAAALSEEDEVAAAAAAEAAHDRAVAATRNHREAEKRRRERIKSHLDRLRAVLACDPKIDKATLLAKAVERVRELKQRMDGVVGEAAAPASHLFPTEHDEIVVLASGGGAGGAAAVFEASVCCDDRSDLLPGLIDTLRALRLRTLRAEMATLGGRVRNVLVLARDAGGHADDDYSTSSEDGGADFLKEALRALVERQGAAAGDRPKRRRVADMNMQAAA

SEQ ID NO: 32227 - DNA, 1276 bp, Triticum aestivum
gaaaaagtaatcctgttatctcctcgcgtcgccctcggcgcaataataaaagcgcaacggcacccagcgatctaggcctcctcctcgctcgcatcgccttccctccgctcgcgtctgctacacttcctctcccggcccggctagatctcgccggcaggagatggcggacgcgaagcagcagcaggccgcggcgcccactggcgtctggaagacgatcaagccattcgtcaatggcggcgcctccgggatgctcgccacctgcgtcatccagcccatcgacatgatcaaggtgaagatccagttgggcgagggatctgcagctcaggtcgcaaagaccatgtatgctaatgagggccttggttccttttacaagggtttgtcagctggtttactaaggcaagcgacctatacgacagctcgtcttggatccttcagggttttgacaaacaaagcaattgaggcaaatgatgggaagccattgccacttgttcagaaagcttttattggtctgactgctggagcgattggcgcatgtgtgggcagtcctgctgatttggcactcattaggatgcaagctgactcgaccctaccagcagcacagcggcgtcactacaagaatgcattccatgcactctaccgtatcaccgctgatgaaggcgtccttgcgctttggaagggtgcaggcccaactgtggtgagagccatgtcactgaatatgggtatgcttgcgtcctatgatcaaagtgttgagctgttcagagacaaattgggtgccggggaatatcagactgttattggagccagtgccatttctggattctgtgcggctgcttgcagtctgccctttgattacgtgaaaacacaaattcagaagatgcaacctgatgccactggcaagtacccatacactgggtctttggactgcgccatgcaaaccttgaagaccggtggcccatttaagttctactccggcttccctgtatattgtgtcaggatcgccccgcatgtcatgatgacgtggctcttcttgaatcaaatccagaagtaccagaagaagatcggcatataagatctccagttggagacaagagtaccaatccttgttcgacacatttaataactttccagcagctttgcactcccgtggttgtttttggtagacagagttttaagcaatttttaccgtagcttacatttgctgtggtactcttgacgttgttacaataatcacataatcacattatttgttgtatttggggcaatttttttggcgggc

SEQ ID NO: 32228 - protein, 302 aa, Triticum aestivum
MADAKQQQAAAPTGVWKTIKPFVNGGASGMLATCVIQPIDMIKVKIQLGEGSAAQVAKTMYANEGLGSFYKGLSAGLLRQATYTTARLGSFRVLTNKAIEANDGKPLPLVQKAFIGLTAGAIGACVGSPADLALIRMQADSTLPAAQRRHYKNAFHALYRITADEGVLALWKGAGPTVVRAMSLNMGMLASYDQSVELFRDKLGAGEYQTVIGASAISGFCAAACSLPFDYVKTQIQKMQPDATGKYPYTGSLDCAMQTLKTGGPFKFYSGFPVYCVRIAPHVMMTWLFLNQIQKYQKKIGI

SEQ ID NO: 32229 - protein, 273 aa, Triticum aestivum
MLATCVIQPIDMIKVKIQLGEGSAAQVAKTMYANEGLGSFYKGLSAGLLRQATYTTARLGSFRVLTNKAIEANDGKPLPLVQKAFIGLTAGAIGACVGSPADLALIRMQADSTLPAAQRRHYKNAFHALYRITADEGVLALWKGAGPTVVRAMSLNMGMLASYDQSVELFRDKLGAGEYQTVIGASAISGFCAAACSLPFDYVKTQIQKMQPDATGKYPYTGSLDCAMQTLKTGGPFKFYSGFPVYCVRIAPHVMMTWLFLNQIQKYQKKIGI

SEQ ID NO: 32230 - protein, 262 aa, Triticum aestivum
MIKVKIQLGEGSAAQVAKTMYANEGLGSFYKGLSAGLLRQATYTTARLGSFRVLTNKAIEANDGKPLPLVQKAFIGLTAGAIGACVGSPADLALIRMQADSTLPAAQRRHYKNAFHALYRITADEGVLALWKGAGPTVVRAMSLNMGMLASYDQSVELFRDKLGAGEYQTVIGASAISGFCAAACSLPFDYVKTQIQKMQPDATGKYPYTGSLDCAMQTLKTGGPFKFYSGFPVYCVRIAPHVMMTWLFLNQIQKYQKKIGI

SEQ ID NO: 32231 - DNA, 1742 bp, Triticum aestivum
accgagccctccgccccgccccgcgcccgacccgaaaccccagccgatcggcggcggccggccggcggagatgtcgctgacggaggtcaggatcggcgaggaggtgtggctcacctgcctctcccacgccctcaccaccgagaccgaggaggtcatgggcctcctcctcggcgacgtcgtgtcctccagcaagggcggctccacggcggtgatatggggcgcgtcgccgcagatgaggtgcgagcggaagaaggaccgcgtcgaggtcaaccccgagctgctcgccgccgcgtcggcgcaggccgaggtaatgacggccaccatcgggaagacgacccgggtgatcggctggtaccactcgcacccgcatatcaccgtcctgccttcccatgtagatgtgcgtacccaggctatgtttcagttgctagatccaggctttgttgggctgatattttcctgttttagtgaagatgctcaaaaggttgggaaaatccaagtgattgccttccagtcacttgatgggacacagaacacacagcgtgctattgttcctgttattaccaatcctgtcattaaccttgaaccatcttggagttcatccgatagctcattagcattgattgagggcattgaacaggacactggagattctagagcttcaaacggaagcaaggtctggggaagatctcaggatatggatctatatccttctttggacacaaatcattcggcaagacatctaccaatagaaaacgctattgttcctttcgaaccggaaaacagtgctgggccctctattgatcaagatggttcagatctgtccccaagcatacaggaggctttgcaccggtcaaccatggacataagtggtgcagagtataaaaggaaggaggtgccacttaaagtattccctacaaggcatctgctaaagctggacactacgttgagttcgtactgtgatatgcagcgtgtcctttttgaagaggaacaatcagcatataaccaagccatgcttcagaatatttgtgatgggaagatgcacccacttacatctatgcaccatacctccacatataatgcttctctatgcaaactgatggaatactgcttgagccctgctataactgtgcttcaggaccgtgtgaaagaaaacgaacttcggttagctatgctagtggaggaggctaaacaactggaggccgagcagagcacgaaaactggctctcctcgccgtgcgatgcccggagggactaccagtggcatcacttcgccaaggggccaggacaagtacccttccggcagacaagggggccctataagccctagcagcagcggccggaggaaggctccttgactcggaccttgctcgccattatgtcatgatggatagtccgattctgggccctgcctgatgctttctggaaccccaaacctgtcccttggcgcgaggggtgaagtcgcaatgcaaatgtacatacccatctcctttcagtgcctggcccgccgtccttctgtggaagtaaccaaccaacagtggttcccttttgctttgtgttgtccttgcgccaaatccttttgcctggttgcgctgagcttgtaatgtgtactcactgacgcgacgagtctcggggcagtggttgcgctgagcttgtaatgtgtactcactggcgcgacgagtctcgggcaggctttctagttggaagaaactcttgtaccaatcctgttgtcgaaatgttcagggg

SEQ ID NO: 32232 - protein, 450 aa, Triticum aestivum
PSPPPRPAPDPKPQPIGGGRPAEMSLTEVRIGEEVWLTCLSHALTTETEEVMGLLLGDVVSSSKGGSTAVIWGASPQMRCERKKDRVEVNPELLAAASAQAEVMTATIGKTTRVIGWYHSHPHITVLPSHVDVRTQAMFQLLDPGFVGLIFSCFSEDAQKVGKIQVIAFQSLDGTQNTQRAIVPVITNPVINLEPSWSSSDSSLALIEGIEQDTGDSRASNGSKVWGRSQDMDLYPSLDTNHSARHLPIENAIVPFEPENSAGPSIDQDGSDLSPSIQEALHRSTMDISGAEYKRKEVPLKVFPTRHLLKLDTTLSSYCDMQRVLFEEEQSAYNQAMLQNICDGKMHPLTSMHHTSTYNASLCKLMEYCLSPAITVLQDRVKENELRLAMLVEEAKQLEAEQSTKTGSPRRAMPGGTTSGITSPRGQDKYPSGRQGGPISPSSSGRRKAP

SEQ ID NO: 32233 - protein, 427 aa, Triticum aestivum
MSLTEVRIGEEVWLTCLSHALTTETEEVMGLLLGDVVSSSKGGSTAVIWGASPQMRCERKKDRVEVNPELLAAASAQAEVMTATIGKTTRVIGWYHSHPHITVLPSHVDVRTQAMFQLLDPGFVGLIFSCFSEDAQKVGKIQVIAFQSLDGTQNTQRAIVPVITNPVINLEPSWSSSDSSLALIEGIEQDTGDSRASNGSKVWGRSQDMDLYPSLDTNHSARHLPIENAIVPFEPENSAGPSIDQDGSDLSPSIQEALHRSTMDISGAEYKRKEVPLKVFPTRHLLKLDTTLSSYCDMQRVLFEEEQSAYNQAMLQNICDGKMHPLTSMHHTSTYNASLCKLMEYCLSPAITVLQDRVKENELRLAMLVEEAKQLEAEQSTKTGSPRRAMPGGTTSGITSPRGQDKYPSGRQGGPISPSSSGRRKAP

SEQ ID NO: 32234 - protein, 399 aa, Triticum aestivum
MGLLLGDVVSSSKGGSTAVIWGASPQMRCERKKDRVEVNPELLAAASAQAEVMTATIGKTTRVIGWYHSHPHITVLPSHVDVRTQAMFQLLDPGFVGLIFSCFSEDAQKVGKIQVIAFQSLDGTQNTQRAIVPVITNPVINLEPSWSSSDSSLALIEGIEQDTGDSRASNGSKVWGRSQDMDLYPSLDTNHSARHLPIENAIVPFEPENSAGPSIDQDGSDLSPSIQEALHRSTMDISGAEYKRKEVPLKVFPTRHLLKLDTTLSSYCDMQRVLFEEEQSAYNQAMLQNICDGKMHPLTSMHHTSTYNASLCKLMEYCLSPAITVLQDRVKENELRLAMLVEEAKQLEAEQSTKTGSPRRAMPGGTTSGITSPRGQDKYPSGRQGGPISPSSSGRRKAP

SEQ ID NO: 32235 - DNA, 1360 bp, Triticum aestivum
cccccgtcctctagctcaccgccgccgccgccgccgccgccgccgctttcttccgccatggccagccccgcggagagctctcgccggcgggaagaagaccgcactccatctccttccaggtcttcctcttctcgccccagcaagtgcaggacggcggccgagagactcaccgacgacctcctcgtggaggtcctctcgcgcgtcccggccaagtcgctctgccgcttcaagtgcgtctccaaccactggctcagcgtcatcgaccaccccgaccaccgcaagaagctgccccaaaccctcaccggcttcttccacggtagcagcaacctcgaggattggattctggaatcacctgtcctcttcaccagcgtgtcgccctcccctcccatggacacctcattcgccttcctgcccaaccaccagcagttcgatctgttagacagctgctacggtctcctcctctgccgcttgtacaacgtctcggctgaggttggcaagtgccattatgtggtgtgcaatcctgccacggagaagtgggtcctgttgccggactccggccaggacagtgtcaacgcatgtttgggcttcaacccagccctgtcttcgcatttccatgtgtttgagttggtggaggagcaggataactacatttccggagtggcagtgtattcgtcagaaaccggagtttgggtttacaaggaaaacagatggaacaaacgtgtcatgctcattgagcttcagccatcatttgtatttcttaacggctatctgcattttcaagtcgatggccatgacttttcccgttatctagctgtggtggacacggacggggaaacatggatgaacttcagtgtccctggtggcctgcttaacggttttattcaacattcacaaggccgcttgcattatgccaattttcagagagatgaacatggtggtgtctttcgactagtggtttatgttcttgagaactaccaaagcaaagaatggacattgaagcatagcgttgaaacttcatacatacttggaaggacagattactgcattgatgggtttgattggattgcgattcatccggaatgcaacttgatattcttcactattgggcaggaactcaaactcatgtgctataatatggatcgtcggcaactcaaagtgatctgcaatcttgaaggtgtcacgccgccatatctgtcatatgtgccattgtatgcagagttagaggcactgcacatttgacatcagcagtagttcatatttggtcgcactttatgttgtttgtacttgtttctgtatactatcagtggttctgttcagtgctacctccatgtgctcggttaactttgcaaaatgtttcagc

SEQ ID NO: 32236 - protein, 412 aa, Triticum aestivum
PPSSSSPPPPPPPPPLSSAMASPAESSRRREEDRTPSPSRSSSSRPSKCRTAAERLTDDLLVEVLSRVPAKSLCRFKCVSNHWLSVIDHPDHRKKLPQTLTGFFHGSSNLEDWILESPVLFTSVSPSPPMDTSFAFLPNHQQFDLLDSCYGLLLCRLYNVSAEVGKCHYVVCNPATEKWVLLPDSGQDSVNACLGFNPALSSHFHVFELVEEQDNYISGVAVYSSETGVWVYKENRWNKRVMLIELQPSFVFLNGYLHFQVDGHDFSRYLAVVDTDGETWMNFSVPGGLLNGFIQHSQGRLHYANFQRDEHGGVFRLVVYVLENYQSKEWTLKHSVETSYILGRTDYCIDGFDWIAIHPECNLIFFTIGQELKLMCYNMDRRQLKVICNLEGVTPPYLSYVPLYAELEALHI

SEQ ID NO: 32237 - protein, 393 aa, Triticum aestivum
MASPAESSRRREEDRTPSPSRSSSSRPSKCRTAAERLTDDLLVEVLSRVPAKSLCRFKCVSNHWLSVIDHPDHRKKLPQTLTGFFHGSSNLEDWILESPVLFTSVSPSPPMDTSFAFLPNHQQFDLLDSCYGLLLCRLYNVSAEVGKCHYVVCNPATEKWVLLPDSGQDSVNACLGFNPALSSHFHVFELVEEQDNYISGVAVYSSETGVWVYKENRWNKRVMLIELQPSFVFLNGYLHFQVDGHDFSRYLAVVDTDGETWMNFSVPGGLLNGFIQHSQGRLHYANFQRDEHGGVFRLVVYVLENYQSKEWTLKHSVETSYILGRTDYCIDGFDWIAIHPECNLIFFTIGQELKLMCYNMDRRQLKVICNLEGVTPPYLSYVPLYAELEALHI

SEQ ID NO: 32238 - protein, 283 aa, Triticum aestivum
MDTSFAFLPNHQQFDLLDSCYGLLLCRLYNVSAEVGKCHYVVCNPATEKWVLLPDSGQDSVNACLGFNPALSSHFHVFELVEEQDNYISGVAVYSSETGVWVYKENRWNKRVMLIELQPSFVFLNGYLHFQVDGHDFSRYLAVVDTDGETWMNFSVPGGLLNGFIQHSQGRLHYANFQRDEHGGVFRLVVYVLENYQSKEWTLKHSVETSYILGRTDYCIDGFDWIAIHPECNLIFFTIGQELKLMCYNMDRRQLKVICNLEGVTPPYLSYVPLYAELEALHI

SEQ ID NO: 32239 - DNA, 1289 bp, Triticum aestivum
ttcccctctcgcgcgcccgcccacgggatttcctcctccgccgccgccctccctccctccatcgtcagatctatccatccgtaagcaccccacctgctttccactcgatccgcgcgcccctcccgccgccgtcgccggcccttcatctgactccccccctcccctctccgcctcctcgccgctgcaggtgattccgtcgggggcgggccacatggcgtccacggctgcggcggcgctcgcggtgacggacgagctggccctgccgctccgcgcggtgggggacctggcggcggccgccggggtctcgcgggaggaggtcgtcgtcatcacgcagtgcgcctcgctcggtgggaagttgccttttgatgatgcatcggtgggtgctgttctatatgtcataaaaaatgtggagagctttggggataagttggttgctgaaattagccgagtgctgaaagctggtggaattgtgctggtacagagcttcacaccctctgctgatcagaagccaaacaattatatcgagcgccagctactcatgggaggttttgttgaagtgcaagcttctgccacaagctcgcaggatagtgtgcaatctgttactatcaaggcaaagaagccctcgtggagtatgggttcttccttccccctgaagaaagcagtaaaggctcttccaaagattgaaattgacgacgatgatgaactgattgacgaagacagcctcttgactgaggaggacttgaagaagccacagcttccagttgtaggagattgtgaggtgggagctacaaagaaggcatgcaagaactgcagttgtggcagggccgaggctgagcaggtggagaagctggggctcactgcagaacagattgataaccctgtctcagcttgtggcagttgtgggttgggcgacgccttccgatgcagcacctgcccatacagaggcctggcgccgttcaagttgggcgagaaggttaccttgtctgacaacttcctctcggccgacatatgatgacggacagcagctgcggatatgaaatgtgccttgttggatttgttggttcgttaggaagatatatctgcgtacgtttttttcgtggtgatggtggttacagcaaaagaagagtgcgtttggagtagcagctcgtgttagcatgtcgtgcgtgtccttgctctcccacctaggctgaagcgagaattggatcgtgtgtgcgcctctgtattcggcaagaagattacatgcatgtaatttgacgaagaaacatatgatggaaagactttgatctgcc

SEQ ID NO: 32240 - protein, 336 aa, Triticum aestivum
SPLARPPTGFPPPPPPSLPPSSDLSIRKHPTCFPLDPRAPPAAVAGPSSDSPPPLSASSPLQVIPSGAGHMASTAAAALAVTDELALPLRAVGDLAAAAGVSREEVVVITQCASLGGKLPFDDASVGAVLYVIKNVESFGDKLVAEISRVLKAGGIVLVQSFTPSADQKPNNYIERQLLMGGFVEVQASATSSQDSVQSVTIKAKKPSWSMGSSFPLKKAVKALPKIEIDDDDELIDEDSLLTEEDLKKPQLPVVGDCEVGATKKACKNCSCGRAEAEQVEKLGLTAEQIDNPVSACGSCGLGDAFRCSTCPYRGLAPFKLGEKVTLSDNFLSADI

SEQ ID NO: 32241 - protein, 266 aa, Triticum aestivum
MASTAAAALAVTDELALPLRAVGDLAAAAGVSREEVVVITQCASLGGKLPFDDASVGAVLYVIKNVESFGDKLVAEISRVLKAGGIVLVQSFTPSADQKPNNYIERQLLMGGFVEVQASATSSQDSVQSVTIKAKKPSWSMGSSFPLKKAVKALPKIEIDDDDELIDEDSLLTEEDLKKPQLPVVGDCEVGATKKACKNCSCGRAEAEQVEKLGLTAEQIDNPVSACGSCGLGDAFRCSTCPYRGLAPFKLGEKVTLSDNFLSADI

SEQ ID NO: 32242 - DNA, 1781 bp, Triticum aestivum
tcactccgccactccggccccattcgacagagacatcaccggcagcaggttaataatggcgcttcgcgcggcggagctccggcgactcctcctcctccgcggcggggcggtcctcccgctcccgctcgcgtcgcgctgccggccggcgagcacggccgcccgtgacgacgagggagcagggggcaacgcctacgacgtgctcggggtgggagagacgagctcctccgcggagatcaaggcctccttccaccgcctcgccaaggagacccaccccgacgtcgctgccgccgccggttcccgacggttccttcagatcctcgcggcctacgagatcctatccgattcccagcgaagggcgcactatgatagcttcctgcgctcgcagaggctagttatacagaagcatcccaggccatcgcaatatgtatatccatatccatatagttcaggcattgtgatgcctagagaaagtaatgttgtcgagtggcttaaatggtacaggcttactgttgatgacattgttacaaaaaagagaatcgcgacgggttcaggttatttcgatagacttgagagtgaactgtactctgcagtccatgctgcatactatggccccgaggttgagtccatggatctccttcctgattgctttgaagccgaggagaggtctgtgtatgagacatctgagctattgcaccttgtatctggccgtgatctgcttggtattgtcagtctagtcgatagcgtccgagagcggtctgatgcttgtcgtgagaagctgacacattctggttctgcaacctgcggcgttagtccaaatgttgcagtaaacggggagaaatgttcaatacctaggcatgcagatattcacaagcaagagaatgaggatagtgacagtatcccatcagatgcctacaaggacattgaattgcagatatgtgagagagtagtggccactgcaaataggaggctcaagtgcaattgcattgacaattcagacatggaagatcacatacatgtatttcttgttccaaatgaggtggttgcacctgatgtgatgcaagagcatctcctccttggaacaatcactgggttagacaccagtggagaggaaggatcttgctgtgtctatgatggccatggaataaagacccatgtaattgttaagcacaggacactgatggttaaacacatgcactggtatcaatttggagatgaagtttcaccctgcgagtgtcgatgtagcagggctcggttgccacccagcaggttttggctttttgagccacggtgttatatgcatgacactggcggttggtacatcgagacatttgggagagacaagaaagggaggacaactccatcgccgagacattggcatggtgtcaatgaacattctgaaaaccatgctctttcatcatattctggcgtggcgcctggcgaagaaagtgaggtgccagtttaatggcatattaattttaccactagagcagtagacaacaggtggtggcacttgctggctgtgctatattcggcaagacaaggcaaagctggctgagctattattaacatcctaaggtagtatgccacttcgaaagtcattgcattctccgctgctataaaagtttggtttttagcatttctggagtgcctagggttaggtttatctatttcccttcccgcaaaaaaaaggtttatctgtttcccaaagtataatgagtttttttttcgacaaagggtggattcaaagtataatgagtacataaagtaatatgtctgatggc

SEQ ID NO: 32243 - protein, 486 aa, Triticum aestivum
HSATPAPFDRDITGSRLIMALRAAELRRLLLLRGGAVLPLPLASRCRPASTAARDDEGAGGNAYDVLGVGETSSSAEIKASFHRLAKETHPDVAAAAGSRRFLQILAAYEILSDSQRRAHYDSFLRSQRLVIQKHPRPSQYVYPYPYSSGIVMPRESNVVEWLKWYRLTVDDIVTKKRIATGSGYFDRLESELYSAVHAAYYGPEVESMDLLPDCFEAEERSVYETSELLHLVSGRDLLGIVSLVDSVRERSDACREKLTHSGSATCGVSPNVAVNGEKCSIPRHADIHKQENEDSDSIPSDAYKDIELQICERVVATANRRLKCNCIDNSDMEDHIHVFLVPNEVVAPDVMQEHLLLGTITGLDTSGEEGSCCVYDGHGIKTHVIVKHRTLMVKHMHWYQFGDEVSPCECRCSRARLPPSRFWLFEPRCYMHDTGGWYIETFGRDKKGRTTPSPRHWHGVNEHSENHALSSYSGVAPGEESEVPV

SEQ ID NO: 32244 - protein, 468 aa, Triticum aestivum
MALRAAELRRLLLLRGGAVLPLPLASRCRPASTAARDDEGAGGNAYDVLGVGETSSSAEIKASFHRLAKETHPDVAAAAGSRRFLQILAAYEILSDSQRRAHYDSFLRSQRLVIQKHPRPSQYVYPYPYSSGIVMPRESNVVEWLKWYRLTVDDIVTKKRIATGSGYFDRLESELYSAVHAAYYGPEVESMDLLPDCFEAEERSVYETSELLHLVSGRDLLGIVSLVDSVRERSDACREKLTHSGSATCGVSPNVAVNGEKCSIPRHADIHKQENEDSDSIPSDAYKDIELQICERVVATANRRLKCNCIDNSDMEDHIHVFLVPNEVVAPDVMQEHLLLGTITGLDTSGEEGSCCVYDGHGIKTHVIVKHRTLMVKHMHWYQFGDEVSPCECRCSRARLPPSRFWLFEPRCYMHDTGGWYIETFGRDKKGRTTPSPRHWHGVNEHSENHALSSYSGVAPGEESEVPV

SEQ ID NO: 32245 - protein, 334 aa, Triticum aestivum
MPRESNVVEWLKWYRLTVDDIVTKKRIATGSGYFDRLESELYSAVHAAYYGPEVESMDLLPDCFEAEERSVYETSELLHLVSGRDLLGIVSLVDSVRERSDACREKLTHSGSATCGVSPNVAVNGEKCSIPRHADIHKQENEDSDSIPSDAYKDIELQICERVVATANRRLKCNCIDNSDMEDHIHVFLVPNEVVAPDVMQEHLLLGTITGLDTSGEEGSCCVYDGHGIKTHVIVKHRTLMVKHMHWYQFGDEVSPCECRCSRARLPPSRFWLFEPRCYMHDTGGWYIETFGRDKKGRTTPSPRHWHGVNEHSENHALSSYSGVAPGEESEVPV

SEQ ID NO: 32246 - DNA, 1687 bp, Triticum aestivum
acagcccaccaaaccctcgctcttcccaccgcaggaagagagctcctctcccctccccgcccccaccgcctccgccgacgaaccgatcggatccgggacacgatctcggattcgctcggcagatcagcgcgcaccagcccccaagcctccggatcctccttcgtcgtcctccccaccgcaagcttcagccatggcaggaatggcaccagagggttcccagtttgatgctaagcagtatgacagcaagatgaccgagttactgaaccaaggtgacaccggggagtttttcacctcgtatgatgaggtgcacgaaagttttgatgacatgggcctccaagagaaccttcttagaggcatctacgcttatggttttgagaagccatcagccattcagcaaagaggaattgttcccttctgcaagggtcttgatgtgattcagcaagctcagtctggaacaggaaaaactgccaccttctgttctggaatcttgcagcagcttgactatggattggttgagtgccaggcattggtccttgctccgacccgtgagcttgcacagcagattgagaaggtcatgcgtgctcttggtgactacttaggtgtcaaggtgcatgcatgtgttggtggaacttctgttcgtgaggaccaaaggattcttgccagtggtgtgcatgttgttgtcggcacacctggtcgtgtgttcgatatgttgcgcaggcaatccctccgtccagaaacatcaagatgtttgtgttggatgaagctgatgaaatgctttcacgtggtttcaaggatcagatctatgatatcttccagcttcttccatcaaagattcaggttggggtgttctcagcaaccatgcctcctgaggcccttgagataacccgcaagttcatgaacaagcctgtgaggattcttgtcaagagagatgagcttacccttgagggtatcaaacaattctatgtcaatgtggagaaggaagagtggaagctggatacactctgtgacctgtacgagaccctggcaattacccagagtgtcatctttgtgaacacccgccgcaaggtggactggctcactgacaagatgaggggacgggaccacactgtctctgccacgcacggagatatggaccagaacactagggacatcatcatgagggagttcagatctggatcttctcgtgtgctcatcaccaccgacctgctggcccgtggtattgatgtgcagcaagtctcccttgtcatcaactatgacctgccgactcagcctgagaattacctccatcgcattggtcgtagtggtcggttcgggaggaagggagttgccatcaactttgtcacccgtgaagatgagaggatgctgttcgacatccagaagttctacaacgtggtcattgaggagctcccggccaatgtcgctgaccttctctagattatatcttaggaatgcagtaaggtgcttgataaagttcgtttttgttgaatatctcccaactctcagttttggagtggtaaggtctgggtctgtttgaatcgtggttaaggatggtctcttgagttttttcctgttatgcaatgtccggaaatttttgtagtgcgtaggctgtgccatctcctgggctagctgggatagagtgactctcatggagtattttacttttcgttgtgaagttattttattgccc

SEQ ID NO: 32247 - protein, 293 aa, Triticum aestivum
QPTKPSLFPPQEESSSPLPAPTASADEPIGSGTRSRIRSADQRAPAPKPPDPPSSSSPPQASAMAGMAPEGSQFDAKQYDSKMTELLNQGDTGEFFTSYDEVHESFDDMGLQENLLRGIYAYGFEKPSAIQQRGIVPFCKGLDVIQQAQSGTGKTATFCSGILQQLDYGLVECQALVLAPTRELAQQIEKVMRALGDYLGVKVHACVGGTSVREDQRILASGVHVVVGTPGRVFDMLRRQSLRPETSRCLCWMKLMKCFHVVSRIRSMISSSFFHQRFRLGCSQQPCLLRPLR

SEQ ID NO: 32248 - protein, 230 aa, Triticum aestivum
MAGMAPEGSQFDAKQYDSKMTELLNQGDTGEFFTSYDEVHESFDDMGLQENLLRGIYAYGFEKPSAIQQRGIVPFCKGLDVIQQAQSGTGKTATFCSGILQQLDYGLVECQALVLAPTRELAQQIEKVMRALGDYLGVKVHACVGGTSVREDQRILASGVHVVVGTPGRVFDMLRRQSLRPETSRCLCWMKLMKCFHVVSRIRSMISSSFFHQRFRLGCSQQPCLLRPLR

SEQ ID NO: 32249 - protein, 229 aa, Triticum aestivum
MFVLDEADEMLSRGFKDQIYDIFQLLPSKIQVGVFSATMPPEALEITRKFMNKPVRILVKRDELTLEGIKQFYVNVEKEEWKLDTLCDLYETLAITQSVIFVNTRRKVDWLTDKMRGRDHTVSATHGDMDQNTRDIIMREFRSGSSRVLITTDLLARGIDVQQVSLVINYDLPTQPENYLHRIGRSGRFGRKGVAINFVTREDERMLFDIQKFYNVVIEELPANVADLL

SEQ ID NO: 32250 - DNA, 2179 bp, Triticum aestivum
acacccagcaaccaccaccacccgtctcctctcctctcctctcctcctcgtcttcctccttcggcctcctcctttgcagctaacggaaccgaagaaagcctttcgttgacatggctgctttcatcctcttcctctgcttgctcgtgccgctcgtcctcgcgtgcgccgtccgcgccaggaagggcgccgccgggcgggcgtcgtcgggcggcggcggcaaaaagggcggcaccagcctgccgctgccgccggggtcgatggggtggccgtacgtgggcgagaccacgcagctctactcctccaagaaccccaacgtcttcttcgccaggaagcggaacaagtacgggcccatcttcaagacgcacatcctcgggtgcccctgcgtcatggtgtccagcccggaggccgccaagttcgtgctcgtcactcaggcgcacctcttcaagcctaccttcccggccagcaaggagcggatgctgggcccccaggccatcttcttccagcagggggactaccatgcccacctccgccgtctcgtctcacgcgccttctctcccgaggccatccgcggttccgtccctgccatcgaggctatcgccctccgctccctcggctcctgggaagacctgcaagtcaacaccttccaagagatgaagacttacgctctgaatgtggcattgctgtccatcttcggcgaggaggagatgcagtacatcgaggagctgaagcagtgctacctgacgctggagaaggggtacaactcgatgccggtgaacctgccgggcacgctgttccacaaggccatgaaggcccgaaagcggctgggcgccattgtggcccacatcatctccgcccggcgcgagcgcgagcgcgggagcgacctcctgggctccttcatggacggccgcgaggcgctcaccgacgaccagatcgccgacaacgccatcggcgtcatcttcgccgcgcgcgacaccaccgccagcgtgctcacgtggatggtcaagttcctcggcgacaaccccgccgtcctcaaagccgtcaccgaagagcacgctgagatcgcgagggagaaggcgttgtccggcgagccactgtcgtgggccgacacgcggcggatgcggatgacgggccgggtgatccaggagacgatgcgggtggcgtccatcctctccttcaccttcagggaggccgtggaggacgtggagtaccaagggtacctgattcccaagggctggaaagtgcttcccctgttccggaacatccaccacaaccccgaccacttcccctcccctgaaaagttcgatccttcacgattcgaggtggcccccaagcccaacacgttcatgccgttcgggaacgggacccactcgtgccccggcaacgagctggccaagctggagatgctcgtcctctgccaccacctcgccaccaagtacagatggtccacctccaagtccgagagcggcgtccagttcggccccttcgccctccccatcaacggcctccccatgaccttcacccgcaaggacgacaagaacaaagcctgagccatccatccatccatccatccatcgcctcctcctcgttcccaaagggaaatcaacagcgcgatagaggcgacggcgtggcacatgcgagcgagctggatcggctccgtccgtgtccgtgccggtcgccgtcggaggggacacttgtagccgtgggcgccgcggcgggagcgggagcgggctggcggaggccgatcggagagagcacgggccgtcaaagtcctttgtacagattcttcagccaggaccatgacggctgggcgagacaagaccaagaaaaatcccactcttcaaaaacacacacacgtaggcattctcagctagggagatccggcgccacaaagaagtggcgccgaactgtaaaaccaaccattttttatccttttttccttcagatttttatttttttggcaacacctatactagtataggaggaggagagaagacagcagactgacaggccctgattgggatgtaagataggctgcccgcctgaaagcaggctggcagctaggccgaataatcaatggatcgatcgctcgcggcaaagggccaaaaggaggcccccgggagagcgacccctctgtattgtttgttacacgtcaatgcagctggaaatggctttcttgtgg

SEQ ID NO: 32251 - protein, 478 aa, Triticum aestivum
MAAFILFLCLLVPLVLACAVRARKGAAGRASSGGGGKKGGTSLPLPPGSMGWPYVGETTQLYSSKNPNVFFARKRNKYGPIFKTHILGCPCVMVSSPEAAKFVLVTQAHLFKPTFPASKERMLGPQAIFFQQGDYHAHLRRLVSRAFSPEAIRGSVPAIEAIALRSLGSWEDLQVNTFQEMKTYALNVALLSIFGEEEMQYIEELKQCYLTLEKGYNSMPVNLPGTLFHKAMKARKRLGAIVAHIISARRERERGSDLLGSFMDGREALTDDQIADNAIGVIFAARDTTASVLTWMVKFLGDNPAVLKAVTEEHAEIAREKALSGEPLSWADTRRMRMTGRVIQETMRVASILSFTFREAVEDVEYQGYLIPKGWKVLPLFRNIHHNPDHFPSPEKFDPSRFEVAPKPNTFMPFGNGTHSCPGNELAKLEMLVLCHHLATKYRWSTSKSESGVQFGPFALPINGLPMTFTRKDDKNKA

SEQ ID NO: 32252 - protein, 429 aa, Triticum aestivum
MGWPYVGETTQLYSSKNPNVFFARKRNKYGPIFKTHILGCPCVMVSSPEAAKFVLVTQAHLFKPTFPASKERMLGPQAIFFQQGDYHAHLRRLVSRAFSPEAIRGSVPAIEAIALRSLGSWEDLQVNTFQEMKTYALNVALLSIFGEEEMQYIEELKQCYLTLEKGYNSMPVNLPGTLFHKAMKARKRLGAIVAHIISARRERERGSDLLGSFMDGREALTDDQIADNAIGVIFAARDTTASVLTWMVKFLGDNPAVLKAVTEEHAEIAREKALSGEPLSWADTRRMRMTGRVIQETMRVASILSFTFREAVEDVEYQGYLIPKGWKVLPLFRNIHHNPDHFPSPEKFDPSRFEVAPKPNTFMPFGNGTHSCPGNELAKLEMLVLCHHLATKYRWSTSKSESGVQFGPFALPINGLPMTFTRKDDKNKA

SEQ ID NO: 32253 - protein, 386 aa, Triticum aestivum
MVSSPEAAKFVLVTQAHLFKPTFPASKERMLGPQAIFFQQGDYHAHLRRLVSRAFSPEAIRGSVPAIEAIALRSLGSWEDLQVNTFQEMKTYALNVALLSIFGEEEMQYIEELKQCYLTLEKGYNSMPVNLPGTLFHKAMKARKRLGAIVAHIISARRERERGSDLLGSFMDGREALTDDQIADNAIGVIFAARDTTASVLTWMVKFLGDNPAVLKAVTEEHAEIAREKALSGEPLSWADTRRMRMTGRVIQETMRVASILSFTFREAVEDVEYQGYLIPKGWKVLPLFRNIHHNPDHFPSPEKFDPSRFEVAPKPNTFMPFGNGTHSCPGNELAKLEMLVLCHHLATKYRWSTSKSESGVQFGPFALPINGLPMTFTRKDDKNKA

SEQ ID NO: 32254 - DNA, 1449 bp, Triticum aestivum
acgacgttcttcttccacttcccgccaaagaggagcttgcacaggtaaaacatcttgaaaaatctcaagggtgaacgaagtttcttggcgggcatgcagggcacgagagacatgtctgccaagggcggcaaggccctggtccagtcggacgcggggaagtatgtggcgtggtcgggcgtcgaccagccggagctcgctgcagaggggctcgggtgtggcttgctcctgctcaggccgctctccttcgcgctgccacactacgccgactgccacaagttcggctacgtcctccgaggctccggggtcgccggtgtcctcccggtcgccaccggggacgcctcccccgcggccagggagagggtcgtgcgcctcgaggccggcgacgtcatagccacgcgcactggggaggtctcgtggtggtacaacgacagcgacggcgatgcgggcgacctctcaatcgtgttcatgggcgacacggagcgcgctgtcagcccgggggacatgtcctacttctttctccccggcggcaacagcgtcctaggcggcttcgacgcgggcctcctcgccggggcatggcctggcgtgaccaaggagcaggccgccgccgtgttccggagccagccagccgtcctcctcaccgggctgagcaagaagctgcccggcgtccgcccgcgcgaggacgacaggaaacggctcgtcgtgaacgccggccaagtcgctgcaggaaccctgaagacgctcaccgcggccgacatggcggcgctgggcggcctggggatcagcgtggttctcggccggctcgagcccggcgccgcgcgcgcgccgtgggtgctacgcgagggtgcggcgcagttggtgtacgtggcacgcgggagcgcgcgcgtccaggtgtcttcttccgcgggcggcgagacgctgctgctggacgaggaggtcgccgcggggagcgtgttcgtcgtaccgcggttcgccgtgacgctcatctccgccggcgccgacggcgcacagtgggtctccctcatcaagagcgccaggcccgcggtggagcacctgaccggtgatggctcgatgctcggcggcctgaccgcgcaggtggtgcaggcgtcgctgagcgtggcgccggagttgctggagctgctcggagtccgcagcgccgagccgtcgcactgagcggtcggtgcacgcgttcgcgccgcggcgtccgttcactttccgtggcgtgtgtgtcccgtatgctccgttgacgtgcaccacacgattgtatttttatacgctgttacgtctctatacgtgcttacttacgtgaatgagcaaaataattgtgtgcattgttgtactcatatgagaccacaagtgtgttacccctcggcttgggttatatacgttgttacgtctcttacttacgtgcatgaggaaaataattctgcgcgttgttgtactcatatgtgc

SEQ ID NO: 32255 - protein, 358 aa, Triticum aestivum
MQGTRDMSAKGGKALVQSDAGKYVAWSGVDQPELAAEGLGCGLLLLRPLSFALPHYADCHKFGYVLRGSGVAGVLPVATGDASPAARERVVRLEAGDVIATRTGEVSWWYNDSDGDAGDLSIVFMGDTERAVSPGDMSYFFLPGGNSVLGGFDAGLLAGAWPGVTKEQAAAVFRSQPAVLLTGLSKKLPGVRPREDDRKRLVVNAGQVAAGTLKTLTAADMAALGGLGISVVLGRLEPGAARAPWVLREGAAQLVYVARGSARVQVSSSAGGETLLLDEEVAAGSVFVVPRFAVTLISAGADGAQWVSLIKSARPAVEHLTGDGSMLGGLTAQVVQASLSVAPELLELLGVRSAEPSH

SEQ ID NO: 32256 - protein, 352 aa, Triticum aestivum
MSAKGGKALVQSDAGKYVAWSGVDQPELAAEGLGCGLLLLRPLSFALPHYADCHKFGYVLRGSGVAGVLPVATGDASPAARERVVRLEAGDVIATRTGEVSWWYNDSDGDAGDLSIVFMGDTERAVSPGDMSYFFLPGGNSVLGGFDAGLLAGAWPGVTKEQAAAVFRSQPAVLLTGLSKKLPGVRPREDDRKRLVVNAGQVAAGTLKTLTAADMAALGGLGISVVLGRLEPGAARAPWVLREGAAQLVYVARGSARVQVSSSAGGETLLLDEEVAAGSVFVVPRFAVTLISAGADGAQWVSLIKSARPAVEHLTGDGSMLGGLTAQVVQASLSVAPELLELLGVRSAEPSH

SEQ ID NO: 32257 - protein, 234 aa, Triticum aestivum
MGDTERAVSPGDMSYFFLPGGNSVLGGFDAGLLAGAWPGVTKEQAAAVFRSQPAVLLTGLSKKLPGVRPREDDRKRLVVNAGQVAAGTLKTLTAADMAALGGLGISVVLGRLEPGAARAPWVLREGAAQLVYVARGSARVQVSSSAGGETLLLDEEVAAGSVFVVPRFAVTLISAGADGAQWVSLIKSARPAVEHLTGDGSMLGGLTAQVVQASLSVAPELLELLGVRSAEPSH

SEQ ID NO: 32258 - DNA, 1539 bp, Triticum aestivum
atctttctctctccccctctctcccacagcacatgcgcgtcgcccgccgacacccgcacccacagcagccagagcagcagcggcagcaatggagcatcggggcctgcttctcgtcctcgccgccgcgctgtgcctcgcgggcgccgccgacgccaggcacgccaagaagtcgtaccaggccgtcttcagcttcggggactcgctctccgacgccggcaacctcatcgtcgacggcatccccaaggccctcaccaccgcgcgcgcgccctacggcatgaccttcttcggccgccccaccggccgctgctccaacggccgcgtcgtcgtcgacttcctcgccgagcatttcgggctgccgctgccgccggcgtcgcaggcgcatggcaaggacttcaagaagggggccaacttcgccatcaccggcgccacggcgctggagtactccttcttcaaggcgcatggcatcgaccagcgcatttggaacaccggctccatcaacacccagatcggctggctccagaagatgaagccgtcgctttgcaagtcggagaaagagtgcaaggactacttcagcaagtccctgtttgtggtgggagagtttggggggaacgactacaacgctcctctcttctccggcgtcgccttctccgatgtgaagacctacgtgccgctggtcgccaaagccatcgccaacggcgtcgagaaattgatcgagcttggcgcgacagacctgttggtgcctggaattcttccgatcgggtgcttcccattgtacctgactctctacaacagcagcaagaagtcggactacaacgcgcgcaccgggtgcctccggagatacaaccgcctggccttccaccacaacagagagctcaagcagcagcttgaccagcttcagaagaagtacccaaagacgaaaatcatgtacggcgattacttcaaagctgcaatgcagtttgtcgtcagccccgggaaattcggtttcagcacggcagtgcaggcatgctgcggcgccggagggtcgggcgcctacaacttcaacctgaagaagaagtgcggcgaggcgggcgcgagcgtgtgctccaacccgtcggcgtacgtgagctgggacggcatccacatgaccgaggccgcctaccgcatggtcgccaacggctggctgaatggcccctatgcctctcccccgatcatgaagtgaaaatccagatggttagccctgtatgtacgtaacgttgctgctgctgctgctgatgatgatgatgatggaggggatcgacggatatgcagagcgcttcaggcgctggagatgttaagttatgatgatgggtaaaatcgctcagtctgttcgttgagagtttgtataaaccgtgccggtatagatatgtttttccagctgaaaagctctagtagtacacatgtacgtaccttgtatgacatgctacctgattcttattcatttaccaagacttgcataagaataaattattaaatattatggaagcaagaggatcagaattgtgcgtttgcgcttcctgaacc

SEQ ID NO: 32259 - protein, 398 aa, Triticum aestivum
SFSLPLSPTAHARRPPTPAPTAARAAAAAMEHRGLLLVLAAALCLAGAADARHAKKSYQAVFSFGDSLSDAGNLIVDGIPKALTTARAPYGMTFFGRPTGRCSNGRVVVDFLAEHFGLPLPPASQAHGKDFKKGANFAITGATALEYSFFKAHGIDQRIWNTGSINTQIGWLQKMKPSLCKSEKECKDYFSKSLFVVGEFGGNDYNAPLFSGVAFSDVKTYVPLVAKAIANGVEKLIELGATDLLVPGILPIGCFPLYLTLYNSSKKSDYNARTGCLRRYNRLAFHHNRELKQQLDQLQKKYPKTKIMYGDYFKAAMQFVVSPGKFGFSTAVQACCGAGGSGAYNFNLKKKCGEAGASVCSNPSAYVSWDGIHMTEAAYRMVANGWLNGPYASPPIMK

SEQ ID NO: 32260 - protein, 369 aa, Triticum aestivum
MEHRGLLLVLAAALCLAGAADARHAKKSYQAVFSFGDSLSDAGNLIVDGIPKALTTARAPYGMTFFGRPTGRCSNGRVVVDFLAEHFGLPLPPASQAHGKDFKKGANFAITGATALEYSFFKAHGIDQRIWNTGSINTQIGWLQKMKPSLCKSEKECKDYFSKSLFVVGEFGGNDYNAPLFSGVAFSDVKTYVPLVAKAIANGVEKLIELGATDLLVPGILPIGCFPLYLTLYNSSKKSDYNARTGCLRRYNRLAFHHNRELKQQLDQLQKKYPKTKIMYGDYFKAAMQFVVSPGKFGFSTAVQACCGAGGSGAYNFNLKKKCGEAGASVCSNPSAYVSWDGIHMTEAAYRMVANGWLNGPYASPPIMK

SEQ ID NO: 32261 - protein, 307 aa, Triticum aestivum
MTFFGRPTGRCSNGRVVVDFLAEHFGLPLPPASQAHGKDFKKGANFAITGATALEYSFFKAHGIDQRIWNTGSINTQIGWLQKMKPSLCKSEKECKDYFSKSLFVVGEFGGNDYNAPLFSGVAFSDVKTYVPLVAKAIANGVEKLIELGATDLLVPGILPIGCFPLYLTLYNSSKKSDYNARTGCLRRYNRLAFHHNRELKQQLDQLQKKYPKTKIMYGDYFKAAMQFVVSPGKFGFSTAVQACCGAGGSGAYNFNLKKKCGEAGASVCSNPSAYVSWDGIHMTEAAYRMVANGWLNGPYASPPIMK

SEQ ID NO: 32262 - DNA, 1838 bp, Triticum aestivum
atagcactctatatatagagtcctagttctacaagacttttctcccgtagaggagcagaaagatcgagaggcagagccaacctactcaactcgaggccgtgttgctgaggtgagacacgcatcgcaatggggagcaacgagggcggcgggtgcgacggcaagccggtggtggtggtgccggagatcaagtacaccaagctcttcatcaacggcgagttcgttgacgccgcatcaggcaagacgtttgagacgagggacccgcggacaggcgacgtgctggcccacatcgcagaggcggacaaagccgacgtggacctcgccgtcgaggccgccagggaggccttcgagcatggcaagtggccccgcatgtcaggctacgagaggagcagggccatgaacaagctggccgacctgatggagcagcacatcgaggagctggcggcgctggacggcgccgacgccggcaagctgctcctgttgggcaagatcatcgacatcccttccgcggtgcagatgctgcgctattacgccggcgccgccgacaagatccacggcgagtcgctgcgtgtgtccggcaagtaccaggggtacaccctcaaggagcccatcggggtcgtcggcatcatcatcccgtggaacttccccagcctcatgttcttcctcaagatcagcccggcgctcgccgccggatgcaccgtcgtcgtcaagcccgccgagcagacgcccctctcggccctctactatgctcaccttgcaaagctggctggcattccggacggagtgatcaatgtcgtccctggcttcggcccgacggccggcgccgccatcgcctcccacatggacgttgacagcgttgccttcactggctctggtgaagtaggccgcctcatcatggaggcatctgcccggagcaacctgaagacggtatcgcttgagctcggtggcaagtcgcctctgataatcttcgacgacgctgatgtcgacatggcggtcgagctctcaaggcttgccatcttcttcaacaagggagaggtttgcgtcgcggggtcccgtgtttatgttcaggaagggatctacgacgagtttgtgaagagggctgtggtggctgcccagaactggaaagtcggagacccgtttgatgtcgccaccaacatgggtccccaggttgataaggagcaatttgagagggtcctaaggtacattgagcatggcaagagcgagggagcgacacttctcaccggcggcaaacctgccagcgacaaaggatactacattgagcctaccatatttgcagatgtcaaggaggacatgaagatcgctcaagatgagatctttggccccgtgatgtccctcatgaagttcaagacggtcgatgaggcgatagagaaggccaactgcaccaagtacgggctggccgccggcataatcaccaagaatttggacatcgccaacagggtgtcgagatcggtgcgcgcggggaccgtgtgggtcaactgctacttcgccttcgaccccgaggcgcccttcggcggggtacaagatgagcgggttcggccgggaccaggggatgatggccatcgacaagtacatgcaggtcaagagcgtcatcaccgcagtccctgactcgccttggtattagcagaatagccaagacaatgcaagttcttaattctctgcagtactgtacatgcttgttgagttggctggtgcttgtgaagcagtcctttgtttgcgttgcctgggtgccaagttgttggtgtgtgtgatataggaaaaagtccaaaacaaaccttgaacttgtagaccaaagctaaatcaaaccctgaacttcaaatcag

SEQ ID NO: 32263 - protein, 498 aa, Triticum aestivum
MGSNEGGGCDGKPVVVVPEIKYTKLFINGEFVDAASGKTFETRDPRTGDVLAHIAEADKADVDLAVEAAREAFEHGKWPRMSGYERSRAMNKLADLMEQHIEELAALDGADAGKLLLLGKIIDIPSAVQMLRYYAGAADKIHGESLRVSGKYQGYTLKEPIGVVGIIIPWNFPSLMFFLKISPALAAGCTVVVKPAEQTPLSALYYAHLAKLAGIPDGVINVVPGFGPTAGAAIASHMDVDSVAFTGSGEVGRLIMEASARSNLKTVSLELGGKSPLIIFDDADVDMAVELSRLAIFFNKGEVCVAGSRVYVQEGIYDEFVKRAVVAAQNWKVGDPFDVATNMGPQVDKEQFERVLRYIEHGKSEGATLLTGGKPASDKGYYIEPTIFADVKEDMKIAQDEIFGPVMSLMKFKTVDEAIEKANCTKYGLAAGIITKNLDIANRVSRSVRAGTVWVNCYFAFDPEAPFGGVQDERVRPGPGDDGHRQVHAGQERHHRSP

SEQ ID NO: 32264 - protein, 418 aa, Triticum aestivum
MSGYERSRAMNKLADLMEQHIEELAALDGADAGKLLLLGKIIDIPSAVQMLRYYAGAADKIHGESLRVSGKYQGYTLKEPIGVVGIIIPWNFPSLMFFLKISPALAAGCTVVVKPAEQTPLSALYYAHLAKLAGIPDGVINVVPGFGPTAGAAIASHMDVDSVAFTGSGEVGRLIMEASARSNLKTVSLELGGKSPLIIFDDADVDMAVELSRLAIFFNKGEVCVAGSRVYVQEGIYDEFVKRAVVAAQNWKVGDPFDVATNMGPQVDKEQFERVLRYIEHGKSEGATLLTGGKPASDKGYYIEPTIFADVKEDMKIAQDEIFGPVMSLMKFKTVDEAIEKANCTKYGLAAGIITKNLDIANRVSRSVRAGTVWVNCYFAFDPEAPFGGVQDERVRPGPGDDGHRQVHAGQERHHRSP

SEQ ID NO: 32265 - protein, 409 aa, Triticum aestivum
MNKLADLMEQHIEELAALDGADAGKLLLLGKIIDIPSAVQMLRYYAGAADKIHGESLRVSGKYQGYTLKEPIGVVGIIIPWNFPSLMFFLKISPALAAGCTVVVKPAEQTPLSALYYAHLAKLAGIPDGVINVVPGFGPTAGAAIASHMDVDSVAFTGSGEVGRLIMEASARSNLKTVSLELGGKSPLIIFDDADVDMAVELSRLAIFFNKGEVCVAGSRVYVQEGIYDEFVKRAVVAAQNWKVGDPFDVATNMGPQVDKEQFERVLRYIEHGKSEGATLLTGGKPASDKGYYIEPTIFADVKEDMKIAQDEIFGPVMSLMKFKTVDEAIEKANCTKYGLAAGIITKNLDIANRVSRSVRAGTVWVNCYFAFDPEAPFGGVQDERVRPGPGDDGHRQVHAGQERHHRSP

SEQ ID NO: 32266 - DNA, 1670 bp, Triticum aestivum
cccattccagttcgttccttccttggcactcagccagccatggctctccgtcttcaccaccgacccctcctcctcctcctcctcctcctcgtgctatccaccgcctccgccacgcactcgccggagagcgccaccgcctccgcctccgcctccgcccgcgcccaccaccaccaccaccgctcgccgttcggcacggccaccgcccacttccaccccgtccctagcgccgcgccctccatgcaccaaaaccacctccacgccgacacccagtccctgctcgccaccggcgacgtcgaccccgtcctcgccgacgcgcaggccacggacgcggcggaggcccgtcccactccgctcgtgccgccccaggccgaagcggcatcaccgcctcccacgctcgtcctcccggtgccggatctcgcggaggcgacgccgacgacgcccgctgcagcgacgacaacgacgaccagcacgcttctcccgctccctgccacggtggcgacgaccacgagcccgcctccgcctcccgccgtgtccgacgccgagcaggggctgcagcagctctccagggtgctcacctcgctggggtacaacgagatggcgtcggaggcgccgctcctcgcccacgcgccgccgctcgcgaggtggcccggggccatcaccgtcttcgcggcccccgacgccttcctccaggccgcctgccccatgtgctcgcgccgccacctcctcgagcagcacatcgccatgggctactacccctactccgagctcgccgccgcagccaccatgaagatcccctccgcctccgtcggcttctgcatcaaggtcgccaccgagcggggccccttcggcatccactacgccaggatctacgccgacggcgtcgaggtgtccctccgcggccaccgctgcctccgtggtgcgcatcatgatccgcgacgccatggcgcgactccgcgacgggggctacggcttcatggcgctggccatgcgcgtcaagttcgccgagctcgagaagttcgccaacctgacgctcttcgcgctcgacgacccggccatcttcgtcggcggaggccacgactacgtctcggcggtgcgcttccacatcgtccccaaccaccgcctcacgcgcgcagacctccaccgcctccgccccggcacggtcctccccactctggccggcgagggccagagcctcgtcgtcacccactacgccaccggctccgcctcctccaacgacgacgtccgcgtcaactacatacccatcaaggagcccgacgtggtggtcaactcgcgcatcgccgtccacggcgtctacgtgccgttcccccgcctccacctcgccgacctcgccgtcgcgtccgccaccgaccagacgaacggcacctgcggcgtcggggggcccttcggcgactgcgcctcctcagcgatcacctctcccggcgagtgatgcgatgcgtacgtctcgtctcgatcgttttgctctgttatgtttctagccatggagaatttactgctagtatagtagtgcgtagtggagtagttgttcggatttgggcagtcgtttagttcaatagaggttcagataagagatgagtgcttctgattgcattttgtggcaccgaatgattgttgcctacttgtccagtacgagttgaatcaattttggtgcg

SEQ ID NO: 32267 - protein, 521 aa, Triticum aestivum
PIPVRSFLGTQPAMALRLHHRPLLLLLLLLVLSTASATHSPESATASASASARAHHHHHRSPFGTATAHFHPVPSAAPSMHQNHLHADTQSLLATGDVDPVLADAQATDAAEARPTPLVPPQAEAASPPPTLVLPVPDLAEATPTTPAAATTTTTSTLLPLPATVATTTSPPPPPAVSDAEQGLQQLSRVLTSLGYNEMASEAPLLAHAPPLARWPGAITVFAAPDAFLQAACPMCSRRHLLEQHIAMGYYPYSELAAAATMKIPSASVGFCIKVATERGPFGIHYARIYADGVEVSLRGHRCLRGAHHDPRRHGATPRRGLRLHGAGHARQVRRAREVRQPDALRARRPGHLRRRRPRLRLGGALPHRPQPPPHARRPPPPPPRHGPPHSGRRGPEPRRHPLRHRLRLLQRRRPRQLHTHQGARRGGQLAHRRPRRLRAVPPPPPRRPRRRVRHRPDERHLRRRGALRRLRLLSDHLSRRVMRCVRLVSIVLLCYVSSHGEFTASIVVRSGVVVRIWAVV

SEQ ID NO: 32268 - protein, 508 aa, Triticum aestivum
MALRLHHRPLLLLLLLLVLSTASATHSPESATASASASARAHHHHHRSPFGTATAHFHPVPSAAPSMHQNHLHADTQSLLATGDVDPVLADAQATDAAEARPTPLVPPQAEAASPPPTLVLPVPDLAEATPTTPAAATTTTTSTLLPLPATVATTTSPPPPPAVSDAEQGLQQLSRVLTSLGYNEMASEAPLLAHAPPLARWPGAITVFAAPDAFLQAACPMCSRRHLLEQHIAMGYYPYSELAAAATMKIPSASVGFCIKVATERGPFGIHYARIYADGVEVSLRGHRCLRGAHHDPRRHGATPRRGLRLHGAGHARQVRRAREVRQPDALRARRPGHLRRRRPRLRLGGALPHRPQPPPHARRPPPPPPRHGPPHSGRRGPEPRRHPLRHRLRLLQRRRPRQLHTHQGARRGGQLAHRRPRRLRAVPPPPPRRPRRRVRHRPDERHLRRRGALRRLRLLSDHLSRRVMRCVRLVSIVLLCYVSSHGEFTASIVVRSGVVVRIWAVV

SEQ ID NO: 32269 - protein, 442 aa, Triticum aestivum
MHQNHLHADTQSLLATGDVDPVLADAQATDAAEARPTPLVPPQAEAASPPPTLVLPVPDLAEATPTTPAAATTTTTSTLLPLPATVATTTSPPPPPAVSDAEQGLQQLSRVLTSLGYNEMASEAPLLAHAPPLARWPGAITVFAAPDAFLQAACPMCSRRHLLEQHIAMGYYPYSELAAAATMKIPSASVGFCIKVATERGPFGIHYARIYADGVEVSLRGHRCLRGAHHDPRRHGATPRRGLRLHGAGHARQVRRAREVRQPDALRARRPGHLRRRRPRLRLGGALPHRPQPPPHARRPPPPPPRHGPPHSGRRGPEPRRHPLRHRLRLLQRRRPRQLHTHQGARRGGQLAHRRPRRLRAVPPPPPRRPRRRVRHRPDERHLRRRGALRRLRLLSDHLSRRVMRCVRLVSIVLLCYVSSHGEFTASIVVRSGVVVRIWAVV

SEQ ID NO: 32270 - DNA, 1204 bp, Triticum aestivum
aaaaccaatcgtacgctcgctcgctcatcaatttcagcagccattccacgaccgcccagagaagactcgcctcctcccgagctcccctctccgtcctcgtcgtctccctctcccgcttccccccacccaaccaacacgctacgccaggcgcgagaggcaccagcggccatgaagggcggcggagccatcaggagcggcggcgggggaggcggcgggctgatgcggacgcggctgcggctccccgtggtgctcctctcctgctccctcttcttcctcgccggcttcctcggctccctcctcttcacccaggatccgcagggggaggaggacgtggagcggccgctgcggagggagcggctcatggaggcggtctggccggagatggcgtacggggagtccggcgagcccacgccctccttgatcccttaccagattttgagctggcaaccccgtgcattatattttccacaatttgcaacagcagaacagtgtgagaatgtagtaaaaactgcgaaggcacggcttaggccatcaacattggccttaaggaaaggagaaagcgaggagactaccaaaggaataaggacaagctcaggcacattccttagtgccgaagaagatccaactggagcccttgcagaaattgaaacgaagattgcaaaggctaccatgatgccaagaagtcatggagagccatttaatgtccttctgtatgagattggacagaagtatgcttcacactatgatgcatttgacccggctcaatatggtccacaaaaaagtcaaagggtggcatctttcttgctctacctcacggatgtcgaggaaggtggagaaaccatgttcccatatgagaatggggataatatgaacataggctacgactacgaacagtgcatcggcttaaaggtgaaaccgaggaagggggatggcctcttgttttactcccttatgctaaatggtaccattgatccgacttcacttcatggaagctgcccagtggtcaaaggagagaaatgggtcgccacaaaatggattagagacagaggctccacgtcctaaatagatcaacacatacatagtaatcatttttttctacaccatcttgtacctgtacattacatttattcaatttccatcggccttcatgaaccagtgaggtaggggaaaaaacaacttgcagtttccatctgctaatttgacg

SEQ ID NO: 32271 - protein, 353 aa, Triticum aestivum
KTNRTLARSSISAAIPRPPREDSPPPELPSPSSSSPSPASPHPTNTLRQAREAPAAMKGGGAIRSGGGGGGGLMRTRLRLPVVLLSCSLFFLAGFLGSLLFTQDPQGEEDVERPLRRERLMEAVWPEMAYGESGEPTPSLIPYQILSWQPRALYFPQFATAEQCENVVKTAKARLRPSTLALRKGESEETTKGIRTSSGTFLSAEEDPTGALAEIETKIAKATMMPRSHGEPFNVLLYEIGQKYASHYDAFDPAQYGPQKSQRVASFLLYLTDVEEGGETMFPYENGDNMNIGYDYEQCIGLKVKPRKGDGLLFYSLMLNGTIDPTSLHGSCPVVKGEKWVATKWIRDRGSTS

SEQ ID NO: 32272 - protein, 297 aa, Triticum aestivum
MKGGGAIRSGGGGGGGLMRTRLRLPVVLLSCSLFFLAGFLGSLLFTQDPQGEEDVERPLRRERLMEAVWPEMAYGESGEPTPSLIPYQILSWQPRALYFPQFATAEQCENVVKTAKARLRPSTLALRKGESEETTKGIRTSSGTFLSAEEDPTGALAEIETKIAKATMMPRSHGEPFNVLLYEIGQKYASHYDAFDPAQYGPQKSQRVASFLLYLTDVEEGGETMFPYENGDNMNIGYDYEQCIGLKVKPRKGDGLLFYSLMLNGTIDPTSLHGSCPVVKGEKWVATKWIRDRGSTS

SEQ ID NO: 32273 - protein, 280 aa, Triticum aestivum
MRTRLRLPVVLLSCSLFFLAGFLGSLLFTQDPQGEEDVERPLRRERLMEAVWPEMAYGESGEPTPSLIPYQILSWQPRALYFPQFATAEQCENVVKTAKARLRPSTLALRKGESEETTKGIRTSSGTFLSAEEDPTGALAEIETKIAKATMMPRSHGEPFNVLLYEIGQKYASHYDAFDPAQYGPQKSQRVASFLLYLTDVEEGGETMFPYENGDNMNIGYDYEQCIGLKVKPRKGDGLLFYSLMLNGTIDPTSLHGSCPVVKGEKWVATKWIRDRGSTS

SEQ ID NO: 32274 - DNA, 1374 bp, Triticum aestivum
aaaccgccgtcccccgttcgccgtctccgcgccgcgcgacccttcggcccggccgccctccccgaacccccctccgtctgctgcgccgccgcccgcgaatccgggccatggaggcgctgtggaagcaggcctccaggctcaaggagcaggtcgcccgccagggcgtgtttaagcagtttggggctggtggctatggaaattctgataatgcattcacagacgagtcagaagttaaactacatcagagattggaaaaactttacttatccactcgtgctgccaaacattttcaaagggacgtcgtccggggtgtggagggctacatagtgacaggatctaagcaagtggagatagggaacaaattgtctgatgatagccagaaatatggcattgaaaacacatgcacaagtggtaatactttatccagagctgctacatactatggaaaggcgcgttcactgatagaaaaggaacgcgggaacatgctaaaagcatttggtactcaggtggcagagcctctacgggcaatggtaatgggtgcccctctagaggatgctagacatctagcccagagatatgacagagtaaggcaagaagctgatgctcaggtcgttgaagtttcaaggcgtcaaagcagagtaagagaatcagctgggaatagtgacgtgatatcaaagttggaggcagctgagtataaacttgaagaactgaagtcaaacatggtggggttaggaaaggaagcggtttcagctatggctgctgtagaggggcagcagcaaagattgacattacaacgcctcattgcaatggttgaggcggagagaacttatcatcagaaagtcctggagatccttgaccatttggaagaagaaatggtgtctgagcgccaaaaaatcgaagcacctccaccccctgcagcagaaagttatatgtcaccgccgccaccatcatatgacgaagttaatggcatgtttgcctccacttctgctgatcaggcagttaactctgtcgacttcttcctgggagaggcgctcgattccttcgaggctgagagtgagtttgagcttaacttatcagttggcgacatcgttatcgtccggaagatatcaagcaacggttgggcggaaggtgaatgcaaggggaaagcaggatggttcccacatgcctatgtcgaaagacgcgagcgtgttctggcgagcaaagtcccgcatattttctaggggttttgaggaggaacataggttataggtgtttgatttcaatagttgaacagcgtactttcagacttctacagtattcatgtgtatagattgaattttcgtcccgtgagccagtttttgtgaagataatgtacatctgacatttcagaacacc

SEQ ID NO: 32275 - protein, 405 aa, Triticum aestivum
TAVPRSPSPRRATLRPGRPPRTPLRLLRRRPRIRAMEALWKQASRLKEQVARQGVFKQFGAGGYGNSDNAFTDESEVKLHQRLEKLYLSTRAAKHFQRDVVRGVEGYIVTGSKQVEIGNKLSDDSQKYGIENTCTSGNTLSRAATYYGKARSLIEKERGNMLKAFGTQVAEPLRAMVMGAPLEDARHLAQRYDRVRQEADAQVVEVSRRQSRVRESAGNSDVISKLEAAEYKLEELKSNMVGLGKEAVSAMAAVEGQQQRLTLQRLIAMVEAERTYHQKVLEILDHLEEEMVSERQKIEAPPPPAAESYMSPPPPSYDEVNGMFASTSADQAVNSVDFFLGEALDSFEAESEFELNLSVGDIVIVRKISSNGWAEGECKGKAGWFPHAYVERRERVLASKVPHIF

SEQ ID NO: 32276 - protein, 370 aa, Triticum aestivum
MEALWKQASRLKEQVARQGVFKQFGAGGYGNSDNAFTDESEVKLHQRLEKLYLSTRAAKHFQRDVVRGVEGYIVTGSKQVEIGNKLSDDSQKYGIENTCTSGNTLSRAATYYGKARSLIEKERGNMLKAFGTQVAEPLRAMVMGAPLEDARHLAQRYDRVRQEADAQVVEVSRRQSRVRESAGNSDVISKLEAAEYKLEELKSNMVGLGKEAVSAMAAVEGQQQRLTLQRLIAMVEAERTYHQKVLEILDHLEEEMVSERQKIEAPPPPAAESYMSPPPPSYDEVNGMFASTSADQAVNSVDFFLGEALDSFEAESEFELNLSVGDIVIVRKISSNGWAEGECKGKAGWFPHAYVERRERVLASKVPHIF

SEQ ID NO: 32277 - protein, 245 aa, Triticum aestivum
MLKAFGTQVAEPLRAMVMGAPLEDARHLAQRYDRVRQEADAQVVEVSRRQSRVRESAGNSDVISKLEAAEYKLEELKSNMVGLGKEAVSAMAAVEGQQQRLTLQRLIAMVEAERTYHQKVLEILDHLEEEMVSERQKIEAPPPPAAESYMSPPPPSYDEVNGMFASTSADQAVNSVDFFLGEALDSFEAESEFELNLSVGDIVIVRKISSNGWAEGECKGKAGWFPHAYVERRERVLASKVPHIF

SEQ ID NO: 32278 - DNA, 963 bp, Triticum aestivum
accaaatatctctctgattgcattgcctccctgcctggctacatttgacttgcttccatccattcgatccactcaactcaaggaagatctactgcactcccgcccatactagccgaggttcgttgggtaggataagatcatcgatggaggatgtgtggaaggacatgtcgctgtgctccaccccgctcgcgctacagtcctaccacctccactccccggccgccgctccctaccgcggcgccgctgtctacccccaggactacctggccggcgcggttccgcaaccgccccgcacgccgccgccggctcacacggcgctcaccctggagttcacctgccccggggggaccagcgctgccaacacggccaccagctccggcgacgacccagccggctgccactttggcttctccgcgtccggaggcggcagcaggagggccgtggtccagccggcggtgggcggcgaccggcggcagcgccggatggtcaagaaccgggagtcggcggcgcggtcgcgggcgcggaagcaggcccacaccaacgagatggagctggagctggagcagctgcgccgggagaacaggatgcttatccagcgcgagcaggacttcatcaacgatcgcttggcgaaggcggcgcaggtagccgtcccggactgcagcagcagcagcagcagctggaggaggaacactagtagcagtaccctccagcagccgcagaggtgccgctccgcccctgcaccatgatcgtcgcggcggccatcgactctagcagcggcagcttcattccacttactagtacaacggattgattgtccaagctagctagatgacttgattagcattgtactacgcgttaaccaagtactatgtatgtaatctagcagtagcctacttccttgcaaaattaagcaagcatgtagctcgacgatggatggaagttaagctaagctagtactcaacc

SEQ ID NO: 32279 - protein, 200 aa, Triticum aestivum
MEDVWKDMSLCSTPLALQSYHLHSPAAAPYRGAAVYPQDYLAGAVPQPPRTPPPAHTALTLEFTCPGGTSAANTATSSGDDPAGCHFGFSASGGGSRRAVVQPAVGGDRRQRRMVKNRESAARSRARKQAHTNEMELELEQLRRENRMLIQREQDFINDRLAKAAQVAVPDCSSSSSSWRRNTSSSTLQQPQRCRSAPAP

SEQ ID NO: 32280 - protein, 193 aa, Triticum aestivum
MSLCSTPLALQSYHLHSPAAAPYRGAAVYPQDYLAGAVPQPPRTPPPAHTALTLEFTCPGGTSAANTATSSGDDPAGCHFGFSASGGGSRRAVVQPAVGGDRRQRRMVKNRESAARSRARKQAHTNEMELELEQLRRENRMLIQREQDFINDRLAKAAQVAVPDCSSSSSSWRRNTSSSTLQQPQRCRSAPAP

SEQ ID NO: 32281 - protein, 164 aa, Triticum aestivum
MCGRTCRCAPPRSRYSPTTSTPRPPLPTAAPLSTPRTTWPARFRNRPARRRRLTRRSPWSSPAPGGPALPTRPPAPATTQPAATLASPRPEAAAGGPWSSRRWAATGGSAGWSRTGSRRRGRGRGSRPTPTRWSWSWSSCAGRTGCLSSASRTSSTIAWRRRRR

SEQ ID NO: 32282 - DNA, 1504 bp, Triticum aestivum
ataaaatcggagaaacccagaaaaaaaaggactaaacgagatactgagagccgaagacctaaattccgtagagaaaactcgcatcgccgccgctgcctagatcgccgggcgccgccatgtcgaccccgggcgccgcctactacgcttccctcgcgcgcaagcagtacttctgctaccaatgcaaccgcaccgtcctcatcgccgcctccgccgcggccgccggcgagctctcatgccccgactgccgcggcgacttcctggaggaggtcaccgtccccgcccccaccatcctccccttcccctttgccttcccccctatgatgcccaccgcctcctccccgtcccgatcctcctcctcctccaccgccgcgcccccctccagcgacctctccaacttcctcaccagcatcctcgacctccaggagggccgccgcgttaggtccaggagcgggagcggtgccgcctcggccgctggcacggccacgcctgagaacgagccggagtccttcgacccgctcgtgtttttccagaactacatccacaccctcatggaggggggcgccaacatccaggtgctcctcgacgacgccagcgtcaacctcgcccccggcctaggcggccgtgccggtgggacaagctacggggactacttcgtcggcccgggactggagcaactcatcgagcagctcgccgagaacgatcccaaccgctatggcacgccgccggctgccaagtccgccctgaccactcttcctgacgtcgttgtcaccgatgccatggttgcggcggcagagggcgccgagtgtgctgtgtgcaaggaagatttctcacctggagatggggccaagcagatgccctgcaagcatatctaccacgcagattgcatcgtaccctggttggagctccacaattcgtgccccatttgtcgctttgagctgcccaccgatgatcctgattatgagggcaataaggcctcaaacgcacagtcagctgttggtatcgctgctgctgctgcatctgggagctctggtgctgctgaggaaggaggggaggagagtggggaggctgcaagggtggtggaaaggagattcaatgtgtcattggcttggccgtttggtggattggcaggtcaaacaccacagcaagatgggaacaatgccggtgctggcagtagctcacaggacagcggttcgcaggatggagctggtggcagtaacaaaaattgaacacaaatctgtgatcagttggaggtctccttgtcggcgatgcgtccagaggtcgacaatgttgatgcgccaccgtgagttatactacagacaatcgaaagaccaaaggaatttacagcctgtttatttggtggaacaaaacagtgttggttttagttgtcgttgtcgctgtccgttagggcgtgtacgcaaggcacagagactgccgtggcaggaagttgtgcgttgcgtagactctttgtgcagatttgttaaattgattctcgtttatggacccc

SEQ ID NO: 32283 - protein, 369 aa, Triticum aestivum
MSTPGAAYYASLARKQYFCYQCNRTVLIAASAAAAGELSCPDCRGDFLEEVTVPAPTILPFPFAFPPMMPTASSPSRSSSSSTAAPPSSDLSNFLTSILDLQEGRRVRSRSGSGAASAAGTATPENEPESFDPLVFFQNYIHTLMEGGANIQVLLDDASVNLAPGLGGRAGGTSYGDYFVGPGLEQLIEQLAENDPNRYGTPPAAKSALTTLPDVVVTDAMVAAAEGAECAVCKEDFSPGDGAKQMPCKHIYHADCIVPWLELHNSCPICRFELPTDDPDYEGNKASNAQSAVGIAAAAASGSSGAAEEGGEESGEAARVVERRFNVSLAWPFGGLAGQTPQQDGNNAGAGSSSQDSGSQDGAGGSNKN

SEQ ID NO: 32284 - protein, 302 aa, Triticum aestivum
MMPTASSPSRSSSSSTAAPPSSDLSNFLTSILDLQEGRRVRSRSGSGAASAAGTATPENEPESFDPLVFFQNYIHTLMEGGANIQVLLDDASVNLAPGLGGRAGGTSYGDYFVGPGLEQLIEQLAENDPNRYGTPPAAKSALTTLPDVVVTDAMVAAAEGAECAVCKEDFSPGDGAKQMPCKHIYHADCIVPWLELHNSCPICRFELPTDDPDYEGNKASNAQSAVGIAAAAASGSSGAAEEGGEESGEAARVVERRFNVSLAWPFGGLAGQTPQQDGNNAGAGSSSQDSGSQDGAGGSNKN

SEQ ID NO: 32285 - protein, 301 aa, Triticum aestivum
MPTASSPSRSSSSSTAAPPSSDLSNFLTSILDLQEGRRVRSRSGSGAASAAGTATPENEPESFDPLVFFQNYIHTLMEGGANIQVLLDDASVNLAPGLGGRAGGTSYGDYFVGPGLEQLIEQLAENDPNRYGTPPAAKSALTTLPDVVVTDAMVAAAEGAECAVCKEDFSPGDGAKQMPCKHIYHADCIVPWLELHNSCPICRFELPTDDPDYEGNKASNAQSAVGIAAAAASGSSGAAEEGGEESGEAARVVERRFNVSLAWPFGGLAGQTPQQDGNNAGAGSSSQDSGSQDGAGGSNKN

SEQ ID NO: 32286 - DNA, 1717 bp, Triticum aestivum
acctcgcgcctcgcagcagcaccaaccaaccaacacagctccagtccccgcccgccccgccacgatggtcgccacggcgaagatcccgcagcggcagctcttcatcgacggcgactggcgcgcgcccgcgctcggccgccgcctccccgtcatcaaccccaccaccgaggcctccatcggcgagatcccggcgggcacctcggaggacgtggacgcggcggtggcggccgcgcgggcggccctcaggaggaaccgcggccgcgactgggcccgcgccccgggcgccgtccgggccaagtacctccgcgccatcgccgccaagatgattgagcggaaatctgatctggctaggctagaggcacttgattgcggcaagcctcttgatgaagcggcatgggacatggacgatgttgccggctgctttgagttcttcgcgggccatgctgaagccttagacaaaaggcaaaatgctgcagttgctctcccggagaattttaaatgccatcttaagaaggaacctattggtgtagttgctctaatcacaccttggaactatcctctcctgatggctgtatggaaggtagcccctgctctggcagctggttgtacagctgtactgaaaccatctgaattagcttccgtgacttgcttagagcttggtgatgtgtgtaaagagattggtcttccatcaggtgtcttaaatattgtgactggattaggtcatgaagctggcgctcctttgtcgtcacaccctgatgtcgacaaggttgcatttaccgggagctatgcaaccggtcaaaagattatggttgctgcagctcctacagtcaagcctgttacattggaacttggtggcaaaagtcctattgtagtatttgatgatgtcgacattgacaaagctgttgagtggactctatttgggtgcttttggaccaacggtcagatttgcagtgcgacatctcgtcttcttatccataaaaacatcgctaaagaattcgtcgacaggatggttgcatggtccaaaaatatcaaggtgtcagacccgctcgaggaaggttgcaggcttgggccagttgttagtgaaggacagtatgagaagatcaagaagtttgtagcgaatgctaaaagtgaaggtgccaccattctgactgggggtgtcaggcccaagcatctggagaaaggtttcttcattgaacccacaatcatcactgacatcaacacatcaatggagatttggagggaggaagtctttggtccagtcctgtgtgtgaaggaattttctaccgaagaggaagccatcgaactggccaatgatactcattatggtctggctggtgccgtgatttctggtgaccgtgaccgatgccagagattagctgaggagatcgacgcggggtgcatctgggtgaactgctcgcagccttgcttctgccaagctccgtggggcgggaacaagcgcagtggctttgggcgcgagctaggagaaggggggatcgataactacctgagcatcaagcaagtcaccgagtacacatctgatgcgccgtggggatggtacaaggctccggctaactaagatgtaattgagctggttcgaggacctgtgtctgttccatcagaggataaatctgtgcgccggcctttgtagtggtgaataaatgtagtttgccatgtactcctgaacctttcttgcaaaataaatggcatgagttttgtg

SEQ ID NO: 32287 - protein, 524 aa, Triticum aestivum
PRASQQHQPTNTAPVPARPATMVATAKIPQRQLFIDGDWRAPALGRRLPVINPTTEASIGEIPAGTSEDVDAAVAAARAALRRNRGRDWARAPGAVRAKYLRAIAAKMIERKSDLARLEALDCGKPLDEAAWDMDDVAGCFEFFAGHAEALDKRQNAAVALPENFKCHLKKEPIGVVALITPWNYPLLMAVWKVAPALAAGCTAVLKPSELASVTCLELGDVCKEIGLPSGVLNIVTGLGHEAGAPLSSHPDVDKVAFTGSYATGQKIMVAAAPTVKPVTLELGGKSPIVVFDDVDIDKAVEWTLFGCFWTNGQICSATSRLLIHKNIAKEFVDRMVAWSKNIKVSDPLEEGCRLGPVVSEGQYEKIKKFVANAKSEGATILTGGVRPKHLEKGFFIEPTIITDINTSMEIWREEVFGPVLCVKEFSTEEEAIELANDTHYGLAGAVISGDRDRCQRLAEEIDAGCIWVNCSQPCFCQAPWGGNKRSGFGRELGEGGIDNYLSIKQVTEYTSDAPWGWYKAPAN

SEQ ID NO: 32288 - protein, 503 aa, Triticum aestivum
MVATAKIPQRQLFIDGDWRAPALGRRLPVINPTTEASIGEIPAGTSEDVDAAVAAARAALRRNRGRDWARAPGAVRAKYLRAIAAKMIERKSDLARLEALDCGKPLDEAAWDMDDVAGCFEFFAGHAEALDKRQNAAVALPENFKCHLKKEPIGVVALITPWNYPLLMAVWKVAPALAAGCTAVLKPSELASVTCLELGDVCKEIGLPSGVLNIVTGLGHEAGAPLSSHPDVDKVAFTGSYATGQKIMVAAAPTVKPVTLELGGKSPIVVFDDVDIDKAVEWTLFGCFWTNGQICSATSRLLIHKNIAKEFVDRMVAWSKNIKVSDPLEEGCRLGPVVSEGQYEKIKKFVANAKSEGATILTGGVRPKHLEKGFFIEPTIITDINTSMEIWREEVFGPVLCVKEFSTEEEAIELANDTHYGLAGAVISGDRDRCQRLAEEIDAGCIWVNCSQPCFCQAPWGGNKRSGFGRELGEGGIDNYLSIKQVTEYTSDAPWGWYKAPAN

SEQ ID NO: 32289 - protein, 417 aa, Triticum aestivum
MIERKSDLARLEALDCGKPLDEAAWDMDDVAGCFEFFAGHAEALDKRQNAAVALPENFKCHLKKEPIGVVALITPWNYPLLMAVWKVAPALAAGCTAVLKPSELASVTCLELGDVCKEIGLPSGVLNIVTGLGHEAGAPLSSHPDVDKVAFTGSYATGQKIMVAAAPTVKPVTLELGGKSPIVVFDDVDIDKAVEWTLFGCFWTNGQICSATSRLLIHKNIAKEFVDRMVAWSKNIKVSDPLEEGCRLGPVVSEGQYEKIKKFVANAKSEGATILTGGVRPKHLEKGFFIEPTIITDINTSMEIWREEVFGPVLCVKEFSTEEEAIELANDTHYGLAGAVISGDRDRCQRLAEEIDAGCIWVNCSQPCFCQAPWGGNKRSGFGRELGEGGIDNYLSIKQVTEYTSDAPWGWYKAPAN

SEQ ID NO: 32290 - DNA, 2130 bp, Triticum aestivum
ccctcgctagcctcgggtgggtctatcctcttccctcgctgagaatggcgtctccggcctccacctccgcgccggtctccctctccctctccctcccgctccgcccttccccgtgccgccgcctccccgcgcccttctcccgcctccctccccgccgcttcaccctctcgccgacccgccccgccgccgcgctgctctccagccccagccccagccccagccacgcgcagcacgagcacaaggacgaggaagatgaagaagaggagtatggtgaagatgaggagctcgtggaggaggatgacttggtggaggtggggtacgtgagcggcgcgcacggggtgcgcggcgacgtcctcgtctcgccccgcaccgacttccccgagctccgcttcgccacgccggggaagaggtggctgagggctcgcgccgccgggaagatgcaggtcagggagttcgagctcgtcagggggaaagcccacacggggaagaagggctggatcgtgcgcttcgacggcgtcgactccttggacgaggccaggcagatagttggttcggctgttctcgtgaagaccgaggataggccggaactggaggaggatgagatctattcgctcgatcttgttggcatgactgttattgtcaaggatacaggcaagcttgtaggcactgttgcacaggtcttcaattttggaggtggcgatcttctccaggttatggttggctctgctgagaatgctgtgcagactgattcagaaaatcaggattcaactccatcccgtcaacacgtgtggattccatttgctgaagatattgtgcctgatattgatatggagactagagagatgtggattacaccaccaaagggtcttcttgaggtcaacacacgtcctgagaaatcaaagaaagaaaggcgtgcgatggattggaaggaaaagaagaaactacagcgtcgcataactgcagcaaagaaggtactacatgaaatggaacagggccatattctggaaggtttgctatcaggggacaagctcgaaaaggcttcacttgctgaacaaattgcgagcattgacttccaattgttcaaacatgcaatgcatagcgtcagcaagcaggttgacagcatgtcaaagaatgttcttgccaattcctcttcatcaagaaaaaacgtgatgaggatacctcgcgaaaccctcatgaatcatggtgagaaagagaagaatgtcttcagtagtgaatttagcaaaggctgtgagatccttcaaaagtcaaaagcagcaattgtacttgttacaaatggctcagactctgatattgtggatgctgagtttcagagattgcttaactcttttagtgagttaatgaaggtagaagaaaatcatatatctccccctttttttattgtttctcctgacgatcatgtggattcagttcggaactacttgatagagaacgactattttggttttgacactcagaaggtatgggtccttgaagagatgaaactaccagttgtcagtctgtcctctgagctagggagcaaaaaaattctgctgaagtccccatgggagatacttcaaaggccagctggatctggggcgattttcagctcactatcatcaaataaaattttggaatcgttcaatgcaatgggcatagagtacgtacagatatgcagcccctctgacgaactagtcctcgggcatcctctgctcttcggtgctgcaagttcgcgcagtgtggatgtcggtgtcaagctccgcaagaccagcgacaagacggaagatggtttcgatttgatcctttccatcgaccacttgaacaagatgtgccgagacgtcgccaaggccaggttctctgcccaccccgagcagcacgaacacgtcgagcttgtcgacggccagtgggtcaccgtccagccagaggggccgaactctcaccggttgagtaccaatgttacaagtgttttggattcttgctctcctgacaagctgtgcgtcatggagattgttgagtagcggctagtgaatctttttgctaatgtactgtaggactgtacatagccagccacaaccaagtactttttttttaaacggagcctcatccattaattaagaagagagttgtccggct

SEQ ID NO: 32291 - protein, 670 aa, Triticum aestivum
LASLGWVYPLPSLRMASPASTSAPVSLSLSLPLRPSPCRRLPAPFSRLPPRRFTLSPTRPAAALLSSPSPSPSHAQHEHKDEEDEEEEYGEDEELVEEDDLVEVGYVSGAHGVRGDVLVSPRTDFPELRFATPGKRWLRARAAGKMQVREFELVRGKAHTGKKGWIVRFDGVDSLDEARQIVGSAVLVKTEDRPELEEDEIYSLDLVGMTVIVKDTGKLVGTVAQVFNFGGGDLLQVMVGSAENAVQTDSENQDSTPSRQHVWIPFAEDIVPDIDMETREMWITPPKGLLEVNTRPEKSKKERRAMDWKEKKKLQRRITAAKKVLHEMEQGHILEGLLSGDKLEKASLAEQIASIDFQLFKHAMHSVSKQVDSMSKNVLANSSSSRKNVMRIPRETLMNHGEKEKNVFSSEFSKGCEILQKSKAAIVLVTNGSDSDIVDAEFQRLLNSFSELMKVEENHISPPFFIVSPDDHVDSVRNYLIENDYFGFDTQKVWVLEEMKLPVVSLSSELGSKKILLKSPWEILQRPAGSGAIFSSLSSNKILESFNAMGIEYVQICSPSDELVLGHPLLFGAASSRSVDVGVKLRKTSDKTEDGFDLILSIDHLNKMCRDVAKARFSAHPEQHEHVELVDGQWVTVQPEGPNSHRLSTNVTSVLDSCSPDKLCVMEIVE

SEQ ID NO: 32292 - protein, 656 aa, Triticum aestivum
MASPASTSAPVSLSLSLPLRPSPCRRLPAPFSRLPPRRFTLSPTRPAAALLSSPSPSPSHAQHEHKDEEDEEEEYGEDEELVEEDDLVEVGYVSGAHGVRGDVLVSPRTDFPELRFATPGKRWLRARAAGKMQVREFELVRGKAHTGKKGWIVRFDGVDSLDEARQIVGSAVLVKTEDRPELEEDEIYSLDLVGMTVIVKDTGKLVGTVAQVFNFGGGDLLQVMVGSAENAVQTDSENQDSTPSRQHVWIPFAEDIVPDIDMETREMWITPPKGLLEVNTRPEKSKKERRAMDWKEKKKLQRRITAAKKVLHEMEQGHILEGLLSGDKLEKASLAEQIASIDFQLFKHAMHSVSKQVDSMSKNVLANSSSSRKNVMRIPRETLMNHGEKEKNVFSSEFSKGCEILQKSKAAIVLVTNGSDSDIVDAEFQRLLNSFSELMKVEENHISPPFFIVSPDDHVDSVRNYLIENDYFGFDTQKVWVLEEMKLPVVSLSSELGSKKILLKSPWEILQRPAGSGAIFSSLSSNKILESFNAMGIEYVQICSPSDELVLGHPLLFGAASSRSVDVGVKLRKTSDKTEDGFDLILSIDHLNKMCRDVAKARFSAHPEQHEHVELVDGQWVTVQPEGPNSHRLSTNVTSVLDSCSPDKLCVMEIVE

SEQ ID NO: 32293 - protein, 525 aa, Triticum aestivum
MQVREFELVRGKAHTGKKGWIVRFDGVDSLDEARQIVGSAVLVKTEDRPELEEDEIYSLDLVGMTVIVKDTGKLVGTVAQVFNFGGGDLLQVMVGSAENAVQTDSENQDSTPSRQHVWIPFAEDIVPDIDMETREMWITPPKGLLEVNTRPEKSKKERRAMDWKEKKKLQRRITAAKKVLHEMEQGHILEGLLSGDKLEKASLAEQIASIDFQLFKHAMHSVSKQVDSMSKNVLANSSSSRKNVMRIPRETLMNHGEKEKNVFSSEFSKGCEILQKSKAAIVLVTNGSDSDIVDAEFQRLLNSFSELMKVEENHISPPFFIVSPDDHVDSVRNYLIENDYFGFDTQKVWVLEEMKLPVVSLSSELGSKKILLKSPWEILQRPAGSGAIFSSLSSNKILESFNAMGIEYVQICSPSDELVLGHPLLFGAASSRSVDVGVKLRKTSDKTEDGFDLILSIDHLNKMCRDVAKARFSAHPEQHEHVELVDGQWVTVQPEGPNSHRLSTNVTSVLDSCSPDKLCVMEIVE

SEQ ID NO: 32294 - DNA, 2394 bp, Triticum aestivum
ctatcctttcatttgctccctctgattccattccatgacgcactgactggattggatgctgcctgccggatctatccccacctcagagcacagctcaccggacaagaggaatccctccttcctcagctccgatttgcaacctaccttccttccttccggcgagccgccatgcctccagtccagcctgtccaatccccccgacctagatagatagacagacacaaggagagctctgctctacgcaacccatggcggccaaggcgccggccccttccgcgcgctcccgggccctcgcctccgcctccgcgcccgcgccggcctcctccaggcgccccaatgccactcccgcagcagacaccgccgcgccatccacctccgccaccacctccccaccgccatcctccccgccgtccgccccgcctccaaagctcgccgcctccccaccgcccgcctcgccgccaccgacgccgcccgccgcactccccactccaaagcccgcgccttccacttccacgccgcctccaaccaccacaagcccacctgctccgccccccaagcgctcccccgccgcagcaccgccgccgacggctcctgcgccaagacccacgccgcccgctccagctccaagaaccgcgccgacctcccagtccccggcggcctcgccccccgcccacgccgcgccgcacgccaagccatcgccgcctcccgcggccggccaccacccgcagctgccgacgccggccaccgccgtcgacccggccaaccagcacggcaggagccccaacaagtcctccacgcagtccgccggcgagcggggccgcaaggcctccccctcgccgggcagcagcaacggggggggccagcaacggcgtcgtcatcgccgtcggcgccgtgctcgccttcctcgtggtcaccctcatagccgccgccgttctctacaccaagaagcgccggagggggcgggacgactaccgcgccggcttccggtcgccgccttactcttcagagctaccaccgtcagttccttcgggcggcggctcggcgaacgcggcaatgtcgtcgtcggccgacccctccgtccacaccaactacagcgccggcagcccgaggctgaaagcgtgcgtgtccgacatgagcgtcggcaactcgcgcttcttcacttaccaggaaatgtaccagatcaccgacggtttctcgccgcgcaatttgctcggcgagggagggttcgggtctgtgtacaagggccggctgcccgaagggaaagacgtggctgtcaagcagctgagggacggcagcgggcaaggcgaacgcgagttccaggctgaggtggagatcattagccgcgtgcatcaccggcatttggtgtctctcgtggggtactgcattgccaatagccagaggctgctcgtctacgatttcgtgtccaatgacaccctgcattatcaccttcacggacagggaaggcctgttttagagtggtcggctagggttaaaatcgccgccggcgctgctcgtggaatagcatacctacacgaagattgccatccaaggataatccaccgagacataaaatcctcaaacattttattggataataactttgacgcactggtggctgattttggtcttgcaagattggctctggatgctgtaacacatgtaactacccgtgttatggggacatttggatacatggctccagagtatgcatcgagtggcaaactgactgagaaatctgatgtgttctcttttggtgttgtactcttagagcttatgactggtcgaaagcctgttgattcatccagaccattgggtgatgagagccttgttgagtgggctagaccattgcttagtcgagctcttgagacaggaaagctggaagggttagtcgaccccaggcttgagaagaatttcaatgaggtagaaatgttccgtatgattgaatctgcagcagcctgcattcgacactcgtcatcaaagaggcccagaatgagccaggtggtgcgggtcctcgatagcttagcggatattgacctaacgaacggtgtccagccagggcaaagcgagctcttcaacgtggcaaacacggcggatatcaggatgttccagcagatggtgcagggcaatcaggatgacagttctgccttcagccaatatagttggatcagtcgcagtagggccgacgccgaggcaacctcctcaaactccaggatcttgtgatcgtctttgtttctgtgctccatgtgtgcgtagctattcttctcgacccactgattcggccgggctgtatcgaccatcgaaaaagtctggtgtaattcttgccttgttacgatgattgctcctgtgtagatcacatgaggaagatgtactcttgtttgacaaattattaagctc

SEQ ID NO: 32295 - protein, 627 aa, Triticum aestivum
MPLPQQTPPRHPPPPPPPHRHPPRRPPRLQSSPPPHRPPRRHRRRPPHSPLQSPRLPLPRRLQPPQAHLLRPPSAPPPQHRRRRLLRQDPRRPLQLQEPRRPPSPRRPRPPPTPRRTPSHRRLPRPATTRSCRRRPPPSTRPTSTAGAPTSPPRSPPASGAARPPPRRAAATGGASNGVVIAVGAVLAFLVVTLIAAAVLYTKKRRRGRDDYRAGFRSPPYSSELPPSVPSGGGSANAAMSSSADPSVHTNYSAGSPRLKACVSDMSVGNSRFFTYQEMYQITDGFSPRNLLGEGGFGSVYKGRLPEGKDVAVKQLRDGSGQGEREFQAEVEIISRVHHRHLVSLVGYCIANSQRLLVYDFVSNDTLHYHLHGQGRPVLEWSARVKIAAGAARGIAYLHEDCHPRIIHRDIKSSNILLDNNFDALVADFGLARLALDAVTHVTTRVMGTFGYMAPEYASSGKLTEKSDVFSFGVVLLELMTGRKPVDSSRPLGDESLVEWARPLLSRALETGKLEGLVDPRLEKNFNEVEMFRMIESAAACIRHSSSKRPRMSQVVRVLDSLADIDLTNGVQPGQSELFNVANTADIRMFQQMVQGNQDDSSAFSQYSWISRSRADAEATSSNSRIL

SEQ ID NO: 32296 - protein, 388 aa, Triticum aestivum
MSSSADPSVHTNYSAGSPRLKACVSDMSVGNSRFFTYQEMYQITDGFSPRNLLGEGGFGSVYKGRLPEGKDVAVKQLRDGSGQGEREFQAEVEIISRVHHRHLVSLVGYCIANSQRLLVYDFVSNDTLHYHLHGQGRPVLEWSARVKIAAGAARGIAYLHEDCHPRIIHRDIKSSNILLDNNFDALVADFGLARLALDAVTHVTTRVMGTFGYMAPEYASSGKLTEKSDVFSFGVVLLELMTGRKPVDSSRPLGDESLVEWARPLLSRALETGKLEGLVDPRLEKNFNEVEMFRMIESAAACIRHSSSKRPRMSQVVRVLDSLADIDLTNGVQPGQSELFNVANTADIRMFQQMVQGNQDDSSAFSQYSWISRSRADAEATSSNSRIL

SEQ ID NO: 32297 - protein, 362 aa, Triticum aestivum
MSVGNSRFFTYQEMYQITDGFSPRNLLGEGGFGSVYKGRLPEGKDVAVKQLRDGSGQGEREFQAEVEIISRVHHRHLVSLVGYCIANSQRLLVYDFVSNDTLHYHLHGQGRPVLEWSARVKIAAGAARGIAYLHEDCHPRIIHRDIKSSNILLDNNFDALVADFGLARLALDAVTHVTTRVMGTFGYMAPEYASSGKLTEKSDVFSFGVVLLELMTGRKPVDSSRPLGDESLVEWARPLLSRALETGKLEGLVDPRLEKNFNEVEMFRMIESAAACIRHSSSKRPRMSQVVRVLDSLADIDLTNGVQPGQSELFNVANTADIRMFQQMVQGNQDDSSAFSQYSWISRSRADAEATSSNSRIL

SEQ ID NO: 32298 - DNA, 2544 bp, Triticum aestivum
atttcaaatcactctccctcccctgctctcctctcctcctcctcctccgccctctcgctcgcgtcccaggacccagccgcgcgaccccgaccccgaccccctcggcggccaccaccgcgcgctcccaccgccggcctgccgataccgcgccgagagattgctcctgacgatgggtggcgcggtgagagaccagcagcagcagctccacccgtgcgattcgcttctcctcgagctcaacgtgatctgggatgaggtcggtgagcccgacacggtgcgggacaagacgctgctggagctcgagcaggaatgcctcgatgtctacaggaggaaggtcgaccaggccaaccgctgcagggctcagctgcggcaatccatcgccgaggccgaggctgagctcgccggcatctgctcggccataggcgagccgccggttcacgtcaggcagtcaaaccagaaattgcatggtttaagggaggagttgaatgcaattatcccatatttagaggagatgcggactaaaaaggttgaaagatggagccagttcgttcatgtcctcgaggagattaagaaaatctcatccgaaatcaggccttcagactttgtgccatttaaaactcctgtggatcagtctgatctgtcgttaagaaagtttgaggagttaacgaaggagctagaatctcttcagaaagagaagagggaaagattaaagcaagtgatggatcatttgaacacattacattccttatgtgaggtgcttggcattgactttaaacaaacagtgcatgaggtgcaccctagcctggacgaagctgaaggatcaaagaacctgagcaacactacaatcgagagactagcattggctgtggatagacttcgtgaaataaaaattcagaggatgcaaaagcttcaagactttgcatcgacaatgctagaactatggaatcttatggatacaccaattgaagagcagcagatgttccagaatgtaacgtgcaatattgctgcctcggagcatgaaataacagaacccaacaccctgtcgatcgacttcctcagctatgtggaagctgaggttttaaggcttgagcaactgaaaggaagcaaaatgaaggacctcgttttgaaaaagaaatcggagctggaggagcacagaagacgtgcgcatctaattggcgaggaaggatattcagatgaatttaacattgaggctattgagtcgggagctattgatcctgcattggtgctggaacaaattgaggctcacattgcaacagtgaaagatgaagctttcagtcgaaaggatattcttgagaaggttgaaagatttctgaatgcatgtgaggaggaagcctggctggaagattacaacaaagatgacaatcgttacaatgctgggaagggggcacatctgacgctcaagagggctgagaaagctcgcattttggttaacaagattccgggaatggtagatgttttgaccacaaaaatcattgcttgggagaatgaaagaggaaaagagttcacatatgatggcgtacgccttctctcaatgctggatgaatacatgattgttcgccaggagaaagaacaagagaagaagagacaaagggatcagaagaagctccacgatcagctcaaagccgagcaggaagctctctacggttcaaagccaagtccatccaagcctcaaagcataaagaaggcgcctagacactcgatgggtggtgtaaaccgcagggtgtccatgggtggagccacgatgcaagcacccaaaacagacatactgcattccaagaatgttcgtgctgccaagagaactgaagacattgcccatttgtcccctgccagcagaggcttggacattggcgatcttcccatcaagaagctatctttcaatgccactgccttgcgtgaaaccgagacacctcgcaagccatttgcgcagatcatgccgccgccaagcagtgtcccctccactcctgcgcgctctgtcaccaatgacaccgaggatgagaaccggacccccaaccccaagacatttggagcagcactgaatctcaagaccccgatgaccgtggcggctccgatgcagctggcaatgacgcccgctgtggctagcaaggtcacggctgctcctgtctcccttgtctacgagaagccagagccaacattgctggaggcgatcgagtattccttcgaagaaaggcggctggccgtctatttgtcaagagaagtttaagctctctttgcgtaggcgaaagttggaaacctgacggctgttacttgtgagagactggctgctgcctagtatgttggtcgacgacagtcgtccagtgctgttctgattgttcccctctgccacatttgattgtttccatactcagcaaaggaagcttgcgcttcagcagcttccgttcagtactgccattggttagatataattaatgtgtataggtttctttctcggcactgaatcatcttgaatctgtttgattaatatagatcggtattgtgttttaatcctcatgcgatgatgtgtttctg

SEQ ID NO: 32299 - protein, 745 aa, Triticum aestivum
FQITLPPLLSSPPPPPPSRSRPRTQPRDPDPDPLGGHHRALPPPACRYRAERLLLTMGGAVRDQQQQLHPCDSLLLELNVIWDEVGEPDTVRDKTLLELEQECLDVYRRKVDQANRCRAQLRQSIAEAEAELAGICSAIGEPPVHVRQSNQKLHGLREELNAIIPYLEEMRTKKVERWSQFVHVLEEIKKISSEIRPSDFVPFKTPVDQSDLSLRKFEELTKELESLQKEKRERLKQVMDHLNTLHSLCEVLGIDFKQTVHEVHPSLDEAEGSKNLSNTTIERLALAVDRLREIKIQRMQKLQDFASTMLELWNLMDTPIEEQQMFQNVTCNIAASEHEITEPNTLSIDFLSYVEAEVLRLEQLKGSKMKDLVLKKKSELEEHRRRAHLIGEEGYSDEFNIEAIESGAIDPALVLEQIEAHIATVKDEAFSRKDILEKVERFLNACEEEAWLEDYNKDDNRYNAGKGAHLTLKRAEKARILVNKIPGMVDVLTTKIIAWENERGKEFTYDGVRLLSMLDEYMIVRQEKEQEKKRQRDQKKLHDQLKAEQEALYGSKPSPSKPQSIKKAPRHSMGGVNRRVSMGGATMQAPKTDILHSKNVRAAKRTEDIAHLSPASRGLDIGDLPIKKLSFNATALRETETPRKPFAQIMPPPSSVPSTPARSVTNDTEDENRTPNPKTFGAALNLKTPMTVAAPMQLAMTPAVASKVTAAPVSLVYEKPEPTLLEAIEYSFEERRLAVYLSREV

SEQ ID NO: 32300 - protein, 689 aa, Triticum aestivum
MGGAVRDQQQQLHPCDSLLLELNVIWDEVGEPDTVRDKTLLELEQECLDVYRRKVDQANRCRAQLRQSIAEAEAELAGICSAIGEPPVHVRQSNQKLHGLREELNAIIPYLEEMRTKKVERWSQFVHVLEEIKKISSEIRPSDFVPFKTPVDQSDLSLRKFEELTKELESLQKEKRERLKQVMDHLNTLHSLCEVLGIDFKQTVHEVHPSLDEAEGSKNLSNTTIERLALAVDRLREIKIQRMQKLQDFASTMLELWNLMDTPIEEQQMFQNVTCNIAASEHEITEPNTLSIDFLSYVEAEVLRLEQLKGSKMKDLVLKKKSELEEHRRRAHLIGEEGYSDEFNIEAIESGAIDPALVLEQIEAHIATVKDEAFSRKDILEKVERFLNACEEEAWLEDYNKDDNRYNAGKGAHLTLKRAEKARILVNKIPGMVDVLTTKIIAWENERGKEFTYDGVRLLSMLDEYMIVRQEKEQEKKRQRDQKKLHDQLKAEQEALYGSKPSPSKPQSIKKAPRHSMGGVNRRVSMGGATMQAPKTDILHSKNVRAAKRTEDIAHLSPASRGLDIGDLPIKKLSFNATALRETETPRKPFAQIMPPPSSVPSTPARSVTNDTEDENRTPNPKTFGAALNLKTPMTVAAPMQLAMTPAVASKVTAAPVSLVYEKPEPTLLEAIEYSFEERRLAVYLSREV

SEQ ID NO: 32301 - protein, 576 aa, Triticum aestivum
MRTKKVERWSQFVHVLEEIKKISSEIRPSDFVPFKTPVDQSDLSLRKFEELTKELESLQKEKRERLKQVMDHLNTLHSLCEVLGIDFKQTVHEVHPSLDEAEGSKNLSNTTIERLALAVDRLREIKIQRMQKLQDFASTMLELWNLMDTPIEEQQMFQNVTCNIAASEHEITEPNTLSIDFLSYVEAEVLRLEQLKGSKMKDLVLKKKSELEEHRRRAHLIGEEGYSDEFNIEAIESGAIDPALVLEQIEAHIATVKDEAFSRKDILEKVERFLNACEEEAWLEDYNKDDNRYNAGKGAHLTLKRAEKARILVNKIPGMVDVLTTKIIAWENERGKEFTYDGVRLLSMLDEYMIVRQEKEQEKKRQRDQKKLHDQLKAEQEALYGSKPSPSKPQSIKKAPRHSMGGVNRRVSMGGATMQAPKTDILHSKNVRAAKRTEDIAHLSPASRGLDIGDLPIKKLSFNATALRETETPRKPFAQIMPPPSSVPSTPARSVTNDTEDENRTPNPKTFGAALNLKTPMTVAAPMQLAMTPAVASKVTAAPVSLVYEKPEPTLLEAIEYSFEERRLAVYLSREV

SEQ ID NO: 32302 - DNA, 2581 bp, Triticum aestivum
aaaaatgatgcgcgaccccagtcctactctccccagttgttactcccagccagcagcaccgtccagggcccggccgcacgctacaactagaaccaaccccagccccggtgcagtgcacagccagtgtagctaggctctctcgcagcgagagcaggacgcaggacggctagctagctttgatcggccggccggatcggagtgctcgtgtgtcgggggccatggccggcgccgcgggcgacagggcggaaggtgtgggcggtggcggggactggccgccgttcgccggcgacgccttcgcggagtactcgtcgtcggtgttcgcggagctcggtggatggtcggatggccttggcgcgggcgccggggagctgccgccgctggatctgccggcggcgagcgcgtccgggccggtcccgatggcgcggtcggacgagatcatgccggccgcgtcaggcgagcccgcaggcgccgcctcctcctgctccagcggcgacggcgccgcagccgccgcggagaacgccgacaagccgcaggaggccgccgacgcagcgagcatgaagccggcggcggcggcagggaagaaggggcagaagcgggcgcggcagcagcggttcgccttcgtgaccaagagcgaagttgatcacctcgaggatgggtacagatggaggaagtatgggcagaaagccgtcaagaacagccctttcccaaggagctactaccggtgcaccaacagcaagtgcaccgtgaagaagcgggtggagcggtcgtcggaggacccctccgtggtgatcaccacctacgagggccagcactgccaccaccagacctccttccagcgcggcggcatgcacttccacggcgccgccaccgttgcgctcgccgagcagatgtcgttcgtgtcaactcagcagctgtacaacctgccgcccctgcgccgacaacagatgaatcctgcatcgtcggagtccgccgttagctccgtgccgccgtctttgcagcagctcaacggcggcgacgaactgcgaaggtcaactagctatagccccacggcgtccgcggtgcagacaccgtcgtcgtcgttggtgcctccggacgtttcctttgacatgggactgcttggcgacatcgtgcctccaggagtaagaaatggatgaagatctataatggtaattattttaagataataggtttataagcgagaacggctacggtgtggacgagctcgtgcgctcccgctaactggacgaacgactccatgacgcgtagcacagcgtatttactgctatggtgtgcattgacgtcgagtacaggtgctccaccgtccaaactaacccgaaagtagcggctcagcttcgtgttgttccgttggaacatgaatgtcggagtggcccataaccgaatgccgccgtcaactttcgctactgagatggcgtcctccgaaagggtacttgggtgcccaactctcaaaagtaaatgggtacccatgtttgggcccatggttgtctcagcgtcgctgaccagtaaaagaaatatatcttccttctcccatagccgcctacagagcaggagctcatggcgatgcagatgtcgacatagccgcctacagagcaggagctcatggcgatgcagatatcggccgctggaggtgttgaagtcgagtttttgtcagatcccgtcgacagatttccactgcgagatctcgctgccgcacagcccttggttgcttacgagatgtacaaatccatggagtgtgagcctgctgagtccagcattggtgatgtggagacgctccggtcaacagtaattgcaatgcgattgccttgtctgcagcagcatctgagcattctacgggcaaagacacccctgaagccccaggctggaggaagagaatgcgagtcggaagttcatctagcgagcgccacccatgcgctgacaggatgagtgctttggaagcaacactaagaagctatgcagagaaaaaaaatggcactgtcgtagttcctactatggggacaaaatttgattctcttgaagaagcctgctagaacatgttcctggatgtgcatggatgcagaaaatgtccttgggatatagagctggaaatctgggacttagggtgttctagagcatccatgccatccaagtgagaggagaatatcctttgtctttaggacatgcttgctgaacatgcaagttcgctagacgaaggatgggtataactgatgaagctttatgcagtctattggcacccatctcatacagagctattgccgagagcgcctttgcatctgacgtcgtgcgccagagttggtcataggggaccacacgcagcttgatcagctcgacatggtcccgcaggcccgtttccttcccttggagagcctaaggctggccatagtgggggtaacataacctgtaacatgcacttgggactagcaaatatgtttatgtggcacataattaaagaggagagagagggttagagtaacataggtagataccatatcatgttaaatgctatgctactttgtgtcatgcatggcaataaatatgatcatctatgatactactttatgttact

SEQ ID NO: 32303 - protein, 311 aa, Triticum aestivum
MAGAAGDRAEGVGGGGDWPPFAGDAFAEYSSSVFAELGGWSDGLGAGAGELPPLDLPAASASGPVPMARSDEIMPAASGEPAGAASSCSSGDGAAAAAENADKPQEAADAASMKPAAAAGKKGQKRARQQRFAFVTKSEVDHLEDGYRWRKYGQKAVKNSPFPRSYYRCTNSKCTVKKRVERSSEDPSVVITTYEGQHCHHQTSFQRGGMHFHGAATVALAEQMSFVSTQQLYNLPPLRRQQMNPASSESAVSSVPPSLQQLNGGDELRRSTSYSPTASAVQTPSSSLVPPDVSFDMGLLGDIVPPGVRNG

SEQ ID NO: 32304 - protein, 245 aa, Triticum aestivum
MARSDEIMPAASGEPAGAASSCSSGDGAAAAAENADKPQEAADAASMKPAAAAGKKGQKRARQQRFAFVTKSEVDHLEDGYRWRKYGQKAVKNSPFPRSYYRCTNSKCTVKKRVERSSEDPSVVITTYEGQHCHHQTSFQRGGMHFHGAATVALAEQMSFVSTQQLYNLPPLRRQQMNPASSESAVSSVPPSLQQLNGGDELRRSTSYSPTASAVQTPSSSLVPPDVSFDMGLLGDIVPPGVRNG

SEQ ID NO: 32305 - protein, 238 aa, Triticum aestivum
MPAASGEPAGAASSCSSGDGAAAAAENADKPQEAADAASMKPAAAAGKKGQKRARQQRFAFVTKSEVDHLEDGYRWRKYGQKAVKNSPFPRSYYRCTNSKCTVKKRVERSSEDPSVVITTYEGQHCHHQTSFQRGGMHFHGAATVALAEQMSFVSTQQLYNLPPLRRQQMNPASSESAVSSVPPSLQQLNGGDELRRSTSYSPTASAVQTPSSSLVPPDVSFDMGLLGDIVPPGVRNG

SEQ ID NO: 32306 - DNA, 1486 bp, Triticum aestivum
gcctagctggagtactaaaaaaacaataaacgtgaggaggcggagcgggctacgcagcacgcacgcagcgtcgccgctttcgaactccgggcgcggacgcaagcacgcacgcacgcgtccgtccgccatccacaccgcaccgcccccgcgagcgacccaaccctagccgcaatccccacccgccgtcccaccctcccctccccgcccgccgatgcagaccgaggcgcgggtgggcggcgtggccctcgacggccgcggcgccgtctcggcctccccccgccaggagcagcagcagcgccacatcggcaccgccgcgcacctcgccgccgggggcttcgccggcgtcgtcagcaagacctgcaccgcgcccctcgcccgcctcaccatcctcttccaggtggcaggtatgcattcagatgctgcagctctaaggaagtgtagtatatggcacgaggcttcacggattgttcgagaagaaggatttggggcattttggaaaggcaatcttgtcaccattgtacatcgattaccttattccgccatgagcttctattcttatgaacgatacaaaaagcttctcggaatggtgcctggcctggatgacccaaattatgttagtgtcgtacgtttacttggtggtggtctagcgggagtgacagctgcatctgtaacttacccgttggatgttgttcgaactcgtttggcaacacacaaaaccaccaggtattacaagggcatctttcatacgttgtccacaatttgtagagaaaagagtgggagaggattgtataaaggccttggggccacgttattgggagttggaccgggtatagcaatcagcttttatgtatatgaatcctttgaggtctcattggcaaatggaaaggccgaatgattccaatgccgttgtgagcttgttttctgggagtctatctggtattgcagcgtcgacagctacatttcctcttgatcttgtaaagcgacgtatgcaactacatggggcggctggggcatcacaaatcgaaaaatcaagcataactggaaccatccgccaaatccttcaaaaggaaggtcctcgtggcttctaccgaggcatagtcccggagtacctgaaggttgttcctagcgttggaatcgccttcatgacctatgaggtattgaaaagcatgctctccagcattgatggggatgatgagaactaaggtcgcaaagcagttgcgttgcctttttttttgccgccctaggttactatcgtaagaccagtgtatgagagtgattacaacatgccttgccaggcagttttgtaggtgttggtaggataaagcaagctttacctgaggttatgttgtaccatataggctaattaaagagcaaacaattgaatctgttttcctgtgagtgttatgctctgattcgtcgtggaatgtaatgccatttgcaaggagaaaactccaaaggtttaatggattctgtgtaatttcaactg

SEQ ID NO: 32307 - protein, 227 aa, Triticum aestivum
MQTEARVGGVALDGRGAVSASPRQEQQQRHIGTAAHLAAGGFAGVVSKTCTAPLARLTILFQVAGMHSDAAALRKCSIWHEASRIVREEGFGAFWKGNLVTIVHRLPYSAMSFYSYERYKKLLGMVPGLDDPNYVSVVRLLGGGLAGVTAASVTYPLDVVRTRLATHKTTRYYKGIFHTLSTICREKSGRGLYKGLGATLLGVGPGIAISFYVYESFEVSLANGKAE

SEQ ID NO: 32308 - protein, 162 aa, Triticum aestivum
MHSDAAALRKCSIWHEASRIVREEGFGAFWKGNLVTIVHRLPYSAMSFYSYERYKKLLGMVPGLDDPNYVSVVRLLGGGLAGVTAASVTYPLDVVRTRLATHKTTRYYKGIFHTLSTICREKSGRGLYKGLGATLLGVGPGIAISFYVYESFEVSLANGKAE

SEQ ID NO: 32309 - protein, 118 aa, Triticum aestivum
MYMNPLRSHWQMERPNDSNAVVSLFSGSLSGIAASTATFPLDLVKRRMQLHGAAGASQIEKSSITGTIRQILQKEGPRGFYRGIVPEYLKVVPSVGIAFMTYEVLKSMLSSIDGDDEN

SEQ ID NO: 32310 - DNA, 1439 bp, Triticum aestivum
gcttctagctagctgcacatccatccatcacacaaagctgcacgtagtacgcacgcgggggccggcgtacgcggcagcttgctggccggctataaatccatcgccgccggcgcactgcacatccgtaacccccaccatccaccgtcgtcagagcgcgcatctgtacaccatggcgggtcctgtcgacggcgccgcgaggagcgtggcggcggtggtcgccctgctgctgctgctgctggccgtgtccgcggcggacgcggcgaccagcagcacggtggtcgccggcatggtgttctgcgaccagtgcaaggacggcgcccgcggcctcttcgactacccgctctacggggcgcgggtggcgatccagtgcggcggcggcgacaccccgatcacggtgcgggagtgcaacaccaactggttcggcggcttctccgtgcgcatggaggggtcgccggacatgaaccgctgcacggcgcgcgtcgtccacgccaccggccactgctccgccgccgccaacaccgacccgcgcgagctcacgctcgccttccgcatgctcggcctcgccctctacaccgtcctgccgctgctatctcagccggagcagcccatggacttctgcccccgcgccggccccgtgcccccgcatgaccccgcggccgctgccgctacgccatcgccgcccatgacggtggcgccgggcccggtgtcttccccggtgccgatcttctggcgccgcaggccgcggctgctgcctcccgtctggcgccgcccgccgaccgtgccgcagcagccagagacggagccgctcccctcgccgcccgcgccttcctctaccgaaacgccggccgagggctcgggctcaagctccggctccgcgtgcgcgtacgaccagtggacgttgccggagaaccggtgccactggaaggtggtgacgcccaacacgacggtggccatggcgttcggcccgctggcggcgcagcggtacggcccggacatgaccctgcgggaggcgctcgacggccgcggcgacccctaccgcacgctgctccgggaggccacggcggcgctgctcaacgcctactacaacgcgccggggtcgcccttcctctacccgaccaccgccagcgtcctcgaccacctcaacggcgcgctcctcagctccgcccagcgcgtgctcatcgagggcgcccgcttccgccgcgccaacaccggcggtggcgggcctgccggccggaccaagctgccatgcgacttcaccccgtgcgccgccaccaacaccactgcagggtgatcgccggtccattccctccaccttcgtgacgcaatcatcgtgacgtaatgaatcattcgattacgatcttagttactagtaattgtgaaactgcatattattcaaatgttggagaggccagtgtttaatgtaattcgcgagacatgtc

SEQ ID NO: 32311 - protein, 429 aa, Triticum aestivum
LLASCTSIHHTKLHVVRTRGPAYAAACWPAINPSPPAHCTSVTPTIHRRQSAHLYTMAGPVDGAARSVAAVVALLLLLLAVSAADAATSSTVVAGMVFCDQCKDGARGLFDYPLYGARVAIQCGGGDTPITVRECNTNWFGGFSVRMEGSPDMNRCTARVVHATGHCSAAANTDPRELTLAFRMLGLALYTVLPLLSQPEQPMDFCPRAGPVPPHDPAAAAATPSPPMTVAPGPVSSPVPIFWRRRPRLLPPVWRRPPTVPQQPETEPLPSPPAPSSTETPAEGSGSSSGSACAYDQWTLPENRCHWKVVTPNTTVAMAFGPLAAQRYGPDMTLREALDGRGDPYRTLLREATAALLNAYYNAPGSPFLYPTTASVLDHLNGALLSSAQRVLIEGARFRRANTGGGGPAGRTKLPCDFTPCAATNTTAG

SEQ ID NO: 32312 - protein, 373 aa, Triticum aestivum
MAGPVDGAARSVAAVVALLLLLLAVSAADAATSSTVVAGMVFCDQCKDGARGLFDYPLYGARVAIQCGGGDTPITVRECNTNWFGGFSVRMEGSPDMNRCTARVVHATGHCSAAANTDPRELTLAFRMLGLALYTVLPLLSQPEQPMDFCPRAGPVPPHDPAAAAATPSPPMTVAPGPVSSPVPIFWRRRPRLLPPVWRRPPTVPQQPETEPLPSPPAPSSTETPAEGSGSSSGSACAYDQWTLPENRCHWKVVTPNTTVAMAFGPLAAQRYGPDMTLREALDGRGDPYRTLLREATAALLNAYYNAPGSPFLYPTTASVLDHLNGALLSSAQRVLIEGARFRRANTGGGGPAGRTKLPCDFTPCAATNTTAG

SEQ ID NO: 32313 - protein, 334 aa, Triticum aestivum
MVFCDQCKDGARGLFDYPLYGARVAIQCGGGDTPITVRECNTNWFGGFSVRMEGSPDMNRCTARVVHATGHCSAAANTDPRELTLAFRMLGLALYTVLPLLSQPEQPMDFCPRAGPVPPHDPAAAAATPSPPMTVAPGPVSSPVPIFWRRRPRLLPPVWRRPPTVPQQPETEPLPSPPAPSSTETPAEGSGSSSGSACAYDQWTLPENRCHWKVVTPNTTVAMAFGPLAAQRYGPDMTLREALDGRGDPYRTLLREATAALLNAYYNAPGSPFLYPTTASVLDHLNGALLSSAQRVLIEGARFRRANTGGGGPAGRTKLPCDFTPCAATNTTAG

SEQ ID NO: 32314 - DNA, 1238 bp, Triticum aestivum
tttgctacattgtaaatctcaaagtatttgcactgtaatatcttgttgagttttacagtgatttacattgtaattctcgtagtggatttacagtgtaattctcaaagtattttcactgtaatatcttttagtgtttctctcacggtatttgtagtggatttttcgcactgtaattatcttgtttgattatagtgtaattctcatagtatttacactgtaatttttcgcactgtaattacagtgtaattctcatagtatttacactgaatttttttagtgtaaatctcaaatgattttacactgtaattgtcttgtttgatctagtgtaattatcttgttttgatagagtaaatctcaaattatttatactgtcttagtggatttacagtgtaattctcatttttggatttacactataattattttgtttttttgcatttttactgtgtaactatcattggatttacactgtaactatttactggttttgttagtgggttttacaccgcaattcttagtggttttacttgtaaatctgagaaccatttgtactagtatccatttgctttgctctaatgatatagtcttattttcttcattgtaacaagcactttaattctaccgatagcactttattttctttctaacatgaaaaggattaacttcgaagagtttcatgtgttgtacccagctgtccctaagcaagataatcggtatttaagtttttctgccttttcatgttcttgtttaatttttatacagatttgtatgaaagctttatttttcttatttgtgttcttttttatcttttcagccatgaatgtggtgtcttcacatttaagtatatggagatattcacaccaagaactcagatggcaaactttttctctagtgcagacattccaaatcttaggatcagatatgcgaatgacatgtttttcagccccatgaacagttgcgacaagtctttcgtaactgatttctatcatgatggagaggcaatgccgggtgaggttaaacatgtgcgcggtcctagcacaaatggtggctgagttcttttttcagtagcatgtaatctggacaaagtagcatgcaatctgagcatatcagtatttttgatttagtagtggtttgtatgttttttcattttgattgtaatgtcatgtctttatgcctgtaactctgcagtacgtatttcgagcagctttttgattctatatcaagggcccttttttgtt

SEQ ID NO: 32315 - protein, 104 aa, Triticum aestivum
MFLFNFYTDLYESFIFLICVLFYLFSHECGVFTFKYMEIFTPRTQMANFFSSADIPNLRIRYANDMFFSPMNSCDKSFVTDFYHDGEAMPGEVKHVRGPSTNGG

SEQ ID NO: 32316 - protein, 100 aa, Triticum aestivum
MKRINFEEFHVLYPAVPKQDNRYLSFSAFSCSCLIFIQICMKALFFLFVFFFIFSAMNVVSSHLSIWRYSHQELRWQTFSLVQTFQILGSDMRMTCFSAP

SEQ ID NO: 32317 - protein, 68 aa, Triticum aestivum
MEIFTPRTQMANFFSSADIPNLRIRYANDMFFSPMNSCDKSFVTDFYHDGEAMPGEVKHVRGPSTNGG

SEQ ID NO: 32318 - DNA, 816 bp, Triticum aestivum
aaaccctagccgccgtccgtccccaaccttcaccgccgctccccctcaaccccccgcccccaaacccgccgccgcctccatcatgcggccgctcgacgagaaggagaccacgatggtcttcgagaagctcttcaagttcaccggccccaacctgaagcacctcctggagcggccctccgtggagggccccgacccggagcccggccgctactgcctccgcctccacaagaaccgcgtcttctacgcctccgagtcgctcgtccgccgcgccaccgccgtgtcccgcacgcgcctcgccggggtcggcacgcccatcggcaagttcacccacggcggcgccttccacctcaccgtccacgcgctcgacctcctcgccgcccacgcgcgccgccgcatctggctcaagcccgacacggagcgctcgttcctcttcggcaactccgtgcccaagtccgcgctcgcgcgcatcaccgagaacaccaagtccggcgacggcgtcgtcgtcatgtccatggccgacgtgccgctcgggttcggggtcgccgccaggggcgcgcaggactgcaggaaggccgataccaacgccgtggtggtgctccaccagtcggatgctggcgagtacctccgcaaggaggaggagctcatgtgaggtgagggtcgaggcttggttgttattgtgtttactgattggaccttatgcgtgaatttagggacccaatgccttactatcttgttcgagagttcctggatatggcatatgaatgtactggatgattaattgagtatgagatgatgcgattgcaaatttgtggtgat

SEQ ID NO: 32319 - protein, 215 aa, Triticum aestivum
NPSRRPSPTFTAAPPQPPAPKPAAASIMRPLDEKETTMVFEKLFKFTGPNLKHLLERPSVEGPDPEPGRYCLRLHKNRVFYASESLVRRATAVSRTRLAGVGTPIGKFTHGGAFHLTVHALDLLAAHARRRIWLKPDTERSFLFGNSVPKSALARITENTKSGDGVVVMSMADVPLGFGVAARGAQDCRKADTNAVVVLHQSDAGEYLRKEEELM

SEQ ID NO: 32320 - protein, 188 aa, Triticum aestivum
MRPLDEKETTMVFEKLFKFTGPNLKHLLERPSVEGPDPEPGRYCLRLHKNRVFYASESLVRRATAVSRTRLAGVGTPIGKFTHGGAFHLTVHALDLLAAHARRRIWLKPDTERSFLFGNSVPKSALARITENTKSGDGVVVMSMADVPLGFGVAARGAQDCRKADTNAVVVLHQSDAGEYLRKEEELM

SEQ ID NO: 32321 - protein, 178 aa, Triticum aestivum
MVFEKLFKFTGPNLKHLLERPSVEGPDPEPGRYCLRLHKNRVFYASESLVRRATAVSRTRLAGVGTPIGKFTHGGAFHLTVHALDLLAAHARRRIWLKPDTERSFLFGNSVPKSALARITENTKSGDGVVVMSMADVPLGFGVAARGAQDCRKADTNAVVVLHQSDAGEYLRKEEELM

SEQ ID NO: 32322 - DNA, 1207 bp, Triticum aestivum
aaaaccctaaactcaaccccgcacctccgccatgcgaggccgccatcatctgcttggcttcctccgccgcgccgcggcaggctccttctccgcggcccgccatgctgattctctctccctcctacaccccatcccgccgggaaatggcgccgccgttcccatcagcacccgcttcctctcctcgcgcaccggcggcgccgcgcggagcctaatcgaggacgaggctgacctcagcgactgggtcagcgacatcaaggccgactccttcaaccttggtctcagcagcggcgacgagcgcgaggcctccacccgcaaacccgctgcctccaggggaggccgaagagggagggattcggggggaccgccgacgaggtcgaggtttgatggcggtgagttcggcggagagagacgcggcggggattttggcggtgataggcgcggtggtcggttcggcggcgatagtcgtggtggtcggtttggtggcgacaggcgtggtggtcgattcggcagcgatagtcgtggtggtcggttcgggggcgataggcctggctctgatcgaagggggagggtggtgagttctgatctcagtgatgatggtgaatctgggtttggttctgcgaggggaaggcgagggcggggcgggatgtcatcgggtgtgtcacacaggggagggaggtatggtgatttggatgatgaagaatctgggattgggtctcccaggggaaggcgaggtcgtggtgggaggacaacagatttgtcaggtagaggacgcaggggaagcgatggccgcctccaccgtcgcatccaaggccctggccctcgtcgccatcctgtcggtcgccgccttctccgtcgtctccgcccaggaggccccggcgcccagccccgtgtccgccgccggcgtcgcgatgccgtccctcgccgctgcgctcgtcgcctccggtgccgccttcctcttcgccgccgttcgccactgaagagactgcctccgtcttccccgtcgacctacctagtacaaccacatatagatccatttatttatcactagtgatttgttcgttcgtgtcattttgcccagatctgctactgtgtgtcactcggtgatggtgattagtatctccttattagtagagattgtacccgtgtgcttgtagatactatttatccggtttgatctagtattcgtatgatcgctccatttagtttt

SEQ ID NO: 32323 - protein, 338 aa, Triticum aestivum
MRGRHHLLGFLRRAAAGSFSAARHADSLSLLHPIPPGNGAAVPISTRFLSSRTGGAARSLIEDEADLSDWVSDIKADSFNLGLSSGDEREASTRKPAASRGGRRGRDSGGPPTRSRFDGGEFGGERRGGDFGGDRRGGRFGGDSRGGRFGGDRRGGRFGSDSRGGRFGGDRPGSDRRGRVVSSDLSDDGESGFGSARGRRGRGGMSSGVSHRGGRYGDLDDEESGIGSPRGRRGRGGRTTDLSGRGRRGSDGRLHRRIQGPGPRRHPVGRRLLRRLRPGGPGAQPRVRRRRRDAVPRRCARRLRCRLPLRRRSPLKRLPPSSPSTYLVQPHIDPFIYH

SEQ ID NO: 32324 - DNA, 1842 bp, Triticum aestivum
acaacgaagcaccagaaaagaacaaaaatataaaaaaataagacgagagagccacccccatcgcctcgtctctcctctcctcgcagatctttcccgtctccggccaccatgaactcctactccggcgaccggtcctcctcccgtcccaccacaacctccttcgactcctaccagtttgacttcggggccaacgcctcccgctcctccacctcccgccccctccgcgaccagaggccaggtggcgccaccaacccttcaccgaggccaaccaccacaaacacatggtcacaccagccggtgaagacgtcctggactcatcagccatccccgtccgccgccgcggcgctcggatccgggcctgtgtccatggtcggcgacatctccggccggagctggtccgccactgcgccctcctccggcatcggcctccctcagtccaacaaccccaacctcttcagcgacctcctcgggcccgcgcttggatccacccgagcccagtccaacgcgccgctcagatcagcagcggcccagccctccaagccgtcaagcgctaaccctaggaccaacagctcttccttctcgatgggcggtatggcgagcacgctcccgaaaaccaccggggcaccgatagcttctggtagttatggggttggtggccggccaatgaagccggtgggcatggcgccggcgaccgcgtcacagcccacggcgcagaagaaggatccgttcggctccatagatcccttcgcggcgaagcctgggtctatgaatgctgcaaagcaggcaggttcggccaaatcggatcagggatttggcgtgtttcagggcgtgagttcgggcgccaacgctggattcagtagtttccagaaagccggtgctggatccagtggcttccagagttctggtgccacgaagccttccaatgttacgcctccgcctgcacccgctccagcgcctgtttctgcagcggtgaactctggcgtggatcattttgacacgctgtttccttcgtccgcatctgcaccaactgcttctgcggcgagtaatggtggtggtgacatgtttggtgagatggatggttgggtggacgtggagtcggagtatgttggtggtggtgatagcagtggcacaaccacagagctggagggattaccgccaccaccctctgggttgacggcatctgctgctaaggcaaaaggaatggataattacaagggtgggcagtatgctgatgctatcaaatggttgtcttgggctgttctgctcatcgagaagactgggaaaaatgctggtattgcagaggtgttgtcatcaagggcctcgtcctataaggaggtcggcgagtacaagaaggctattgccgactgttcgaaggtgctcgagcaagataaggacaatgtgtcggtgctagtgcaacgtgctctcttatatgagagcagtgagaaatataggcttggggctgaggacctgcgtttggttctgaagattgaccctgggaatcgtcttgccaggagtatgattcatcgattgaacaaaatggctgactagggatgtttgtcaagttccctgatgtaccaccattgtaatcatccttgacacggaaactgtgagttatttcaaattgttttactatacttgtggctttgggggtaataatttacaactttggtgttatgaagcacatcattgcatcttcacacacagtatatctttgatatgtattgtatatcatatattgtattgaactttaatagttcactttgtgtttgaaaaaaaaaaaaaaaaaaaaaaaaaaaaaaaaaaaaaaaaaaaaaaaaaaaaaaaaaaaaaaaaaaaaaaagg

SEQ ID NO: 32325 - protein, 479 aa, Triticum aestivum
MNSYSGDRSSSRPTTTSFDSYQFDFGANASRSSTSRPLRDQRPGGATNPSPRPTTTNTWSHQPVKTSWTHQPSPSAAAALGSGPVSMVGDISGRSWSATAPSSGIGLPQSNNPNLFSDLLGPALGSTRAQSNAPLRSAAAQPSKPSSANPRTNSSSFSMGGMASTLPKTTGAPIASGSYGVGGRPMKPVGMAPATASQPTAQKKDPFGSIDPFAAKPGSMNAAKQAGSAKSDQGFGVFQGVSSGANAGFSSFQKAGAGSSGFQSSGATKPSNVTPPPAPAPAPVSAAVNSGVDHFDTLFPSSASAPTASAASNGGGDMFGEMDGWVDVESEYVGGGDSSGTTTELEGLPPPPSGLTASAAKAKGMDNYKGGQYADAIKWLSWAVLLIEKTGKNAGIAEVLSSRASSYKEVGEYKKAIADCSKVLEQDKDNVSVLVQRALLYESSEKYRLGAEDLRLVLKIDPGNRLARSMIHRLNKMAD

SEQ ID NO: 32326 - protein, 393 aa, Triticum aestivum
MVGDISGRSWSATAPSSGIGLPQSNNPNLFSDLLGPALGSTRAQSNAPLRSAAAQPSKPSSANPRTNSSSFSMGGMASTLPKTTGAPIASGSYGVGGRPMKPVGMAPATASQPTAQKKDPFGSIDPFAAKPGSMNAAKQAGSAKSDQGFGVFQGVSSGANAGFSSFQKAGAGSSGFQSSGATKPSNVTPPPAPAPAPVSAAVNSGVDHFDTLFPSSASAPTASAASNGGGDMFGEMDGWVDVESEYVGGGDSSGTTTELEGLPPPPSGLTASAAKAKGMDNYKGGQYADAIKWLSWAVLLIEKTGKNAGIAEVLSSRASSYKEVGEYKKAIADCSKVLEQDKDNVSVLVQRALLYESSEKYRLGAEDLRLVLKIDPGNRLARSMIHRLNKMAD

SEQ ID NO: 32327 - protein, 321 aa, Triticum aestivum
MGGMASTLPKTTGAPIASGSYGVGGRPMKPVGMAPATASQPTAQKKDPFGSIDPFAAKPGSMNAAKQAGSAKSDQGFGVFQGVSSGANAGFSSFQKAGAGSSGFQSSGATKPSNVTPPPAPAPAPVSAAVNSGVDHFDTLFPSSASAPTASAASNGGGDMFGEMDGWVDVESEYVGGGDSSGTTTELEGLPPPPSGLTASAAKAKGMDNYKGGQYADAIKWLSWAVLLIEKTGKNAGIAEVLSSRASSYKEVGEYKKAIADCSKVLEQDKDNVSVLVQRALLYESSEKYRLGAEDLRLVLKIDPGNRLARSMIHRLNKMAD

SEQ ID NO: 32328 - DNA, 915 bp, Triticum aestivum
acaccaggtcttccctttaataataccccctgcaaagctgtcgcgatctggtcgtttcgctcgcgtcctcctcgtcggcggccatgatccaggcggtgatggtcatcagcactctgggcaagccccgcctcctcaagttctacgatttccaggacccggagaagcaccaggagctggtccgcggcgtcttccagttgttatctgcgaggccggagggtgtgagcaatttcgtcgaggccgatgcaatctttggaccgggaacgagactggtctacaagcatttggcgacactatacttcatctttgtctttgatagctctgagaatgagcttgccatgctcgacctcgtacaagtttttgttgaaacattgaataggtgcttcaagaatgtatgtgagcttgacattgtatttaacttcaacaagcttcacacagttttggatgaaatgatactgggaggacaagtgattgaaacaagttcagagcaaataatgaaatctgtagaagagattgcgaggttagagaaacaatcaagcacaactagcctcataccaaagtcgatatcggagcgtttcagccgttaaaattttccgcttgtgttttggaccgacagttttggagacttgagcaaaagaaatcaaattgatgatcatatctccgatggtctttcagttctctgaagtcttgagcatctgccattcaacatgaaaacctattggctgacgtgcacagcagattgtctccctccccagagttgtaagttgtaacctgaaatgtgaagctggcatgtccagtctatacagctgttatgtgtaaacttatacagttggagtactagtctagttatgtggctctgtgacggtgtgcaaatgtagcaagccagagatttatttctgaccacatttctatggtgat

SEQ ID NO: 32329 - protein, 166 aa, Triticum aestivum
MIQAVMVISTLGKPRLLKFYDFQDPEKHQELVRGVFQLLSARPEGVSNFVEADAIFGPGTRLVYKHLATLYFIFVFDSSENELAMLDLVQVFVETLNRCFKNVCELDIVFNFNKLHTVLDEMILGGQVIETSSEQIMKSVEEIARLEKQSSTTSLIPKSISERFSR

SEQ ID NO: 32330 - protein, 161 aa, Triticum aestivum
MVISTLGKPRLLKFYDFQDPEKHQELVRGVFQLLSARPEGVSNFVEADAIFGPGTRLVYKHLATLYFIFVFDSSENELAMLDLVQVFVETLNRCFKNVCELDIVFNFNKLHTVLDEMILGGQVIETSSEQIMKSVEEIARLEKQSSTTSLIPKSISERFSR

SEQ ID NO: 32331 - protein, 103 aa, Triticum aestivum
HQVFPLIIPPAKLSRSGRFARVLLVGGHDPGGDGHQHSGQAPPPQVLRFPGPGEAPGAGPRRLPVVICEAGGCEQFRRGRCNLWTGNETGLQAFGDTILHLCL

SEQ ID NO: 32332 - DNA, 1194 bp, Triticum aestivum
attcaccacttcatctctcctccctctttctcttccctctatatatacgcacccccacccagttcttgcttcctctctctcttccaccacctccatctcctaatcacaagccatcttgcatacacggagagagaaagagaagccaagagatcagcagctgctcgagtagctcgcgtggaggtgtccaaggtgggagacccaagcacgggctagctagccgaccagctgctccgccggagccgatggctggcgccgacgtcgacgtcgggacggagctcaggctcgggctgcccgggggcggcgccgaggcggccaaggccgggaagaggggctatgaggacaccattgacttgaagctcacgctgcccaccggcggcatgcaggaagactctgccggcaagccggagccagccgccgacaaggccaagaggcccgctgaggccgcggccgccgaccccgagaagccacctgctcccaaggcacaggccgtgggttggccaccagtccggtcgtaccgcaggaacgccatgaccgtccagtcggtgaagatcaagaaggaggaggagaccgagaagcagcagcctgctgctgccgctgctgctggtgccaacggctccaactttgtcaaggtgagcatggacggcgcgccctacctgcgcaaggtggatctcaagatgtacaacacctacaaggacctctccattgctctgcagaagatgttcagcaccttcaccgcaactgggaatgaggggaagatggttgaggcagtgaacggttcagatgttgttactacttacgaagacaaggatggagactggatgcttgttggagacgtcccatgggagatgtttgttgcttcatgcaaacgcttgaggatcatgaaggggtccgaagccatcggtcttgcaccaagggccaaggacaagtacaagaacaagagctaaagatggggcagtaagaggaagactatgatgccacaaggatggtgttcttgcagtgtgctatggtttcttagatatataatgttttcaattattagctggattaaaagaagggagagttgccatgtttaatttgttggtggaccagaagcaataatctatctgtagttagctgttcgtgctatgtcgtcttgtaacttgtgctggttcatgatctggagaaatagtaacagcgcttatttcggttctttct

SEQ ID NO: 32333 - protein, 313 aa, Triticum aestivum
SPLHLSSLFLFPLYIRTPTQFLLPLSLPPPPSPNHKPSCIHGERKRSQEISSCSSSSRGGVQGGRPKHGLASRPAAPPEPMAGADVDVGTELRLGLPGGGAEAAKAGKRGYEDTIDLKLTLPTGGMQEDSAGKPEPAADKAKRPAEAAAADPEKPPAPKAQAVGWPPVRSYRRNAMTVQSVKIKKEEETEKQQPAAAAAAGANGSNFVKVSMDGAPYLRKVDLKMYNTYKDLSIALQKMFSTFTATGNEGKMVEAVNGSDVVTTYEDKDGDWMLVGDVPWEMFVASCKRLRIMKGSEAIGLAPRAKDKYKNKS

SEQ ID NO: 32334 - protein, 233 aa, Triticum aestivum
MAGADVDVGTELRLGLPGGGAEAAKAGKRGYEDTIDLKLTLPTGGMQEDSAGKPEPAADKAKRPAEAAAADPEKPPAPKAQAVGWPPVRSYRRNAMTVQSVKIKKEEETEKQQPAAAAAAGANGSNFVKVSMDGAPYLRKVDLKMYNTYKDLSIALQKMFSTFTATGNEGKMVEAVNGSDVVTTYEDKDGDWMLVGDVPWEMFVASCKRLRIMKGSEAIGLAPRAKDKYKNKS

SEQ ID NO: 32335 - protein, 188 aa, Triticum aestivum
MQEDSAGKPEPAADKAKRPAEAAAADPEKPPAPKAQAVGWPPVRSYRRNAMTVQSVKIKKEEETEKQQPAAAAAAGANGSNFVKVSMDGAPYLRKVDLKMYNTYKDLSIALQKMFSTFTATGNEGKMVEAVNGSDVVTTYEDKDGDWMLVGDVPWEMFVASCKRLRIMKGSEAIGLAPRAKDKYKNKS

SEQ ID NO: 32336 - DNA, 932 bp, Triticum aestivum
gcaaccctagctgtagtgcagcgtatcccacttcccacctaacccctacccctatccctccgaaccccgcaccaagatggcggcgccgacgaccttctccggcgaggtgtgggcggagctgcgcctggcggacgcgcgcgacgtgccgcacatccacagcctcatccaccagatggcggagttcgagctcctcaccgacctcttcgccgccacccacgagctcctggcctccacgctcttccccacgccccagccggcccccttcacctccttcaccgccctcatcctcgacctctctccgtcccccgccccggcctccgccgacaccgtcggctcccgccgcctcgacctctcggcgtccccgctcgccgacccggaggcggccgccttcccgtccccgcgcggcggcgggcgcgtcacggccgggttcgtcatctgctttcccaactactccaccttcctcgccaagcccgggctgtacgtggaggacatcttcgtgcgcgcgccctggcgccgccgcgggctcggccggatgatgctgtccgccgtcgccggcagggccgcggagatcggaatgggccgcgtggagtggtgcgtgctcgactggaaccagaacgccatcgacttctacgaggggatgggcgccgaggtgttcaagcagtggcgcatctgccggctcaccggtcccgccctcgacaagtacaagggcaccggcagccaggaggaggaggacgccggcgggaaggcccagtaggcctgtaggagaggagagatcggggctccggtgactggtaataataaaggtggtagattttgcctccacttggtgatgtattcttccttgctagtactgatagtgatttagtgcattggtatgttcttcatggagatgcattatggacctgttcttgccttccttggaaggagtattg

SEQ ID NO: 32337 - protein, 225 aa, Triticum aestivum
MAAPTTFSGEVWAELRLADARDVPHIHSLIHQMAEFELLTDLFAATHELLASTLFPTPQPAPFTSFTALILDLSPSPAPASADTVGSRRLDLSASPLADPEAAAFPSPRGGGRVTAGFVICFPNYSTFLAKPGLYVEDIFVRAPWRRRGLGRMMLSAVAGRAAEIGMGRVEWCVLDWNQNAIDFYEGMGAEVFKQWRICRLTGPALDKYKGTGSQEEEDAGGKAQ

SEQ ID NO: 32338 - protein, 193 aa, Triticum aestivum
MAEFELLTDLFAATHELLASTLFPTPQPAPFTSFTALILDLSPSPAPASADTVGSRRLDLSASPLADPEAAAFPSPRGGGRVTAGFVICFPNYSTFLAKPGLYVEDIFVRAPWRRRGLGRMMLSAVAGRAAEIGMGRVEWCVLDWNQNAIDFYEGMGAEVFKQWRICRLTGPALDKYKGTGSQEEEDAGGKAQ

SEQ ID NO: 32339 - protein, 177 aa, Triticum aestivum
NPSCSAAYPTSHLTPTPIPPNPAPRWRRRRPSPARCGRSCAWRTRATCRTSTASSTRWRSSSSSPTSSPPPTSSWPPRSSPRPSRPPSPPSPPSSSTSLRPPPRPPPTPSAPAASTSRRPRSPTRRRPPSRPRAAAGASRPGSSSAFPTTPPSSPSPGCTWRTSSCARPGAAAGSAG

SEQ ID NO: 32340 - DNA, 531 bp, Triticum aestivum
cgtatacctgatgggaaatttcaggctgctttcctgacgtaccattctcttggacactgggttcatcgaggaagctcatcagaccaggctggccatagtcatgctgtcttgccagtcatgggtttgcaatcttacaacgacaagggggagtggtggtttcagacgagcagatctggttcgggggatgcagagtcctcgtcgagtcggccgtctcaggttcttcaagaaaggttgtcgacgctgaaccaagccgcggcggcgatggccagggccgacgtgtggaagaaggaccaggctcgcagaaacaggcacccggactacgagttcttcctgtcccggcagcaacggtagacagacgactccaggctttttgcgcgtacaatgtgttcaaaatgctgacggacgaacgtttgttcccttgtaaccagaagcaagcatgcggactgagcggtgccgtctgcgtgtgttaccaccctgtatatatttgagatagaggtacatgtcatgtggaggtgctgctcaattgaaagg

SEQ ID NO: 32341 - protein, 116 aa, Triticum aestivum
RIPDGKFQAAFLTYHSLGHWVHRGSSSDQAGHSHAVLPVMGLQSYNDKGEWWFQTSRSGSGDAESSSSRPSQVLQERLSTLNQAAAAMARADVWKKDQARRNRHPDYEFFLSRQQR

SEQ ID NO: 32342 - protein, 77 aa, Triticum aestivum
MGLQSYNDKGEWWFQTSRSGSGDAESSSSRPSQVLQERLSTLNQAAAAMARADVWKKDQARRNRHPDYEFFLSRQQR

SEQ ID NO: 32343 - DNA, 1819 bp, Triticum aestivum
cccgttccgtgtcggcgagccctccaccaccaccaccacctcctttccccctcctcgccctcccgcggccaccaaccggccccgatcccggatccggcgcggcagatccggatcccggcgatggcgtccacggcggcgaggcggctcagggagctgcaggggcagcccgggaacaagacgtgcgtcgactgcgcgcagaggaacccgcagtgggccagcgtctcctacggcgtcttcatgtgcctcgagtgctccggcaagcaccggggcctcggcgtgcacatcagcttcgtccgctccgtcaccatggactcctggaccgagccgcagctccgcaagatggaggccgggggcaacgaccgcctcaacgccttcctcaccgcgcggggcgtgcccaaggacacgccccacatccccaagtacaactccaacgccgccgccgcctaccgcgaccgcatcgtcgccctcgccgagggccgcgcgtggaccgacccgcccgtcgttaaggagacgcccggatctggcgcccccgcccccgccaggaggccgcccttgcccgccggagtagggggcggaggcggtggcggtggcggtggatgggacgattgggacgacgaggtccgtccggatatgcgtaggaaccaatcggccggatcgtttgctggcgctggagcggattcggggagacagccgacgaggtccaagtccactcaggacatatacaccaagcaggagcttgaggcgtcggcggccagcaaggaggattttttcgctaggagaatggcggagaacgagtccaagcctcaggggatccctccctctcagggcggcaagtacgttggcttcggatccaccccgccgccgtcggcgaacaggaacaacaacggtgctgcccagggcgatgtcatgcaggtcgtttcccagggatttggacgcctttcgcttgttgcagcatctgctgcccaatctgctgctactgttgtccaagttggcacaaaagagattcaatcaaagatgagggaagggggttatgatcagaaggtgaatgaaactgtcaatgttgtaaccaataaaactgcagagataggaagcagaacctgggggattatgaaaggagtgatggcattggcgacacaaaaggtagaggaatatgccaaggaagggggagtgggtggtggctggggtgatgattggcaacaaagggagcagcagaacaacagcaacgagccttaccgcaggtatgatcaggagaccagcaacggcaacggctggaattctccgcaagatggatcagcgaagaaccagaaccacaattccaattcttgggatgattgggatgaccaagacaagaaggaagagcctgccaagacaagccagagcagcgactcgtgggccggctgggatgatgcgaaagatgacggttttgatagttacagccatcacagcccagccaacaagggtgggagcaatcagaatggaactgcgggggggtcatattgggccgacggcggcttccgctgatgctggtctctttgtgagagccatatactttgcagagttatatgccagaaaaatgtgagcgtggttattatttcaggatacctaagtgttggagagtaaaagagttttttttttgtaagttgtctacaattgttatgtctagcggcatgttcatatggccaagcctcatttgaaactgccatccccagctattaagaagcgtcgaattgaaattgtaatctacacatacatacttcccctgcagattctttattccttgtgctgatttgtcgtagttgcaagtggcaagaggggtggc

SEQ ID NO: 32344 - protein, 506 aa, Triticum aestivum
PVPCRRALHHHHHLLSPSSPSRGHQPAPIPDPARQIRIPAMASTAARRLRELQGQPGNKTCVDCAQRNPQWASVSYGVFMCLECSGKHRGLGVHISFVRSVTMDSWTEPQLRKMEAGGNDRLNAFLTARGVPKDTPHIPKYNSNAAAAYRDRIVALAEGRAWTDPPVVKETPGSGAPAPARRPPLPAGVGGGGGGGGGGWDDWDDEVRPDMRRNQSAGSFAGAGADSGRQPTRSKSTQDIYTKQELEASAASKEDFFARRMAENESKPQGIPPSQGGKYVGFGSTPPPSANRNNNGAAQGDVMQVVSQGFGRLSLVAASAAQSAATVVQVGTKEIQSKMREGGYDQKVNETVNVVTNKTAEIGSRTWGIMKGVMALATQKVEEYAKEGGVGGGWGDDWQQREQQNNSNEPYRRYDQETSNGNGWNSPQDGSAKNQNHNSNSWDDWDDQDKKEEPAKTSQSSDSWAGWDDAKDDGFDSYSHHSPANKGGSNQNGTAGGSYWADGGFR

SEQ ID NO: 32345 - protein, 466 aa, Triticum aestivum
MASTAARRLRELQGQPGNKTCVDCAQRNPQWASVSYGVFMCLECSGKHRGLGVHISFVRSVTMDSWTEPQLRKMEAGGNDRLNAFLTARGVPKDTPHIPKYNSNAAAAYRDRIVALAEGRAWTDPPVVKETPGSGAPAPARRPPLPAGVGGGGGGGGGGWDDWDDEVRPDMRRNQSAGSFAGAGADSGRQPTRSKSTQDIYTKQELEASAASKEDFFARRMAENESKPQGIPPSQGGKYVGFGSTPPPSANRNNNGAAQGDVMQVVSQGFGRLSLVAASAAQSAATVVQVGTKEIQSKMREGGYDQKVNETVNVVTNKTAEIGSRTWGIMKGVMALATQKVEEYAKEGGVGGGWGDDWQQREQQNNSNEPYRRYDQETSNGNGWNSPQDGSAKNQNHNSNSWDDWDDQDKKEEPAKTSQSSDSWAGWDDAKDDGFDSYSHHSPANKGGSNQNGTAGGSYWADGGFR

SEQ ID NO: 32346 - protein, 427 aa, Triticum aestivum
MCLECSGKHRGLGVHISFVRSVTMDSWTEPQLRKMEAGGNDRLNAFLTARGVPKDTPHIPKYNSNAAAAYRDRIVALAEGRAWTDPPVVKETPGSGAPAPARRPPLPAGVGGGGGGGGGGWDDWDDEVRPDMRRNQSAGSFAGAGADSGRQPTRSKSTQDIYTKQELEASAASKEDFFARRMAENESKPQGIPPSQGGKYVGFGSTPPPSANRNNNGAAQGDVMQVVSQGFGRLSLVAASAAQSAATVVQVGTKEIQSKMREGGYDQKVNETVNVVTNKTAEIGSRTWGIMKGVMALATQKVEEYAKEGGVGGGWGDDWQQREQQNNSNEPYRRYDQETSNGNGWNSPQDGSAKNQNHNSNSWDDWDDQDKKEEPAKTSQSSDSWAGWDDAKDDGFDSYSHHSPANKGGSNQNGTAGGSYWADGGFR

SEQ ID NO: 32347 - DNA, 616 bp, Triticum aestivum
accattacagtacacaccacctcaagcgaaagcagcagaagccacagcccaagctcaagctcaagctctcctcttcactcctgcaatggcgcgcatccagctcgtggctctggccctgaccatgctcttcgccgccaccgcggcccaggccccggcggccaccccgatgcccgcgcccgtggccccggtgtccccgcccccgacgatgccgccgccgaccccggcgccggtgtcccccccgccggccgtggccccggccacccctcccccggcgccggcgcccgccgcaccggctcccgcccccatggtccctgccccaacaaggcccactaggcggcacagctcttcagatctgagtgccccgtttacccttgctcctttacctacctcctgattctgcagcaagtcataccctatacctatcagtactagtattagtcgccgtagcgtttccccctgctgctcgatgcgagcttggttccagaagaattgctggtggtgtgttcgttaagatccaagttattttgctgtctctctgtgatgaggacacagatctatctatgtgttggatggactaagttatcgaagtcaagtttggtgtcttgtagattgatca

SEQ ID NO: 32348 - protein, 130 aa, Triticum aestivum
PLQYTPPQAKAAEATAQAQAQALLFTPAMARIQLVALALTMLFAATAAQAPAATPMPAPVAPVSPPPTMPPPTPAPVSPPPAVAPATPPPAPAPAAPAPAPMVPAPTRPTRRHSSSDLSAPFTLAPLPTS

SEQ ID NO: 32349 - protein, 110 aa, Triticum aestivum
TITVHTTSSESSRSHSPSSSSSSPLHSCNGAHPARGSGPDHALRRHRGPGPGGHPDARARGPGVPAPDDAAADPGAGVPPAGRGPGHPSPGAGARRTGSRPHGPCPNKAH

SEQ ID NO: 32350 - protein, 102 aa, Triticum aestivum
MARIQLVALALTMLFAATAAQAPAATPMPAPVAPVSPPPTMPPPTPAPVSPPPAVAPATPPPAPAPAAPAPAPMVPAPTRPTRRHSSSDLSAPFTLAPLPTS

SEQ ID NO: 32351 - DNA, 1059 bp, Triticum aestivum
acttgtagtggcccactgtgaaaggccagcgtctggctcctctgctcctcctcatcccctccgccgccgcgctgctgctcaaccagaacggagagcttgcaagatcagcgttgcggtccacacgctcggccccgcaaggtcgccgcctctgtgaaggccgccccaccgaataagaagaaggggaagaaaccaaacctcgtcatgaagagcttccctgtggccggcggccgcagcgtctccctcgccctcttctccgatgtctccaacagccgggagctcctagatctgatgcagtcagggaagctggagccggaggccgcttttctcaatgcatcactggtgccgggcgtgttcccggtcctcgcggcggcgcacaaagcgctgctctccaagtcgagggagtcgctgaccacgagaaccctgcactcggagcttgtctataattgctctggctcgaagcatataactgagtccctaaagcggtgcggtatcgctgatgacacgcagtatatccttgcggctcggtttgatgcttcagatgaagagatgaaagctctggaaaagctcatcagcggaaccgagattgatctgtcggaattggagacaagagcagaccaaccaaagattctgaagcaatacaaaataactccacaagaattatcaatatctacactgccagaggcaatcgtgtgcaggattgctgctcgagacgccctctgaggtcttaaaaacgatggccaggacgttctgcagctgtgtgtgtcaaattctttggacgatcaccgcatctgccgcacctcctgtcgatggtcaagctcgtggcggcaggatgtttcaactcatgaacttaggaattgcattacggtaacattcagtcctggatgctgtagcgacaactgaataatatgtatggtcacaggctcacggcttgagtgtttctaagatcacttcatcaagatttaatgcaagcaaccttcagttgatatcgcgatgttgactcggatctgttgtttcggtgacactgcagaacatgagtaaaatcagcgaaatatgtgtggc

SEQ ID NO: 32352 - protein, 172 aa, Triticum aestivum
MKSFPVAGGRSVSLALFSDVSNSRELLDLMQSGKLEPEAAFLNASLVPGVFPVLAAAHKALLSKSRESLTTRTLHSELVYNCSGSKHITESLKRCGIADDTQYILAARFDASDEEMKALEKLISGTEIDLSELETRADQPKILKQYKITPQELSISTLPEAIVCRIAARDAL

SEQ ID NO: 32353 - protein, 143 aa, Triticum aestivum
MQSGKLEPEAAFLNASLVPGVFPVLAAAHKALLSKSRESLTTRTLHSELVYNCSGSKHITESLKRCGIADDTQYILAARFDASDEEMKALEKLISGTEIDLSELETRADQPKILKQYKITPQELSISTLPEAIVCRIAARDAL

SEQ ID NO: 32354 - DNA, 1621 bp, Triticum aestivum
acgcacgcttccccaatcccatccagcaagcaagcagcagcgaggggtctccccgccgtcttccccgtcgccgtccgttaccgtcgtcgtcgccgcggtccagccctccggtcggcgctggttgctgacgcgtaggcgaaatccgtgcgagttctgcagatcgtcgccggcagacaatgtggggcgagagggctcatcacaggcatgggcaccatcacgaccacgttccgtccgggggttccaaggaccggcagcccaagttcatagcagacaactacagctcggtagatgaggtcattgctgcattgagagaagctgggcttgaatcatcaaatctaattcttggcatcgacttcaccaaaagcaatgaatggtcaggtaggcattcctttggaagaaaatctctgcatgccattagtggcactccaaatccatatgagcaagccatctctataattgggcgaacactatcaccttttgatgatgataacttgataccatgctttggatttggtgatgcttctacgcatgatcattctgtcttcagcttttaccaagaaaaccgtccttgccgtggttttgaggaggttcttgacagatacagacaaattgttccacatttgaacctttcaggaccaacttcttttgcacctcttatctacgcggcgatgtcagttgtcgaaagcagtaactgccaataccatgtcctcgtcatcatagctgatggacaggtgaccacttcaacttcaggtggaagattaagtccacaagaacaggcaactatacaagcgattgttgatgctagcttctatcctctttcaattgtgatggtgggggtgggcgatgggccatgggatgcaatgcagcattttgatgactgtattcctgacagagccttcgacaatttccagttcgtgaacttcactggtatcatgtcatcaagcaaggatatgtcaaagaaggaggccgcatttgcgcttgcagcgctgatggaaatacccacccaatacaaagcgactcaaggcctccgacctccagagaggcacgcacaaaacgccaaccctccgaggatccttccccctcccagcaaagttcttgaacgtgacaatattgtcgcagcttctcatactccagccgcaacctcgcagtcaaccgacgttggctacaccgtttcggatgaaaaggtatgtcccatctgcttaacgaatccaaaggacatggctttccaatgcggccatctgacatgcaaggaatgcgggccgacgctatcgacatgccccttgtgccgcgcgccaatcactgtccgtgtaaggctcttttcataaagatgatgcagacttctggaagtgaagaatcagccattcatgcaatatgttatcggcagtaatcaaggagcaagaagttgggcgggcaaggagatatgtacatgttcataaagctttactgtataacatgtccagcgccaactgtttcggctgtctgagtctgatgaataatttccatcacctcttgtgcagtttattcctgtcatcttgtaaaaaaagtagcagcagtagtcgtagttgaaaatcgtgttttcctgtaaaacctaaatgaatcaatacttcctccgtttttattg

SEQ ID NO: 32355 - protein, 382 aa, Triticum aestivum
MWGERAHHRHGHHHDHVPSGGSKDRQPKFIADNYSSVDEVIAALREAGLESSNLILGIDFTKSNEWSGRHSFGRKSLHAISGTPNPYEQAISIIGRTLSPFDDDNLIPCFGFGDASTHDHSVFSFYQENRPCRGFEEVLDRYRQIVPHLNLSGPTSFAPLIYAAMSVVESSNCQYHVLVIIADGQVTTSTSGGRLSPQEQATIQAIVDASFYPLSIVMVGVGDGPWDAMQHFDDCIPDRAFDNFQFVNFTGIMSSSKDMSKKEAAFALAALMEIPTQYKATQGLRPPERHAQNANPPRILPPPSKVLERDNIVAASHTPAATSQSTDVGYTVSDEKVCPICLTNPKDMAFQCGHLTCKECGPTLSTCPLCRAPITVRVRLFS

SEQ ID NO: 32356 - protein, 218 aa, Triticum aestivum
MSVVESSNCQYHVLVIIADGQVTTSTSGGRLSPQEQATIQAIVDASFYPLSIVMVGVGDGPWDAMQHFDDCIPDRAFDNFQFVNFTGIMSSSKDMSKKEAAFALAALMEIPTQYKATQGLRPPERHAQNANPPRILPPPSKVLERDNIVAASHTPAATSQSTDVGYTVSDEKVCPICLTNPKDMAFQCGHLTCKECGPTLSTCPLCRAPITVRVRLFS

SEQ ID NO: 32357 - DNA, 1876 bp, Triticum aestivum
atattcccgagagagaaagaatccagcccccacccgccgccgcgccgctgatagcgagcgtgacagagtcctcccccattaaacccccccgcccgccgccgcgtccaccgccaccgccagaccacgcagcccgcaatcgccgaccgaggcaccgccggtggtcggagaagcgctacgaacgccgaggacgcgcgccatggagggcagagcgccgctgctgccccggcgccaagaggcggccaagagcggcgggtggcgttgcggggcggcggcggcggaggccaggaaggtcgcgcacgtggcgctgccgatggcggccgtgagcgtggcgcagtacgccgtgcaggtggcctccaacatgatggtcggccacctccccgggggcgtgctggcgctctccgcctccgccatcgccacctccctcgcctccgtatccggattcagcctcctcattggaatgtcaaacggcttagaaactctctgtggtcaagcttacggggccgaacaatatggcagattgggagtgcaaacctacagagctatggtcaccctgacggctgtcagcattccaatctcacttctctggatattcatgggaaaactcctgaccctcataggccaggaccccgtgatctcgcatgaagccgggagatacataatgtggttgattccggccctctttgcatatgctgtcagccagcccctaacaaagttcttacagtctcagagtctgataatccctatgctctggtcctccattgcaacattgctcttgcacattcctgtttgctggttattggtgttcaagaccagccttgggtacattggagccgctttggcgataagcgtatcatactggttgaacgtgttcatgcttgttgcgtacatcggatgctcaaactcttgtaaggagacattctcgcctcccacactcgatgctttcagtggagtgggtgtgttcatgcgcttagccctgccgtctgcactaatgttatgttttgaatggtggtcatttgaggtcattattcttctgtctggacttctacccaatccagagctgcaaacttcagttctttctacatgcatgacaacaatcacattgatgtatactatagcgtacggaattggtgctgctggaagcactcgtgtatcaaatgaattaggtgctgggaatcctgaaggtgctcgactggctgtccgcgttgtgatgtctattgctgtgactgaggcagttctcatcactggggcactgttagcatcccagcacatcttgggctacgcatacagcagtgataaggaggttgttgattatgtcaatgcaatggttccgttcatctgcatctcagttgctgctgatagcctacaaggagttctctcaggtatcgctcgagggtgcgggtcgcagcacctgggcgcctatgttaacctcggttcgttctatctgtttgggattccaatgtccctcctactcgggtttgttctgaagatgggaggaaaggggctctggatgggcatttcctgcggctccatagtgcaattcctacttctgtccggcatagtgttcttcagcaactggcaaaagatgtctgacaatgcgagggagagggttttcggcggaaccccggcggagaaggagcctttgatgtctgatgtaacgggcgctgcctaattttctcgcgagttgctcaatcccttgacccgaacttgaagcggacgacacggcagcttaatcttgtcgctgtagatgacagtctcagagatgtgtgtatatagagaggcgagtttgctgaagaaccgaagaacttaagaactaactggtgcccgtagttgtaatgttgcaattttgctgaggtcggaaaagaatgatacatacagt

SEQ ID NO: 32358 - protein, 490 aa, Triticum aestivum
MEGRAPLLPRRQEAAKSGGWRCGAAAAEARKVAHVALPMAAVSVAQYAVQVASNMMVGHLPGGVLALSASAIATSLASVSGFSLLIGMSNGLETLCGQAYGAEQYGRLGVQTYRAMVTLTAVSIPISLLWIFMGKLLTLIGQDPVISHEAGRYIMWLIPALFAYAVSQPLTKFLQSQSLIIPMLWSSIATLLLHIPVCWLLVFKTSLGYIGAALAISVSYWLNVFMLVAYIGCSNSCKETFSPPTLDAFSGVGVFMRLALPSALMLCFEWWSFEVIILLSGLLPNPELQTSVLSTCMTTITLMYTIAYGIGAAGSTRVSNELGAGNPEGARLAVRVVMSIAVTEAVLITGALLASQHILGYAYSSDKEVVDYVNAMVPFICISVAADSLQGVLSGIARGCGSQHLGAYVNLGSFYLFGIPMSLLLGFVLKMGGKGLWMGISCGSIVQFLLLSGIVFFSNWQKMSDNARERVFGGTPAEKEPLMSDVTGAA

SEQ ID NO: 32359 - protein, 452 aa, Triticum aestivum
MAAVSVAQYAVQVASNMMVGHLPGGVLALSASAIATSLASVSGFSLLIGMSNGLETLCGQAYGAEQYGRLGVQTYRAMVTLTAVSIPISLLWIFMGKLLTLIGQDPVISHEAGRYIMWLIPALFAYAVSQPLTKFLQSQSLIIPMLWSSIATLLLHIPVCWLLVFKTSLGYIGAALAISVSYWLNVFMLVAYIGCSNSCKETFSPPTLDAFSGVGVFMRLALPSALMLCFEWWSFEVIILLSGLLPNPELQTSVLSTCMTTITLMYTIAYGIGAAGSTRVSNELGAGNPEGARLAVRVVMSIAVTEAVLITGALLASQHILGYAYSSDKEVVDYVNAMVPFICISVAADSLQGVLSGIARGCGSQHLGAYVNLGSFYLFGIPMSLLLGFVLKMGGKGLWMGISCGSIVQFLLLSGIVFFSNWQKMSDNARERVFGGTPAEKEPLMSDVTGAA

SEQ ID NO: 32360 - protein, 436 aa, Triticum aestivum
MMVGHLPGGVLALSASAIATSLASVSGFSLLIGMSNGLETLCGQAYGAEQYGRLGVQTYRAMVTLTAVSIPISLLWIFMGKLLTLIGQDPVISHEAGRYIMWLIPALFAYAVSQPLTKFLQSQSLIIPMLWSSIATLLLHIPVCWLLVFKTSLGYIGAALAISVSYWLNVFMLVAYIGCSNSCKETFSPPTLDAFSGVGVFMRLALPSALMLCFEWWSFEVIILLSGLLPNPELQTSVLSTCMTTITLMYTIAYGIGAAGSTRVSNELGAGNPEGARLAVRVVMSIAVTEAVLITGALLASQHILGYAYSSDKEVVDYVNAMVPFICISVAADSLQGVLSGIARGCGSQHLGAYVNLGSFYLFGIPMSLLLGFVLKMGGKGLWMGISCGSIVQFLLLSGIVFFSNWQKMSDNARERVFGGTPAEKEPLMSDVTGAA

SEQ ID NO: 32361 - DNA, 2132 bp, Triticum aestivum
caccgcatcgcacgaaaaacaccgaccttttttccagccgagacacgatgatccaccgccattagcagcggcggggaagcggcgatcgatcttccgtggccccgcgctcgcgtgctcgctctcgccggatcgggcctggcaaatggcgcgcgcggcctccctggcggcgctctgcctcctcctcctcgccgccgccgccgccgccggagctcgaatggacccgatttattctggccaactggtgccggactggagcagggaacccaagattaaaccgcagaatttctccctgaatcgagaggataatcttcagctcctaagcaggtcacgagatgtgactcgcaggaaattgggggagaggaccggtgtaataaagatggaaacagtacagcaggatgatgaagccctggttaaacttgagaatgcaggttttgagcgttcaaaagcagttgattctgctgtgctgggaaaatatagtctatggagacgcgaaaatgaaaacgagaaggcggatgcaaatgtccgtctgatgcgggaccaaatgatcatggctagaatatattccgtgcttgccaaatccagggacaagctcgatctttatcgggagctactcgccaggatcaaggaaagccagcgctcccttggggaagctactgctgattctgatctccctaagagtgcttctgagagagcaaaagcgatgggtctagttttatcaaaagcaagggatcaattgtacaattgcaaggaaattacccatcgtttaagatcaatgcttcagtcagctgatgagcaggtccggagcttaaagaagcagagcaccttcctcagtcagttggcagctaagacaataccgaatggcatacattgcttgtccatgcgcttaacaatagactattaccttctctctccagagaaaagaaagttccctaatagtgagaatttggaagatcctgatctttatcactatgctcttttttcggacaatgttctggcagcatcagttgtggttaactcaaccatcgtgaacgcaaaggagcctgagaagcatgtctttcatcttgttactgacaaactgaactttggggcaatgaacatgtggttcttgttgaatccacctggggatgccacaatccatgttgaaaatgtggatgacttcaaatggttgaactcttcgtactgccctgttttgaagcagctcgagtctgcagccatgaaagagtactactttaaggcagatcgtcaaaaaactctctctgctgggtcctctaatctgaagtaccgaaacccaaaatatctgtccatgctcaaccatctaagattttacctgccacaagtctatcctaagttgaataaaatccttttcctcgatgacgacattgtggtccagaaggacttgaccggactgtgggatgttgatcttaatgggaatgtaaatggtgctgtggaaacgtgcggggagagcttccaccgatttgacaagtacctcaatttctcgaacccaaatatttcgcagaattttgatcctaacgcatgtggttgggcttatggaatgaatatatttgatctggaggagtggaagaagaaggacattactggaatttaccataagtggcagaacatgaatgaaaacaggctgctgtggaaactggggacgcttccgccaggcctgatgactttctacaagctgacgcaccccctggacaaatcatggcatgtgcttgggttagggtacaacccgacggtcgagcacgcggagatcgacaccgccgccgtcatccactacaacgggaacatgaagccgtggctggagattgcgatgaccaagtaccggccttactggacgcagtacatcaactacgagcactcctatgtccggggctgcaagatcagtcaataggcagtagctagaagaggagcattcgcttcgacaggactactaaagaaagaaagtgtttccctgttggtagtgcagttatagcgcatgttcttcgttcgtgttattagatttgttttggttggtatcttttctgctgtatgtagcttcctcgcccgattcgttgtgctgcctcgactagtctgctgcggcacgtgttacatgttattctcttgaaaagaatggtgaacttggc

SEQ ID NO: 32362 - protein, 632 aa, Triticum aestivum
TASHEKHRPFFQPRHDDPPPLAAAGKRRSIFRGPALACSLSPDRAWQMARAASLAALCLLLLAAAAAAGARMDPIYSGQLVPDWSREPKIKPQNFSLNREDNLQLLSRSRDVTRRKLGERTGVIKMETVQQDDEALVKLENAGFERSKAVDSAVLGKYSLWRRENENEKADANVRLMRDQMIMARIYSVLAKSRDKLDLYRELLARIKESQRSLGEATADSDLPKSASERAKAMGLVLSKARDQLYNCKEITHRLRSMLQSADEQVRSLKKQSTFLSQLAAKTIPNGIHCLSMRLTIDYYLLSPEKRKFPNSENLEDPDLYHYALFSDNVLAASVVVNSTIVNAKEPEKHVFHLVTDKLNFGAMNMWFLLNPPGDATIHVENVDDFKWLNSSYCPVLKQLESAAMKEYYFKADRQKTLSAGSSNLKYRNPKYLSMLNHLRFYLPQVYPKLNKILFLDDDIVVQKDLTGLWDVDLNGNVNGAVETCGESFHRFDKYLNFSNPNISQNFDPNACGWAYGMNIFDLEEWKKKDITGIYHKWQNMNENRLLWKLGTLPPGLMTFYKLTHPLDKSWHVLGLGYNPTVEHAEIDTAAVIHYNGNMKPWLEIAMTKYRPYWTQYINYEHSYVRGCKISQ

SEQ ID NO: 32363 - protein, 585 aa, Triticum aestivum
MARAASLAALCLLLLAAAAAAGARMDPIYSGQLVPDWSREPKIKPQNFSLNREDNLQLLSRSRDVTRRKLGERTGVIKMETVQQDDEALVKLENAGFERSKAVDSAVLGKYSLWRRENENEKADANVRLMRDQMIMARIYSVLAKSRDKLDLYRELLARIKESQRSLGEATADSDLPKSASERAKAMGLVLSKARDQLYNCKEITHRLRSMLQSADEQVRSLKKQSTFLSQLAAKTIPNGIHCLSMRLTIDYYLLSPEKRKFPNSENLEDPDLYHYALFSDNVLAASVVVNSTIVNAKEPEKHVFHLVTDKLNFGAMNMWFLLNPPGDATIHVENVDDFKWLNSSYCPVLKQLESAAMKEYYFKADRQKTLSAGSSNLKYRNPKYLSMLNHLRFYLPQVYPKLNKILFLDDDIVVQKDLTGLWDVDLNGNVNGAVETCGESFHRFDKYLNFSNPNISQNFDPNACGWAYGMNIFDLEEWKKKDITGIYHKWQNMNENRLLWKLGTLPPGLMTFYKLTHPLDKSWHVLGLGYNPTVEHAEIDTAAVIHYNGNMKPWLEIAMTKYRPYWTQYINYEHSYVRGCKISQ

SEQ ID NO: 32364 - protein, 561 aa, Triticum aestivum
MDPIYSGQLVPDWSREPKIKPQNFSLNREDNLQLLSRSRDVTRRKLGERTGVIKMETVQQDDEALVKLENAGFERSKAVDSAVLGKYSLWRRENENEKADANVRLMRDQMIMARIYSVLAKSRDKLDLYRELLARIKESQRSLGEATADSDLPKSASERAKAMGLVLSKARDQLYNCKEITHRLRSMLQSADEQVRSLKKQSTFLSQLAAKTIPNGIHCLSMRLTIDYYLLSPEKRKFPNSENLEDPDLYHYALFSDNVLAASVVVNSTIVNAKEPEKHVFHLVTDKLNFGAMNMWFLLNPPGDATIHVENVDDFKWLNSSYCPVLKQLESAAMKEYYFKADRQKTLSAGSSNLKYRNPKYLSMLNHLRFYLPQVYPKLNKILFLDDDIVVQKDLTGLWDVDLNGNVNGAVETCGESFHRFDKYLNFSNPNISQNFDPNACGWAYGMNIFDLEEWKKKDITGIYHKWQNMNENRLLWKLGTLPPGLMTFYKLTHPLDKSWHVLGLGYNPTVEHAEIDTAAVIHYNGNMKPWLEIAMTKYRPYWTQYINYEHSYVRGCKISQ

SEQ ID NO: 32365 - DNA, 1763 bp, Triticum aestivum
accaccaccgtcctcatctcctcctcgagcccctcccccctcctccgcatctcgccaccaacctccccccgatccccaacccccatgatccgcaggaggcgcgggcacgccgccgcctagggtttccactccccgccccccccgatggagtcgctgccgcggaagcgcaagggcgcgcgctccctcgccggctccctccacgacgcctccgcggaccgcaagcggacctgccgggagcggaagccgcgccccgacaagaagaaaaagaagccctccaccgccggcgatgacgccgccaccgcctccggccggggcggcgtggtcatgacggcgccgccggccagcggccgggccgccccggacagccccggaagggggctcaagcgcaaggtcggctgcatcgagtccgccacccggataggccgcaagaagcgcctcgaggccgagtacgagctcggcgacgagatcggccagggcaagttcggctccgtccggatctgccgcgccaaggccggcggcgaggagttcgcctgcaaggcgctccccaagaacggcgaggagacggtccaccgcgaggtcgagatcatgcagcacctctccggccaccccggcgtcgtcacgctcaaggccgtcttcgaggacgccgacaagttctacctcgtcatggagctctgcagcggcggccgcttgctcgacgagatggccagggacggcaccttctccgagcagcgagccgcccttgtcatcaaggatctaatgtcggtcgtcaagtactgccatgaaatgggcgtcatccacagggacattaagccggagaatattttgctcaccaagactgggaagatgaaactagcagattttggattggcagcacgagttactaacggtcagaaattgtctggcgttgctgggagcccagcctatgtggcgcctgaggtgttgtcaggaagctattctgagaaagtagacatatggggtgctggggtgctcctccatgtactactgcttggttcacttccatttcaagggggctctctggaagctgtctttgaagctataaagacagttgagcttgatttcaacagcggtccatgggaatcaatgtcagttcttggacgggatcttataagtcgaatgttagatcgagatgtctcttctagaataactgctgatcaagttctttgtcatccatgggtgttgttctacacggaatgtaccctgaaggctgtaacacctaatgtcactaacaagattgtagcacccaaaattacatgggacagaattagatcacattgtgagtcgtcagcttcagattcgtctagccagaggtcggaggaccaggatgaatgtggcatagtcgacgcactgacagcggcaataacacatgttagaatatcggagccgaaaaggacccggctttgcagccccggcattcccatacagcaggagtgctcctcaaacataaagagcaacctgtgtacggcgttctgacatgaccccaatgtatagccccttgtgtgttggtctgatgtcagtgatggctcgccctgctggttgtctctgtgctgaggataataactcgggttttcctgtcagagcaagcaagcgttcgacatggtgatgctgtagattgcggtgatggctgatgaacccgacatggtagctgatgctgtaaattttgtaaatagaatgatccatgtagctaatttatatcttgagagagttgagaataatttcagtctatgatgaacatagtgcgcgcc

SEQ ID NO: 32366 - protein, 448 aa, Triticum aestivum
MESLPRKRKGARSLAGSLHDASADRKRTCRERKPRPDKKKKKPSTAGDDAATASGRGGVVMTAPPASGRAAPDSPGRGLKRKVGCIESATRIGRKKRLEAEYELGDEIGQGKFGSVRICRAKAGGEEFACKALPKNGEETVHREVEIMQHLSGHPGVVTLKAVFEDADKFYLVMELCSGGRLLDEMARDGTFSEQRAALVIKDLMSVVKYCHEMGVIHRDIKPENILLTKTGKMKLADFGLAARVTNGQKLSGVAGSPAYVAPEVLSGSYSEKVDIWGAGVLLHVLLLGSLPFQGGSLEAVFEAIKTVELDFNSGPWESMSVLGRDLISRMLDRDVSSRITADQVLCHPWVLFYTECTLKAVTPNVTNKIVAPKITWDRIRSHCESSASDSSSQRSEDQDECGIVDALTAAITHVRISEPKRTRLCSPGIPIQQECSSNIKSNLCTAF

SEQ ID NO: 32367 - protein, 388 aa, Triticum aestivum
MTAPPASGRAAPDSPGRGLKRKVGCIESATRIGRKKRLEAEYELGDEIGQGKFGSVRICRAKAGGEEFACKALPKNGEETVHREVEIMQHLSGHPGVVTLKAVFEDADKFYLVMELCSGGRLLDEMARDGTFSEQRAALVIKDLMSVVKYCHEMGVIHRDIKPENILLTKTGKMKLADFGLAARVTNGQKLSGVAGSPAYVAPEVLSGSYSEKVDIWGAGVLLHVLLLGSLPFQGGSLEAVFEAIKTVELDFNSGPWESMSVLGRDLISRMLDRDVSSRITADQVLCHPWVLFYTECTLKAVTPNVTNKIVAPKITWDRIRSHCESSASDSSSQRSEDQDECGIVDALTAAITHVRISEPKRTRLCSPGIPIQQECSSNIKSNLCTAF

SEQ ID NO: 32368 - protein, 301 aa, Triticum aestivum
MQHLSGHPGVVTLKAVFEDADKFYLVMELCSGGRLLDEMARDGTFSEQRAALVIKDLMSVVKYCHEMGVIHRDIKPENILLTKTGKMKLADFGLAARVTNGQKLSGVAGSPAYVAPEVLSGSYSEKVDIWGAGVLLHVLLLGSLPFQGGSLEAVFEAIKTVELDFNSGPWESMSVLGRDLISRMLDRDVSSRITADQVLCHPWVLFYTECTLKAVTPNVTNKIVAPKITWDRIRSHCESSASDSSSQRSEDQDECGIVDALTAAITHVRISEPKRTRLCSPGIPIQQECSSNIKSNLCTAF

SEQ ID NO: 32369 - DNA, 1981 bp, Triticum aestivum
gtagtcgcgtgcctccacctccactacaccgcaccgcgccatcagaaggccggccgggtcggtcggtgcaaggatattgcacacacacgctcgcagacacggtgtgacagcaattgcctccggcgatgtccgtttcttggccggcgccgtcgacgtgcgcggccgccggggccctcctggccgccgcgtggctgctgtgcttcaggctgttcccggccgtggcgaggccgagaaggcgggcgatgaagacgggggcgcagctccctcccggcatcttcgggtggccggtcgtcggcgagacgctggacttcgtctcctgcgcctactccccacgccccgaggcgttcgttgacaagcgccgcctccggtacggcagcgcggtgttccggtcgcacctgttcgggtcggcgacggtagtgacggcggacgcggaggtgaaccggttcgtgctgcagagcgacgcgcggtcgttcgtaccgtggtacccgcggtcgctgacggagctcatgggcaagtcctccatcctcgtcatcaacggcagcctgcagcgccgcgtccacggcctcgtcggcgccttcttcaagtcgccgcagctcaaggcgcaggtcaccgccgacatgcagcgccgcctcgccccggcgctcgccgcctggcgcgagcagggccccggcgcgcgcctccgcatccaggaccacgccaagacgattgtgttccagatcctggtgcgggctctgatcgggctggaggcaggcccagagatgcagcagctcaagcagcaattccaggaatttattgtcggactcatgtcccttcccattaagctgccagggactaggctctacagatccctccaggccaagaagaggatggcgagggtcgtacagaggatcatacaggagaagaggaggaggagggccctggacggcggcggcgcgccgagagacgccatcgacgtgctcatgggcgacggcagtgaggagctcaccgacgagctcatatccgacaacatgatcgacttcatgatccccgccgaggactccgtgccggtgctcatcacgctcgccgtcaagttcctcagcgagtgccccctcgccttgcaacagcttgaggaggagaacatgcagctcaagatgagaaaaaccgacctgggtgaaaccttgcaatggactgactacatgtccttgtcattcacgcagcatgtgataacggagacgctgcggattgggaatatcatcagtgggatcatgcgcaaggcggtccgcgacgtcgaagtgaaggggcatctcatccccaaaggatggcgtgtgttcatgtacttccggtcggtccacctcgacgacatgctctacgaggatccctgcaagttcaatccatggaggtggaagtgtgtcaatcaacaggagaaggacatgagcactagcagcttcaccccttttggtggtgggcagaggctgtgcccgggcctggatctggccaggctggaagcttccatctttctccaccacttggtcaccagcttcaggtgggtggccgaggaggaccacatcgtcaacttccccaccgtgcgcctcaagggaggcatgcccatcagggtcaccgccaaagactagctacccgttactcggaccatcgtccttgatcaactccccgcagcagccaagccagccaaaggctcaagttacatgtgcatatacataatgctactgctacaagtatgtggtgttatccatagcaaggttaaaagccccttcaaggagtaagctagctaggcaacatctgatgtgagtacataggggggtatgttgaagtgttgtaggggagcttaattagccaaggagtagtaggtgccactgatgatcactgtggctcgttaatcatagccgagggagactctgaccgatgatgcatgctgttatagtagtataagtagtagtatagtgctggtgtcacaaggaatagatatatcatctatgtatacatg

SEQ ID NO: 32370 - protein, 494 aa, Triticum aestivum
MSVSWPAPSTCAAAGALLAAAWLLCFRLFPAVARPRRRAMKTGAQLPPGIFGWPVVGETLDFVSCAYSPRPEAFVDKRRLRYGSAVFRSHLFGSATVVTADAEVNRFVLQSDARSFVPWYPRSLTELMGKSSILVINGSLQRRVHGLVGAFFKSPQLKAQVTADMQRRLAPALAAWREQGPGARLRIQDHAKTIVFQILVRALIGLEAGPEMQQLKQQFQEFIVGLMSLPIKLPGTRLYRSLQAKKRMARVVQRIIQEKRRRRALDGGGAPRDAIDVLMGDGSEELTDELISDNMIDFMIPAEDSVPVLITLAVKFLSECPLALQQLEEENMQLKMRKTDLGETLQWTDYMSLSFTQHVITETLRIGNIISGIMRKAVRDVEVKGHLIPKGWRVFMYFRSVHLDDMLYEDPCKFNPWRWKCVNQQEKDMSTSSFTPFGGGQRLCPGLDLARLEASIFLHHLVTSFRWVAEEDHIVNFPTVRLKGGMPIRVTAKD

SEQ ID NO: 32371 - protein, 455 aa, Triticum aestivum
MKTGAQLPPGIFGWPVVGETLDFVSCAYSPRPEAFVDKRRLRYGSAVFRSHLFGSATVVTADAEVNRFVLQSDARSFVPWYPRSLTELMGKSSILVINGSLQRRVHGLVGAFFKSPQLKAQVTADMQRRLAPALAAWREQGPGARLRIQDHAKTIVFQILVRALIGLEAGPEMQQLKQQFQEFIVGLMSLPIKLPGTRLYRSLQAKKRMARVVQRIIQEKRRRRALDGGGAPRDAIDVLMGDGSEELTDELISDNMIDFMIPAEDSVPVLITLAVKFLSECPLALQQLEEENMQLKMRKTDLGETLQWTDYMSLSFTQHVITETLRIGNIISGIMRKAVRDVEVKGHLIPKGWRVFMYFRSVHLDDMLYEDPCKFNPWRWKCVNQQEKDMSTSSFTPFGGGQRLCPGLDLARLEASIFLHHLVTSFRWVAEEDHIVNFPTVRLKGGMPIRVTAKD

SEQ ID NO: 32372 - protein, 367 aa, Triticum aestivum
MGKSSILVINGSLQRRVHGLVGAFFKSPQLKAQVTADMQRRLAPALAAWREQGPGARLRIQDHAKTIVFQILVRALIGLEAGPEMQQLKQQFQEFIVGLMSLPIKLPGTRLYRSLQAKKRMARVVQRIIQEKRRRRALDGGGAPRDAIDVLMGDGSEELTDELISDNMIDFMIPAEDSVPVLITLAVKFLSECPLALQQLEEENMQLKMRKTDLGETLQWTDYMSLSFTQHVITETLRIGNIISGIMRKAVRDVEVKGHLIPKGWRVFMYFRSVHLDDMLYEDPCKFNPWRWKCVNQQEKDMSTSSFTPFGGGQRLCPGLDLARLEASIFLHHLVTSFRWVAEEDHIVNFPTVRLKGGMPIRVTAKD

SEQ ID NO: 32373 - DNA, 1692 bp, Triticum aestivum
tagctagctagtgttatccgttagccgatgccgttggctggctttcgatcgatcacacgagacatgtggaaaccacgggcggccatgtattcagttcgtcgttagcgcgcgcgtagcagatagaagatggacgccttggcggggctctcggcccttgccgcggtggcgctgctgctgctgtacagcgtgcaccggtggaggagccctcggtgcaacggccggctcccgccggggtctatgggcctcccgctcgtcggcgagacgttccagttcttctccccggacgcctccttggacatccctcgcttcatccgacacaggctcacgaggtacggcccgatcttcaagacgagcgtggtggggcacccgatggtggtgtcggcggaccaggagctgaaccacatggtgttccagcaggagggggagctgttccagagctggtacccggactcgttcgtggagatcctcggccgcgataacgtcggggagcagaagggcaccatgttcaagtacctcaagaacatagttctcaggtacttcggcccggagagccttaaggagtccatccttggcgacgtcgagcgcgccgtctgcagctcgctctgcacctggtccaccctgccggccgtcgagctcaaagaagccgtctccaccatggtgtttgaactttccgcgagcaagctgctgggcctggagccgtcgaggtccaaggttctacggaagagcttcttcgacttcgtcagagggctcatctccttcccgctctacttgccaggaacagcctactacgcatgcatgcagggacggatgagtgtaatggaggtgctgcagcaggtgctggaggagaggacgagatcggctgaggcggccggaggacgggaagcacggtgccacggcgacttcctggactacgtcgtgcaggagatcaccaaggagaagcctgtcctgacggagggaatggcgctggacctcctgtttgtgctcctcttcgccagcttccacacgacgtcgctggccatcaccctggccgtcaagctcctcaccgagcaccctcgcgtcctggaggagctcacggtggagcatgaaacgattctgaacgagcgtgaggcaggcggcgagtctgatggcgacagagttacatggaaagagtacaaatccatgacattcacatcccaggtgataaacgagacggtccgactggccaacattgcgcctggcatcttcagaaagacactgaaagatgtacagttcagaggatacacaattccagctggatggggagtgatggtctgccctctcgcggtgcaccttaatccagatatttaccctgaccccctcaccttcaatccttcaaggttcaaggataaactagaggcaaaccgtgggttaagacacttcatggctttcggaggaggtctccggtcctgtgttggggcagacttcagcaagctacaaatggccattttccttcactttcttgtcaccaaatataggtggatacaactaggtggaggcaagatagtccggtgtccagggctggaatttcctgatggttacctcattcagatcagacagagagattaatcagcacctgctttcaagtcatgctagcagtaggaaaagcttatatctcacgtgtacaattgttctagcatgttgtttgatgaaataacacttgtgcagaagtattac

SEQ ID NO: 32374 - protein, 485 aa, Triticum aestivum
MDALAGLSALAAVALLLLYSVHRWRSPRCNGRLPPGSMGLPLVGETFQFFSPDASLDIPRFIRHRLTRYGPIFKTSVVGHPMVVSADQELNHMVFQQEGELFQSWYPDSFVEILGRDNVGEQKGTMFKYLKNIVLRYFGPESLKESILGDVERAVCSSLCTWSTLPAVELKEAVSTMVFELSASKLLGLEPSRSKVLRKSFFDFVRGLISFPLYLPGTAYYACMQGRMSVMEVLQQVLEERTRSAEAAGGREARCHGDFLDYVVQEITKEKPVLTEGMALDLLFVLLFASFHTTSLAITLAVKLLTEHPRVLEELTVEHETILNEREAGGESDGDRVTWKEYKSMTFTSQVINETVRLANIAPGIFRKTLKDVQFRGYTIPAGWGVMVCPLAVHLNPDIYPDPLTFNPSRFKDKLEANRGLRHFMAFGGGLRSCVGADFSKLQMAIFLHFLVTKYRWIQLGGGKIVRCPGLEFPDGYLIQIRQRD

SEQ ID NO: 32375 - protein, 448 aa, Triticum aestivum
MGLPLVGETFQFFSPDASLDIPRFIRHRLTRYGPIFKTSVVGHPMVVSADQELNHMVFQQEGELFQSWYPDSFVEILGRDNVGEQKGTMFKYLKNIVLRYFGPESLKESILGDVERAVCSSLCTWSTLPAVELKEAVSTMVFELSASKLLGLEPSRSKVLRKSFFDFVRGLISFPLYLPGTAYYACMQGRMSVMEVLQQVLEERTRSAEAAGGREARCHGDFLDYVVQEITKEKPVLTEGMALDLLFVLLFASFHTTSLAITLAVKLLTEHPRVLEELTVEHETILNEREAGGESDGDRVTWKEYKSMTFTSQVINETVRLANIAPGIFRKTLKDVQFRGYTIPAGWGVMVCPLAVHLNPDIYPDPLTFNPSRFKDKLEANRGLRHFMAFGGGLRSCVGADFSKLQMAIFLHFLVTKYRWIQLGGGKIVRCPGLEFPDGYLIQIRQRD

SEQ ID NO: 32376 - protein, 404 aa, Triticum aestivum
MVVSADQELNHMVFQQEGELFQSWYPDSFVEILGRDNVGEQKGTMFKYLKNIVLRYFGPESLKESILGDVERAVCSSLCTWSTLPAVELKEAVSTMVFELSASKLLGLEPSRSKVLRKSFFDFVRGLISFPLYLPGTAYYACMQGRMSVMEVLQQVLEERTRSAEAAGGREARCHGDFLDYVVQEITKEKPVLTEGMALDLLFVLLFASFHTTSLAITLAVKLLTEHPRVLEELTVEHETILNEREAGGESDGDRVTWKEYKSMTFTSQVINETVRLANIAPGIFRKTLKDVQFRGYTIPAGWGVMVCPLAVHLNPDIYPDPLTFNPSRFKDKLEANRGLRHFMAFGGGLRSCVGADFSKLQMAIFLHFLVTKYRWIQLGGGKIVRCPGLEFPDGYLIQIRQRD

SEQ ID NO: 32377 - DNA, 1889 bp, Triticum aestivum
actagtatataacaattcactcccatccaccaaccacaccaagaatcgcgagcgagcttgggatccggcttgaagttgccatggaggcggccgccgagctggcgcagcgcctgcgggccgcggccaacgaccggctggcggggcaggagccgctcctcctcgtcgccgcgccgctgctcgcgctcctcgccgcgcgcgccgtccacgccgccgccgccgacgtcgccgaccgcggcctccgcaccgtcctcatcaccctcgccatggccgccgtcaagttggtgccgggggtcagcggatacatcgccgccgagaagagcaaggttgttgagcagttgcagtcaggcagcgcgtccagcaagaagaacctgcgaaccgagctgcccgccgtcggggatcccgacggagtcatagacgagctccaggcgctcaaagacaaggatgtgagatggcagggcaaatgctccggcaccgtttatatcgctgggagcgagtctgaaggccatttttcacttataaacaaggcctactctatgttttcacacacaaatccactgcatcaggatgtattcaagagtgtggcacagttagaggctgaagtagtagcaatgacagctgctttgcttggcagcaaagaaaaggcgtctggtggacaaatttgtggcaatatgacgtcaggcgggactgaaagcatattgttggccgtcaaaacatcacgcgattatatgcaatcaaagaagggaatcacaaagcccgaaattataattgctgaatcagctcattctgcctatgacaaagctgctcaatatttcaatattaaagtgcggcgtgtacctgtgaataaagaatttcttgcagatgtaaaaggattcaaacggtgcataaatggaaacaccataatgatggttggatctgcaccaggatttccccatggtttaattgatcccatcgaggaacttggggagttggcttcacaatatggtatttgcttgcatgttgatctatgccttggtggcttcgtattgcctttcgcccgtaagcttgggtatcctattcctccttttgatttttctgtcaaaggtgttacgtcgatctcaacagatgttcataagtatgggctagccccaaaaggcaccagtactgtcctatacaggaatcatgaaattagaaagcaccaatttgttgctgtgacggaatggactggtgggctctatatttcccctactatggctggaagcaggccaggtggactagtcgcaggagcttgggctgcgatgatgtctcttggattgaatggttatttggaaagtactggtaaaatcatggaagtctcaaggaagatacaaaaaggaattgatgatatctcaggtttatttgtgattgggaagccagacatgaccgtcgtggcctttgggtcggacgcagtcgacatatttgaggtgaatgacataatgtcatcaaaaggatggcacctcaatgctcttcagagacccaacagtctgcacatctgcgtgacgcttcaacacacggctatctatgaggaattcctcaaggacctcgaggattctgtgaacacagtgaaagcgaatccagggcctatcagcggggggatggctccgatctacggcgcggctgggaagatgccggacagaggcacggtcaaggagttgcttgtggagttcatggacagctcttgctaaccattgactataccccattggttggtcatctctctgtaacatgcatatgtacaagccgcagtgacagtgttgtgtgatcttctatatttggtttggctcaaaactgaaggcacacaacacaatgcctccaatatagacatgtatctatgtatcagttacattggtcgcaataaagttacattttcagcc

SEQ ID NO: 32378 - protein, 539 aa, Triticum aestivum
MEAAAELAQRLRAAANDRLAGQEPLLLVAAPLLALLAARAVHAAAADVADRGLRTVLITLAMAAVKLVPGVSGYIAAEKSKVVEQLQSGSASSKKNLRTELPAVGDPDGVIDELQALKDKDVRWQGKCSGTVYIAGSESEGHFSLINKAYSMFSHTNPLHQDVFKSVAQLEAEVVAMTAALLGSKEKASGGQICGNMTSGGTESILLAVKTSRDYMQSKKGITKPEIIIAESAHSAYDKAAQYFNIKVRRVPVNKEFLADVKGFKRCINGNTIMMVGSAPGFPHGLIDPIEELGELASQYGICLHVDLCLGGFVLPFARKLGYPIPPFDFSVKGVTSISTDVHKYGLAPKGTSTVLYRNHEIRKHQFVAVTEWTGGLYISPTMAGSRPGGLVAGAWAAMMSLGLNGYLESTGKIMEVSRKIQKGIDDISGLFVIGKPDMTVVAFGSDAVDIFEVNDIMSSKGWHLNALQRPNSLHICVTLQHTAIYEEFLKDLEDSVNTVKANPGPISGGMAPIYGAAGKMPDRGTVKELLVEFMDSSC

SEQ ID NO: 32379 - protein, 478 aa, Triticum aestivum
MAAVKLVPGVSGYIAAEKSKVVEQLQSGSASSKKNLRTELPAVGDPDGVIDELQALKDKDVRWQGKCSGTVYIAGSESEGHFSLINKAYSMFSHTNPLHQDVFKSVAQLEAEVVAMTAALLGSKEKASGGQICGNMTSGGTESILLAVKTSRDYMQSKKGITKPEIIIAESAHSAYDKAAQYFNIKVRRVPVNKEFLADVKGFKRCINGNTIMMVGSAPGFPHGLIDPIEELGELASQYGICLHVDLCLGGFVLPFARKLGYPIPPFDFSVKGVTSISTDVHKYGLAPKGTSTVLYRNHEIRKHQFVAVTEWTGGLYISPTMAGSRPGGLVAGAWAAMMSLGLNGYLESTGKIMEVSRKIQKGIDDISGLFVIGKPDMTVVAFGSDAVDIFEVNDIMSSKGWHLNALQRPNSLHICVTLQHTAIYEEFLKDLEDSVNTVKANPGPISGGMAPIYGAAGKMPDRGTVKELLVEFMDSSC

SEQ ID NO: 32380 - protein, 388 aa, Triticum aestivum
MFSHTNPLHQDVFKSVAQLEAEVVAMTAALLGSKEKASGGQICGNMTSGGTESILLAVKTSRDYMQSKKGITKPEIIIAESAHSAYDKAAQYFNIKVRRVPVNKEFLADVKGFKRCINGNTIMMVGSAPGFPHGLIDPIEELGELASQYGICLHVDLCLGGFVLPFARKLGYPIPPFDFSVKGVTSISTDVHKYGLAPKGTSTVLYRNHEIRKHQFVAVTEWTGGLYISPTMAGSRPGGLVAGAWAAMMSLGLNGYLESTGKIMEVSRKIQKGIDDISGLFVIGKPDMTVVAFGSDAVDIFEVNDIMSSKGWHLNALQRPNSLHICVTLQHTAIYEEFLKDLEDSVNTVKANPGPISGGMAPIYGAAGKMPDRGTVKELLVEFMDSSC

SEQ ID NO: 32381 - DNA, 897 bp, Triticum aestivum
agattcaaagcgatcgttcaaagccatggcagggcactcgcccactctccctcatcttgtcttacttgagcaccggcagccatcatccgcctcccattaagaactccagaccgtcaccatggctgcctcttctcctcccaagtcccaacccatcactatggggcctcttccgccgctcgtattagcactctttctcctacctctcctctacttgttcttcaggggcggtagcaagggacgatcgacacagggagcaagaaacgctcccgggccgccgaaacagcttcccgtgctcggcaacctcctgcagctcggcggccggccacaccggtacttccagtcgctcacccagaagtacgggccggtggtgcaggtgcagctcggccgcgtgcggatggtcgtcgtcgcgtcgcctgaggcggccaaggaggttctccggacgaacgacctgcactgctgcagccgcccaaattcaccaggtgcgaggatgctgagctacaacttcctcgacgtggctttcggcccctacagcgactactggcgcgagatgcggaagctcctcgtgctggagctgctgagcgtgaggcgcgtccagtccttcgcctacgcccgggccgcagaggtggaccgccttgtctcctccctcgccggcacccctccgggcaccccggtcgacctcagcgagcagctgtacgcgctctcggacggcatcatcggcacggtggccttcgggaagatgtacgggtcggagtcgttcgagaggaccagcttccagcggatgatggacgagacgctgcgggtgctcggcagcttcacgttcgaggacttcttcccgtcgtcggcgctcgcacggtgggcggacgccctcaccggcgtggcgtcgcggcggcggagggt

SEQ ID NO: 32382 - protein, 259 aa, Triticum aestivum
MAASSPPKSQPITMGPLPPLVLALFLLPLLYLFFRGGSKGRSTQGARNAPGPPKQLPVLGNLLQLGGRPHRYFQSLTQKYGPVVQVQLGRVRMVVVASPEAAKEVLRTNDLHCCSRPNSPGARMLSYNFLDVAFGPYSDYWREMRKLLVLELLSVRRVQSFAYARAAEVDRLVSSLAGTPPGTPVDLSEQLYALSDGIIGTVAFGKMYGSESFERTSFQRMMDETLRVLGSFTFEDFFPSSALARWADALTGVASRRRR

SEQ ID NO: 32383 - protein, 246 aa, Triticum aestivum
MGPLPPLVLALFLLPLLYLFFRGGSKGRSTQGARNAPGPPKQLPVLGNLLQLGGRPHRYFQSLTQKYGPVVQVQLGRVRMVVVASPEAAKEVLRTNDLHCCSRPNSPGARMLSYNFLDVAFGPYSDYWREMRKLLVLELLSVRRVQSFAYARAAEVDRLVSSLAGTPPGTPVDLSEQLYALSDGIIGTVAFGKMYGSESFERTSFQRMMDETLRVLGSFTFEDFFPSSALARWADALTGVASRRRR

SEQ ID NO: 32384 - protein, 167 aa, Triticum aestivum
MVVVASPEAAKEVLRTNDLHCCSRPNSPGARMLSYNFLDVAFGPYSDYWREMRKLLVLELLSVRRVQSFAYARAAEVDRLVSSLAGTPPGTPVDLSEQLYALSDGIIGTVAFGKMYGSESFERTSFQRMMDETLRVLGSFTFEDFFPSSALARWADALTGVASRRRR

SEQ ID NO: 32385 - DNA, 1725 bp, Triticum aestivum
atcactatcgtgtaacttcgtacgttgccgactactttcaatggcggcctttgcaaagatcgccatggagtgcctgcacgatcccctcatctggctacttcttgcgtcggtggccttggtcatcctgcaaagacggcggctgaaactgaacccgccgccgctccctccaggccccaagccgctaccgatcatcggcaacctgatgatggcggaccagctgacccaccgtggcctggcggcgctggccaagcagtacggcgggttgctgcacctccgcctgggctcgctccgcgtcttcgcggtgtccaccccggagtacgcgcgcgaggtgctccaggcgcaggacagcgacttctggtaccgcccagcctccatcgccgtccgctacctcacctacggctgctccgacatggcgttcgcgcgcgacgggccctactggcgccagatgcgcaagctgtgcgtcaccaagctcttcagccgccggcgcgccgagacctggctggccgtgcgcgacgggtacggggagctcgcccgggccgtcggcaggtccagcggcgaggccgtgaacctcggcgagctcatcttcaagcacaccgttagcatcatcttccgggccgccttcggcgtgcgcgacgtccaaggactggacgagttcatccccatgttcaaggagttctccaagctcttagaggcgttccacgtcggtgacttcttcccttggctaagctggatgggccggcggggcttcgaccggcgccttcgcaccgtgcgcggcgctctaggaacgtttgtggacaagatcattgacgagcacgtgaggaggggcaagaaccccgacgacgccgacgctgacatggtagacggcctactcgcgctcctcgctgatgccaaccaagccagcggggaggacgacctccgcttcacccgcgacaacgttagggccatgatgatggacatgttgtttggcgggccggacacggtggggttcaccattgagtgggcgatggcagagatgatgcattgccctgacatccttctgcggctgcagcaggagctcgtcgacattgtggggcttgatcggactgttgacgaatcggaccttggcaagctccccttcctcaagtgtgtcatcaaggagacgctccgaatgcacccaccgatcccgattcacctccacgggaacaccaaagattgcgtcctcggtggctactccgtgcccaggggctcccgtgtctttatcaacgcgtgggcgatcaaccgcgacggcgaggcgtggaaggaccctaacgcgttccggccatcgaggttcatgccagatggggaagccaccgggctggatctcaagggcggctgctacgagctattgtcgttcggttcgggggggcgctcgtgcccagcacaggggcttggccagcacgccgtggagtttgccatcgcgcagcttgtgcatgggttcaactggaagctacccggtgacatgaaaccaacggagctcgacatgagcgacatgaacggtgtcactgtgtcccgcgccacacgactctatgcagttcccacaccccggctcaattgtcctttgtaatattaattagaacatcgagctctttgttgtgacgtattgtaggtggaactacttgccataagattgcgtgtcaggctttagatacaaacacgtggtacacaactacacaccatggaatatggagtgtgcaaccgccttcctcc

SEQ ID NO: 32386 - protein, 526 aa, Triticum aestivum
SLSCNFVRCRLLSMAAFAKIAMECLHDPLIWLLLASVALVILQRRRLKLNPPPLPPGPKPLPIIGNLMMADQLTHRGLAALAKQYGGLLHLRLGSLRVFAVSTPEYAREVLQAQDSDFWYRPASIAVRYLTYGCSDMAFARDGPYWRQMRKLCVTKLFSRRRAETWLAVRDGYGELARAVGRSSGEAVNLGELIFKHTVSIIFRAAFGVRDVQGLDEFIPMFKEFSKLLEAFHVGDFFPWLSWMGRRGFDRRLRTVRGALGTFVDKIIDEHVRRGKNPDDADADMVDGLLALLADANQASGEDDLRFTRDNVRAMMMDMLFGGPDTVGFTIEWAMAEMMHCPDILLRLQQELVDIVGLDRTVDESDLGKLPFLKCVIKETLRMHPPIPIHLHGNTKDCVLGGYSVPRGSRVFINAWAINRDGEAWKDPNAFRPSRFMPDGEATGLDLKGGCYELLSFGSGGRSCPAQGLGQHAVEFAIAQLVHGFNWKLPGDMKPTELDMSDMNGVTVSRATRLYAVPTPRLNCPL

SEQ ID NO: 32387 - protein, 513 aa, Triticum aestivum
MAAFAKIAMECLHDPLIWLLLASVALVILQRRRLKLNPPPLPPGPKPLPIIGNLMMADQLTHRGLAALAKQYGGLLHLRLGSLRVFAVSTPEYAREVLQAQDSDFWYRPASIAVRYLTYGCSDMAFARDGPYWRQMRKLCVTKLFSRRRAETWLAVRDGYGELARAVGRSSGEAVNLGELIFKHTVSIIFRAAFGVRDVQGLDEFIPMFKEFSKLLEAFHVGDFFPWLSWMGRRGFDRRLRTVRGALGTFVDKIIDEHVRRGKNPDDADADMVDGLLALLADANQASGEDDLRFTRDNVRAMMMDMLFGGPDTVGFTIEWAMAEMMHCPDILLRLQQELVDIVGLDRTVDESDLGKLPFLKCVIKETLRMHPPIPIHLHGNTKDCVLGGYSVPRGSRVFINAWAINRDGEAWKDPNAFRPSRFMPDGEATGLDLKGGCYELLSFGSGGRSCPAQGLGQHAVEFAIAQLVHGFNWKLPGDMKPTELDMSDMNGVTVSRATRLYAVPTPRLNCPL

SEQ ID NO: 32388 - protein, 505 aa, Triticum aestivum
MECLHDPLIWLLLASVALVILQRRRLKLNPPPLPPGPKPLPIIGNLMMADQLTHRGLAALAKQYGGLLHLRLGSLRVFAVSTPEYAREVLQAQDSDFWYRPASIAVRYLTYGCSDMAFARDGPYWRQMRKLCVTKLFSRRRAETWLAVRDGYGELARAVGRSSGEAVNLGELIFKHTVSIIFRAAFGVRDVQGLDEFIPMFKEFSKLLEAFHVGDFFPWLSWMGRRGFDRRLRTVRGALGTFVDKIIDEHVRRGKNPDDADADMVDGLLALLADANQASGEDDLRFTRDNVRAMMMDMLFGGPDTVGFTIEWAMAEMMHCPDILLRLQQELVDIVGLDRTVDESDLGKLPFLKCVIKETLRMHPPIPIHLHGNTKDCVLGGYSVPRGSRVFINAWAINRDGEAWKDPNAFRPSRFMPDGEATGLDLKGGCYELLSFGSGGRSCPAQGLGQHAVEFAIAQLVHGFNWKLPGDMKPTELDMSDMNGVTVSRATRLYAVPTPRLNCPL

SEQ ID NO: 32389 - DNA, 1731 bp, Triticum aestivum
aaaaaaaacggcatctcgctcccgcaccgcaccagcctcctgcctgagaacatcagtcagtactgtaccgtgtacgtactatcgcaggccacacagccatgcagagcgagatttggctgctatgggcgacgctcgccgccgcgctactcttctacctgaccagcgcagcccgccgcgggggcaccggggcacggcagcctcggggcccgacgccgctcccagtcctcggcaacgtgctcgacctaggtggcaacctgcaccacacgttggcgcgcctcgcgcgcgtccacggccccgtcatgaagctcaagctcggcctggtcaccatcgtggtggtctcctcccgtgacgccgcgcgggaggcctacaccaggtacgaccgccacctggccgcgcgcgcggtcccggacgccgccaacgcggtcggcaactccgggcggtccatgatctggctgcccagctccgacccgctctggaagacgctgcgcggcatcgtggcctcgcacatattctcgccgcgtggcctcgccgccgcgcgcggcgtgcgcgagcgcaaggtgcgcgacatggtgggctacttccgctgccacgcgggggaggaggtggacgtcggccaggccgtgtacggcggcgtgctgaacctcgtgtccagcgccttcttctccgttgacgtggtggacgtgggcagcgagtccgctagcgggttgcgggaggtcgtggatggacatcatcgccgcgctagccaagcccaacgtctccgacatcttccctttcctccggccgctggacctgcagggctggcgtcgctgggcgggggcgcgttaccagaaggtcttcggcatacttgacggcatagtcgaccgccgtctggcagatgcccggacgtccaagggcgagcacgcccacggcgacttcctggactcgctgctggagctcgtttccgcaggcaagatcggtcgcgacaaggtgacggtgatactgttcgacgtgttcgcggccgggaccgacacgatggccatcacggtggagtgggcgatggccgagctgctccggcacccgcatgccatggccaaggtgcgcgcggagatggcggacatcctcggaggcaagggcacggacaccctcgaggagcccgacgcggcgaacctgccgtacctgcaggccgtggtgaaggaggtgatgcggctgcacccggtggcgccgctcatgctgccgcaccaggccgcggaggacggcgtggagatcggcggctacgccgtgcccaggggagccacggtgatcttcaacgtgtgggcgatcatgcgggacccggcggcgtgggagaggcccgacgagttcgtgccggagaggttcctgctggataaggcggtggatagggcggtggagttccggggcaaggactacgagttcatcccgttcgggtccggccggcggctgtgcccgggcctgccgatggcggagcgggtcgtgccgttcgtgctggcgtcgctgctgcacgcgttcgagtggcggctcccggacggcgtctcggccgacgagatggacgtgaccgagaagttcaccacggtgaacacgctcgcggtgcccatcagggccgtccccgtcgtggtcacctagctagctgctagccttgtgtatgcatgcaatcttatcttgtatcgtgcggacgagatgggcccgctttacactgtatcgaaaatcacatgaaaattgagtagccagacattcctc

SEQ ID NO: 32390 - protein, 298 aa, Triticum aestivum
MDIIAALAKPNVSDIFPFLRPLDLQGWRRWAGARYQKVFGILDGIVDRRLADARTSKGEHAHGDFLDSLLELVSAGKIGRDKVTVILFDVFAAGTDTMAITVEWAMAELLRHPHAMAKVRAEMADILGGKGTDTLEEPDAANLPYLQAVVKEVMRLHPVAPLMLPHQAAEDGVEIGGYAVPRGATVIFNVWAIMRDPAAWERPDEFVPERFLLDKAVDRAVEFRGKDYEFIPFGSGRRLCPGLPMAERVVPFVLASLLHAFEWRLPDGVSADEMDVTEKFTTVNTLAVPIRAVPVVVT

SEQ ID NO: 32391 - protein, 249 aa, Triticum aestivum
MQSEIWLLWATLAAALLFYLTSAARRGGTGARQPRGPTPLPVLGNVLDLGGNLHHTLARLARVHGPVMKLKLGLVTIVVVSSRDAAREAYTRYDRHLAARAVPDAANAVGNSGRSMIWLPSSDPLWKTLRGIVASHIFSPRGLAAARGVRERKVRDMVGYFRCHAGEEVDVGQAVYGGVLNLVSSAFFSVDVVDVGSESASGLREVVDGHHRRASQAQRLRHLPFPPAAGPAGLASLGGGALPEGLRHT

SEQ ID NO: 32392 - protein, 201 aa, Triticum aestivum
MAITVEWAMAELLRHPHAMAKVRAEMADILGGKGTDTLEEPDAANLPYLQAVVKEVMRLHPVAPLMLPHQAAEDGVEIGGYAVPRGATVIFNVWAIMRDPAAWERPDEFVPERFLLDKAVDRAVEFRGKDYEFIPFGSGRRLCPGLPMAERVVPFVLASLLHAFEWRLPDGVSADEMDVTEKFTTVNTLAVPIRAVPVVVT

SEQ ID NO: 32393 - DNA, 1613 bp, Triticum aestivum
aaatcattcactcaacaatggaattcgttatgctcctggccgctctcttttgcctcctagccggagtggtctttctgcggagctacaccaggagatcccaggccaccacccaccacatcggggaccccgatgttgctcatcgagcgctcattgggaacgccgacgacttcttaaaccggccggcagcaagcttccccacctccctggccacctggcgccatggcgaacggaacgacaacatagccactgtgacctacggcccgcagtggcgagtgctccggtgcaacctcacggctgagatcctctcacgcctcggttccttagccccgcttcatgaggaggccgcccaggcactcgtcgcagacttctcggcccgatgcggcggaggaggtgacgtggccgtccgtgagcccgtcaccaaagccgtgttcacgctggccacgcgcctgtgcttcggcgacattgtggacgacggccagagacacgccataggacgcgtgatacgggactccatcgtcgccgcaggtaagctcagccccgggttcgatggctcgatgctatccaagctcgcgaactggagggggtttcgccggatctccgccgtgctcaaacggcagaccgagctgtacctccctctgatcgcggcacggaggcagtcgcagtctcagctctgtggcggcatcgtccatccttacgaggactcgctcctggatctccgtgtccccgacaatggtgatgcctccggccccggccgtcctcttcaagacggcgagctggtgggccttgtgttcgagttcctgggtgcagccactgggtcaaccgcagcctgcctcgagtggaccctcgcccatctcatcgaccagcaggagaccctggacaggctgcgccgggagatcgaagacgaggccgacgccggcgggatactctccagcaagagccttcgcagcggcatgccctacctgaacgcggtagtccttgaatgcctccgcatgcaccagccggtgccggtcatcttgagcagcgcccacggggacggcgccaaagcgatcggtggaatgagagctgtgccgctggacggcttgagcgtgcagttcaatttagccgacattggaagagatgcgaagcggtggacccatcctgacaagttctggccggagcggttccttgccggaggcgaggcggaagacatcgggccggcgccgggccccaaggagatcaggatgatgccgttcggtgcgggacatcggcactgccctggcgtgaacatgggaatgttgcacatcaagtgcttcttagcggcgctcgtgcacaacttcgactgggcactgtccgccgaagactgcagcagcggtgtcgacatgacggagcaggacggcttcataaaaataatgaagaagccgctctccgcgcgtgtcactggacgcacttgagttcttctaaaatctttgacaaacttgtgtccggtttctgaatgtgtgtggtcctatttttcatgcacgtcttgttctgctttcctgttgaagtttgtttgagcttgcttaccacacggaccgtgtggtatgtgtgattgtacttgcatcaaataataagaaatcgtgtgcttcttgcttttc

SEQ ID NO: 32394 - protein, 475 aa, Triticum aestivum
IIHSTMEFVMLLAALFCLLAGVVFLRSYTRRSQATTHHIGDPDVAHRALIGNADDFLNRPAASFPTSLATWRHGERNDNIATVTYGPQWRVLRCNLTAEILSRLGSLAPLHEEAAQALVADFSARCGGGGDVAVREPVTKAVFTLATRLCFGDIVDDGQRHAIGRVIRDSIVAAGKLSPGFDGSMLSKLANWRGFRRISAVLKRQTELYLPLIAARRQSQSQLCGGIVHPYEDSLLDLRVPDNGDASGPGRPLQDGELVGLVFEFLGAATGSTAACLEWTLAHLIDQQETLDRLRREIEDEADAGGILSSKSLRSGMPYLNAVVLECLRMHQPVPVILSSAHGDGAKAIGGMRAVPLDGLSVQFNLADIGRDAKRWTHPDKFWPERFLAGGEAEDIGPAPGPKEIRMMPFGAGHRHCPGVNMGMLHIKCFLAALVHNFDWALSAEDCSSGVDMTEQDGFIKIMKKPLSARVTGRT

SEQ ID NO: 32395 - protein, 470 aa, Triticum aestivum
MEFVMLLAALFCLLAGVVFLRSYTRRSQATTHHIGDPDVAHRALIGNADDFLNRPAASFPTSLATWRHGERNDNIATVTYGPQWRVLRCNLTAEILSRLGSLAPLHEEAAQALVADFSARCGGGGDVAVREPVTKAVFTLATRLCFGDIVDDGQRHAIGRVIRDSIVAAGKLSPGFDGSMLSKLANWRGFRRISAVLKRQTELYLPLIAARRQSQSQLCGGIVHPYEDSLLDLRVPDNGDASGPGRPLQDGELVGLVFEFLGAATGSTAACLEWTLAHLIDQQETLDRLRREIEDEADAGGILSSKSLRSGMPYLNAVVLECLRMHQPVPVILSSAHGDGAKAIGGMRAVPLDGLSVQFNLADIGRDAKRWTHPDKFWPERFLAGGEAEDIGPAPGPKEIRMMPFGAGHRHCPGVNMGMLHIKCFLAALVHNFDWALSAEDCSSGVDMTEQDGFIKIMKKPLSARVTGRT

SEQ ID NO: 32396 - protein, 466 aa, Triticum aestivum
MLLAALFCLLAGVVFLRSYTRRSQATTHHIGDPDVAHRALIGNADDFLNRPAASFPTSLATWRHGERNDNIATVTYGPQWRVLRCNLTAEILSRLGSLAPLHEEAAQALVADFSARCGGGGDVAVREPVTKAVFTLATRLCFGDIVDDGQRHAIGRVIRDSIVAAGKLSPGFDGSMLSKLANWRGFRRISAVLKRQTELYLPLIAARRQSQSQLCGGIVHPYEDSLLDLRVPDNGDASGPGRPLQDGELVGLVFEFLGAATGSTAACLEWTLAHLIDQQETLDRLRREIEDEADAGGILSSKSLRSGMPYLNAVVLECLRMHQPVPVILSSAHGDGAKAIGGMRAVPLDGLSVQFNLADIGRDAKRWTHPDKFWPERFLAGGEAEDIGPAPGPKEIRMMPFGAGHRHCPGVNMGMLHIKCFLAALVHNFDWALSAEDCSSGVDMTEQDGFIKIMKKPLSARVTGRT

SEQ ID NO: 32397 - DNA, 1973 bp, Triticum aestivum
atattgcaccacctctcctgtcctcacctcacctctcgctgcgctccggcgatcgagcttggctagcttggcgatggaggcagggacgtgggcggtggtggtggcggcggcggccgcgtacctggcgtggttctggcggatgtcgcgcgggctcagcggccccagggtgtggccgctggtgggtagcctgccggggctgctgcagcacgcggaggacatgcacgagtggatcgtcggcaacctgcgccgcaccggcggcacctaccagacctgcatcttcgcggtgcccggcgtggcccgccgcggcgggctggtcacggtcacctgcgaccccaggaacctggagcacgtcctcaaggcgcgcttcgacaactaccccaagggccccttctggcacggcgtcttcagcgacctgctcggcgacggcatcttcaactccgacggcgacacgtgggtcgcgcagcgcaagacgatccgcgctcgagttcaccacgcgcacgctccgcaccgccatgtcccgctgggtctcccgctccatccaccaccgcatgctccccatcctgtccgacgcggcggcctccggcgcgcacgtcgacctgcaggacctcctcctccgcctcaccttcgacaacatcctgcggcctcgccttcggcaaggacccggagacgctcgcccgcggcctccccgagaacgccttcgccacctccttcgacagcgccaccgaggccacgctcaaccgcttcatcttcccggagtgcgtgtggcggtgcaagaagtggctggggctcggcatggagacctcgttggcgcgcagcgtcgcgcacgtcgaccgctacctctccgccgtcatcaagacgcgcaagctcgagctcgccggcaagagcgacgggtccacgccgcacgacgacctcctgtcgcgcttcatgcgcaaggggacctactccgacgactccctgcagcacgtggcgctcaacttcatcctcgccggccgcgacacctcctcggtggcgctctgatggttcttctggctggtctccacccacccggacgtggagcgcaagatcgtgcgcgagctctgcgccgtcctggcggcgtcccgcggcgcagacgacccggcattatggctggccgccccgttcgactacgaggagctggaccgcctcgtgtacctcaaggcggcgctctcggagaccctccggctgtacccgtccgtgccggaggactccaagcacgtggtcgccgacgactacctccccgacggcacgttcgtgccggccgggtcgtcggtgacgtactccatctactcggcggggcgcatgaagacggtgtggggggaggactgcctggagttccggccggagcggtggctgtcggccgacggcaccaagttcgagccgcacgactcgtacaggttcgtggcgttcaacgccgggccgcgcatatgcctgggcaaggacctggcgtacctgcagatgaagaacatcgccgggagcatcctcctccggcaccgcctggccgtggcgccggggcaccgcgtggagcagaagatgtcgctcacgctgttcatgaagcacgggctccggatggtggtgcgcccgcgcgacctcgccccgaccctcgacgagctccccgccgcggcacccgccgtcgcggcctgcgcgtagaagatcgatgtgtatggacccccggcgccgtgcatgcatgctccacgtacggttcgtgccatatggggaaggtccggaggacgaagttggaagtggcaagaaaactgtgtagatacacgagtccaacacaccaacaggtactacttagtaggtgagtatatctacatcgggataaagggatctgtctaaaaatatccaaatcagaaagaaagggaaacacacaggggcaacaaacaataatgctcctctcctgtactgtaatgtactgtactgaactacgtgtgacagattagaagtgtataagctcc

SEQ ID NO: 32398 - protein, 605 aa, Triticum aestivum
IAPPLLSSPHLSLRSGDRAWLAWRWRQGRGRWWWRRRPRTWRGSGGCRAGSAAPGCGRWWVACRGCCSTRRTCTSGSSATCAAPAAPTRPASSRCPAWPAAAGWSRSPATPGTWSTSSRRASTTTPRAPSGTASSATCSATASSTPTATRGSRSARRSALEFTTRTLRTAMSRWVSRSIHHRMLPILSDAAASGAHVDLQDLLLRLTFDNILRPRLRQGPGDARPRPPRERLRHLLRQRHRGHAQPLHLPGVRVAVQEVAGARHGDLVGAQRRARRPLPLRRHQDAQARARRQERRVHAARRPPVALHAQGDLLRRLPAARGAQLHPRRPRHLLGGALMVLLAGLHPPGRGAQDRARALRRPGGVPRRRRPGIMAGRPVRLRGAGPPRVPQGGALGDPPAVPVRAGGLQARGRRRLPPRRHVRAGRVVGDVLHLLGGAHEDGVGGGLPGVPAGAVAVGRRHQVRAARLVQVRGVQRRAAHMPGQGPGVPADEEHRREHPPPAPPGRGAGAPRGAEDVAHAVHEARAPDGGAPARPRPDPRRAPRRGTRRRGLRVEDRCVWTPGAVHACSTYGSCHMGKVRRTKLEVARKLCRYTSPTHQQVLLSR

SEQ ID NO: 32399 - protein, 435 aa, Triticum aestivum
MSRWVSRSIHHRMLPILSDAAASGAHVDLQDLLLRLTFDNILRPRLRQGPGDARPRPPRERLRHLLRQRHRGHAQPLHLPGVRVAVQEVAGARHGDLVGAQRRARRPLPLRRHQDAQARARRQERRVHAARRPPVALHAQGDLLRRLPAARGAQLHPRRPRHLLGGALMVLLAGLHPPGRGAQDRARALRRPGGVPRRRRPGIMAGRPVRLRGAGPPRVPQGGALGDPPAVPVRAGGLQARGRRRLPPRRHVRAGRVVGDVLHLLGGAHEDGVGGGLPGVPAGAVAVGRRHQVRAARLVQVRGVQRRAAHMPGQGPGVPADEEHRREHPPPAPPGRGAGAPRGAEDVAHAVHEARAPDGGAPARPRPDPRRAPRRGTRRRGLRVEDRCVWTPGAVHACSTYGSCHMGKVRRTKLEVARKLCRYTSPTHQQVLLSR

SEQ ID NO: 32400 - protein, 429 aa, Triticum aestivum
YCTTSPVLTSPLAALRRSSLASLAMEAGTWAVVVAAAAAYLAWFWRMSRGLSGPRVWPLVGSLPGLLQHAEDMHEWIVGNLRRTGGTYQTCIFAVPGVARRGGLVTVTCDPRNLEHVLKARFDNYPKGPFWHGVFSDLLGDGIFNSDGDTWVAQRKTIRARVHHAHAPHRHVPLGLPLHPPPHAPHPVRRGGLRRARRPAGPPPPPHLRQHPAASPSARTRRRSPAASPRTPSPPPSTAPPRPRSTASSSRSACGGARSGWGSAWRPRWRAASRTSTATSPPSSRRASSSSPARATGPRRTTTSCRASCARGPTPTTPCSTWRSTSSSPAATPPRWRSDGSSGWSPPTRTWSARSCASSAPSWRRPAAQTTRHYGWPPRSTTRSWTASCTSRRRSRRPSGCTRPCRRTPSTWSPTTTSPTARSCRPGRR

SEQ ID NO: 32401 - DNA, 1842 bp, Triticum aestivum
actgccacacaagacacacacatccaatcaacccgagacctcaagtgtcacgactcgagacacaacacttcccccggaccaccatggataaggcatacattgccgtcctcaccatcgccttcctcttcctgctccactacatttcaggcaagatcagcaatggcaggcgcggcaagggcgccgtgcagctgccgccaagccccccggtcatccccttcctcggccatctccacctcgtggagaaaccgttccacgccgcgctgcgccgcctggccgcgcgcctcggcccggtcttctcgctgcggctcggctcgcgccgcgccgtggtggtgtcgtcggcggagtgcgccagggagtgcttcacggagcacgacgtgacgttcgccaaccggccccggttcccgtcgcagctgctcgtgtccttcgacggcgccgcgctcgccacgtccagctacggcccgcactggcgcaacctccgccgcgtcgccgccgtgcagctgctctccgcgcaccgcgtcgcctgcatgtcgggcgtcatcgccggcgaggtgcgcgccatggcgcgccggctgttccgcgccgccgccgccgcccccggcgacgccgcgcgggtccagctgaagcggaggctgttcgagctctccctcagcgtgctcatggagaccatcgcgcagaccaaggggacccggtcggaggccgacgccgacacggacatgtccgtggaggcccaggagttcaagaaggtggtggacgagatcatcccctacctcggcgccgccaacacgtgggactacctgccggtgttgcggtggttcgacgtgttcggcgtgaggaacaagatcctggccgccgtgagcaggagggacgccttcctgcatcgtctcatcgacaacgagcgccggaggctcgacgacgccggcgccgaaggcgacaagaagagcatgatcgccgtgctcctcaatctccagaagacggagccggaggtgtacacccataccatgatcacggccctctgcgcgaatttatttggggccggaacggagaccacgtcgacgacgacggagtgggcgatgtcgctgctgctgaaccacccggaggcgctgaggaaggcgcaggccgagatcgacgcaaccgtcggaaccacccggctggtcaccgccgacgacgtgccgcggctggcctacctgcagtgcatcgtgagcgagacgctgcgactgtacccggcggcgccgatgctgctgccgcaccagtcctcagcggactgcaaggtcggcggctacaacgtgccgagcggcacgatgctgatggtgaacgcgtacgccatccaccgcgacccggcggcatgggagcggccgctggagttcgtcccggagcggttcgagggcgggaaggccgaggggcggttcatgatcccgttcgggatgggccggcggcggtgccccggggagacgctggcgctgcggaccatcggcatggtgctggccacgctggtgcagtgcttcgactgggagcgcgtggacggcgcggaggtggacatgacggagggcggcgggctcaccatccccaaggccgtgccgctcgaggccgtgtgcaggccgcgcccggccatgcgcgacgtgcttcagagcctctgatcgccgagcttgttggcgtaataatgcatggttttgatagcctgctgatgtcgtagcaaataaactagtgagttgtgactttgagagcagagtcaggctagctaccatctgtaaattactcgtaacgaataagggttttgtaagaaccactagccgtagctatcttgcggtagcactgaaccagcaatctgtaatttagcttgcaacc

SEQ ID NO: 32402 - protein, 543 aa, Triticum aestivum
CHTRHTHPINPRPQVSRLETQHFPRTTMDKAYIAVLTIAFLFLLHYISGKISNGRRGKGAVQLPPSPPVIPFLGHLHLVEKPFHAALRRLAARLGPVFSLRLGSRRAVVVSSAECARECFTEHDVTFANRPRFPSQLLVSFDGAALATSSYGPHWRNLRRVAAVQLLSAHRVACMSGVIAGEVRAMARRLFRAAAAAPGDAARVQLKRRLFELSLSVLMETIAQTKGTRSEADADTDMSVEAQEFKKVVDEIIPYLGAANTWDYLPVLRWFDVFGVRNKILAAVSRRDAFLHRLIDNERRRLDDAGAEGDKKSMIAVLLNLQKTEPEVYTHTMITALCANLFGAGTETTSTTTEWAMSLLLNHPEALRKAQAEIDATVGTTRLVTADDVPRLAYLQCIVSETLRLYPAAPMLLPHQSSADCKVGGYNVPSGTMLMVNAYAIHRDPAAWERPLEFVPERFEGGKAEGRFMIPFGMGRRRCPGETLALRTIGMVLATLVQCFDWERVDGAEVDMTEGGGLTIPKAVPLEAVCRPRPAMRDVLQSL

SEQ ID NO: 32403 - protein, 516 aa, Triticum aestivum
MDKAYIAVLTIAFLFLLHYISGKISNGRRGKGAVQLPPSPPVIPFLGHLHLVEKPFHAALRRLAARLGPVFSLRLGSRRAVVVSSAECARECFTEHDVTFANRPRFPSQLLVSFDGAALATSSYGPHWRNLRRVAAVQLLSAHRVACMSGVIAGEVRAMARRLFRAAAAAPGDAARVQLKRRLFELSLSVLMETIAQTKGTRSEADADTDMSVEAQEFKKVVDEIIPYLGAANTWDYLPVLRWFDVFGVRNKILAAVSRRDAFLHRLIDNERRRLDDAGAEGDKKSMIAVLLNLQKTEPEVYTHTMITALCANLFGAGTETTSTTTEWAMSLLLNHPEALRKAQAEIDATVGTTRLVTADDVPRLAYLQCIVSETLRLYPAAPMLLPHQSSADCKVGGYNVPSGTMLMVNAYAIHRDPAAWERPLEFVPERFEGGKAEGRFMIPFGMGRRRCPGETLALRTIGMVLATLVQCFDWERVDGAEVDMTEGGGLTIPKAVPLEAVCRPRPAMRDVLQSL

SEQ ID NO: 32404 - protein, 369 aa, Triticum aestivum
MSGVIAGEVRAMARRLFRAAAAAPGDAARVQLKRRLFELSLSVLMETIAQTKGTRSEADADTDMSVEAQEFKKVVDEIIPYLGAANTWDYLPVLRWFDVFGVRNKILAAVSRRDAFLHRLIDNERRRLDDAGAEGDKKSMIAVLLNLQKTEPEVYTHTMITALCANLFGAGTETTSTTTEWAMSLLLNHPEALRKAQAEIDATVGTTRLVTADDVPRLAYLQCIVSETLRLYPAAPMLLPHQSSADCKVGGYNVPSGTMLMVNAYAIHRDPAAWERPLEFVPERFEGGKAEGRFMIPFGMGRRRCPGETLALRTIGMVLATLVQCFDWERVDGAEVDMTEGGGLTIPKAVPLEAVCRPRPAMRDVLQSL

SEQ ID NO: 32405 - DNA, 1755 bp, Triticum aestivum
tcaccttcgaaccatttgcttccaagaaacttctcaagaatcccacgccaggcactgccatggatctttccatggctaccggcccggaagactccctcctcctgctcctcctcccggctaccaccctgctcccacctcctcttccaccgcgcaatgggcttcgccccgtcgggcgacgctcactggcgtgccctccgccgtctcgccgcggcgcacctcttcggcccgcgccgcgtggcggcctccgcaccccatcgctcctctattgggacgcgcatgctcggcgacgtcgcctccctcatggcccgccacggcgaagtcgcccctcggcggttcctgcacgcggcgtccctaaaccacgtcatggccgtcgtcttcggcaagcgctacgatgacttcacaagccaagaaggagtcgtcgtggaggagatggtaaacgaagggtacgacctcctcggcacgttcaactgggcagatcacctgccattcctcaagtggctcgacctccagggcgtgcgacgccggtgcaacaggttagtccggcaggtggaggcgtatgtcggtaacatcattcaggagcacaaagcgaggcgcgccagcggatcaggcattgcggatgagctctccggcgacttcgtcgatgtgctcctcggcctcgacggagaagacaagatgtcagagtccgacatgatcgccgttctttgggagatgatctttcgagggacggacacggtggcgatcttgatggagtggatcatggccaggatggtgctgcacccggagatccagtcgaaggcccgggcggagctggacgccgtggtggggcggggcagggccgtgatggacgaggacgtggcgaggctcccctacatccagtgcatcgtcaaggagacgctgcgcatgcacccgccgggcccgctcctctcgtgggcgcggctggccgtgcacgacgcgcacgtcggcggccacctcgtcccggccggcacgacggcgatggtgaacatgtgggccatcgcgcacgacgcggcggtgtggcccgagccggagctgttccggccggagcggttcatggaggaggaggtgagcgtgctgggcagcgacctccgcctggccccgttcggcgccgggcggcgcgtgtgccccggcaagatgctggccctcgccaccgtccacctctggctcgcccagctgctgcaccggttcgagtgggctcccgcgaccgcggcctcggggggcgtcgacctgtcagagcgcctgaagatgtcgctggagatggccacgccgctggtctgcagggccgtggctcgctagggccagagagagctgcacctgcatgctaccgccgccgtctacgttacctagcctgtcggcggcgccagcgttacttgctttattgcctagtatttattggctagccgttggaggctagcttgccagggtctagtagcactactgctttttggtcatctccatgcatgtacggctagctagctccgtctttgcgcggccgatccgttagccattgaaggaagctatagctagccatgggttactcctgctcgaggtcagcgagcaatcgcgcatgctgtcttgatggggtaattttggtcttctagatggagagttattagtgtgttttgtttttgttcgggagaaacatctggtgtctgtgagtgtgagttgtcatgtcgagtcgtagtagcgtggtgcttcaagaaaatttgtagtgagattttgaatattttttaatccgcg

SEQ ID NO: 32406 - protein, 436 aa, Triticum aestivum
SPSNHLLPRNFSRIPRQALPWIFPWLPARKTPSSCSSSRLPPCSHLLFHRAMGFAPSGDAHWRALRRLAAAHLFGPRRVAASAPHRSSIGTRMLGDVASLMARHGEVAPRRFLHAASLNHVMAVVFGKRYDDFTSQEGVVVEEMVNEGYDLLGTFNWADHLPFLKWLDLQGVRRRCNRLVRQVEAYVGNIIQEHKARRASGSGIADELSGDFVDVLLGLDGEDKMSESDMIAVLWEMIFRGTDTVAILMEWIMARMVLHPEIQSKARAELDAVVGRGRAVMDEDVARLPYIQCIVKETLRMHPPGPLLSWARLAVHDAHVGGHLVPAGTTAMVNMWAIAHDAAVWPEPELFRPERFMEEEVSVLGSDLRLAPFGAGRRVCPGKMLALATVHLWLAQLLHRFEWAPATAASGGVDLSERLKMSLEMATPLVCRAVAR

SEQ ID NO: 32407 - protein, 385 aa, Triticum aestivum
MGFAPSGDAHWRALRRLAAAHLFGPRRVAASAPHRSSIGTRMLGDVASLMARHGEVAPRRFLHAASLNHVMAVVFGKRYDDFTSQEGVVVEEMVNEGYDLLGTFNWADHLPFLKWLDLQGVRRRCNRLVRQVEAYVGNIIQEHKARRASGSGIADELSGDFVDVLLGLDGEDKMSESDMIAVLWEMIFRGTDTVAILMEWIMARMVLHPEIQSKARAELDAVVGRGRAVMDEDVARLPYIQCIVKETLRMHPPGPLLSWARLAVHDAHVGGHLVPAGTTAMVNMWAIAHDAAVWPEPELFRPERFMEEEVSVLGSDLRLAPFGAGRRVCPGKMLALATVHLWLAQLLHRFEWAPATAASGGVDLSERLKMSLEMATPLVCRAVAR

SEQ ID NO: 32408 - protein, 344 aa, Triticum aestivum
MLGDVASLMARHGEVAPRRFLHAASLNHVMAVVFGKRYDDFTSQEGVVVEEMVNEGYDLLGTFNWADHLPFLKWLDLQGVRRRCNRLVRQVEAYVGNIIQEHKARRASGSGIADELSGDFVDVLLGLDGEDKMSESDMIAVLWEMIFRGTDTVAILMEWIMARMVLHPEIQSKARAELDAVVGRGRAVMDEDVARLPYIQCIVKETLRMHPPGPLLSWARLAVHDAHVGGHLVPAGTTAMVNMWAIAHDAAVWPEPELFRPERFMEEEVSVLGSDLRLAPFGAGRRVCPGKMLALATVHLWLAQLLHRFEWAPATAASGGVDLSERLKMSLEMATPLVCRAVAR

SEQ ID NO: 32409 - DNA, 1660 bp, Triticum aestivum
atctttaattgtcaccatggcggctcagctagtggcagcactcttatctccacaagcactatcgctttatctcctgctcctccctatcgtcctcctctactactcggcaacaaaaacaaagagatcggggagcgagcaggctgcggcggtgggccatggcgaagagcgcccccttcctgcgcctccgagtaagctccctctcatcggccacctccacctcatcggcaccaacccccacgtctccctcgccgcgctcaccgcccagcacggcgacggcgggatcctgctgctccacctgggccaggtgcgcaatctcgtggtcactaccccgggcgccgcggaggcggtgcttcgcacgcacgaccacgtcttcgcgtcgcgccggcagaacgcgttcgccgacacgctcctcgacggctccgacatcgccttcgccccctacggcaagttctggcggcagctgaggcggctggtcaccacgcacctgctcagcgccaggaaggtgctgtcgctccgcgctggtcgcgaggaggaggcacgcctggtcatggccaagatccgcgacgctgcggccgccggcgccgccgtggacgtgtccacgctgctcgccaccttcaccaacgacgtcgcttgccgcgccgtgtccggcaagttcttccgggaggaaggccggaacgagctgttccgggaggtgatcgacggcaacgtcgcggcgttcggggggttcaacccgcaggactacttcccgagcctggccaaggtggacgcgctggcgcgggtgctgttccccaagatgactcggctgaggaagaggtgggacgggctgctcgacaggatcatcgacgaccacgccaccaaatcatcgctgcagcaagaagaagatgaggaggagacagacttcgtggacgttctcctcgctcgtcaacacgagtacagtctcaccaggcagcatatcaaggccattttggtggacatgtttgtagctgggacggacacgtcatacgtagtcctagagttcgccatggccgagctcatgcgaaagccacacctcatggccaaactccaagccgaggtaagggaaaagacaccaaagggccaaccaatggtcatggaggatgacttgggcggcatgacctacctaaaggcggtcttgaaggagacgctccggctgcacccaccattgcccctcctcctcccacacttctctgtggacaagtgtgtcattaacggctacacagtccccgccgaaactcgtgtcatcatcaatgtgtgggccatcggcagagaccctgggtcgtgggaggatgcggaggagttcatccctgagaggttcgaggacatcgcgtcccccgactacaaggggagggattttgggatcctgccgtttggagccggtcgaaggatatgtcccgggataaactttggcatggcctccgtggagattatgctcgccaaccttgcatattgctttgattgggagctcccgggtgggatgcagcacaaggacctcaatatgtcagaggtgtttggaatgacgatacaccgggaggagaagctaattcttgtcccaacaacacgagatgttagtcatgaataatatatagtttacatgcacttgtaagggtatagatgctatagtacttaagagtgttatttttgg

SEQ ID NO: 32410 - protein, 531 aa, Triticum aestivum
SLIVTMAAQLVAALLSPQALSLYLLLLPIVLLYYSATKTKRSGSEQAAAVGHGEERPLPAPPSKLPLIGHLHLIGTNPHVSLAALTAQHGDGGILLLHLGQVRNLVVTTPGAAEAVLRTHDHVFASRRQNAFADTLLDGSDIAFAPYGKFWRQLRRLVTTHLLSARKVLSLRAGREEEARLVMAKIRDAAAAGAAVDVSTLLATFTNDVACRAVSGKFFREEGRNELFREVIDGNVAAFGGFNPQDYFPSLAKVDALARVLFPKMTRLRKRWDGLLDRIIDDHATKSSLQQEEDEEETDFVDVLLARQHEYSLTRQHIKAILVDMFVAGTDTSYVVLEFAMAELMRKPHLMAKLQAEVREKTPKGQPMVMEDDLGGMTYLKAVLKETLRLHPPLPLLLPHFSVDKCVINGYTVPAETRVIINVWAIGRDPGSWEDAEEFIPERFEDIASPDYKGRDFGILPFGAGRRICPGINFGMASVEIMLANLAYCFDWELPGGMQHKDLNMSEVFGMTIHREEKLILVPTTRDVSHE

SEQ ID NO: 32411 - protein, 526 aa, Triticum aestivum
MAAQLVAALLSPQALSLYLLLLPIVLLYYSATKTKRSGSEQAAAVGHGEERPLPAPPSKLPLIGHLHLIGTNPHVSLAALTAQHGDGGILLLHLGQVRNLVVTTPGAAEAVLRTHDHVFASRRQNAFADTLLDGSDIAFAPYGKFWRQLRRLVTTHLLSARKVLSLRAGREEEARLVMAKIRDAAAAGAAVDVSTLLATFTNDVACRAVSGKFFREEGRNELFREVIDGNVAAFGGFNPQDYFPSLAKVDALARVLFPKMTRLRKRWDGLLDRIIDDHATKSSLQQEEDEEETDFVDVLLARQHEYSLTRQHIKAILVDMFVAGTDTSYVVLEFAMAELMRKPHLMAKLQAEVREKTPKGQPMVMEDDLGGMTYLKAVLKETLRLHPPLPLLLPHFSVDKCVINGYTVPAETRVIINVWAIGRDPGSWEDAEEFIPERFEDIASPDYKGRDFGILPFGAGRRICPGINFGMASVEIMLANLAYCFDWELPGGMQHKDLNMSEVFGMTIHREEKLILVPTTRDVSHE

SEQ ID NO: 32412 - protein, 349 aa, Triticum aestivum
MAKIRDAAAAGAAVDVSTLLATFTNDVACRAVSGKFFREEGRNELFREVIDGNVAAFGGFNPQDYFPSLAKVDALARVLFPKMTRLRKRWDGLLDRIIDDHATKSSLQQEEDEEETDFVDVLLARQHEYSLTRQHIKAILVDMFVAGTDTSYVVLEFAMAELMRKPHLMAKLQAEVREKTPKGQPMVMEDDLGGMTYLKAVLKETLRLHPPLPLLLPHFSVDKCVINGYTVPAETRVIINVWAIGRDPGSWEDAEEFIPERFEDIASPDYKGRDFGILPFGAGRRICPGINFGMASVEIMLANLAYCFDWELPGGMQHKDLNMSEVFGMTIHREEKLILVPTTRDVSHE

SEQ ID NO: 32413 - DNA, 1846 bp, Triticum aestivum
actcaatcattccgagagctgtgctccagaaaaagaaactgcagagggggcgagaagtgcaaaaaaaaaaggagctgcgaagctctgctggcgctcgccgtctccgtcttctccggtctccaccatggcctctttcgccgcccttccgctggccgctctcctggtgctggccgtctcgtgggcatgggagcacctcgtgtggaggccctacgccatagccaggaggcacagggcgcaagggatccatggccccccatacaggttcctcaagggctccaacgaggaggtgaggcggatgaaggcggagacggccgacgtggtgctcgacgtccgcgaccacaactacctccccagggtcgcgccgcacttcctcaagtggagggcacagtatggagagccatttctgttctggtttggtgccaagccccggatctgtgtctttgactacgagttggttaggcagatcctttcaagcaaatccggacactttccgaagaacgacgcgcacccgaacgtgttggaattgctcggcaagggcctggtgttggtgaacggtgtggattgggtgcgccatcgcagggtcatcaaccctgcttttgcaatggataagataaaggcgatgacggaaacgatggtgtcttgtgcccaacgcacgttcagtgtgtttgaagatcaggcatgcaagaacacaaatagagaaatcctagtggaattcgacaaagcagtccaagggttaacagcagatatcatatcccacacagccttcggaagtagctacaaattaggaatggaagccttccatgcccagaaagagctccagtcaatcgccatatccagtttacttaatgtgcagataccaggattcagctatctgcccacaaaaaggaataggaggaagtggatgcttgaaaagaagcttcgaagcacgctcatgcgtgtcataaactcgcggttagcgtcgaaggggagcggatatggaaatgacctacttggtttgatgtttgagggctgcactacgacagtgcaagggggcaagcaggagcagctaagcttgagcatggaggagatcctacacgagtgcaaaacattcttcttcgccggttacgaaacgacatcgcttctgctcacctggacagtgttcttgctcagtgtgtacccagagtggcaggagaggctacgggaggaggtcttgagggaggttggaaagggtaaccccaccggcgacaacctcggcaaactgaaagagatgatgatggtcctccatgaagccctgaggctctacggccctgctcttttcatgcagaggaagaccataactgacatggtggtcggagccataacaatccccaaggaccatgcagttgtcataggcgccccattcatgcaccgggataaaaaggtctggggtgaggatgcggatcagttcaacccgatgagattcgcgaacggggtcgccagagcggcgaaggttccacacgccctgctggcgttctcgatcgggccgagggcgtgcatcggccagaactttgcgatgctcgaagccaaatccgtgatggtgacggttctgcagaagttctcgttcgctctctccccgagctatgtccacgctcctgcggatttcctcactctgcagcctaagtttggcctccccgtcgttatgaagctgctggatatatgaaatggaaccggctggttctgaatgttgcagtacagaacttctgaattttctgcatgtggtgctcatagtgcacgcagtgtatatattcttttccaaattaaggttggaaaagtagtacgattacaagaaaatatattgcatgtggcttgaccacccgtctgtttgcac

SEQ ID NO: 32414 - protein, 558 aa, Triticum aestivum
LNHSESCAPEKETAEGARSAKKKGAAKLCWRSPSPSSPVSTMASFAALPLAALLVLAVSWAWEHLVWRPYAIARRHRAQGIHGPPYRFLKGSNEEVRRMKAETADVVLDVRDHNYLPRVAPHFLKWRAQYGEPFLFWFGAKPRICVFDYELVRQILSSKSGHFPKNDAHPNVLELLGKGLVLVNGVDWVRHRRVINPAFAMDKIKAMTETMVSCAQRTFSVFEDQACKNTNREILVEFDKAVQGLTADIISHTAFGSSYKLGMEAFHAQKELQSIAISSLLNVQIPGFSYLPTKRNRRKWMLEKKLRSTLMRVINSRLASKGSGYGNDLLGLMFEGCTTTVQGGKQEQLSLSMEEILHECKTFFFAGYETTSLLLTWTVFLLSVYPEWQERLREEVLREVGKGNPTGDNLGKLKEMMMVLHEALRLYGPALFMQRKTITDMVVGAITIPKDHAVVIGAPFMHRDKKVWGEDADQFNPMRFANGVARAAKVPHALLAFSIGPRACIGQNFAMLEAKSVMVTVLQKFSFALSPSYVHAPADFLTLQPKFGLPVVMKLLDI

SEQ ID NO: 32415 - protein, 517 aa, Triticum aestivum
MASFAALPLAALLVLAVSWAWEHLVWRPYAIARRHRAQGIHGPPYRFLKGSNEEVRRMKAETADVVLDVRDHNYLPRVAPHFLKWRAQYGEPFLFWFGAKPRICVFDYELVRQILSSKSGHFPKNDAHPNVLELLGKGLVLVNGVDWVRHRRVINPAFAMDKIKAMTETMVSCAQRTFSVFEDQACKNTNREILVEFDKAVQGLTADIISHTAFGSSYKLGMEAFHAQKELQSIAISSLLNVQIPGFSYLPTKRNRRKWMLEKKLRSTLMRVINSRLASKGSGYGNDLLGLMFEGCTTTVQGGKQEQLSLSMEEILHECKTFFFAGYETTSLLLTWTVFLLSVYPEWQERLREEVLREVGKGNPTGDNLGKLKEMMMVLHEALRLYGPALFMQRKTITDMVVGAITIPKDHAVVIGAPFMHRDKKVWGEDADQFNPMRFANGVARAAKVPHALLAFSIGPRACIGQNFAMLEAKSVMVTVLQKFSFALSPSYVHAPADFLTLQPKFGLPVVMKLLDI

SEQ ID NO: 32416 - protein, 460 aa, Triticum aestivum
MKAETADVVLDVRDHNYLPRVAPHFLKWRAQYGEPFLFWFGAKPRICVFDYELVRQILSSKSGHFPKNDAHPNVLELLGKGLVLVNGVDWVRHRRVINPAFAMDKIKAMTETMVSCAQRTFSVFEDQACKNTNREILVEFDKAVQGLTADIISHTAFGSSYKLGMEAFHAQKELQSIAISSLLNVQIPGFSYLPTKRNRRKWMLEKKLRSTLMRVINSRLASKGSGYGNDLLGLMFEGCTTTVQGGKQEQLSLSMEEILHECKTFFFAGYETTSLLLTWTVFLLSVYPEWQERLREEVLREVGKGNPTGDNLGKLKEMMMVLHEALRLYGPALFMQRKTITDMVVGAITIPKDHAVVIGAPFMHRDKKVWGEDADQFNPMRFANGVARAAKVPHALLAFSIGPRACIGQNFAMLEAKSVMVTVLQKFSFALSPSYVHAPADFLTLQPKFGLPVVMKLLDI

SEQ ID NO: 32417 - DNA, 1681 bp, Triticum aestivum
aacccgaacagttagacagagaaaaatcctccaagcgcatcgccacccgctgccgcgagccgccgcccgccggccccagccccgccacaggctacagcgcgccgccaccgcctaccccgccggcactcctacccctaccccaagtgcctcccacgctcgctacgttctaccgccggcgacactcgacgccgcggccgttgccggctcccacacccgcgggcctttatctccccggcggccgccgccgccgccctgctcgtccagcgggctggccctgtccatggggcgtacgggctacccgcgcccttcgacgcccgcacgcgcctccttctgcccttccgccgcggacgatgccgacttctctgagtctaatgcgatcctggtggtggccacgccctgcgagagtctgttgctgctcagcccagcgtcttgccgtggcgggcgcctgtcgtcggagctctggttgtcggttccagagtcgggtggttccacacaggggcgcatatcccgttgtgccaccaatcacttaattcggctctcttgagctgcccggcttcggcggcgaagatgatggcgatgcctaggacacaacggccacatgggatgaaactagcagagatgaagaaggcggtggtcgttgggaggagaagattgcccggaagctggaggacgtgcaccagctgcggttgctggacaaccgctacgtttagtggctgagggaattgttgggctacgagaatcagtcgctgataagagggctgaggctgagaagatcaagagggatcagagattgtgctcaattgttggtggtcaggacgtcaggagttatctgaagaaaggactcactatctggttaaatgttccattggatgcccttgcaagaaggattgctgcggtggttcagcgtcactgcccctcctgcatcaacaatctggtgatccatatgcaaaggttcagaagagctattttgtgtacatgagttgctactggcagtggacagattgtctatgcagagtgcgtagagaaaaaaatgctcacatacaaacacaaacgacatccagtaggcgcttggaacacccgacagattgaaagcacagaagcaaagatttccaatacgaggccacgatgcccgacagagatgtagccaatatgtgcccaatccttatttcttgatgttggaacaacaagtgttgaggcagggaaaaggcagcagtagaggcatgggcacttcagaaaagggtgttgactgttctgattgaggccagttgaaggcttccacgtgccacctccttcgcctcctacgccgcgtcgagaaaggcggacacgtgcggtaggagccaagggggaacagggaaaggcggacacgagattcgtgaacccagagaagagaatgtatgcgagcttgtccacctcggcggtgtcagccgccagtgccaccgtgtcccgcctccgcctggcctggtcgcaacaaaagtatgactgcaggtgtggttcattcagttttgaagtttgatttacttgcttgtgcatgtgtgtgtgtattctaagagagagggagagattattctgttctagccagtcgtatttctggacaaatctgctcccctccactccttttttatttgccttaaatctgaacatgaaaagcagttacaaattgagagcaacagagtaaacgttc

SEQ ID NO: 32418 - protein, 180 aa, Triticum aestivum
TRTVRQRKILQAHRHPLPRAAARRPQPRHRLQRAATAYPAGTPTPTPSASHARYVLPPATLDAAAVAGSHTRGPLSPRRPPPPPCSSSGLALSMGRTGYPRPSTPARASFCPSAADDADFSESNAILVVATPCESLLLLSPASCRGGRLSSELWLSVPESGGSTQGRISRCATNHLIRLS

SEQ ID NO: 32419 - protein, 175 aa, Triticum aestivum
PEQLDREKSSKRIATRCREPPPAGPSPATGYSAPPPPTPPALLPLPQVPPTLATFYRRRHSTPRPLPAPTPAGLYLPGGRRRRPARPAGWPCPWGVRATRALRRPHAPPSALPPRTMPTSLSLMRSWWWPRPARVCCCSAQRLAVAGACRRSSGCRFQSRVVPHRGAYPVVPPIT

SEQ ID NO: 32420 - protein, 87 aa, Triticum aestivum
MGRTGYPRPSTPARASFCPSAADDADFSESNAILVVATPCESLLLLSPASCRGGRLSSELWLSVPESGGSTQGRISRCATNHLIRLS

SEQ ID NO: 32421 - DNA, 1775 bp, Triticum aestivum
atatcgaacgcaacaatgcacctcgtcgccatggatatccctctcccgttgctcctctccaccttggccgttgccgtgaccatatgctatgtcctcttcttccgtgctgacaaggggcgcgcgccgctgccgcccgggccgaggggctggccggtgctggggaacctcccgcagctcggcggcaagacgcaccagaccatgcacgagatgtccaaggtgtacgggcccgtgctccggctccggttcggcagctccgtcgtggtggtggccgggtcggccgccgtggccgagcagttcctccgcacccacgacgccaagttcagcagccggccgcccaactccggcggcgagcacatggcgtacaactaccaggacgtggtgttcgcgccctacggcccccggtggcgcgcgatgaggaaggtgtgcgccgtgaacctcttctcggcccgcgcgctcgacgacctccgcgggttccgcgagcgggaggccgcgctcatggtgaggtccctcgctgatgccgctgctaccggcggggtggtggcggtcggcaaggcggcgaacgtgtgcacgaccaacgctctctcgcgggcggcggtggggctccgggtgttcgccgcggccggcgccgagcttggcgccaaggagttcaaggagatcgtgctggaggtgatggaggtgggcggcgtgctcaacgtcggggacttcgtgccggctctccggtggctcgacccgcagggtgttgttgccaggttgaagaaactgcaccgccggttcgacgacatgatgaacgggatcatcgccgagagaagggccggaggtagcacggccggcgaggagaaggaaggtaaggacctgctcggcttgctgctcgccatggtgcaggaagacaagtccctcaccggcggcgaggaggacaggatcacggacacggacgtcaaggcgctcatactgaacttgttcgtggcgggcacggagacgacgtcgacgatagtggagtgggcggtggcggagctgatccggcacccggacatgctgaagcgggcgcaggaggagatggacgccgtcgtgggccgggacaggctcgtctcggagtccgacctgccgcgcctcacgttcctgaacgcggtcatcaaggagaccttccggctgcacccgtcgacgccgctctcgctgccgcggatggcctccgaggagtgcgaggtcgccggctaccgcatccccaagggcacggagctgctggtcaacgtgtggggcatcgcccgcgacccggccctgtggcccgacccgctcgagttccggcccgcccggttcctcccgggagggacccacgccgacgtcgacgtcaaggggggcgacttcgggctgatcccgttcggggccggccggcggatctgcgcgggcctcagctggggcctgcgggtggtcaccgtgacggcggccacgctcgtgcactcgttcgactgggagctgccggcgggccagacgcccgacaagctcaacatggaggaggccttctctctgctgctgcagcgggccgtgccgctgatggcccacccggtgcccaggctgctcccgtcggcgtacgaaattgcataaacaaagacagagggaagcgcgccactgatttgtcgtgatgatctatggaggagaagctccagttgtgctatgtattgttgtcgatgggggtgtgcctcatcgttttcaactaaaatagttccacatgtaacttctgtactgtttttagatatagcatggaaaataacattttatgtatc

SEQ ID NO: 32422 - protein, 531 aa, Triticum aestivum
ISNATMHLVAMDIPLPLLLSTLAVAVTICYVLFFRADKGRAPLPPGPRGWPVLGNLPQLGGKTHQTMHEMSKVYGPVLRLRFGSSVVVVAGSAAVAEQFLRTHDAKFSSRPPNSGGEHMAYNYQDVVFAPYGPRWRAMRKVCAVNLFSARALDDLRGFREREAALMVRSLADAAATGGVVAVGKAANVCTTNALSRAAVGLRVFAAAGAELGAKEFKEIVLEVMEVGGVLNVGDFVPALRWLDPQGVVARLKKLHRRFDDMMNGIIAERRAGGSTAGEEKEGKDLLGLLLAMVQEDKSLTGGEEDRITDTDVKALILNLFVAGTETTSTIVEWAVAELIRHPDMLKRAQEEMDAVVGRDRLVSESDLPRLTFLNAVIKETFRLHPSTPLSLPRMASEECEVAGYRIPKGTELLVNVWGIARDPALWPDPLEFRPARFLPGGTHADVDVKGGDFGLIPFGAGRRICAGLSWGLRVVTVTAATLVHSFDWELPAGQTPDKLNMEEAFSLLLQRAVPLMAHPVPRLLPSAYEIA

SEQ ID NO: 32423 - protein, 526 aa, Triticum aestivum
MHLVAMDIPLPLLLSTLAVAVTICYVLFFRADKGRAPLPPGPRGWPVLGNLPQLGGKTHQTMHEMSKVYGPVLRLRFGSSVVVVAGSAAVAEQFLRTHDAKFSSRPPNSGGEHMAYNYQDVVFAPYGPRWRAMRKVCAVNLFSARALDDLRGFREREAALMVRSLADAAATGGVVAVGKAANVCTTNALSRAAVGLRVFAAAGAELGAKEFKEIVLEVMEVGGVLNVGDFVPALRWLDPQGVVARLKKLHRRFDDMMNGIIAERRAGGSTAGEEKEGKDLLGLLLAMVQEDKSLTGGEEDRITDTDVKALILNLFVAGTETTSTIVEWAVAELIRHPDMLKRAQEEMDAVVGRDRLVSESDLPRLTFLNAVIKETFRLHPSTPLSLPRMASEECEVAGYRIPKGTELLVNVWGIARDPALWPDPLEFRPARFLPGGTHADVDVKGGDFGLIPFGAGRRICAGLSWGLRVVTVTAATLVHSFDWELPAGQTPDKLNMEEAFSLLLQRAVPLMAHPVPRLLPSAYEIA

SEQ ID NO: 32424 - protein, 521 aa, Triticum aestivum
MDIPLPLLLSTLAVAVTICYVLFFRADKGRAPLPPGPRGWPVLGNLPQLGGKTHQTMHEMSKVYGPVLRLRFGSSVVVVAGSAAVAEQFLRTHDAKFSSRPPNSGGEHMAYNYQDVVFAPYGPRWRAMRKVCAVNLFSARALDDLRGFREREAALMVRSLADAAATGGVVAVGKAANVCTTNALSRAAVGLRVFAAAGAELGAKEFKEIVLEVMEVGGVLNVGDFVPALRWLDPQGVVARLKKLHRRFDDMMNGIIAERRAGGSTAGEEKEGKDLLGLLLAMVQEDKSLTGGEEDRITDTDVKALILNLFVAGTETTSTIVEWAVAELIRHPDMLKRAQEEMDAVVGRDRLVSESDLPRLTFLNAVIKETFRLHPSTPLSLPRMASEECEVAGYRIPKGTELLVNVWGIARDPALWPDPLEFRPARFLPGGTHADVDVKGGDFGLIPFGAGRRICAGLSWGLRVVTVTAATLVHSFDWELPAGQTPDKLNMEEAFSLLLQRAVPLMAHPVPRLLPSAYEIA

SEQ ID NO: 32425 - DNA, 1055 bp, Triticum aestivum
actcagagcaccatagtctcagaggatttgaggcgatatggctcatgtactcactatcgtctccccagaagttctgctctcactcctactctgcttcatcgtactacgccgctactacttggcaagacgatcagcgaacaattgcagtgatcatggccgccgcctcccgccgtcgcctccgaagctccctctcataggccacctgcacctcgtcagccccgacccgcacatctccctcgccgagctttcacggaagcacgccggccgcgacggcctcatgctcctccgcctcggccaggtgcccaacctcgtcgtctcctccccgagcgccgccgaggccgtcctgcgcacgcacgaccacgtcttcgcctcccgcccgccgtccatcgtcgccgacgtcctcctcagcggcccctccgacgtcgccctcgccccctacggcgagtactggcggcaggtccgcaagctcgtcaccacccacctgctgagcgcccggaaggtgcgcgcgctccagggcggccgcgaggaggaggtgcgccttgtggtggccaagctccgggcggccgcggccgcgcgctccgccatcgacatgaccgagctgctcggcgccttcaccaacgacgtggtgtgccgcgccgtgtccgggaagttcttcagggaggaaggcaggaacgagctgttccgggagctcatcgccgggaacgtggccgcgatagggggtttcaacctggaggactacttcccgagcttgaccaaggtcggtctgctccggcgagtggtgctggccaggacgtgcacgctaaagaagagatgggacgagttgctcgataagatcatagacgaccacgcaaccaaatcaccatggctagtaggaggagtacatcatcaacaacacaatgagctagagcaacgccaagaagatcaagacagagacttggtggatgttctcctctctcttgagcacgaatacaatctcactagagacaacgtcaaggtcatcttaatggtaattctctgaatttcgtgacacttaatagtattgccgatttccaatc

SEQ ID NO: 32426 - protein, 326 aa, Triticum aestivum
MAHVLTIVSPEVLLSLLLCFIVLRRYYLARRSANNCSDHGRRLPPSPPKLPLIGHLHLVSPDPHISLAELSRKHAGRDGLMLLRLGQVPNLVVSSPSAAEAVLRTHDHVFASRPPSIVADVLLSGPSDVALAPYGEYWRQVRKLVTTHLLSARKVRALQGGREEEVRLVVAKLRAAAAARSAIDMTELLGAFTNDVVCRAVSGKFFREEGRNELFRELIAGNVAAIGGFNLEDYFPSLTKVGLLRRVVLARTCTLKKRWDELLDKIIDDHATKSPWLVGGVHHQQHNELEQRQEDQDRDLVDVLLSLEHEYNLTRDNVKVILMVIL

SEQ ID NO: 32427 - protein, 246 aa, Triticum aestivum
MLLRLGQVPNLVVSSPSAAEAVLRTHDHVFASRPPSIVADVLLSGPSDVALAPYGEYWRQVRKLVTTHLLSARKVRALQGGREEEVRLVVAKLRAAAAARSAIDMTELLGAFTNDVVCRAVSGKFFREEGRNELFRELIAGNVAAIGGFNLEDYFPSLTKVGLLRRVVLARTCTLKKRWDELLDKIIDDHATKSPWLVGGVHHQQHNELEQRQEDQDRDLVDVLLSLEHEYNLTRDNVKVILMVIL

SEQ ID NO: 32428 - DNA, 1244 bp, Triticum aestivum
acacacacacacacagagctcaatcgttcagtcaaaatggagctccttacgctttttgccactgcttgctgcctcctcctagctgccgtagctctccggcgaagcactaggcgagcccatgcccgcaggaccctccaccgtgtccgtgacgccgctgtggcccatcgcgcactcaacaagaacgcggacgccttcttggaccgtgctgaaggcttcttccccgttgtcctcggcaccgggctgcgccgcggcgagcggaacgagaccattgtcacggcatcccatggcccccactggcgggcgctccgctgcaacctcagcgccgacgtcctacacccgtcccgcgtcgcttcactggcaccgctgcagcaggaggccgcccaggccctcgtcgccggcctgttcgccaaggtccagggcgaggccgcgtctgttgttatccgaggcgacctgaaccgcgctgcgttctccctgttggcgcgtatgtgcttcggcgacggcgtcgacgggcactgcgtggagtccatggagcgcgagatgctggatctgctggccaccgtcggggagctcatccccgtggtggacggctcgtggctgccccagctcctgtaccggaggcagctcacccacctcatgggcgccctcggcaggcagaagctgatgtaccttcctctcatcgatgcacggaggcgacctgaatctcgcgtctataggggcggtggcgtcgcctatccgtacgtggactcactccttgatctccgcgtgcccaacggcgagggcggcgggcgctcagggacgacgagctcgtgtgcctcgtatccgagttcctcggcagcggctcgggctccaccgtggcctgcgtggaatggaccctggcccacctcgtcgacagaccggaggtccaggacaagctgcggcgcgagattgacggcaccgacggaggcgcggtcaccatcaagagccttcgccgcggcatgccgtacctgaacgccgtggtgctccttaggattgctgacacgcatgcatggtgttgtcatatttatttccagcgcgtaagtcaaagtgtataactgtgtggtttgcccaagttttactttccttcacttcaaaaatagttttatttacttttctttgcgacgagaagctcaggctcggattgagctcaactcgactcgactgagttcaagtgacataacatgtaaggaagaaaaagaaaaaagtaaagaactttttgcgtggatctc

SEQ ID NO: 32429 - protein, 328 aa, Triticum aestivum
THTHTELNRSVKMELLTLFATACCLLLAAVALRRSTRRAHARRTLHRVRDAAVAHRALNKNADAFLDRAEGFFPVVLGTGLRRGERNETIVTASHGPHWRALRCNLSADVLHPSRVASLAPLQQEAAQALVAGLFAKVQGEAASVVIRGDLNRAAFSLLARMCFGDGVDGHCVESMEREMLDLLATVGELIPVVDGSWLPQLLYRRQLTHLMGALGRQKLMYLPLIDARRRPESRVYRGGGVAYPYVDSLLDLRVPNGEGGGRSGTTSSCASYPSSSAAARAPPWPAWNGPWPTSSTDRRSRTSCGARLTAPTEARSPSRAFAAACRT

SEQ ID NO: 32430 - protein, 316 aa, Triticum aestivum
MELLTLFATACCLLLAAVALRRSTRRAHARRTLHRVRDAAVAHRALNKNADAFLDRAEGFFPVVLGTGLRRGERNETIVTASHGPHWRALRCNLSADVLHPSRVASLAPLQQEAAQALVAGLFAKVQGEAASVVIRGDLNRAAFSLLARMCFGDGVDGHCVESMEREMLDLLATVGELIPVVDGSWLPQLLYRRQLTHLMGALGRQKLMYLPLIDARRRPESRVYRGGGVAYPYVDSLLDLRVPNGEGGGRSGTTSSCASYPSSSAAARAPPWPAWNGPWPTSSTDRRSRTSCGARLTAPTEARSPSRAFAAACRT

SEQ ID NO: 32431 - protein, 167 aa, Triticum aestivum
MCFGDGVDGHCVESMEREMLDLLATVGELIPVVDGSWLPQLLYRRQLTHLMGALGRQKLMYLPLIDARRRPESRVYRGGGVAYPYVDSLLDLRVPNGEGGGRSGTTSSCASYPSSSAAARAPPWPAWNGPWPTSSTDRRSRTSCGARLTAPTEARSPSRAFAAACRT

SEQ ID NO: 32432 - DNA, 1820 bp, Triticum aestivum
atatctttttcatccacttgtctccaagcaagaaagaggccacggccggataagactcaccaagcttagctaagcaacttcaacaatggagggggcgggaacagcactactgtggagccaggtgggctcgccgctggcatccttcccggcgatgctgttcacggtggcggccatggcggccggcgcattcgcagtgtacttctacgcgccgtcatggcgcctgcgcagtgtgccgggccccctcgcttacggcctcgtcggccacctgccgctgctggacaagcatggctcccaggcgttcggcgtcctcgcaaagaaatacgggcccatctacaggttctacatgggcaggcagccgctggtggtggtcgccgacccggagctgtgcagggaggccggcatcaagaagttcaagagcatcgtcgacaggagcgtgccggtcaccatcgctagctcgcccatccactacaagagcctcctcttcaccaagggctcgacatggcaggcgatgcggaacgtgatcatctccatctaccagccatcgcacctggcgagcctcatcccggccatccagccctacatcgagcaggcgggcaacctgttctgccccggcgaggagatcaccttctctgacatctccatcaggctcttcaccgacgtcatcggccaggccgcctttggcgtcgacttcgggctcaccaaggacgccgccgacgacgccgagaagatcatccacgacgcgccccgcgacttcatccagaagcacctgtacgccaccacgtccctcaagatggacctgtcgggctcgctgtccatgctcgtcggcacgttcctgccggcgctccagaagccgctgcggcagctgatgctgcgcgtgccgggctccatggaccggcggatggacgagaccaacacggcgctcagcggcgagctcgacaccatcgtggcggagcgggcggctcaggcggaccggggccagaagaacttcctctccgtgctgctcaacggcatcgacaccagcgacgccatgaggaagctcttcacgccggactacgtcagcgcgctcacgtacgagcacttgctcgcgggctccggcaccatgtccttcacgctgtcgagcctggtgtacctcgtgtcggcgcacccggaggtggaggggaagctgctccaggagatcgacgcgttcgggcccaaggacgtggtgcccgacgccgacgacctccgcaccaagttcccctacctggagcaggtcgtcaaggagaccatgcgatactttcccggctccccggtggtctcgagggaggcgaccgccgacgtcgagatcggaggctatttcctgcccaaggggacgtgggtgtggctggcgacggcggtgctggggagggacccggagcagttcccggagcccgaagcgttccggccggagcgcttcgacccggagagcgagcagtgcaagcggagacacccctacgcgtacatccccttcggcatcggcccgcgggcgtgcccggggcagaagttcgcgttccagcagctcaagctcaccgtcatccacctctaccgccgctacgtcttcaggcactcgaccagcatggagtccccactgcagctgcagttctccatcgtcaccaacttcaagaacggtgtcaagctccaggtcgttcaaaggaagaactaatatgagtgtatgacagtaagtttgtgaccgactatttatgtactagtagcagtacatgcttgctccgttcaacgtgtgcgaaatcacatttttgaaagtgtgtaatcgatttgttcaattcaataaaagttgcggttttgac

SEQ ID NO: 32433 - protein, 530 aa, Triticum aestivum
MEGAGTALLWSQVGSPLASFPAMLFTVAAMAAGAFAVYFYAPSWRLRSVPGPLAYGLVGHLPLLDKHGSQAFGVLAKKYGPIYRFYMGRQPLVVVADPELCREAGIKKFKSIVDRSVPVTIASSPIHYKSLLFTKGSTWQAMRNVIISIYQPSHLASLIPAIQPYIEQAGNLFCPGEEITFSDISIRLFTDVIGQAAFGVDFGLTKDAADDAEKIIHDAPRDFIQKHLYATTSLKMDLSGSLSMLVGTFLPALQKPLRQLMLRVPGSMDRRMDETNTALSGELDTIVAERAAQADRGQKNFLSVLLNGIDTSDAMRKLFTPDYVSALTYEHLLAGSGTMSFTLSSLVYLVSAHPEVEGKLLQEIDAFGPKDVVPDADDLRTKFPYLEQVVKETMRYFPGSPVVSREATADVEIGGYFLPKGTWVWLATAVLGRDPEQFPEPEAFRPERFDPESEQCKRRHPYAYIPFGIGPRACPGQKFAFQQLKLTVIHLYRRYVFRHSTSMESPLQLQFSIVTNFKNGVKLQVVQRKN

SEQ ID NO: 32434 - protein, 508 aa, Triticum aestivum
MLFTVAAMAAGAFAVYFYAPSWRLRSVPGPLAYGLVGHLPLLDKHGSQAFGVLAKKYGPIYRFYMGRQPLVVVADPELCREAGIKKFKSIVDRSVPVTIASSPIHYKSLLFTKGSTWQAMRNVIISIYQPSHLASLIPAIQPYIEQAGNLFCPGEEITFSDISIRLFTDVIGQAAFGVDFGLTKDAADDAEKIIHDAPRDFIQKHLYATTSLKMDLSGSLSMLVGTFLPALQKPLRQLMLRVPGSMDRRMDETNTALSGELDTIVAERAAQADRGQKNFLSVLLNGIDTSDAMRKLFTPDYVSALTYEHLLAGSGTMSFTLSSLVYLVSAHPEVEGKLLQEIDAFGPKDVVPDADDLRTKFPYLEQVVKETMRYFPGSPVVSREATADVEIGGYFLPKGTWVWLATAVLGRDPEQFPEPEAFRPERFDPESEQCKRRHPYAYIPFGIGPRACPGQKFAFQQLKLTVIHLYRRYVFRHSTSMESPLQLQFSIVTNFKNGVKLQVVQRKN

SEQ ID NO: 32435 - protein, 501 aa, Triticum aestivum
MAAGAFAVYFYAPSWRLRSVPGPLAYGLVGHLPLLDKHGSQAFGVLAKKYGPIYRFYMGRQPLVVVADPELCREAGIKKFKSIVDRSVPVTIASSPIHYKSLLFTKGSTWQAMRNVIISIYQPSHLASLIPAIQPYIEQAGNLFCPGEEITFSDISIRLFTDVIGQAAFGVDFGLTKDAADDAEKIIHDAPRDFIQKHLYATTSLKMDLSGSLSMLVGTFLPALQKPLRQLMLRVPGSMDRRMDETNTALSGELDTIVAERAAQADRGQKNFLSVLLNGIDTSDAMRKLFTPDYVSALTYEHLLAGSGTMSFTLSSLVYLVSAHPEVEGKLLQEIDAFGPKDVVPDADDLRTKFPYLEQVVKETMRYFPGSPVVSREATADVEIGGYFLPKGTWVWLATAVLGRDPEQFPEPEAFRPERFDPESEQCKRRHPYAYIPFGIGPRACPGQKFAFQQLKLTVIHLYRRYVFRHSTSMESPLQLQFSIVTNFKNGVKLQVVQRKN

SEQ ID NO: 32436 - DNA, 1831 bp, Triticum aestivum
ctgcatccactctcagccatagtgttagaggatgcgaggcgatatggctcaagtactcaccatcttctccccggaagttctgctctcactcttgctctgcttcttcgtactacgccgctactacttggcaagacgatctgcgaacaattgcagtgatcatggccgccgtctcccgccgtcgcctccgaagctccctctcataggccacctgcacctcgtcggccccgacccgcacatctccctcgccgagctctcaaggaagcacgccggccgcgacggcctcatgctcctccgcctcggccaggtgcccaacctcgtcgtctcctccccgagcgccgccgaggccgtcctgcgcacgcacgaccacgtcttcgcctcccgcccgccgtccatcgtcgccggcgtcctcctcagcggcccctccgacgtcgccctcaccccctacggcgagtactggcggcaggccaggaagctcgttaccacccacctgctgagcgcccggaaggtgcgcgcgctccagggcggccgcgaggaggaggtgcgccttgtggtggccaaactccgggcggccgcggccgcccgctctgccgtcgacatgaccgagctgctcggcggcttcaccaacgacgtcgtatgccgcgccgtgtccgggaagttcttcagggaggaaggcaggaacgagctgttccgggagctcatcgccgggaacgtggctgcgataggggggttcaacctggaggactacttcccgagcttggccaaggtaggtcttctccggcgagtggtgctcggcaagacgaggaggctgaagaagagatgggacgagttgctcgacaagatcatagacgaccacgcgaccaaatcaccatggctagtaggagtacatcagcatcaacccaatgagcaagagcaaaaccaacaagatgaagacagagacttggtagatgttctcctctctcttcaacacgagtacagtctcactagagacaacgtcaaggccatcttgttggacatgttctctgcgggcacagacacgtcatccatcgtcctggagttcgccatggcggagctcatgcggaagccacacctcatggccaaactccaggccgacgtgaggagcaagacacccaagacccagcaaacagtcaaggaggacgatctgggcaacatgtcctacctcaaggctgtggtgaaggagacgctccggctccacccaccggcgccgctcctcctcccacacctctccatggccgagtgcgacgacgtcaacggctacatggtcccggcagggacacgcgtcatcatcaacgcgtgggctctctgcagagacaccgagtcctgggggatgaaggcggaggagttctggccggagaggttcatagacggggccaaagcagctgccgacttcaaagggagggatttccaattcctgccgtttggagccgggcggaggatttgccccgggatgggctttgggctcgccacggtcgaggccatgcttgccaaccttgtttattgcttcgactgggagctccccgatgggatgcgggaggaggacgttgacatggccgacgtgtttggagtgacgatgcgtcggaaggagaagcttgttcttgtcccaagaataccacaagatgcaaacatatagtgcatgcgcaccattccatactatcagttagtatagccgcaataaaaatttagaccaactcaaatatgaacatctcctagttatgcttctctcctacagaatgtaaaaaacgcaggaactgtactttttgcaggaattgtttctttaggagagataaagacacatgttgcattggacttctcg

SEQ ID NO: 32437 - protein, 538 aa, Triticum aestivum
MRGDMAQVLTIFSPEVLLSLLLCFFVLRRYYLARRSANNCSDHGRRLPPSPPKLPLIGHLHLVGPDPHISLAELSRKHAGRDGLMLLRLGQVPNLVVSSPSAAEAVLRTHDHVFASRPPSIVAGVLLSGPSDVALTPYGEYWRQARKLVTTHLLSARKVRALQGGREEEVRLVVAKLRAAAAARSAVDMTELLGGFTNDVVCRAVSGKFFREEGRNELFRELIAGNVAAIGGFNLEDYFPSLAKVGLLRRVVLGKTRRLKKRWDELLDKIIDDHATKSPWLVGVHQHQPNEQEQNQQDEDRDLVDVLLSLQHEYSLTRDNVKAILLDMFSAGTDTSSIVLEFAMAELMRKPHLMAKLQADVRSKTPKTQQTVKEDDLGNMSYLKAVVKETLRLHPPAPLLLPHLSMAECDDVNGYMVPAGTRVIINAWALCRDTESWGMKAEEFWPERFIDGAKAAADFKGRDFQFLPFGAGRRICPGMGFGLATVEAMLANLVYCFDWELPDGMREEDVDMADVFGVTMRRKEKLVLVPRIPQDANI

SEQ ID NO: 32438 - protein, 534 aa, Triticum aestivum
MAQVLTIFSPEVLLSLLLCFFVLRRYYLARRSANNCSDHGRRLPPSPPKLPLIGHLHLVGPDPHISLAELSRKHAGRDGLMLLRLGQVPNLVVSSPSAAEAVLRTHDHVFASRPPSIVAGVLLSGPSDVALTPYGEYWRQARKLVTTHLLSARKVRALQGGREEEVRLVVAKLRAAAAARSAVDMTELLGGFTNDVVCRAVSGKFFREEGRNELFRELIAGNVAAIGGFNLEDYFPSLAKVGLLRRVVLGKTRRLKKRWDELLDKIIDDHATKSPWLVGVHQHQPNEQEQNQQDEDRDLVDVLLSLQHEYSLTRDNVKAILLDMFSAGTDTSSIVLEFAMAELMRKPHLMAKLQADVRSKTPKTQQTVKEDDLGNMSYLKAVVKETLRLHPPAPLLLPHLSMAECDDVNGYMVPAGTRVIINAWALCRDTESWGMKAEEFWPERFIDGAKAAADFKGRDFQFLPFGAGRRICPGMGFGLATVEAMLANLVYCFDWELPDGMREEDVDMADVFGVTMRRKEKLVLVPRIPQDANI

SEQ ID NO: 32439 - protein, 454 aa, Triticum aestivum
MLLRLGQVPNLVVSSPSAAEAVLRTHDHVFASRPPSIVAGVLLSGPSDVALTPYGEYWRQARKLVTTHLLSARKVRALQGGREEEVRLVVAKLRAAAAARSAVDMTELLGGFTNDVVCRAVSGKFFREEGRNELFRELIAGNVAAIGGFNLEDYFPSLAKVGLLRRVVLGKTRRLKKRWDELLDKIIDDHATKSPWLVGVHQHQPNEQEQNQQDEDRDLVDVLLSLQHEYSLTRDNVKAILLDMFSAGTDTSSIVLEFAMAELMRKPHLMAKLQADVRSKTPKTQQTVKEDDLGNMSYLKAVVKETLRLHPPAPLLLPHLSMAECDDVNGYMVPAGTRVIINAWALCRDTESWGMKAEEFWPERFIDGAKAAADFKGRDFQFLPFGAGRRICPGMGFGLATVEAMLANLVYCFDWELPDGMREEDVDMADVFGVTMRRKEKLVLVPRIPQDANI

SEQ ID NO: 32440 - DNA, 1748 bp, Triticum aestivum
accttacatgctgtgctttcagtttgtggcgtgttgcctcctggtcctgctctactcgcttcgatctggttctaccagcagcgctggccatggcccgagaagctacccggtcatcggctgcctgctcgccttctacgagaaccggcggcggctgctcgactggtacaccgagatgctctcggcctcgcccacccagacgatcgtcgttgaccgcctgggcgcgcgccggaccgtggtgaccgcgaacccggccaacgtcgagtacatcctcctgggcaacttcggcaactaccccaaggggaagccgttcaccgacgtgctcggcgacctgctcggcaatggcatcttcaacgtcgacggcgacaagtggttcgcccagcggaagctggtcagccacgagttctcggcgcgcacgctccgtgagctggagatcgctgtgctcgaggctgaggcgctcgaccgcctcgtcccggcgatggaagcggccgctgagccgggcggcggcgccgtcgacatgcaggatgtcctccgccggttcgcattcgacgtcatctgccgtgtctcgctgggcgttgacccgggatgcctcgacccggcattgcccgcgccgaggctggccaccgccttcgacgccgccgccgggatcatcgccaggcgcggggctgcgccgctggccgccgtctggaagatcaagcgcgcgctgaacatcggctcggagcggcggctgcgggaggaggtccaggttatccacgaagccgtcatggatctcatccggagccgcaaaaagaagcgcttcttggtcaacgccggcgacgtgaggaacgacctgctgtcgcggatgatcgattgcggctacgccgacgaggatatccgtgacatggtgatcagcttcatcatggccggccgcgacacgacgtcgtcggcgctgacctggttcttctggctgctcatgcgccaccgcgacgtggagcgagacgtcctggaggagatcacaagcatgagacgagacagcagcaacggcacctacaccggcgaaggcttcgacctcgacgacttccgcaggatgcgggtgctccacgccgcgctgagcgagaccatgcggctgtacccgccggtggcgtgggactcgaagcacgcggcggcggcagacgtgctgccggacggcacccgcgtcgcgtccggcgaccgggtcacctactttcagtacgggatggggaggatggaggccatctggggctccgacgccggcgagttcagcctggagaggtggctcgcactgccggcggacggcaacgcggcgtctggcggcgtgtctcccttcaagtacccggtgttccagggcggcccgcggacgtgcctgggcagggagatggccttcgtgcagatgaagttcgtcgccggcgccatactccgtcggttcgacctccgccccgtcgacgagggccgcacgccggcgttcctgccgctgctcacttcccacatgcacggcgggctcaaggtgacggtgaggaggaggaaggtggagagtaccacaggcaacgccttgcacgacgcagctacagacaagagccgatcatctttttttagctagtggtaaatggcagcattccctcgtgtaaaaaagcaaataatttttcatatacatccactttgtacatgtccatacatacataggatgatcatatgaatctgatgtacacacagaaatgaattcaattcccccacagaataaaaaataaaaaaaaaac

SEQ ID NO: 32441 - protein, 529 aa, Triticum aestivum
PYMLCFQFVACCLLVLLYSLRSGSTSSAGHGPRSYPVIGCLLAFYENRRRLLDWYTEMLSASPTQTIVVDRLGARRTVVTANPANVEYILLGNFGNYPKGKPFTDVLGDLLGNGIFNVDGDKWFAQRKLVSHEFSARTLRELEIAVLEAEALDRLVPAMEAAAEPGGGAVDMQDVLRRFAFDVICRVSLGVDPGCLDPALPAPRLATAFDAAAGIIARRGAAPLAAVWKIKRALNIGSERRLREEVQVIHEAVMDLIRSRKKKRFLVNAGDVRNDLLSRMIDCGYADEDIRDMVISFIMAGRDTTSSALTWFFWLLMRHRDVERDVLEEITSMRRDSSNGTYTGEGFDLDDFRRMRVLHAALSETMRLYPPVAWDSKHAAAADVLPDGTRVASGDRVTYFQYGMGRMEAIWGSDAGEFSLERWLALPADGNAASGGVSPFKYPVFQGGPRTCLGREMAFVQMKFVAGAILRRFDLRPVDEGRTPAFLPLLTSHMHGGLKVTVRRRKVESTTGNALHDAATDKSRSSFFS

SEQ ID NO: 32442 - protein, 527 aa, Triticum aestivum
MLCFQFVACCLLVLLYSLRSGSTSSAGHGPRSYPVIGCLLAFYENRRRLLDWYTEMLSASPTQTIVVDRLGARRTVVTANPANVEYILLGNFGNYPKGKPFTDVLGDLLGNGIFNVDGDKWFAQRKLVSHEFSARTLRELEIAVLEAEALDRLVPAMEAAAEPGGGAVDMQDVLRRFAFDVICRVSLGVDPGCLDPALPAPRLATAFDAAAGIIARRGAAPLAAVWKIKRALNIGSERRLREEVQVIHEAVMDLIRSRKKKRFLVNAGDVRNDLLSRMIDCGYADEDIRDMVISFIMAGRDTTSSALTWFFWLLMRHRDVERDVLEEITSMRRDSSNGTYTGEGFDLDDFRRMRVLHAALSETMRLYPPVAWDSKHAAAADVLPDGTRVASGDRVTYFQYGMGRMEAIWGSDAGEFSLERWLALPADGNAASGGVSPFKYPVFQGGPRTCLGREMAFVQMKFVAGAILRRFDLRPVDEGRTPAFLPLLTSHMHGGLKVTVRRRKVESTTGNALHDAATDKSRSSFFS

SEQ ID NO: 32443 - protein, 472 aa, Triticum aestivum
MLSASPTQTIVVDRLGARRTVVTANPANVEYILLGNFGNYPKGKPFTDVLGDLLGNGIFNVDGDKWFAQRKLVSHEFSARTLRELEIAVLEAEALDRLVPAMEAAAEPGGGAVDMQDVLRRFAFDVICRVSLGVDPGCLDPALPAPRLATAFDAAAGIIARRGAAPLAAVWKIKRALNIGSERRLREEVQVIHEAVMDLIRSRKKKRFLVNAGDVRNDLLSRMIDCGYADEDIRDMVISFIMAGRDTTSSALTWFFWLLMRHRDVERDVLEEITSMRRDSSNGTYTGEGFDLDDFRRMRVLHAALSETMRLYPPVAWDSKHAAAADVLPDGTRVASGDRVTYFQYGMGRMEAIWGSDAGEFSLERWLALPADGNAASGGVSPFKYPVFQGGPRTCLGREMAFVQMKFVAGAILRRFDLRPVDEGRTPAFLPLLTSHMHGGLKVTVRRRKVESTTGNALHDAATDKSRSSFFS

SEQ ID NO: 32444 - DNA, 1695 bp, Triticum aestivum
acacccaaaataagatcacatttttttgctcttcccttctccaattcaaggagccggggcagccatggacgccgccacgggcacgggcatggaggagctgtcatggtgcgcgcggtgcgtcggcctggcattccttgtcttctccgtgtgcgtggtggcgctcggcgcggcgctcttcctcgcccgccggtggccgtggtgcagctgccacgtctgccgttcgtacctcacgggatcgtgggcgcgggacttcaccaacctcggcgactggtacgcacacctgctccgctgctccccgaccggcaccgtggccgtccacgtcctcggctgtaccatcaccgccaacccggccaacgtcgagcacatgctccacacccgcttcgacaacttccccaaagggaagcccttcgccgccgtcctcggcgacctcctcggcggcggcatcttcaacgtcgacggcgacgcctggcgccaccagcgcaagatggccagcctcgagctcggcagcgtcgcggtgcgctcctacgcgtacggcatcgtcgccgaggaagtggaggcgcgcctcctgccactgctcgccgacgccgccgacaatggcagggtggtcgacctgcaggacgtgttccggcgtttcgctttcgacaccatctgcaagatctccttcggactagaccccggctgcctcgagctcgacatgcccatgtccaagctcgccgccgcgttcgacaccgcctcgcggctatccgccatgcgcggcgcggcggcgtcgcccctggtgtggagggcaaagcggctgctgaacttcggctccgagagggagctcaggaagtccatccacctcgtcgacgagctcgcggcggccatgataaggcagcgccggaagctgggcgtcgccgggagccacgacctcctgtcccggttcatggcctcggaggcgcacggcaccgccgtcgacgacaagtacctccgcgacatcgtggtcagcttcctcctcgccggacgggacacggtgtcctccgcgctcaccaccatcttcatgctgctctccaagaaccccgctgtggcggccgccatgcgctcggaggccgccgccggcgagaagacaaggacatcgtcgaagaccacgtacgagcacctcaagtccctccactacacccacgcggtgctgcacgagaacatgcggctgttcccgcctgtgcagttcgactccaagttctgcgccgccgatgacgtgctcccggacggcacgtacgtgaccgccggggctcgtgtgatgtaccacccctacgccatggggcgcatgccccgcatttggggcgacgactgcgagaagttccgaccggagcggtggctgacgggccccggggggacgttcgtgccggagagcctgtacaggtacccggtgttccaggccgggctccgcgtgtgcctcggcaaggagctcgccgtgatggagatgaaggcggtgaccgtggccgtggtgaagcagttcgacgtggaggtggttgggcaaaagggcgccgtgcccaggttcgcgccgggtctgacggcgtccatcagcggcgggctcccggtgagggtcaggcgcatctagagacatgttgagtactgtagtagctagacactgtttctgtactgtacatagggatattataagagaagaaattaatgagaagggaagttgtttgtggcgac

SEQ ID NO: 32445 - protein, 509 aa, Triticum aestivum
MDAATGTGMEELSWCARCVGLAFLVFSVCVVALGAALFLARRWPWCSCHVCRSYLTGSWARDFTNLGDWYAHLLRCSPTGTVAVHVLGCTITANPANVEHMLHTRFDNFPKGKPFAAVLGDLLGGGIFNVDGDAWRHQRKMASLELGSVAVRSYAYGIVAEEVEARLLPLLADAADNGRVVDLQDVFRRFAFDTICKISFGLDPGCLELDMPMSKLAAAFDTASRLSAMRGAAASPLVWRAKRLLNFGSERELRKSIHLVDELAAAMIRQRRKLGVAGSHDLLSRFMASEAHGTAVDDKYLRDIVVSFLLAGRDTVSSALTTIFMLLSKNPAVAAAMRSEAAAGEKTRTSSKTTYEHLKSLHYTHAVLHENMRLFPPVQFDSKFCAADDVLPDGTYVTAGARVMYHPYAMGRMPRIWGDDCEKFRPERWLTGPGGTFVPESLYRYPVFQAGLRVCLGKELAVMEMKAVTVAVVKQFDVEVVGQKGAVPRFAPGLTASISGGLPVRVRRI

SEQ ID NO: 32446 - protein, 501 aa, Triticum aestivum
MEELSWCARCVGLAFLVFSVCVVALGAALFLARRWPWCSCHVCRSYLTGSWARDFTNLGDWYAHLLRCSPTGTVAVHVLGCTITANPANVEHMLHTRFDNFPKGKPFAAVLGDLLGGGIFNVDGDAWRHQRKMASLELGSVAVRSYAYGIVAEEVEARLLPLLADAADNGRVVDLQDVFRRFAFDTICKISFGLDPGCLELDMPMSKLAAAFDTASRLSAMRGAAASPLVWRAKRLLNFGSERELRKSIHLVDELAAAMIRQRRKLGVAGSHDLLSRFMASEAHGTAVDDKYLRDIVVSFLLAGRDTVSSALTTIFMLLSKNPAVAAAMRSEAAAGEKTRTSSKTTYEHLKSLHYTHAVLHENMRLFPPVQFDSKFCAADDVLPDGTYVTAGARVMYHPYAMGRMPRIWGDDCEKFRPERWLTGPGGTFVPESLYRYPVFQAGLRVCLGKELAVMEMKAVTVAVVKQFDVEVVGQKGAVPRFAPGLTASISGGLPVRVRRI

SEQ ID NO: 32447 - protein, 409 aa, Triticum aestivum
MLHTRFDNFPKGKPFAAVLGDLLGGGIFNVDGDAWRHQRKMASLELGSVAVRSYAYGIVAEEVEARLLPLLADAADNGRVVDLQDVFRRFAFDTICKISFGLDPGCLELDMPMSKLAAAFDTASRLSAMRGAAASPLVWRAKRLLNFGSERELRKSIHLVDELAAAMIRQRRKLGVAGSHDLLSRFMASEAHGTAVDDKYLRDIVVSFLLAGRDTVSSALTTIFMLLSKNPAVAAAMRSEAAAGEKTRTSSKTTYEHLKSLHYTHAVLHENMRLFPPVQFDSKFCAADDVLPDGTYVTAGARVMYHPYAMGRMPRIWGDDCEKFRPERWLTGPGGTFVPESLYRYPVFQAGLRVCLGKELAVMEMKAVTVAVVKQFDVEVVGQKGAVPRFAPGLTASISGGLPVRVRRI

SEQ ID NO: 32448 - DNA, 1883 bp, Triticum aestivum
ataaccataaaccatctcatatctcaggctctcgacttagcagcagagaaagccaagcacagaattaaccacaaatcatggagatggagctcaatctcgtctcgtacgtgtccatcgccctgttcgtcctctcgggcgcgtacgtctaccacgcgacgcggagccggtcgccgaggcagcggctcccgccggcgccgccggggtggcccgtgatcggccacctccacctgctgacggacatgccccaccacgcgctggcggagctggccaagaccatgcgcgccccactgctccggctccggctcgggagcgtcccggccctggtgatctccaagcccgacctggcccgcgccgcgctcaccagcaacgacgcggccatggcgtcccgcccccacctcctctccggccagttcctctcgttcgggtgctccgacgtgaccttcgcccccgcggggccgtaccaccgcatggcgcggcgggtggtcgtctccgagctcctctcggcgcgccgcgtcgccacctacggcagcgtccggggcaaggagctccgccgcctgctcgcgcacctcaccaagaacaccaagccgggaacgcccgtcgacctcagcgagtgcttcctcaacctcgccaacgacgtgctctgccgcgtggccttcggccgccggttcccgcacggcaaggacgacaagctcgccgcggtgctcgccgaggcccaggacctgttcgccgggttcaccatcggggacttcttcccggagctcgagcccttcgccagcaccgtcacgggcctccgccgccggctgaagagctgcctcgccgacctccgcgaggtctgcgacgacatcgtcgaggagcacgtgagcggcaagcaccagcgcctccccggcgaccgcgacgaggacttcgtggacgtgctcctccgcgtccagaagtcgcccgacctcgaggtcccgctcaccgacgacaacctcaaagccctcgtcctggacatgttcgtcgccggcacggacacgacgttcgcgacgctggagtgggtgatgacggagctggtgcgccacccgcgcatccttcaaaaggcgcaggaggaggtccggcgggtggtgggcgccaagggccgggtggaggagtcggacctggcggagctccactacatgcgcgccatcatcaaggagaccttccggctgcacccggcggtgccgctgctcgtgccgcgggagaccgtcgcggcgtgcactctcggcggctacgacatcccggccaagacccgcgtcttcatcaacaccttcgccatgggccgggacccggagatctgggaggagccgctggagtactcgccggagcggttcgaggtggccggcgccggcggcgagatcgacctcaaggacccggactacaagctgctgccgttcggcggcgggcggagggggtgcccggggtacacgttcgcgctggccaccgtgcaggtatcgctggccagcctgctgtaccacttcgagtgggcgctgccggccggcgtgcgcgccgaggacgtgagcgtggaggagaccttcgggctggccaccaggaagaaggagccgctcttcgtcgccgtcagcaagagcgatgtgtaccagttcaagggggaggagctcaacgaggtttaaattatttttgcttagtaatttcttgtcatgcaagtaggttttttctcttctcttcagacaatgcaaataagagagtaggtagctaggtaaaaaaacaaaagcaaggaagagagagaataggtaaaataaaaatggatctagtaccgcacgtgttggtgcctgacttgctgtggtaagagacgtgtatgtgtgtaattttgttgtggtaattcttctaaaaaaatgcaatattttgtagtc

SEQ ID NO: 32449 - protein, 521 aa, Triticum aestivum
MEMELNLVSYVSIALFVLSGAYVYHATRSRSPRQRLPPAPPGWPVIGHLHLLTDMPHHALAELAKTMRAPLLRLRLGSVPALVISKPDLARAALTSNDAAMASRPHLLSGQFLSFGCSDVTFAPAGPYHRMARRVVVSELLSARRVATYGSVRGKELRRLLAHLTKNTKPGTPVDLSECFLNLANDVLCRVAFGRRFPHGKDDKLAAVLAEAQDLFAGFTIGDFFPELEPFASTVTGLRRRLKSCLADLREVCDDIVEEHVSGKHQRLPGDRDEDFVDVLLRVQKSPDLEVPLTDDNLKALVLDMFVAGTDTTFATLEWVMTELVRHPRILQKAQEEVRRVVGAKGRVEESDLAELHYMRAIIKETFRLHPAVPLLVPRETVAACTLGGYDIPAKTRVFINTFAMGRDPEIWEEPLEYSPERFEVAGAGGEIDLKDPDYKLLPFGGGRRGCPGYTFALATVQVSLASLLYHFEWALPAGVRAEDVSVEETFGLATRKKEPLFVAVSKSDVYQFKGEELNEV

SEQ ID NO: 32450 - protein, 519 aa, Triticum aestivum
MELNLVSYVSIALFVLSGAYVYHATRSRSPRQRLPPAPPGWPVIGHLHLLTDMPHHALAELAKTMRAPLLRLRLGSVPALVISKPDLARAALTSNDAAMASRPHLLSGQFLSFGCSDVTFAPAGPYHRMARRVVVSELLSARRVATYGSVRGKELRRLLAHLTKNTKPGTPVDLSECFLNLANDVLCRVAFGRRFPHGKDDKLAAVLAEAQDLFAGFTIGDFFPELEPFASTVTGLRRRLKSCLADLREVCDDIVEEHVSGKHQRLPGDRDEDFVDVLLRVQKSPDLEVPLTDDNLKALVLDMFVAGTDTTFATLEWVMTELVRHPRILQKAQEEVRRVVGAKGRVEESDLAELHYMRAIIKETFRLHPAVPLLVPRETVAACTLGGYDIPAKTRVFINTFAMGRDPEIWEEPLEYSPERFEVAGAGGEIDLKDPDYKLLPFGGGRRGCPGYTFALATVQVSLASLLYHFEWALPAGVRAEDVSVEETFGLATRKKEPLFVAVSKSDVYQFKGEELNEV

SEQ ID NO: 32451 - protein, 467 aa, Triticum aestivum
MPHHALAELAKTMRAPLLRLRLGSVPALVISKPDLARAALTSNDAAMASRPHLLSGQFLSFGCSDVTFAPAGPYHRMARRVVVSELLSARRVATYGSVRGKELRRLLAHLTKNTKPGTPVDLSECFLNLANDVLCRVAFGRRFPHGKDDKLAAVLAEAQDLFAGFTIGDFFPELEPFASTVTGLRRRLKSCLADLREVCDDIVEEHVSGKHQRLPGDRDEDFVDVLLRVQKSPDLEVPLTDDNLKALVLDMFVAGTDTTFATLEWVMTELVRHPRILQKAQEEVRRVVGAKGRVEESDLAELHYMRAIIKETFRLHPAVPLLVPRETVAACTLGGYDIPAKTRVFINTFAMGRDPEIWEEPLEYSPERFEVAGAGGEIDLKDPDYKLLPFGGGRRGCPGYTFALATVQVSLASLLYHFEWALPAGVRAEDVSVEETFGLATRKKEPLFVAVSKSDVYQFKGEELNEV

SEQ ID NO: 32452 - DNA, 1885 bp, Triticum aestivum
agggacagaccagaacaacccaaccgcacccgttccagagcgcgatcacacaacagagcggtaacagtttcccgggcagttcccgccccggccggcgccatggacttcgtcttcgtggagaagctcctcgcgggcctcctcgcggccgtggtgggcgccatcgtggtgtccaagatccggggccgcaagctgaggctgccgccgggccccttcccggtccccatcttcggcaactggctgcaggtcggcgacgacctgaaccaccgcaacctggcggcgatggcccgcaagttcggcgaggtcttcctcctccgcatgggccagcgcaacctggtggtggtctcctctccgccgctcgcccgcgaggtgctccacacgcagggcgtggagttcgggtcccgcacccgcaacgtggtgttcgacatcttcacgggcgagggccaagacatggtgttcaccgtgtacggtgaccactggcgcaagatgcggcgcatcatgacggtgcccttcttcaccaacaaggtggtgcagcagtaccggcccgggtgggaggccgaggcggccttcgtcatcgacaacgtccgcgccgaccccagggccgccacagagggcgtcgtgctccgccgccacctgcagctcatgatgtacaacaacatgtaccgcatcatgttcgaccggcggttcgagagcatggacgacccgctgttcctccggctccgggcgctcaacggcgagcgcagccgcctcgcgcaaagcttcgagtacaactacggcgacttcatccccatcctccgccccttcctccgcggctacctcaggctctgcaaggaggtcaaggagacccgcctcaagctcttcaaggattacttcctggacgagaggaagaagctggtgagcaccaaggccatggacaacaacggtgggctcaagtgcgccattgatcacatcctggaggctgagcagaagggggagatcaacgaggacaacgtcctctacatcatcgagaacatcaacgtcgcagcgatcgagacgacgctgtggtcgatcgagtgggggctggcagagctggtgaaccacccggagatccagcagaagcttcgcgacgaaatggacgcggtgctgggcgcggggcaccagatcacggagccggagacgcacaagctcccctacctgcaggcggtgatcaaggagacgctccggctgcgcatggccatcccgctgctggtgccccacatgaacctccacgacgccaagctcgccggctacaacatccccgccgagagcaagatcctcgtcaacgcctggttcctcgccaacaacccggagcagtggaagcggcccgacgagttccggccggagcgcttcctggaggaggagaagcacgtggaggccaacggcaacgacttcaggtacctgcccttcggcgtcggccgccggagctgccccggcatcatcctcgcgctgcccatcctcggcatcaccatcggccgcctcgtccagaacttcgtgctcacgccgccgcccggccaggacaagctcgacaccacggagaagggcggccagttcagcctccacatcctcaagcactccaccatcgtcgccaagcccagagtgttctagagcagcgacgtacgtgctctggagtttggacttccagcattttggtttggtggtgttgtactttcacgattgttcgctcgtcctaagtatacttgattatagtatccgtcacagagtagacacacgtttcgttaatgttatccgcaagaaaacagaggagctgaagaaatgtcgaacggggaggaaaagactggacgatttccgtcagatgtactcctgatgctgccataaattaaatcctcaaaatattgatgattttttcacg

SEQ ID NO: 32453 - protein, 539 aa, Triticum aestivum
RDRPEQPNRTRSRARSHNRAVTVSRAVPAPAGAMDFVFVEKLLAGLLAAVVGAIVVSKIRGRKLRLPPGPFPVPIFGNWLQVGDDLNHRNLAAMARKFGEVFLLRMGQRNLVVVSSPPLAREVLHTQGVEFGSRTRNVVFDIFTGEGQDMVFTVYGDHWRKMRRIMTVPFFTNKVVQQYRPGWEAEAAFVIDNVRADPRAATEGVVLRRHLQLMMYNNMYRIMFDRRFESMDDPLFLRLRALNGERSRLAQSFEYNYGDFIPILRPFLRGYLRLCKEVKETRLKLFKDYFLDERKKLVSTKAMDNNGGLKCAIDHILEAEQKGEINEDNVLYIIENINVAAIETTLWSIEWGLAELVNHPEIQQKLRDEMDAVLGAGHQITEPETHKLPYLQAVIKETLRLRMAIPLLVPHMNLHDAKLAGYNIPAESKILVNAWFLANNPEQWKRPDEFRPERFLEEEKHVEANGNDFRYLPFGVGRRSCPGIILALPILGITIGRLVQNFVLTPPPGQDKLDTTEKGGQFSLHILKHSTIVAKPRVF

SEQ ID NO: 32454 - protein, 506 aa, Triticum aestivum
MDFVFVEKLLAGLLAAVVGAIVVSKIRGRKLRLPPGPFPVPIFGNWLQVGDDLNHRNLAAMARKFGEVFLLRMGQRNLVVVSSPPLAREVLHTQGVEFGSRTRNVVFDIFTGEGQDMVFTVYGDHWRKMRRIMTVPFFTNKVVQQYRPGWEAEAAFVIDNVRADPRAATEGVVLRRHLQLMMYNNMYRIMFDRRFESMDDPLFLRLRALNGERSRLAQSFEYNYGDFIPILRPFLRGYLRLCKEVKETRLKLFKDYFLDERKKLVSTKAMDNNGGLKCAIDHILEAEQKGEINEDNVLYIIENINVAAIETTLWSIEWGLAELVNHPEIQQKLRDEMDAVLGAGHQITEPETHKLPYLQAVIKETLRLRMAIPLLVPHMNLHDAKLAGYNIPAESKILVNAWFLANNPEQWKRPDEFRPERFLEEEKHVEANGNDFRYLPFGVGRRSCPGIILALPILGITIGRLVQNFVLTPPPGQDKLDTTEKGGQFSLHILKHSTIVAKPRVF

SEQ ID NO: 32455 - protein, 446 aa, Triticum aestivum
MARKFGEVFLLRMGQRNLVVVSSPPLAREVLHTQGVEFGSRTRNVVFDIFTGEGQDMVFTVYGDHWRKMRRIMTVPFFTNKVVQQYRPGWEAEAAFVIDNVRADPRAATEGVVLRRHLQLMMYNNMYRIMFDRRFESMDDPLFLRLRALNGERSRLAQSFEYNYGDFIPILRPFLRGYLRLCKEVKETRLKLFKDYFLDERKKLVSTKAMDNNGGLKCAIDHILEAEQKGEINEDNVLYIIENINVAAIETTLWSIEWGLAELVNHPEIQQKLRDEMDAVLGAGHQITEPETHKLPYLQAVIKETLRLRMAIPLLVPHMNLHDAKLAGYNIPAESKILVNAWFLANNPEQWKRPDEFRPERFLEEEKHVEANGNDFRYLPFGVGRRSCPGIILALPILGITIGRLVQNFVLTPPPGQDKLDTTEKGGQFSLHILKHSTIVAKPRVF

SEQ ID NO: 32456 - DNA, 1749 bp, Triticum aestivum
agagcaatacttgttgccaacacagacaccgctctgcctcttgaacccaagcagagcatcaaagaaaccagaggaggcggaggcagaggaagaagatggcgctcctccttgtgcttgtcggcgttgtggtcggcgtggtgctcgcgagcagcctgctgctgcggtggaacgaggtcaggtacggccggaggaaggagggccgcttgccgccggggacaatggggtggccgctcttcggcgagaccaccgagttcctcaagcagggcccgagcttcatgaagcagaggaggctcaggtacgggaggctgttccggacgcacatcctgggttgccccacggtggtgtgcatggacccggagctcaaccgccggatgctgctgcagggcgaggccggcggcctggtgcccggctacccgcagtccatgctcgacatcctcggccgcaacaatatcgccgccgtgcacggccagctgcaccgcgtcatgcgtggtgccatggtcggcctcgtccgccccgccgcgctccggcaaagcctcctccccaagatcgacgccttcatgcgcgaccacctctgcggctgggccggcaccgttgtcgacgtccaggccaagaccaaggagatggccttgctgtctgcactcaggcagatcgccggcgtcacggccggcccactctctgacgccctcaagacggagctgtacacgcttgtgctcggcaccatctccttgcccatcaacctcccagggaccagctactaccaaggctttcaggcaaggaagaagctcgtgtccattctagagcagatgatcgcggaacggcgatcctctggtgatgctcacgatgacatgttggatgctctcttgagaagcggcgatgacggcaccagggaaaagattagcgatgagcagatcattgacttgctcatcgccctcatctactctgggtacgagaccatgtcgacgacctcaatgatggctgtcaagtacctgtcagaacatccgcgggccctcgaagaacttaggagagagcatcttgatatcaggaagggaaaatcgccggacgaagccatcagctacgatgatgtcaagtccatgactttcactcgagctgccatttttgagacgctaagattagccacagttgtgaatggactgctgaggaaaactattaaggatgtagaaatgaatgggtatgtcattccaaaaggctggagaatctatgtttacacaagggagataaactacgatccgttcatgtatcctgacccgatgacctttaatccgtggagatggctggagaagaacatggaatcgcacccgcacttcatgttgttcggagggggcggccggatgtgccccgggaaggaggtgggaacggtggagatcacgactttcctccactatttcgtgacccgatacagatgggaggaagaaggcaagaacaccatcttgaaattcccccgggtggaagctcccaacgggctgcatatccgagttcaagattactgaactcttccaagaaacattttgcagagtttagatagatatgacaaagacaaagacgatgagagcgcgattctgcgccgatgaatagattagattagaaatttgatacctgtataaacataggaaaatagcgatagtatagatgttataggttcactaggtagccgggataataggcaacaacatgctcctgtgttcttttgttctaccaattccgaaatgaacaaaggcgtatgatgtgggt

SEQ ID NO: 32457 - protein, 470 aa, Triticum aestivum
MALLLVLVGVVVGVVLASSLLLRWNEVRYGRRKEGRLPPGTMGWPLFGETTEFLKQGPSFMKQRRLRYGRLFRTHILGCPTVVCMDPELNRRMLLQGEAGGLVPGYPQSMLDILGRNNIAAVHGQLHRVMRGAMVGLVRPAALRQSLLPKIDAFMRDHLCGWAGTVVDVQAKTKEMALLSALRQIAGVTAGPLSDALKTELYTLVLGTISLPINLPGTSYYQGFQARKKLVSILEQMIAERRSSGDAHDDMLDALLRSGDDGTREKISDEQIIDLLIALIYSGYETMSTTSMMAVKYLSEHPRALEELRREHLDIRKGKSPDEAISYDDVKSMTFTRAAIFETLRLATVVNGLLRKTIKDVEMNGYVIPKGWRIYVYTREINYDPFMYPDPMTFNPWRWLEKNMESHPHFMLFGGGGRMCPGKEVGTVEITTFLHYFVTRYRWEEEGKNTILKFPRVEAPNGLHIRVQDY

SEQ ID NO: 32458 - protein, 429 aa, Triticum aestivum
MGWPLFGETTEFLKQGPSFMKQRRLRYGRLFRTHILGCPTVVCMDPELNRRMLLQGEAGGLVPGYPQSMLDILGRNNIAAVHGQLHRVMRGAMVGLVRPAALRQSLLPKIDAFMRDHLCGWAGTVVDVQAKTKEMALLSALRQIAGVTAGPLSDALKTELYTLVLGTISLPINLPGTSYYQGFQARKKLVSILEQMIAERRSSGDAHDDMLDALLRSGDDGTREKISDEQIIDLLIALIYSGYETMSTTSMMAVKYLSEHPRALEELRREHLDIRKGKSPDEAISYDDVKSMTFTRAAIFETLRLATVVNGLLRKTIKDVEMNGYVIPKGWRIYVYTREINYDPFMYPDPMTFNPWRWLEKNMESHPHFMLFGGGGRMCPGKEVGTVEITTFLHYFVTRYRWEEEGKNTILKFPRVEAPNGLHIRVQDY

SEQ ID NO: 32459 - protein, 410 aa, Triticum aestivum
MKQRRLRYGRLFRTHILGCPTVVCMDPELNRRMLLQGEAGGLVPGYPQSMLDILGRNNIAAVHGQLHRVMRGAMVGLVRPAALRQSLLPKIDAFMRDHLCGWAGTVVDVQAKTKEMALLSALRQIAGVTAGPLSDALKTELYTLVLGTISLPINLPGTSYYQGFQARKKLVSILEQMIAERRSSGDAHDDMLDALLRSGDDGTREKISDEQIIDLLIALIYSGYETMSTTSMMAVKYLSEHPRALEELRREHLDIRKGKSPDEAISYDDVKSMTFTRAAIFETLRLATVVNGLLRKTIKDVEMNGYVIPKGWRIYVYTREINYDPFMYPDPMTFNPWRWLEKNMESHPHFMLFGGGGRMCPGKEVGTVEITTFLHYFVTRYRWEEEGKNTILKFPRVEAPNGLHIRVQDY

SEQ ID NO: 32460 - DNA, 1964 bp, Triticum aestivum
accctcttacaacacatcaacctgaaacctgcactgcacagtccagaatactccaagaaaaaaagttagagcttttagtttgagaaccaataaatggtggacctgtccatgatcgacatggaatggctccaagagccattgagatggctgttcgttgcctcggtcatcttcgtgttgctgcagcggcggcgtggcaaggcgccgccgctgcccccaggaccgtattcgccgccgattgtcggcaatatcttcatgatggaccagctgacccaccggggcttcgcggggctggccaagcagtacggcggccttctccacctccgcctcggcaaggtccacaccttcgccgtatcgacgccggagtacgcccagcaggtgctgcaggcccaggacgccgccttctcgcaccggcctgccaccatcgccaccacctacctcacctacaaccgcgccgacatggtgttcgcccgctacgggcccttctggcgccagatgcgcaagctgtgcgtgatgaagctcttcagccggcgccgtcccgggacgtggctcgccgtgcgcgacgagtccgcggcgctcgtccgtgccgtggcccggcggagcggcgagcctgtcaacctcggcgacctcatcttcaacctcagcatgaacgtcaccttccgcgcggcgttcggcgctgaagccgccggtgacggcaatggccggaagcgggacgagttcatcgctatcatgcaggagttctccaagctcttcggcgcgttcagcatcggcgacttcatcccatggctgggatgggcggacccgcagggcatcagcgtgcgcctccgagctgcgggcgcagccctagacgatttcatggtcaagatcatggacgagcacataaagaggggcaagaaccctgacgacatggacgccgacatggtagacgccatgctcgcctacctccctgaagcgaagccggagaaggccgctggcgacgacctgcagcacacgctccgcctcaaccgtgacaacatcaaggccattatcatggacgtgatgtttggtgggacggagacggtgtcgtcggcaatagaatgggcaatggccgaaatgatgcatagcccagatgacctcttgcagctgcagcaggagtttgccgataaggtgggactcgaccgaaacgtggacgaggcagacctcaacaacctctccttcctcaaatgtgttatcaaggagacactccggttacacccgcccatcccgctcctccaccgtgagaacgccgaggactgtgtggttggcaactactctgtgccccagggctcgagcgtcaatatcaatgtcttcgcaatgggccgcgacgacagggtgtggaaggacgccgacacattccgtccgtcacggttcatgatgggtgaaggggaggcagccggggtcgacttcaagggcgggtgcttccagttcctgccgtttgggtctggtcgtcgctcgtgcccggggatggcgctcggcctgtactcgctggagctcgttattgcgcggctcgcccatgggttcaactgggcgctgcccgacggtaagaagccgtcggagctcgacatgggtgacattttcggcctcaccgcaccgcgtgccacaaggctctgggtcgtgcccacgccccgacttacctgccctttggttgttgatgtcgacgccgcgtgccagacatgatgtcgtgcgcgcacagctgatggtatctaccagctgcgcaggggtgaaggtgtttgattagcgtgttagttaatctagttgtagctatagctatttcccctttcgtgttagatatttcctagtttcgttcatacaagatcgcacccctataaatcggttgccttgcatgtggaatagcacgacctgttgttggcatcgtggagctgtgggtcacgatcgttcctttcatcatgaataaaaaggagagccctacttcagtgctcccctaacgc

SEQ ID NO: 32461 - protein, 532 aa, Triticum aestivum
MVDLSMIDMEWLQEPLRWLFVASVIFVLLQRRRGKAPPLPPGPYSPPIVGNIFMMDQLTHRGFAGLAKQYGGLLHLRLGKVHTFAVSTPEYAQQVLQAQDAAFSHRPATIATTYLTYNRADMVFARYGPFWRQMRKLCVMKLFSRRRPGTWLAVRDESAALVRAVARRSGEPVNLGDLIFNLSMNVTFRAAFGAEAAGDGNGRKRDEFIAIMQEFSKLFGAFSIGDFIPWLGWADPQGISVRLRAAGAALDDFMVKIMDEHIKRGKNPDDMDADMVDAMLAYLPEAKPEKAAGDDLQHTLRLNRDNIKAIIMDVMFGGTETVSSAIEWAMAEMMHSPDDLLQLQQEFADKVGLDRNVDEADLNNLSFLKCVIKETLRLHPPIPLLHRENAEDCVVGNYSVPQGSSVNINVFAMGRDDRVWKDADTFRPSRFMMGEGEAAGVDFKGGCFQFLPFGSGRRSCPGMALGLYSLELVIARLAHGFNWALPDGKKPSELDMGDIFGLTAPRATRLWVVPTPRLTCPLVVDVDAACQT

SEQ ID NO: 32462 - protein, 527 aa, Triticum aestivum
MIDMEWLQEPLRWLFVASVIFVLLQRRRGKAPPLPPGPYSPPIVGNIFMMDQLTHRGFAGLAKQYGGLLHLRLGKVHTFAVSTPEYAQQVLQAQDAAFSHRPATIATTYLTYNRADMVFARYGPFWRQMRKLCVMKLFSRRRPGTWLAVRDESAALVRAVARRSGEPVNLGDLIFNLSMNVTFRAAFGAEAAGDGNGRKRDEFIAIMQEFSKLFGAFSIGDFIPWLGWADPQGISVRLRAAGAALDDFMVKIMDEHIKRGKNPDDMDADMVDAMLAYLPEAKPEKAAGDDLQHTLRLNRDNIKAIIMDVMFGGTETVSSAIEWAMAEMMHSPDDLLQLQQEFADKVGLDRNVDEADLNNLSFLKCVIKETLRLHPPIPLLHRENAEDCVVGNYSVPQGSSVNINVFAMGRDDRVWKDADTFRPSRFMMGEGEAAGVDFKGGCFQFLPFGSGRRSCPGMALGLYSLELVIARLAHGFNWALPDGKKPSELDMGDIFGLTAPRATRLWVVPTPRLTCPLVVDVDAACQT

SEQ ID NO: 32463 - protein, 524 aa, Triticum aestivum
MEWLQEPLRWLFVASVIFVLLQRRRGKAPPLPPGPYSPPIVGNIFMMDQLTHRGFAGLAKQYGGLLHLRLGKVHTFAVSTPEYAQQVLQAQDAAFSHRPATIATTYLTYNRADMVFARYGPFWRQMRKLCVMKLFSRRRPGTWLAVRDESAALVRAVARRSGEPVNLGDLIFNLSMNVTFRAAFGAEAAGDGNGRKRDEFIAIMQEFSKLFGAFSIGDFIPWLGWADPQGISVRLRAAGAALDDFMVKIMDEHIKRGKNPDDMDADMVDAMLAYLPEAKPEKAAGDDLQHTLRLNRDNIKAIIMDVMFGGTETVSSAIEWAMAEMMHSPDDLLQLQQEFADKVGLDRNVDEADLNNLSFLKCVIKETLRLHPPIPLLHRENAEDCVVGNYSVPQGSSVNINVFAMGRDDRVWKDADTFRPSRFMMGEGEAAGVDFKGGCFQFLPFGSGRRSCPGMALGLYSLELVIARLAHGFNWALPDGKKPSELDMGDIFGLTAPRATRLWVVPTPRLTCPLVVDVDAACQT

SEQ ID NO: 32464 - DNA, 1376 bp, Triticum aestivum
acggctgggtttcagtgagatagaacctttgatcacacgccttaccagtctcttgtggcatggcggccctgcagcttgccgccctccttgccctgctgctcgcactgtggcgtctcgtgtggcggccgcgcgccatggcgcggtcgttcgtgaggcaggggatccgagggccgccctacacgttcctggccgggtccttgccggaggcgaagcggctgctgatcgctggccggagaggcgtgccgcccctcgacgccgggtgccacgacatcatgcccatcctgctgccgcagttccacagatgggttgccgattatggcaaaacgttcctgttctggatcgggctgatccccgccatcttctctatcgacctgcagctgataaagcaagtgctcacagacatgacgggcctgtatcagaaggacttcatgatccccgtgctcaaatccctcttcggcaacggcgtcatattgataaatggtgacgattggaagcggcaccggaaagtagtccttcctgctttcaactatgagcagatcaagagcatgtcagcggtgacggcagaggtcacaaggcagatgatacagcaatggggcgagcagatacaccaaagcaacagcgacaagaaagcagctgagatagacatgatccacgccttcaacgacctgactgccaagatcaacggccgtgtcgccttcggcactacccaccgggatgtcgaggaggtcatcgtcttgatgcaggagatgcaaaaggtcgccactgcggccatgctcgatgctccaatactctggtatctgccgactcggcgtaacttgcacgttcgacgcctgaacaaacagctgagaagcaagatcatgtcgatcatgcaggcacggctggccgcagatggagccaaatatggtcgaggagacaccggcggctgcggggacgacctgctcgggctgttgttagaggcgtggacaccgcaccggcaagtgaggggcggcgatacgctgacaactgacgaggtgattgatgagtgcaaaaccttcttcgccgcagggcaggaaaccacggccaccctcctcgtctgggccatgttcctgcttgccgtgcacccccagtggcaggacaaggtcagggaagaggtcctccgggagttccccggcggggacagcgacgatgtggtacccaacgcggatgttctcgccaaactgaagctggtgcgtacatttcaactgtcaatgtcatttttcctatattttcgtacgaatgtattcggtatcataaatgctcatattgtttctataaagttgatcaaagtttacaaaatttaactgttgagattttttgtatgtagtgtaattttgcaaagagggaataactaatgtgtt

SEQ ID NO: 32465 - protein, 419 aa, Triticum aestivum
MAALQLAALLALLLALWRLVWRPRAMARSFVRQGIRGPPYTFLAGSLPEAKRLLIAGRRGVPPLDAGCHDIMPILLPQFHRWVADYGKTFLFWIGLIPAIFSIDLQLIKQVLTDMTGLYQKDFMIPVLKSLFGNGVILINGDDWKRHRKVVLPAFNYEQIKSMSAVTAEVTRQMIQQWGEQIHQSNSDKKAAEIDMIHAFNDLTAKINGRVAFGTTHRDVEEVIVLMQEMQKVATAAMLDAPILWYLPTRRNLHVRRLNKQLRSKIMSIMQARLAADGAKYGRGDTGGCGDDLLGLLLEAWTPHRQVRGGDTLTTDEVIDECKTFFAAGQETTATLLVWAMFLLAVHPQWQDKVREEVLREFPGGDSDDVVPNADVLAKLKLVRTFQLSMSFFLYFRTNVFGIINAHIVSIKLIKVYKI

SEQ ID NO: 32466 - protein, 394 aa, Triticum aestivum
MARSFVRQGIRGPPYTFLAGSLPEAKRLLIAGRRGVPPLDAGCHDIMPILLPQFHRWVADYGKTFLFWIGLIPAIFSIDLQLIKQVLTDMTGLYQKDFMIPVLKSLFGNGVILINGDDWKRHRKVVLPAFNYEQIKSMSAVTAEVTRQMIQQWGEQIHQSNSDKKAAEIDMIHAFNDLTAKINGRVAFGTTHRDVEEVIVLMQEMQKVATAAMLDAPILWYLPTRRNLHVRRLNKQLRSKIMSIMQARLAADGAKYGRGDTGGCGDDLLGLLLEAWTPHRQVRGGDTLTTDEVIDECKTFFAAGQETTATLLVWAMFLLAVHPQWQDKVREEVLREFPGGDSDDVVPNADVLAKLKLVRTFQLSMSFFLYFRTNVFGIINAHIVSIKLIKVYKI

SEQ ID NO: 32467 - protein, 348 aa, Triticum aestivum
MPILLPQFHRWVADYGKTFLFWIGLIPAIFSIDLQLIKQVLTDMTGLYQKDFMIPVLKSLFGNGVILINGDDWKRHRKVVLPAFNYEQIKSMSAVTAEVTRQMIQQWGEQIHQSNSDKKAAEIDMIHAFNDLTAKINGRVAFGTTHRDVEEVIVLMQEMQKVATAAMLDAPILWYLPTRRNLHVRRLNKQLRSKIMSIMQARLAADGAKYGRGDTGGCGDDLLGLLLEAWTPHRQVRGGDTLTTDEVIDECKTFFAAGQETTATLLVWAMFLLAVHPQWQDKVREEVLREFPGGDSDDVVPNADVLAKLKLVRTFQLSMSFFLYFRTNVFGIINAHIVSIKLIKVYKI

SEQ ID NO: 32468 - DNA, 1766 bp, Triticum aestivum
cacaactcacaacttgcaaacacacgaagcgaaattccttagctccgacccagagtcgccagggagagcgcaaatggaggacaccttcatcacggtctgcctcgccgtagctctcgtttcgctgctcatcatgattgcgggccgccggcgctggggggcgcgtggcgacggcctgcgtatggcgcctgggccgtggcagctgccggtgatcggcagcctgcaccacctcgtcctggccgggcagctccctcaccgcgcgatgcgcgacctggcgcgacgctacgggccggccgtgctgctccagctcggccaggtgaagacgctggtggtgtcctctcgggagggggcgcgcgaggtgatgaagaaccacgacaccatgttcgccacgcggccgctgagcaccaccatgcgcgtgctctcctacggcggccaggacatcgtcttcgcgccctacggagaatactggcgccagctccgcaagatcgccgtgtccgagctcttcaccgcgcgccgcgtcctctccttccgcgccatccgcgaggaggaggtcgccacggcgctccgcgtcgtcggcgaggctgcggcggcggcgcgccccgtggagatgcgcgcggtgctatccacgctcgtgacggacagcacggcgcgcgccgtcataggcgaccggtgcagggagcgcgacgcgttcctccgggagctcgaccgcatcgtgcagctcgcgtcggggttcaacctggccgacatgtggccgtcgtcgcagcttgcggcgtggctcagtggagccgaggagtgccgccacaccctgtacaccatgctcgacggcatcgttgaggagcacctggagaggacggacggcggcggaggccacgccgaggacttgctcgacgtgctgctcaagatccagaaggagggtggtctcaagtttcccatccacatggacgccgtcaaagccatcatcttggacgtattctctgccggcagtgaaacaacaactacgacaattgagtgggccatatcagagctgatcaacaacccgatggccatgcagaaggcgacagatgaggtgcgacaagccttccatgctagtggaaccgtgtccgagcacgccctaagcgagctcccatacctgcgcttggtcatccgagagacgctgcggctacacccgcccctgccgttgttgttccgcgagtgccaggaaccgtgccaagtgcagggatacgacgtgcagcggggcacgcaggtgttggtcaatgcttgggcgctaggccgcgacgagcgctattggcccgacgcgcctgaggagttccggccggaacggttcgaggaagaagcagcaaaggcagactttgggggtggtgactttgcgttcttgccgtttggcgccggccgcaggatgtgccctgggatggcgtttggcctcgccggcgtcgagctcccgcttgcaagcatgctcttccactttgactggaagccaccagggccaggctcggcggagctcgacatgacagagacgttcggcctcaccgcacggcggacagaccagctcctgttgcgccctgtccttcgcgtacctattcccggagtctagtcaatatataaactataagaaatggaggtataatgtaaaactatacttgtacccacatagaaaataaattgcaaagttctacgactgttgcataacatcattagtattgtgcaataactagcgtagtggggctagatcaatatgtggttcctgaatatattgtaaacctatttgaaat

SEQ ID NO: 32469 - protein, 528 aa, Triticum aestivum
TTHNLQTHEAKFLSSDPESPGRAQMEDTFITVCLAVALVSLLIMIAGRRRWGARGDGLRMAPGPWQLPVIGSLHHLVLAGQLPHRAMRDLARRYGPAVLLQLGQVKTLVVSSREGAREVMKNHDTMFATRPLSTTMRVLSYGGQDIVFAPYGEYWRQLRKIAVSELFTARRVLSFRAIREEEVATALRVVGEAAAAARPVEMRAVLSTLVTDSTARAVIGDRCRERDAFLRELDRIVQLASGFNLADMWPSSQLAAWLSGAEECRHTLYTMLDGIVEEHLERTDGGGGHAEDLLDVLLKIQKEGGLKFPIHMDAVKAIILDVFSAGSETTTTTIEWAISELINNPMAMQKATDEVRQAFHASGTVSEHALSELPYLRLVIRETLRLHPPLPLLFRECQEPCQVQGYDVQRGTQVLVNAWALGRDERYWPDAPEEFRPERFEEEAAKADFGGGDFAFLPFGAGRRMCPGMAFGLAGVELPLASMLFHFDWKPPGPGSAELDMTETFGLTARRTDQLLLRPVLRVPIPGV

SEQ ID NO: 32470 - protein, 504 aa, Triticum aestivum
MEDTFITVCLAVALVSLLIMIAGRRRWGARGDGLRMAPGPWQLPVIGSLHHLVLAGQLPHRAMRDLARRYGPAVLLQLGQVKTLVVSSREGAREVMKNHDTMFATRPLSTTMRVLSYGGQDIVFAPYGEYWRQLRKIAVSELFTARRVLSFRAIREEEVATALRVVGEAAAAARPVEMRAVLSTLVTDSTARAVIGDRCRERDAFLRELDRIVQLASGFNLADMWPSSQLAAWLSGAEECRHTLYTMLDGIVEEHLERTDGGGGHAEDLLDVLLKIQKEGGLKFPIHMDAVKAIILDVFSAGSETTTTTIEWAISELINNPMAMQKATDEVRQAFHASGTVSEHALSELPYLRLVIRETLRLHPPLPLLFRECQEPCQVQGYDVQRGTQVLVNAWALGRDERYWPDAPEEFRPERFEEEAAKADFGGGDFAFLPFGAGRRMCPGMAFGLAGVELPLASMLFHFDWKPPGPGSAELDMTETFGLTARRTDQLLLRPVLRVPIPGV

SEQ ID NO: 32471 - protein, 485 aa, Triticum aestivum
MIAGRRRWGARGDGLRMAPGPWQLPVIGSLHHLVLAGQLPHRAMRDLARRYGPAVLLQLGQVKTLVVSSREGAREVMKNHDTMFATRPLSTTMRVLSYGGQDIVFAPYGEYWRQLRKIAVSELFTARRVLSFRAIREEEVATALRVVGEAAAAARPVEMRAVLSTLVTDSTARAVIGDRCRERDAFLRELDRIVQLASGFNLADMWPSSQLAAWLSGAEECRHTLYTMLDGIVEEHLERTDGGGGHAEDLLDVLLKIQKEGGLKFPIHMDAVKAIILDVFSAGSETTTTTIEWAISELINNPMAMQKATDEVRQAFHASGTVSEHALSELPYLRLVIRETLRLHPPLPLLFRECQEPCQVQGYDVQRGTQVLVNAWALGRDERYWPDAPEEFRPERFEEEAAKADFGGGDFAFLPFGAGRRMCPGMAFGLAGVELPLASMLFHFDWKPPGPGSAELDMTETFGLTARRTDQLLLRPVLRVPIPGV

SEQ ID NO: 32472 - DNA, 1639 bp, Triticum aestivum
gactatgatttttcagttcctcttctatttagtgcttcatgtgtcgtacactcgtacgccgtacgccgaactgcacaaaggaagcaatggtggccatggctgtgtttgcgccgtggctatcatggctcgtcgtctctctcctatccttctaccttctcaacctcctcgcgcacgcgcgctccggcctcccgccgggcccccgcccactgccgctcatcggcagcctccaccttctcggggacaagccgcaccgctccctcgcccacctagccaagatccacggtccgctcatgtccatccgcctcggcgcggtcaccacggtggtcgtctcctcccctgccatggcccgggagttcctgcagaggcatgattccgtgctcgccacccggtccgtgcctgacgccaccggcaagcacgcggcgggcgtagcctggctgccccccgggccgaggtggcgcgcgctccgcaagatcatggccacggagctcttcgcgccgcaccggctcgacgcgctccaccacctccggagcgacaaggtgtgggagctcacggaccacgtcgcgcggctggcgcgcgagggcacggcggtgaacgtcggtcgcgtggccttcacgacgagcctcaaccttatctcccgcaccatcttctccatcgacctcacgagcctcgacgaccacggcggctccgaggacttccaaggggtgatcacggccatgatggaaggcttgggcaccccgaacgtgtccgacttcttcccggtgctcgcgccggccgacctgcagggcatgcgccggcgcctggcgcggatcttcgcgcggctgcacgccgtgttagacgccgaggtggacaagaggctgcgcggccgccacgccggccagcccaggaagaacgactacctcgacgtgctgctcgacgtggcggcgcgtgacgagggcaaggacctgctggaccgtgatacgctacgctcacagttcacggatttgtttgctgctggtagtgacacaagctctagcacagtggaatgggcaatggctgagcttcttcgaaacccatcatcaatggttaaggtttgtgacgagcttgcacaagttatcggctctagaagaaacattgaagaagctgatattgttcggttgccctatctccaagctgtcataaaagagacctttcggctccaccctcctgcaccactcttgttgccacgccaaccagatgacggtcaaaatagccggttacacaatacctaaaggttcacgcgtgttcataaacgtatgggcgataggtcgagataaagatgtatgggctgaacctgagacgtttatgcctgagaggttcttgggttcggcgattgactttaggggtgtggattttgagctccttccatttggtgcagggcgtcgaatctgccctggaatgactttggcaattaggatggtgcatgtgatgcttgcttccttgttaaatcagtttaagtggagtcttcctattgagctggaacgtgatgggattgatatggaagatcactttggcctgacactagtaaagaatgtgcccctttgtattatagcaacaccgatttgaggaaaataaaaggcaccattttaagagtgttttagatgttgtcaatgtgtaataattc

SEQ ID NO: 32473 - protein, 402 aa, Triticum aestivum
MCRTLVRRTPNCTKEAMVAMAVFAPWLSWLVVSLLSFYLLNLLAHARSGLPPGPRPLPLIGSLHLLGDKPHRSLAHLAKIHGPLMSIRLGAVTTVVVSSPAMAREFLQRHDSVLATRSVPDATGKHAAGVAWLPPGPRWRALRKIMATELFAPHRLDALHHLRSDKVWELTDHVARLAREGTAVNVGRVAFTTSLNLISRTIFSIDLTSLDDHGGSEDFQGVITAMMEGLGTPNVSDFFPVLAPADLQGMRRRLARIFARLHAVLDAEVDKRLRGRHAGQPRKNDYLDVLLDVAARDEGKDLLDRDTLRSQFTDLFAAGSDTSSSTVEWAMAELLRNPSSMVKVCDELAQVIGSRRNIEEADIVRLPYLQAVIKETFRLHPPAPLLLPRQPDDGQNSRLHNT

SEQ ID NO: 32474 - protein, 386 aa, Triticum aestivum
MVAMAVFAPWLSWLVVSLLSFYLLNLLAHARSGLPPGPRPLPLIGSLHLLGDKPHRSLAHLAKIHGPLMSIRLGAVTTVVVSSPAMAREFLQRHDSVLATRSVPDATGKHAAGVAWLPPGPRWRALRKIMATELFAPHRLDALHHLRSDKVWELTDHVARLAREGTAVNVGRVAFTTSLNLISRTIFSIDLTSLDDHGGSEDFQGVITAMMEGLGTPNVSDFFPVLAPADLQGMRRRLARIFARLHAVLDAEVDKRLRGRHAGQPRKNDYLDVLLDVAARDEGKDLLDRDTLRSQFTDLFAAGSDTSSSTVEWAMAELLRNPSSMVKVCDELAQVIGSRRNIEEADIVRLPYLQAVIKETFRLHPPAPLLLPRQPDDGQNSRLHNT

SEQ ID NO: 32475 - protein, 383 aa, Triticum aestivum
MAVFAPWLSWLVVSLLSFYLLNLLAHARSGLPPGPRPLPLIGSLHLLGDKPHRSLAHLAKIHGPLMSIRLGAVTTVVVSSPAMAREFLQRHDSVLATRSVPDATGKHAAGVAWLPPGPRWRALRKIMATELFAPHRLDALHHLRSDKVWELTDHVARLAREGTAVNVGRVAFTTSLNLISRTIFSIDLTSLDDHGGSEDFQGVITAMMEGLGTPNVSDFFPVLAPADLQGMRRRLARIFARLHAVLDAEVDKRLRGRHAGQPRKNDYLDVLLDVAARDEGKDLLDRDTLRSQFTDLFAAGSDTSSSTVEWAMAELLRNPSSMVKVCDELAQVIGSRRNIEEADIVRLPYLQAVIKETFRLHPPAPLLLPRQPDDGQNSRLHNT

SEQ ID NO: 32476 - DNA, 1366 bp, Triticum aestivum
acctcatcggcgagctaggcagctagagctagctcgaccctcggccgaaacaatggggatctcactgctccacacgcagtggcacctactcgcccagctgccccagcaatggcagctcctcctccttctcgctggcctcctcctccccgtggtctcgtacccgctgctgataacgaggggcaatgttgagggaggacggctgaggctgccgcccggccctgcgcgggtgccggtgctcggcaacctgcaccagctgggcccgctgtcgcaccgcagcctgcgcgacctggcccagcagcacggccccgtcatgctgctccccctcggcaccgtgccgacgctggtggtctcgtctgctgctgcggcgcgcgacgtgatgaaggcgcacgacgccgactgctgcagccgattcgcgtctccaggccccgcgcggctctcctacgacggcaagagcatcgcctcctcgccctacggcccctactggcaggacatgcgcaggctctttgtcgccgagctcttcggcccgcggggcgtccgctccgtatgggacgcgcgtcggcagcaggttgacaggctcatggccaccctgggcacggcggcagcgacggcgggctccggtggcgatggaccagcacgtgttccgcgtcgccgacggcatcatcggcaccgtggcgtacgggcgcatctacgccgcggaggcgttcgcgcgcaagtacgagcagttccagcacgtgctagaggaggccatggccatgtcggccagcttctcggccgaagacttcttccccaacgccgccggccgcctcgtcgaccggctcgccggcatcatcgcgcggcgagagagaatctttagggacctcgacgccttcttcgaggcggtgctggagcagcacctggaccccgcgcgccccaagccagagagcggcgacggcgacctggtagacgccttcgtcagcgcctgtgaggagcacggcttcacgagggaccacgtgaaggccatgctcctggacgcgttcctcggcggcgttgacggcagctctatcacgatcgtgtgggtgatggcggagctgatccataacccgacggcgctgaagaaggcacaagatgagatcagggccgcggtggccgccagcgatgtttcgccgccgggctcggggttgccggtccagccggacgacctgcccaagctaacctacctgaagatggtcgtcaaagagaccatgcggctgtattgagtatgtattttgtattgcacgtgtattggagttgtggcccacttcctagttctgtataattaaggtagaggccttccctgtattatatatacgtgcatcggcacccatcaatacatcatcattgtattgcc

SEQ ID NO: 32477 - protein, 283 aa, Triticum aestivum
PHRRARQLELARPSAETMGISLLHTQWHLLAQLPQQWQLLLLLAGLLLPVVSYPLLITRGNVEGGRLRLPPGPARVPVLGNLHQLGPLSHRSLRDLAQQHGPVMLLPLGTVPTLVVSSAAAARDVMKAHDADCCSRFASPGPARLSYDGKSIASSPYGPYWQDMRRLFVAELFGPRGVRSVWDARRQQVDRLMATLGTAAATAGSGGDGPARVPRRRRHHRHRGVRAHLRRGGVRAQVRAVPARARGGHGHVGQLLGRRLLPQRRRPPRRPARRHHRAARENL

SEQ ID NO: 32478 - protein, 266 aa, Triticum aestivum
MGISLLHTQWHLLAQLPQQWQLLLLLAGLLLPVVSYPLLITRGNVEGGRLRLPPGPARVPVLGNLHQLGPLSHRSLRDLAQQHGPVMLLPLGTVPTLVVSSAAAARDVMKAHDADCCSRFASPGPARLSYDGKSIASSPYGPYWQDMRRLFVAELFGPRGVRSVWDARRQQVDRLMATLGTAAATAGSGGDGPARVPRRRRHHRHRGVRAHLRRGGVRAQVRAVPARARGGHGHVGQLLGRRLLPQRRRPPRRPARRHHRAARENL

SEQ ID NO: 32479 - protein, 203 aa, Triticum aestivum
MDQHVFRVADGIIGTVAYGRIYAAEAFARKYEQFQHVLEEAMAMSASFSAEDFFPNAAGRLVDRLAGIIARRERIFRDLDAFFEAVLEQHLDPARPKPESGDGDLVDAFVSACEEHGFTRDHVKAMLLDAFLGGVDGSSITIVWVMAELIHNPTALKKAQDEIRAAVAASDVSPPGSGLPVQPDDLPKLTYLKMVVKETMRLY

SEQ ID NO: 32480 - DNA, 1678 bp, Triticum aestivum
gaagtacaggctcgatcggtcagaaactcagaatagcttgagctgcaaccatggagctcacggcctggccaccgttcctcttgctcatcactctctcactctcgctcgcagctgcgctcctcttcttgctcagctgccgccacagcgtcgagaagaaggtgaccgggaaggagcttcccccaggcccaccggcgctgctcttcctggccaagttcctagcgctccggcgatccatcttccaccttgcgccgctcctccgcgagctgcacgcgcgctacggccccgtcatctccatccgcctcttccgcgccctcgtcttcgtctccgaccgccacctcgcccaccgcgtcctcgtccagggcggcgccaccttcgccgaccgcccgaggctcttcgagccgggcctcctcttcacctccggctcccgcaacatcaacgccgcgccctacgggccttactggcgcctcgtccgccgcaacctcgcctccgaggcgctgcacccggcctgcgtcagccagttcgcgcccgcgaggcgccggatgcgcgacatgctcgtccgcgacctccgcaagcgcgcgccgccggcgaccccgtcgaggtgaggacgccgttccggaacgccatgttcgacctgctggtgtacatgagcctcggcgccaggctcgccccggagatgctcgacgagatgcaggagatgcagctgtgggtcgtccgcaccatcaccggcttccccatcttttccttcttgccggcgctcaccaagaggctcttccgcaagcgatgggaagcgcaccttgccgtccgccggaggcaggacgagatcttgctcccgctgatcgaaacaaggcgttccgtttccgtgccccgcggcgctgacaacccaccgtgctacgccgactcgcttctggcgctgcgtgtggcggacgaaggcggccgcccgctcacggactccgagctcgtcagtctctgctccgagttcttgagcggtggcacggacagcacggtgacctcgctggaatggatcatgggggagctggtgaaccatccggacatgcaggccaaggtctacgaggaggtcaggaactcaggagcaaggcggagctcagtgaaggcgacctgcagcggatgccgtacctgaaggccgtcgtcctcgaggggctgcggctccacccgccggctcacttcctcctccctcacgccgtgcagagcgacacggagatcagcggctacagggtccccaagggcgcggatgtcaacttcctggtcgctgagtacgggcgcgacgagacggtgtgggcggcggcacgggagttccagccggagcgattcctggacggcggcgagggatgcggcgtggacatcacgggtagcagagagatcaagatgatgcccttcggagcgtgccgcaggatgtgcccgggatacacgctcgccatgctgcacgtcttcgtcgggaacctcgtgagggagctggaatggctgccggcgcctcacggagaggaggtggacatgaccgaggtgctggatttcaccaccctcatgaagcatcccctccgagttcgcgccatcccaaggacttgaagctacgtctcatccattctactcagcgtcagagtcaactctgaactctgaagaaaattacaagaaagaaagtccatgatggggtttctatagttag

SEQ ID NO: 32481 - protein, 378 aa, Triticum aestivum
KYRLDRSETQNSLSCNHGAHGLATVPLAHHSLTLARSCAPLLAQLPPQRREEGDREGASPRPTGAALPGQVPSAPAIHLPPCAAPPRAARALRPRHLHPPLPRPRLRLRPPPRPPRPRPGRRHLRRPPEALRAGPPLHLRLPQHQRRALRALLAPRPPQPRLRGAAPGLRQPVRAREAPDARHARPRPPQARAAGDPVEVRTPFRNAMFDLLVYMSLGARLAPEMLDEMQEMQLWVVRTITGFPIFSFLPALTKRLFRKRWEAHLAVRRRQDEILLPLIETRRSVSVPRGADNPPCYADSLLALRVADEGGRPLTDSELVSLCSEFLSGGTDSTVTSLEWIMGELVNHPDMQAKVYEEVRNSGARRSSVKATCSGCRT

SEQ ID NO: 32482 - DNA, 1632 bp, Triticum aestivum
atcgatccaagctgccatggccgcggttctcccgatctgcctgcttctcgtgcttctcctcgccatcccgctcatcctcttcaagtccaggcgcccggcgcctcatcgtggccccggtggcagggccgtgcggctcccgccagggccatgggcgctcccggtcatcggtcacctgcaccatctcgccggcgcccttccgcaccgtgctctgcgcgacctcgcgcggcgccacggcccgctcatgatgctccgcctcggcgagctcgacgccgtggtcgcgtcgtcccctgacgccgcgcgcgagatcatgaagacccacgacgcttccttcgcgtccaggcctctgacgtcgatgcagcagatggcgtacggcgacgccgagggcctcatcttcgcgccctacggcgacgcatggcggcagcttcgcaagatatgcactgtcgagatcttcagctcccgccgcgtccagtccttccgccccgcccgcgaggaggagctcggtcacctcctccgctccgtcgcggcggcttctgcctcgtcttcgccggtgaacctgagcgagcgcatatcggcgtacgtcgcggattctacggtgcgcgccatcgtcggcagccggttcaagcagagggacacgtacctggagatgctgcaagagggactcaaaatcgtgcccgggatgacccttcccgacattttcccctcctcgcgtctcgtgcggctccttagcagcgtccccggcaggatacagcgccatagccaagacatgaagctgttcatggacaccatcatccaagagcaccaggtgaacagcggccccgactgcgacggcgacaaagaagaagacttgctcgacgtgctcctgagactccaaaaggaaggggactcgcagtatccactcaccactgacaacatcaagaccgtcatgctggacatgtttggcgccggcagcgagacgtcggcgacgacgctgcagtgggcgatggcggagctgatacggaacccgcgggttatgcggaaggcgcaagacgaggtccggcagcaactcgccgggcacgacaaggtgagggaggccgacctggcagatctgcgataccttgggtttgtcatcaaggagacgctgaggatgcacccgccggcgccattgctgctgccgcgtaggtgcgggagcccgtgtcaggttctgggcctggacgtgccggagggggtcatggtgatcgtgaacgcgtgggcgatcggcatggacccggcgcactgggaggcacccgaggagttcgcaccggagcggttcgagcagaacgggagggacttcaagggggcggacttcgagttcgtgccgttcggcggcgggaggaggatatgccccggcatggctttcgggctggcgcacgtggagctcgcgctcgcggcgctgctgttccacttcgactgggagctgccaggcggggcggcggccgaggatctggacatgaccgaggagtttggcgtcacggcacggctccggtctgaccttgtcgtggtcgccgtggccacggagtaaacgcacttttggtgatgtgcatcctatatttgtttttttgaggtgacctatatttgttgatcctgtgcaagttgattagcccatcaccgtggcgt

SEQ ID NO: 32483 - protein, 511 aa, Triticum aestivum
SIQAAMAAVLPICLLLVLLLAIPLILFKSRRPAPHRGPGGRAVRLPPGPWALPVIGHLHHLAGALPHRALRDLARRHGPLMMLRLGELDAVVASSPDAAREIMKTHDASFASRPLTSMQQMAYGDAEGLIFAPYGDAWRQLRKICTVEIFSSRRVQSFRPAREEELGHLLRSVAAASASSSPVNLSERISAYVADSTVRAIVGSRFKQRDTYLEMLQEGLKIVPGMTLPDIFPSSRLVRLLSSVPGRIQRHSQDMKLFMDTIIQEHQVNSGPDCDGDKEEDLLDVLLRLQKEGDSQYPLTTDNIKTVMLDMFGAGSETSATTLQWAMAELIRNPRVMRKAQDEVRQQLAGHDKVREADLADLRYLGFVIKETLRMHPPAPLLLPRRCGSPCQVLGLDVPEGVMVIVNAWAIGMDPAHWEAPEEFAPERFEQNGRDFKGADFEFVPFGGGRRICPGMAFGLAHVELALAALLFHFDWELPGGAAAEDLDMTEEFGVTARLRSDLVVVAVATE

SEQ ID NO: 32484 - protein, 506 aa, Triticum aestivum
MAAVLPICLLLVLLLAIPLILFKSRRPAPHRGPGGRAVRLPPGPWALPVIGHLHHLAGALPHRALRDLARRHGPLMMLRLGELDAVVASSPDAAREIMKTHDASFASRPLTSMQQMAYGDAEGLIFAPYGDAWRQLRKICTVEIFSSRRVQSFRPAREEELGHLLRSVAAASASSSPVNLSERISAYVADSTVRAIVGSRFKQRDTYLEMLQEGLKIVPGMTLPDIFPSSRLVRLLSSVPGRIQRHSQDMKLFMDTIIQEHQVNSGPDCDGDKEEDLLDVLLRLQKEGDSQYPLTTDNIKTVMLDMFGAGSETSATTLQWAMAELIRNPRVMRKAQDEVRQQLAGHDKVREADLADLRYLGFVIKETLRMHPPAPLLLPRRCGSPCQVLGLDVPEGVMVIVNAWAIGMDPAHWEAPEEFAPERFEQNGRDFKGADFEFVPFGGGRRICPGMAFGLAHVELALAALLFHFDWELPGGAAAEDLDMTEEFGVTARLRSDLVVVAVATE

SEQ ID NO: 32485 - protein, 431 aa, Triticum aestivum
MMLRLGELDAVVASSPDAAREIMKTHDASFASRPLTSMQQMAYGDAEGLIFAPYGDAWRQLRKICTVEIFSSRRVQSFRPAREEELGHLLRSVAAASASSSPVNLSERISAYVADSTVRAIVGSRFKQRDTYLEMLQEGLKIVPGMTLPDIFPSSRLVRLLSSVPGRIQRHSQDMKLFMDTIIQEHQVNSGPDCDGDKEEDLLDVLLRLQKEGDSQYPLTTDNIKTVMLDMFGAGSETSATTLQWAMAELIRNPRVMRKAQDEVRQQLAGHDKVREADLADLRYLGFVIKETLRMHPPAPLLLPRRCGSPCQVLGLDVPEGVMVIVNAWAIGMDPAHWEAPEEFAPERFEQNGRDFKGADFEFVPFGGGRRICPGMAFGLAHVELALAALLFHFDWELPGGAAAEDLDMTEEFGVTARLRSDLVVVAVATE

SEQ ID NO: 32486 - DNA, 1655 bp, Triticum aestivum
acccgatgcgcctggctggctttcgattgatcacacgagacatgtagaaaccacatgcgtttccaacctagttagatagaaggatggacgccttggcggggctctcggcctttgccgcggtggcgctgccgctcctcctgctgtacagcgtgcaccggtggaggaaccctcggtgcaacggccggctcccgccggggtccatgggcctcccgctcgtcggcgagacgttccagttcttctccccggacgcctccttggacgtccctcgcttcatccgagacaggctcacgaggtacggcccgatcttcaagacgagcgtggtggggcacccggtggtggtgtcggcggacgaggagctgaaccacatggtgttccagcaggagggggagctgttccagagctggtacccggactcgttcgtggagatcctcggccgcgacaacgtcggggagcagaagggcaccatgttcaagtacctcaagaacatggtgctcaggttcttcggcccggagagcctcaaggagtccatcctccgcgacgtccagcgcgccgtctgcagctcgctctgcacctggtccaccctgccggccgtcgacttcaaagaagccgtctccaccatggtgtttgaactttcggcgagcaagctgctcggcctggagccgtcgaggtccaaggttctacggaagagcttcttcgacttcgttctagggctcatctccttcccgctctacctgccaggaacagcctactacgcatgcatgcagggacggatgagtgtaatggaggtgctgcagcaggtgttggaggagaggacgagatcagctgaggcggccggaggaggggaagcacggtgccacggcgacttcctggactacgtcgtccaggagatcaccaaggagaagccggtcctgacggagggaatggcgctggacctcctgtttgtgctcctcttcgccagcttccacaccacgtcgctggccatcaccctggccgtcaagctcctcaccgacaaccctcgcgtcctggaggaactcacggtggagcatgaaacgattctgaacgagcgtgaggcaggcggtgagactgatggcgacagacttacatggaaagagtacaaatccatgacattcacatcccaggtgataaacgagacggtccgactggccaacattgcgcctggcatcttcagaaagacactgaaagatgtacagttcagagtctacacaattccagctggatggggagtgatggtctgccctctcgcggtgcacctgaatccagatatttaccctgaccccctcaccttcaatccttcaaggtttaaggataaactagaggcaaaccgtgggtcaagacacttcatggctttcggaggaggtctccggtcctgtgttggagcagacttcagcaagctacaaatggccattttccttcactttcttgtcaccaaatataggtggatacaactaggtggaggcaagatagtccggtgtccagggctggaatttcctgatggttacctcattcagattagacagagagactaatcaacacctgctttcaagtcatgctagcagtaggaaaagcttatatcacacgtgtacaattgttctagcatgttgtttgatgaaataacagttgtgcagaagtattat

SEQ ID NO: 32487 - protein, 487 aa, Triticum aestivum
MDALAGLSAFAAVALPLLLLYSVHRWRNPRCNGRLPPGSMGLPLVGETFQFFSPDASLDVPRFIRDRLTRYGPIFKTSVVGHPVVVSADEELNHMVFQQEGELFQSWYPDSFVEILGRDNVGEQKGTMFKYLKNMVLRFFGPESLKESILRDVQRAVCSSLCTWSTLPAVDFKEAVSTMVFELSASKLLGLEPSRSKVLRKSFFDFVLGLISFPLYLPGTAYYACMQGRMSVMEVLQQVLEERTRSAEAAGGGEARCHGDFLDYVVQEITKEKPVLTEGMALDLLFVLLFASFHTTSLAITLAVKLLTDNPRVLEELTVEHETILNEREAGGETDGDRLTWKEYKSMTFTSQVINETVRLANIAPGIFRKTLKDVQFRVYTIPAGWGVMVCPLAVHLNPDIYPDPLTFNPSRFKDKLEANRGSRHFMAFGGGLRSCVGADFSKLQMAIFLHFLVTKYRWIQLGGGKIVRCPGLEFPDGYLIQIRQRD

SEQ ID NO: 32488 - protein, 448 aa, Triticum aestivum
MGLPLVGETFQFFSPDASLDVPRFIRDRLTRYGPIFKTSVVGHPVVVSADEELNHMVFQQEGELFQSWYPDSFVEILGRDNVGEQKGTMFKYLKNMVLRFFGPESLKESILRDVQRAVCSSLCTWSTLPAVDFKEAVSTMVFELSASKLLGLEPSRSKVLRKSFFDFVLGLISFPLYLPGTAYYACMQGRMSVMEVLQQVLEERTRSAEAAGGGEARCHGDFLDYVVQEITKEKPVLTEGMALDLLFVLLFASFHTTSLAITLAVKLLTDNPRVLEELTVEHETILNEREAGGETDGDRLTWKEYKSMTFTSQVINETVRLANIAPGIFRKTLKDVQFRVYTIPAGWGVMVCPLAVHLNPDIYPDPLTFNPSRFKDKLEANRGSRHFMAFGGGLRSCVGADFSKLQMAIFLHFLVTKYRWIQLGGGKIVRCPGLEFPDGYLIQIRQRD

SEQ ID NO: 32489 - protein, 393 aa, Triticum aestivum
MVFQQEGELFQSWYPDSFVEILGRDNVGEQKGTMFKYLKNMVLRFFGPESLKESILRDVQRAVCSSLCTWSTLPAVDFKEAVSTMVFELSASKLLGLEPSRSKVLRKSFFDFVLGLISFPLYLPGTAYYACMQGRMSVMEVLQQVLEERTRSAEAAGGGEARCHGDFLDYVVQEITKEKPVLTEGMALDLLFVLLFASFHTTSLAITLAVKLLTDNPRVLEELTVEHETILNEREAGGETDGDRLTWKEYKSMTFTSQVINETVRLANIAPGIFRKTLKDVQFRVYTIPAGWGVMVCPLAVHLNPDIYPDPLTFNPSRFKDKLEANRGSRHFMAFGGGLRSCVGADFSKLQMAIFLHFLVTKYRWIQLGGGKIVRCPGLEFPDGYLIQIRQRD

SEQ ID NO: 32490 - DNA, 1632 bp, Triticum aestivum
atccaatcgccagcctccttgtattcatgcgttggtgcaacttctttcttagcttcgtacgttcagctagctcagtatgaagatcacagtgcggtcatccaagtccatcaagcctgactatggcagcggccacctgatggctccggccacggccaacgtcgtcccgctcacagtgttcgacaaagccaacttcgacatgcacgtctctgtcatctacaccttccacccaccagccccgtcccatgacgtcctcgaggccgggctcgccaaggccctcgccgactaccgcgagtgggccggccgtctcaccctggacgccaacggcaagcgctgcgccatcctactcaacgacgccggtgcgcgattcgtcgaagcgacggccggcgtggcgctcgacagcgtcatgcctctgcagcccactcccgaggtgctgagcctgcacccgaccggcggtggcgacgagctgctgttgatccaggccacgaggttcgcatgcgggtccctcgtcgttggcctgactgggcaccacatggtcaccgacggtggcggctggtgcaacctcatcatcgcgtggggtcaggccacgcgaggcgcctccattgaccctgtcccagtgcacgatcggccgtccttcttcctgccgcgcaacccgcttaagatagagtacgagcaccacagcatcgagttcaagccatacgacgaccgcaatagtacggccggcggcggcgacgacgaggtggtggtagagagggtccacttcagtatggaccacatcgcaaaactgaagtcgcaggcgtcagctgtggccggcacgggccggccgtacagcaccgtgcagtgcgtggtggcgcacctgtggcggtgcatgacgctggcgcgcggcctcgatgggcgtgacgtcaccggtctgttcatcgcagtggacgggcgagcgcggatgagccagcgggtgccggacgggtacaccggcaacgtggtgctctgggcgcggcctacagccaccgcgggggaggtcgtgaacaggccgctgcaccacctggcggagctcatcagcggggcggttgcccggattgacgacgcctacttcaagtctttcatcgacttcgcctgctccggggccgtggaggaggaggggctggtgccgactgctgacccggcggtgacggtgcttagccccaacgtcgaggtggacagctggctgcggatcccgttctatgatctggatctgggcagcggccggcccttcttcttcatgcccagctacctgccagtggagggaggggtcatcctcgtgccttccttctatggcgatgggagcgtggatgcctacgtgccccttttcagccgccacatggacgccttcaagaactgctgcacatccggcctccccaaactctgatttttatcccgggattgtaactctcagtcagtcaatgcggtagccgtctgatctggtgcgatatgattcgtaccatcttctggcgttgtattgctttggtggtcttctgaatggccttctatttgtgcctttgtatgcacaaggagatgcattgtgtgcgtgagtgttttgaaatttgtatttcgctttagctacaggtcagtcgcctgaaaaattaagttagggtcactatc

SEQ ID NO: 32491 - protein, 440 aa, Triticum aestivum
MKITVRSSKSIKPDYGSGHLMAPATANVVPLTVFDKANFDMHVSVIYTFHPPAPSHDVLEAGLAKALADYREWAGRLTLDANGKRCAILLNDAGARFVEATAGVALDSVMPLQPTPEVLSLHPTGGGDELLLIQATRFACGSLVVGLTGHHMVTDGGGWCNLIIAWGQATRGASIDPVPVHDRPSFFLPRNPLKIEYEHHSIEFKPYDDRNSTAGGGDDEVVVERVHFSMDHIAKLKSQASAVAGTGRPYSTVQCVVAHLWRCMTLARGLDGRDVTGLFIAVDGRARMSQRVPDGYTGNVVLWARPTATAGEVVNRPLHHLAELISGAVARIDDAYFKSFIDFACSGAVEEEGLVPTADPAVTVLSPNVEVDSWLRIPFYDLDLGSGRPFFFMPSYLPVEGGVILVPSFYGDGSVDAYVPLFSRHMDAFKNCCTSGLPKL

SEQ ID NO: 32492 - protein, 420 aa, Triticum aestivum
MAPATANVVPLTVFDKANFDMHVSVIYTFHPPAPSHDVLEAGLAKALADYREWAGRLTLDANGKRCAILLNDAGARFVEATAGVALDSVMPLQPTPEVLSLHPTGGGDELLLIQATRFACGSLVVGLTGHHMVTDGGGWCNLIIAWGQATRGASIDPVPVHDRPSFFLPRNPLKIEYEHHSIEFKPYDDRNSTAGGGDDEVVVERVHFSMDHIAKLKSQASAVAGTGRPYSTVQCVVAHLWRCMTLARGLDGRDVTGLFIAVDGRARMSQRVPDGYTGNVVLWARPTATAGEVVNRPLHHLAELISGAVARIDDAYFKSFIDFACSGAVEEEGLVPTADPAVTVLSPNVEVDSWLRIPFYDLDLGSGRPFFFMPSYLPVEGGVILVPSFYGDGSVDAYVPLFSRHMDAFKNCCTSGLPKL

SEQ ID NO: 32493 - protein, 400 aa, Triticum aestivum
MHVSVIYTFHPPAPSHDVLEAGLAKALADYREWAGRLTLDANGKRCAILLNDAGARFVEATAGVALDSVMPLQPTPEVLSLHPTGGGDELLLIQATRFACGSLVVGLTGHHMVTDGGGWCNLIIAWGQATRGASIDPVPVHDRPSFFLPRNPLKIEYEHHSIEFKPYDDRNSTAGGGDDEVVVERVHFSMDHIAKLKSQASAVAGTGRPYSTVQCVVAHLWRCMTLARGLDGRDVTGLFIAVDGRARMSQRVPDGYTGNVVLWARPTATAGEVVNRPLHHLAELISGAVARIDDAYFKSFIDFACSGAVEEEGLVPTADPAVTVLSPNVEVDSWLRIPFYDLDLGSGRPFFFMPSYLPVEGGVILVPSFYGDGSVDAYVPLFSRHMDAFKNCCTSGLPKL

SEQ ID NO: 32494 - DNA, 1792 bp, Triticum aestivum
aaagaatttcagacagctaaacaaactcggccgcccagcttcctcctcctcctcctccccctccttcccctcgacctgctggtgaccgccgtctgccttctccgacgaatctccccgcgagttcggcctagctccacagggagtctcgaatctcccctttgccgctgagtcgaggaagaagatcggctcgggttcgcttgctcgttcgctcgaggacgagattcagcggcgggactgattgattgattgggcgtgagcgagagcggatgaaggggaagggcggggcgctcgacaggaggtcgtctgcgaggtggaggctgctgctgctctgcgccttcagctttgggctcggcatgctcttcaccaaccgcttctggacagcaccaagtaccaataaccacatcatgtcccaacacaggagacaagaccaggagttgcaacttgtgtcagaggattgcaatacaaagaggaagcatggggagcacaaggatataatgggagaggtaaccaggacccatgaagccatacaattgttggataagtcaatctcaacgctgcagatggagcttgcagcaaagcgaagcacgttggaactggtccgttctggtgtgccagtaacttcagaaactagtcaaccaaggaaaaaagcattcgttgtcgttggagttaacaccgctttcagtagccgcaagcgtcgtgattcagtcagggagacatggatgcctcaaggtgagaagctgctgcagcttgaagaacagaagggaatagttatccgcttcactataggccatagtgctacatccaatagtatattggacaaagcaatagatgcagaagatgaacagcatcacgactttcttagactggaccatgtcgaggggtatcatgaactctccgcaaagacaaaaatcttcttctccacgtccgtgggcatttgggatgctgactttttcgtcaaggtcgatgatgatgtgcatgtgaacttaggaatgcttgccactacccttgcgaggcataaagcgaaaccaagaacttatattggctgcatgaagtcaggcccagttctggctgacaagaatctgaagtaccatgaacctgaggcctggaaatttggggaggatggaaacaagtattttcgccatgctactggacagatatatgctatctcaaaagatcttgcgacctatatctcaataaatcaacctatcttacacaagtatgcgaacgaagatgtatcacttgggtcatggtttatcgggttagaggttaatcatattgatgaaaggaacatgtgctgcggaactccaccagactgtgagtggaaagggcaagctggcaatatctgcgtggcatcctttgattggagctgcagcggcatatgcaagtccgtcgagagactcaaggatgtacatgctcgatgcggcgaaggcgattcttctgtttggagtgatctaatctagctaataccctccctggcgtaaatatgtagcatcctcagtaaaccctgacgatcgtgcctcagtggctacaactgaaatgaccgaaattgcacaacaggtccgcagatggactatatttctggtagttcggtctgaggcaacacatgtagtgtagatgatacttgttcagtcgttgagagatctcagtagatgggaattgctttgtgccatcacctgtgacgtcagtagtgttagaagagagaccaaagcgagcgagttacacagctgctgtgtaccacagattaggggaaaacatctactgcaaattttgatcaattcttttgatgtcggtt

SEQ ID NO: 32495 - protein, 397 aa, Triticum aestivum
MKGKGGALDRRSSARWRLLLLCAFSFGLGMLFTNRFWTAPSTNNHIMSQHRRQDQELQLVSEDCNTKRKHGEHKDIMGEVTRTHEAIQLLDKSISTLQMELAAKRSTLELVRSGVPVTSETSQPRKKAFVVVGVNTAFSSRKRRDSVRETWMPQGEKLLQLEEQKGIVIRFTIGHSATSNSILDKAIDAEDEQHHDFLRLDHVEGYHELSAKTKIFFSTSVGIWDADFFVKVDDDVHVNLGMLATTLARHKAKPRTYIGCMKSGPVLADKNLKYHEPEAWKFGEDGNKYFRHATGQIYAISKDLATYISINQPILHKYANEDVSLGSWFIGLEVNHIDERNMCCGTPPDCEWKGQAGNICVASFDWSCSGICKSVERLKDVHARCGEGDSSVWSDLI

SEQ ID NO: 32496 - protein, 368 aa, Triticum aestivum
MLFTNRFWTAPSTNNHIMSQHRRQDQELQLVSEDCNTKRKHGEHKDIMGEVTRTHEAIQLLDKSISTLQMELAAKRSTLELVRSGVPVTSETSQPRKKAFVVVGVNTAFSSRKRRDSVRETWMPQGEKLLQLEEQKGIVIRFTIGHSATSNSILDKAIDAEDEQHHDFLRLDHVEGYHELSAKTKIFFSTSVGIWDADFFVKVDDDVHVNLGMLATTLARHKAKPRTYIGCMKSGPVLADKNLKYHEPEAWKFGEDGNKYFRHATGQIYAISKDLATYISINQPILHKYANEDVSLGSWFIGLEVNHIDERNMCCGTPPDCEWKGQAGNICVASFDWSCSGICKSVERLKDVHARCGEGDSSVWSDLI

SEQ ID NO: 32497 - protein, 351 aa, Triticum aestivum
MSQHRRQDQELQLVSEDCNTKRKHGEHKDIMGEVTRTHEAIQLLDKSISTLQMELAAKRSTLELVRSGVPVTSETSQPRKKAFVVVGVNTAFSSRKRRDSVRETWMPQGEKLLQLEEQKGIVIRFTIGHSATSNSILDKAIDAEDEQHHDFLRLDHVEGYHELSAKTKIFFSTSVGIWDADFFVKVDDDVHVNLGMLATTLARHKAKPRTYIGCMKSGPVLADKNLKYHEPEAWKFGEDGNKYFRHATGQIYAISKDLATYISINQPILHKYANEDVSLGSWFIGLEVNHIDERNMCCGTPPDCEWKGQAGNICVASFDWSCSGICKSVERLKDVHARCGEGDSSVWSDLI

SEQ ID NO: 32498 - DNA, 1838 bp, Triticum aestivum
atgcggagctccatggcctgctggtcgccaaccatggcgccgctggcaatgctgctcgtctctgctctattcttcgtcacctcccatgcttcccttcctatccctatccaagctgccgccgacgacttcctccggtgcatgtcggcgtccgtcccaggcaaccttctctttccccgcagctcgccgtcgttcgcgtcggtccttgcgtcctccgtccggaacccgcggttcctcgggccggccgtggtgcgtccgctctgcatcgtcacggcgaccaacgcgtcccacgtccaggccgccgtcgtgtgcggccgccggcacggcgtgcgcctccgcgtgcgcagcggcgggcacgactacgagggcctctcgttccggtccgcgcgccaggaggacttcgccgtcgtggacctcgccgccctccgctccgtgcgcgtcaccgtgcgggagccggccgaggcgtgggtggagtccggcgccacgctcggggagctgtaccacgccatcgggagggcgaccgaccggcacgcgttcccggggggcctctgcccgacggtgggcgtcgggggccacctgagcggcggcggcttcggcatgctgctgcgcaagtacggcctcgcctccgaccacgtcatcaacgccgtgatggtggacgcggaggggcggctgctggacaagcaggccatggggcgcgacgtgttctgggccatccgcggcggcggcggcgggagcttcgggatcgtgctgtcgtggaaggtgaggctggtggccgtgccgccgagggtgacggtgttcaccgtcgtgaagacggcccgggagggcgcggcggacctcctcgccaagtggcaggaggtcgcccctgctctccccgacgacctgctggtgagggtggtcgtccagggggacaaggcgaggttccaggccctgtacctgggcgcccgcgacgcgctgctgccggtgatgggcagccggttcccggagctgggagtgaacccgacgcactgcaaggagatgtcgtggatccagtcggtgccctacatctacatcggcgaggcagccagcgtggacgacatcctgaaccggaccgtcgcgagggactcctccccgagcaagtcgacgtccgactacgtgcggcgggccatcccgagggacgtgtgggcgcggatcttctccgactggctggcgaggcgggacgcggggctgatgatcctggacccctacggcgggagcatcgcgggcgtggcggagtcggcgacgcccttctcgcaccgggccggcgtgctgtacaacgtgcagtacatgaacttctggggcgtgggcggcgacggcgcggcaaacacgaggtggatcagggacatgtacgcgttcatggagccgcacgtgagcaagaacccgcgggaggcgtacgtgaactacagggacctggacctcgggcagaacgtggtgggcgccggcgacgtctcgagcttcgaggccggtagggtgtggggggagaagtactactccaaggccaacttccggaggctcgccatggccaaggggcagatcgatccccgcgactacttcaggagcgagcagagcatcccgccgcttgttggctcgcagctggagctgacctccgccaggaacgcgccgcacgttgatggcgtgaatcctccgggttggtgggcagtggggtgtgggacaggcagtccgtgttcagtccttagctctgtcttggctaaactgatgcctagtttcttttagacatagctcattctgttttaccacgtagtacttgttggtcttattgtcaatggtgtttgctagcggaaataaagtctgaaattatggttaag

SEQ ID NO: 32499 - protein, 581 aa, Triticum aestivum
MRSSMACWSPTMAPLAMLLVSALFFVTSHASLPIPIQAAADDFLRCMSASVPGNLLFPRSSPSFASVLASSVRNPRFLGPAVVRPLCIVTATNASHVQAAVVCGRRHGVRLRVRSGGHDYEGLSFRSARQEDFAVVDLAALRSVRVTVREPAEAWVESGATLGELYHAIGRATDRHAFPGGLCPTVGVGGHLSGGGFGMLLRKYGLASDHVINAVMVDAEGRLLDKQAMGRDVFWAIRGGGGGSFGIVLSWKVRLVAVPPRVTVFTVVKTAREGAADLLAKWQEVAPALPDDLLVRVVVQGDKARFQALYLGARDALLPVMGSRFPELGVNPTHCKEMSWIQSVPYIYIGEAASVDDILNRTVARDSSPSKSTSDYVRRAIPRDVWARIFSDWLARRDAGLMILDPYGGSIAGVAESATPFSHRAGVLYNVQYMNFWGVGGDGAANTRWIRDMYAFMEPHVSKNPREAYVNYRDLDLGQNVVGAGDVSSFEAGRVWGEKYYSKANFRRLAMAKGQIDPRDYFRSEQSIPPLVGSQLELTSARNAPHVDGVNPPGWWAVGCGTGSPCSVLSSVLAKLMPSFF

SEQ ID NO: 32500 - protein, 577 aa, Triticum aestivum
MACWSPTMAPLAMLLVSALFFVTSHASLPIPIQAAADDFLRCMSASVPGNLLFPRSSPSFASVLASSVRNPRFLGPAVVRPLCIVTATNASHVQAAVVCGRRHGVRLRVRSGGHDYEGLSFRSARQEDFAVVDLAALRSVRVTVREPAEAWVESGATLGELYHAIGRATDRHAFPGGLCPTVGVGGHLSGGGFGMLLRKYGLASDHVINAVMVDAEGRLLDKQAMGRDVFWAIRGGGGGSFGIVLSWKVRLVAVPPRVTVFTVVKTAREGAADLLAKWQEVAPALPDDLLVRVVVQGDKARFQALYLGARDALLPVMGSRFPELGVNPTHCKEMSWIQSVPYIYIGEAASVDDILNRTVARDSSPSKSTSDYVRRAIPRDVWARIFSDWLARRDAGLMILDPYGGSIAGVAESATPFSHRAGVLYNVQYMNFWGVGGDGAANTRWIRDMYAFMEPHVSKNPREAYVNYRDLDLGQNVVGAGDVSSFEAGRVWGEKYYSKANFRRLAMAKGQIDPRDYFRSEQSIPPLVGSQLELTSARNAPHVDGVNPPGWWAVGCGTGSPCSVLSSVLAKLMPSFF

SEQ ID NO: 32501 - protein, 570 aa, Triticum aestivum
MAPLAMLLVSALFFVTSHASLPIPIQAAADDFLRCMSASVPGNLLFPRSSPSFASVLASSVRNPRFLGPAVVRPLCIVTATNASHVQAAVVCGRRHGVRLRVRSGGHDYEGLSFRSARQEDFAVVDLAALRSVRVTVREPAEAWVESGATLGELYHAIGRATDRHAFPGGLCPTVGVGGHLSGGGFGMLLRKYGLASDHVINAVMVDAEGRLLDKQAMGRDVFWAIRGGGGGSFGIVLSWKVRLVAVPPRVTVFTVVKTAREGAADLLAKWQEVAPALPDDLLVRVVVQGDKARFQALYLGARDALLPVMGSRFPELGVNPTHCKEMSWIQSVPYIYIGEAASVDDILNRTVARDSSPSKSTSDYVRRAIPRDVWARIFSDWLARRDAGLMILDPYGGSIAGVAESATPFSHRAGVLYNVQYMNFWGVGGDGAANTRWIRDMYAFMEPHVSKNPREAYVNYRDLDLGQNVVGAGDVSSFEAGRVWGEKYYSKANFRRLAMAKGQIDPRDYFRSEQSIPPLVGSQLELTSARNAPHVDGVNPPGWWAVGCGTGSPCSVLSSVLAKLMPSFF

SEQ ID NO: 32502 - DNA, 1735 bp, Triticum aestivum
ccggtagttaagcgccccgcgccaccaccactactactagtagcagcggcactcccgctgccatccccactgcccccccgaacccccctccgcgctccgcacattgggtgggaggagctgctccagctcggttgtcggtgccgggtggatcgccctgccgcgccatggacggcgacgcggacgccctgaagtccgggaggcacggggccggggacgtgtgccagatctgcgccgacgggctgggcaccacggtggacggcgaggtcttcaccgcctgcgacgtctgccgcttcccggtctgccgcccctgctacgagcacgagcgcaaggagggcacccaggcctgcctccagtgcaagaccaagtacaagcgccacagagggagccctccgatccgcggggaggaaggcgatgacaccgatgccgatgatggcagtgacttcaactaccctgcatctggcactgaggaccagaagcagaagattgctgataggatgcgcagctggcgcatgaacaccgggggtagtggcaatgttggccaccccaagtatgacagtggcgagatcggcctctccaagtatgacagtggagagatccctaggggatacgtcccttcagtcaccaacagccagatgtcaggagaaatccctggagcttcccctgatcatcatatgatgtcccctacagggaacatcagcagacgtgctccctttccctatgtgaatcattcaccaaatccgtcaagggagttctctggcagtattgggaatgttgcctggaaagagagagtcgatggctggaaaatgaagcaggacaagggtgcaattcccatgactaatgggacaagtattgctccctctgaaggtcgggcagctactgacattgatgcatctactgaatacaacatggaagacgctttactgaatgatgaaactcgccagcctctatctagaaaagtccccattgcttcatccaaaataaatccctacagaatggtcattgttctgcggttggttgttctaagcatcttcctgcactaccgtctcacaaatcctgtgcgtaatgcatacccactgtggcttttatctgttatatgtgagatttggtttgctttatcctggatactggatcagttcccgaagtggtttccaatcaaccgggagacctaccttgatagactggctttaaggtatgaccgagaaggtgaaccgtctcagttggctgctgttgacatatttgtcagtacagtcgaccccttgaaggagccacctatcgtcactgccaacactgtgctatccattcttgctgttgattatcccgtggacaaggtctcttgctatgtatctgatgacggagcttcaatgctgacttttgatgcattggctgagacttcagagtttgctaggaaatgggtaccatttgtgaagaagtatgacattgaacccagagctcctgagttttacttttgccagaaaattgattacctgaaagacaaagtccagccttcatttgttaaagaccgccggaccagagaaggagagcagcggaaggtggaggatgggattgtggagaaggccatcttggtgaaagatttcgcgtgagcttttcttctagcttgatgagaagacatctccctagtatttgttgtttctttgacttgcaatgtataccttgattttaagatcagatgacattatgctaatctctttggtccgggggcaagtttcttggcctc

SEQ ID NO: 32503 - protein, 478 aa, Triticum aestivum
MDGDADALKSGRHGAGDVCQICADGLGTTVDGEVFTACDVCRFPVCRPCYEHERKEGTQACLQCKTKYKRHRGSPPIRGEEGDDTDADDGSDFNYPASGTEDQKQKIADRMRSWRMNTGGSGNVGHPKYDSGEIGLSKYDSGEIPRGYVPSVTNSQMSGEIPGASPDHHMMSPTGNISRRAPFPYVNHSPNPSREFSGSIGNVAWKERVDGWKMKQDKGAIPMTNGTSIAPSEGRAATDIDASTEYNMEDALLNDETRQPLSRKVPIASSKINPYRMVIVLRLVVLSIFLHYRLTNPVRNAYPLWLLSVICEIWFALSWILDQFPKWFPINRETYLDRLALRYDREGEPSQLAAVDIFVSTVDPLKEPPIVTANTVLSILAVDYPVDKVSCYVSDDGASMLTFDALAETSEFARKWVPFVKKYDIEPRAPEFYFCQKIDYLKDKVQPSFVKDRRTREGEQRKVEDGIVEKAILVKDFA

SEQ ID NO: 32504 - protein, 368 aa, Triticum aestivum
MRSWRMNTGGSGNVGHPKYDSGEIGLSKYDSGEIPRGYVPSVTNSQMSGEIPGASPDHHMMSPTGNISRRAPFPYVNHSPNPSREFSGSIGNVAWKERVDGWKMKQDKGAIPMTNGTSIAPSEGRAATDIDASTEYNMEDALLNDETRQPLSRKVPIASSKINPYRMVIVLRLVVLSIFLHYRLTNPVRNAYPLWLLSVICEIWFALSWILDQFPKWFPINRETYLDRLALRYDREGEPSQLAAVDIFVSTVDPLKEPPIVTANTVLSILAVDYPVDKVSCYVSDDGASMLTFDALAETSEFARKWVPFVKKYDIEPRAPEFYFCQKIDYLKDKVQPSFVKDRRTREGEQRKVEDGIVEKAILVKDFA

SEQ ID NO: 32505 - protein, 363 aa, Triticum aestivum
MNTGGSGNVGHPKYDSGEIGLSKYDSGEIPRGYVPSVTNSQMSGEIPGASPDHHMMSPTGNISRRAPFPYVNHSPNPSREFSGSIGNVAWKERVDGWKMKQDKGAIPMTNGTSIAPSEGRAATDIDASTEYNMEDALLNDETRQPLSRKVPIASSKINPYRMVIVLRLVVLSIFLHYRLTNPVRNAYPLWLLSVICEIWFALSWILDQFPKWFPINRETYLDRLALRYDREGEPSQLAAVDIFVSTVDPLKEPPIVTANTVLSILAVDYPVDKVSCYVSDDGASMLTFDALAETSEFARKWVPFVKKYDIEPRAPEFYFCQKIDYLKDKVQPSFVKDRRTREGEQRKVEDGIVEKAILVKDFA

SEQ ID NO: 32506 - DNA, 1143 bp, Triticum aestivum
agacaggaaggatttggtagattatggagaggtacaaatgctggcttggcattagctataccaactgttggaatatatttgccttgctatgacatattccgcaacaagattgaagattttacaagaagcaatgctcctgggttgacaccatatgccccactagtagcaggatcagttgcacgttcgctcgcatgcattgcttgttccccaattgaattggcaaggacacggatgcaggcgtataaggaatttcagcctggagtaaagcctcctggaatgtggaaaacattgcttggtgttctttcaccacatgcaagtccaagtcagaatgtgcaaaactatcgtgttctatggacgggtgtgggggcacagcttgctcgggatgttccattctctgctatatgctggtcaacgctggagccgattcgaagaaagctgcttggtcttgttgcagaggacggtgacgcagctagtgcgttgggagcgaactttgctgctggctttgtagcaggtagtcttgctgctggtgttacatgccctcttgatgttgccaagacaaggagacagatagagaaggatgcccagaaggcaatgagaatgaccacgaggcaaacgttagttgatatattgaggtctgaaggtccaaaaggcttgttcactggtgttggtccacgcgtcgctcgtgctggaccatcagttggtattgtcatttccttttatgaggtcgtcaagtatgctcttcaccaaaggaacatgtcatgaccaggattttgtccggaagataaaactatcaccctcttttgtagaaacatggcattccccagatctgtctagtttatgccagccactcgagctttgggcagcgtaaggtgtggtaaaggctcaaattagaggatcaaagtgaccagcaatcagcattatttttcctggacgaggtccagttgtctcctggtaataatgtttaaaggctttcagtttgccgcggagcaagctccagttttgtagaggggaatggaccatataactttgattaacttacgtaggaagatggatgtagtgtaagatgtagcattgacgatgatcaataataccttgtgctttgtacacttaaaactacagaataattttgttttgccttgtctc

SEQ ID NO: 32507 - protein, 253 aa, Triticum aestivum
RQEGFGRLWRGTNAGLALAIPTVGIYLPCYDIFRNKIEDFTRSNAPGLTPYAPLVAGSVARSLACIACSPIELARTRMQAYKEFQPGVKPPGMWKTLLGVLSPHASPSQNVQNYRVLWTGVGAQLARDVPFSAICWSTLEPIRRKLLGLVAEDGDAASALGANFAAGFVAGSLAAGVTCPLDVAKTRRQIEKDAQKAMRMTTRQTLVDILRSEGPKGLFTGVGPRVARAGPSVGIVISFYEVVKYALHQRNMS

SEQ ID NO: 32508 - protein, 176 aa, Triticum aestivum
MQAYKEFQPGVKPPGMWKTLLGVLSPHASPSQNVQNYRVLWTGVGAQLARDVPFSAICWSTLEPIRRKLLGLVAEDGDAASALGANFAAGFVAGSLAAGVTCPLDVAKTRRQIEKDAQKAMRMTTRQTLVDILRSEGPKGLFTGVGPRVARAGPSVGIVISFYEVVKYALHQRNMS

SEQ ID NO: 32509 - protein, 161 aa, Triticum aestivum
MWKTLLGVLSPHASPSQNVQNYRVLWTGVGAQLARDVPFSAICWSTLEPIRRKLLGLVAEDGDAASALGANFAAGFVAGSLAAGVTCPLDVAKTRRQIEKDAQKAMRMTTRQTLVDILRSEGPKGLFTGVGPRVARAGPSVGIVISFYEVVKYALHQRNMS

SEQ ID NO: 32510 - DNA, 2008 bp, Triticum aestivum
atccgcacgagcgcacacgcacagcgataaagccagcgcagcagcaaagccggagcagagccatcaaaccacgccgcgactcctccccctcccctgctcctcccggcgactcgcggggtgctgctgctgacggctcatgggctgctgccgctcgtcgctgcgggcggtgacgcacccccacccggagaagccgccggggacgggcgcgggggcggcgccgatggccaggcggccgtccttctcggcgagcgcgcaccgggccgcgccgcctccgccggcggcggcggcggcggcatcgtcctccgaggcggggttcgccgagttctcgctggcggagctgcgcgcggccacgggcgggttcgcgccggagaacatcgtgtccgagagcggcgacaaggcgcccaacttcgtctacaggggccgcctgcagcaggggcaggggcagggcccccgccgcgcgatcgccgtcaagaagttcggcaagatggcctggcccgaccccaagcagttcgcggaggaggccaggggggtgggcaggctgcgccaccgccggctcgccaacctcatcggctactgctgcgacggggacgagcgcctgctcgtcgccgagttcatgcccaacgacaccctcgccaagcacgtcttccactgggaaaaccagactattgaatgggctatgcgtctaagagtcgcgtaccacatagctgaggcgctggactactgcagcaacgagggtagacctttatatcatgacctaaatgcatatagggtcctttttgatgagaatggtgatcctcgcctttcatgctttggtttgatgaaaaacagcagagatgggaaaagttatagcacaaaccttgcatacacacctccagaatatttgagaactggaagagtcactccagaaagtgtcatattcagctttggcaccgtactactggaccttctaagtggaaaacgcatacctccttcccatgctcttgacatgatgcgaggcaacaatatccaaatgttgatggattcacatttggaaggaaactactcaacagaagaggcaaccgctttggtagatcttgcctcccagtgtttgcagtatgaagctagggaccgccccaatacaaaaaagctggttaacatacttgagcccttgcaaacaaaattagaggtaccgtcctacgagatgcttggcataccaaagcatgaggaagaagtacctccacctcctgccccacaaccaccacaacaccctctttctcccatggctgaggcctgttctaggatggacctgacagctatccagcagatccttgtatcgacacattacagagacgacgaaggcagtaatgagctatcattccaggaatggacgcagcagatgagggacatgttggacgccaggaaacgtggggatctagcttttcgtgacaaagatttcaagacagccatagaatgctatacacagtttgttgatgtgggcacaatggtatcgccgacggtgtatgcccgaaggagcttgtgtcacctcatgtgcgaccagcccgacgctgccctccgggacgcgatgcaagcgcaatgcgtgtaccccgaatggccaactgcattctatatgcaagccgtcgcgctttcgaagccagatatgcagagcgacgccaaggacatgttgagtgaggcttcgcagctagaagagaagaagcaaaagaactcgagatgatgtcgagagcgtggtctttgtaaagatgtgtcggttcggtctcttttgcggctcaaatgtttacgtcgattgaggcgtgctattccgtcctttggaaaagaaaaaaactgtgagatattcgaggttgagttagggagaaactgcagggaagaagtgccgccgtagagtcgtgtggttgtaactatttggtttggcatttctgcgatgcattattttttgggtctatatatatatatatatgacatttttaaaagctataatcaggcataatgcttaagctaatgccgtagcttccac

SEQ ID NO: 32511 - protein, 524 aa, Triticum aestivum
MGCCRSSLRAVTHPHPEKPPGTGAGAAPMARRPSFSASAHRAAPPPPAAAAAASSSEAGFAEFSLAELRAATGGFAPENIVSESGDKAPNFVYRGRLQQGQGQGPRRAIAVKKFGKMAWPDPKQFAEEARGVGRLRHRRLANLIGYCCDGDERLLVAEFMPNDTLAKHVFHWENQTIEWAMRLRVAYHIAEALDYCSNEGRPLYHDLNAYRVLFDENGDPRLSCFGLMKNSRDGKSYSTNLAYTPPEYLRTGRVTPESVIFSFGTVLLDLLSGKRIPPSHALDMMRGNNIQMLMDSHLEGNYSTEEATALVDLASQCLQYEARDRPNTKKLVNILEPLQTKLEVPSYEMLGIPKHEEEVPPPPAPQPPQHPLSPMAEACSRMDLTAIQQILVSTHYRDDEGSNELSFQEWTQQMRDMLDARKRGDLAFRDKDFKTAIECYTQFVDVGTMVSPTVYARRSLCHLMCDQPDAALRDAMQAQCVYPEWPTAFYMQAVALSKPDMQSDAKDMLSEASQLEEKKQKNSR

SEQ ID NO: 32512 - protein, 496 aa, Triticum aestivum
MARRPSFSASAHRAAPPPPAAAAAASSSEAGFAEFSLAELRAATGGFAPENIVSESGDKAPNFVYRGRLQQGQGQGPRRAIAVKKFGKMAWPDPKQFAEEARGVGRLRHRRLANLIGYCCDGDERLLVAEFMPNDTLAKHVFHWENQTIEWAMRLRVAYHIAEALDYCSNEGRPLYHDLNAYRVLFDENGDPRLSCFGLMKNSRDGKSYSTNLAYTPPEYLRTGRVTPESVIFSFGTVLLDLLSGKRIPPSHALDMMRGNNIQMLMDSHLEGNYSTEEATALVDLASQCLQYEARDRPNTKKLVNILEPLQTKLEVPSYEMLGIPKHEEEVPPPPAPQPPQHPLSPMAEACSRMDLTAIQQILVSTHYRDDEGSNELSFQEWTQQMRDMLDARKRGDLAFRDKDFKTAIECYTQFVDVGTMVSPTVYARRSLCHLMCDQPDAALRDAMQAQCVYPEWPTAFYMQAVALSKPDMQSDAKDMLSEASQLEEKKQKNSR

SEQ ID NO: 32513 - protein, 408 aa, Triticum aestivum
MAWPDPKQFAEEARGVGRLRHRRLANLIGYCCDGDERLLVAEFMPNDTLAKHVFHWENQTIEWAMRLRVAYHIAEALDYCSNEGRPLYHDLNAYRVLFDENGDPRLSCFGLMKNSRDGKSYSTNLAYTPPEYLRTGRVTPESVIFSFGTVLLDLLSGKRIPPSHALDMMRGNNIQMLMDSHLEGNYSTEEATALVDLASQCLQYEARDRPNTKKLVNILEPLQTKLEVPSYEMLGIPKHEEEVPPPPAPQPPQHPLSPMAEACSRMDLTAIQQILVSTHYRDDEGSNELSFQEWTQQMRDMLDARKRGDLAFRDKDFKTAIECYTQFVDVGTMVSPTVYARRSLCHLMCDQPDAALRDAMQAQCVYPEWPTAFYMQAVALSKPDMQSDAKDMLSEASQLEEKKQKNSR

SEQ ID NO: 32514 - DNA, 857 bp, Triticum aestivum
aaaaacgatcagaaaaccacaaccaggagcaacaggaatgggttcctttgctaatggccagaatggttcggagcttggcatccagatgccggccatggggagcagcgcggtgccggagcctcccacaacatctgtagcagcaagatgtccacggctggacatggccatggtggccaccagagctgcagccctcgtgatggcgctgctctcaatgtcgctcatggtctccgccaagcaacggggtagtctcatcatctttggcatcgagattccactgtatgccaaatggtccctctctgattcgctgaaatccttggttgggctatctgcggcagcagctgcctactctctggcacaacttctgtcgattgcgtacaaggccttgaagaaagtccctgtggttccatccaggcgctatgcctggatgctgttagctggtgatcaggtctttgcgtatgcgatgttgagcggggggtcagcagcggcggccgtcgcaaatttgaaccgcaccggcatccggcacacggcgcttcccaacttctgcaagcccttgccacgtttctgcgacctatcagcagcctccatcgcgtgcgcctttctcagctgcgccttccttgccgcatccgctgtaatcgatgttatctggctgtcaaatctgtgagaatgtgagatagatggtggcaaactagtacaccccttggcagggagttcaactttcagggtgctgtgcctttagatgatgtgccgaacctgaacctgtaaagtgtcctgaagtcctgtgagttggctgcttgtacaaattggagcccccttggtgcaatggatggcatcacctggatgttgattgttgatttgct

SEQ ID NO: 32515 - protein, 219 aa, Triticum aestivum
KTIRKPQPGATGMGSFANGQNGSELGIQMPAMGSSAVPEPPTTSVAARCPRLDMAMVATRAAALVMALLSMSLMVSAKQRGSLIIFGIEIPLYAKWSLSDSLKSLVGLSAAAAAYSLAQLLSIAYKALKKVPVVPSRRYAWMLLAGDQVFAYAMLSGGSAAAAVANLNRTGIRHTALPNFCKPLPRFCDLSAASIACAFLSCAFLAASAVIDVIWLSNL

SEQ ID NO: 32516 - protein, 207 aa, Triticum aestivum
MGSFANGQNGSELGIQMPAMGSSAVPEPPTTSVAARCPRLDMAMVATRAAALVMALLSMSLMVSAKQRGSLIIFGIEIPLYAKWSLSDSLKSLVGLSAAAAAYSLAQLLSIAYKALKKVPVVPSRRYAWMLLAGDQVFAYAMLSGGSAAAAVANLNRTGIRHTALPNFCKPLPRFCDLSAASIACAFLSCAFLAASAVIDVIWLSNL

SEQ ID NO: 32517 - protein, 191 aa, Triticum aestivum
MPAMGSSAVPEPPTTSVAARCPRLDMAMVATRAAALVMALLSMSLMVSAKQRGSLIIFGIEIPLYAKWSLSDSLKSLVGLSAAAAAYSLAQLLSIAYKALKKVPVVPSRRYAWMLLAGDQVFAYAMLSGGSAAAAVANLNRTGIRHTALPNFCKPLPRFCDLSAASIACAFLSCAFLAASAVIDVIWLSNL

SEQ ID NO: 32518 - DNA, 1621 bp, Triticum aestivum
gcagggaaaatcaaaaatgttccccggcgacgggaatcgaaagtgaggtaaccttaccggccccgaaacgctcgcccccacatgccaccacggcccgcactgcacgcgcctcctccctcctccccctcctaaccctagaatcttccagaatcagcgggaagcagggagggcgaggcgcgcgccgcgcttccggaagcttctagaagctctaggggggaaggagccgagatggggacgtcggatctggaccggcagatcgagcagctcaagcggtgcgagccgctggcggaggcggaggtcaaggcgctctgcctcaaggccatggagatcctcgtcgaggagagcaacgtccagcgcgtcgacgcccccgtcacgatatgtggagacattcatggacagttctacgacatgaaagaacttttcaaagttggaggtgactgcccaaagacaaactacctgttccttggggattttgtcgaccgaggattttattctgttgaaacatttttgcttcttttggccttaaaggttaggtacccagatcgtataactttaatacgaggaaatcatgagagcaggcagatcacacaagtttatggcttctatgatgagtgtcttcgtaaatatggctcggtgaatgtctggagatattgcacagaaatatttgactatttaagtttgtctgcacttattgagaacaaaatcttcagtgtccatggaggcctttcccctgctattacgacactggatcagatcagagtaatagatcgcaagcaagaagtgcctcatgatggtgccatgtgtgaccttctttggtctgatccagaggatgctgtagacggctggggattaagtcctcgaggtgcagggttcctctttggtggaaacgttgtctcttcatttaaccactcaaacaacatagattatatttgccgtgctcatcaactagtcatggaaggattcaagtggatgttcaataacaagattgttactgtatggtctgctcctaactattgctacaggtgtggcaatgttgctgcaatcctagagcttgatgagaacttgaataagcagttccgtgtatttgaagctgctccacatgaatcaagaggtgttcctgccaagaggcctgccccagattactttctttgagactgcacacatggcatgtgacacgctgtcttttcatgcccttgagcaccagcgggccgatagggggtattgaaggcgtgccatgttggcagatgggcgcgtgctttgcaagagattagccaggaggtgctttcgggatgtataaatcgattgttctgtgtccgtccaggtctattgtttgtaacaaagttgatgtcggtatccacttctccccaaaatagctccaatttgagctttgagaaaatgcctccgagaagggagtggtgtagatgaagccactctgggcccatgatgtaaaattttgatgccagtcccttcctcccctgggaatccgtacattttctagaatgtagaatggtatgcaaatgtgtgccttgagtttaccttttagttgcattgcaggcagctgtaggaaatcttgtagttttgatgttttgcatggaagtattctgaggaagcacacatcagc

SEQ ID NO: 32519 - protein, 307 aa, Triticum aestivum
MGTSDLDRQIEQLKRCEPLAEAEVKALCLKAMEILVEESNVQRVDAPVTICGDIHGQFYDMKELFKVGGDCPKTNYLFLGDFVDRGFYSVETFLLLLALKVRYPDRITLIRGNHESRQITQVYGFYDECLRKYGSVNVWRYCTEIFDYLSLSALIENKIFSVHGGLSPAITTLDQIRVIDRKQEVPHDGAMCDLLWSDPEDAVDGWGLSPRGAGFLFGGNVVSSFNHSNNIDYICRAHQLVMEGFKWMFNNKIVTVWSAPNYCYRCGNVAAILELDENLNKQFRVFEAAPHESRGVPAKRPAPDYFL

SEQ ID NO: 32520 - protein, 276 aa, Triticum aestivum
MEILVEESNVQRVDAPVTICGDIHGQFYDMKELFKVGGDCPKTNYLFLGDFVDRGFYSVETFLLLLALKVRYPDRITLIRGNHESRQITQVYGFYDECLRKYGSVNVWRYCTEIFDYLSLSALIENKIFSVHGGLSPAITTLDQIRVIDRKQEVPHDGAMCDLLWSDPEDAVDGWGLSPRGAGFLFGGNVVSSFNHSNNIDYICRAHQLVMEGFKWMFNNKIVTVWSAPNYCYRCGNVAAILELDENLNKQFRVFEAAPHESRGVPAKRPAPDYFL

SEQ ID NO: 32521 - protein, 247 aa, Triticum aestivum
MKELFKVGGDCPKTNYLFLGDFVDRGFYSVETFLLLLALKVRYPDRITLIRGNHESRQITQVYGFYDECLRKYGSVNVWRYCTEIFDYLSLSALIENKIFSVHGGLSPAITTLDQIRVIDRKQEVPHDGAMCDLLWSDPEDAVDGWGLSPRGAGFLFGGNVVSSFNHSNNIDYICRAHQLVMEGFKWMFNNKIVTVWSAPNYCYRCGNVAAILELDENLNKQFRVFEAAPHESRGVPAKRPAPDYFL

SEQ ID NO: 32522 - DNA, 1652 bp, Triticum aestivum
gcccgcccgcctccgcgaacgaaaggccaaacctctgcccccctccttggctcctcctcctcgtgactccctcctgcggcccctcccccctccctcgccggtcaaaccctaacgcgcgcacccacccacccacccgtcaatcccttctcccatggcggcgctctccgtgcctctccgcaccgcggcggccctgtcctcgtccggcgccggatcccgcgccgccgccgacccctccaaggtgtcatgcgtgaggagcacccgctccgctcattttgactgcagcttcccctccattgcggcttcctcttcatctgccaggaacattgagccacttagagctatagctacacaggcacccccggccgtcccacaatatttgagtggagagaagacgaaggttggcatcaatgggttcggacggattgggaggttggttctgagaattgcaaccagtagagatgatattgaagttgtggctgtcaatgatcctttcattgatgctaagtacatggcctatatgttcaagtatgactccactcatggcccctttaaaggatccatcaatgttgtggatgattcaaccctggagatcaatgggaagaaaatcactataacaagcaaaagagatcccgcagagattccttggggtaactttggagctgactatgttgttgaatcttctggtgtttttacaaccatcgataaagcatcggtacacttgaagggtggtgctaagaaagtggtgatatctgctccatccgcagatgctcccatgtttgtggttggagtaaatgagatgagctacgatcccaagatgaatgttgtttctaatgcaagttgtaccactaactgtcttgctcctcttgccaaggttgttcatgaagaatttggcattcttgaaggtctaatgacaactgttcacgccacaacagccacccaaaagactgttgatggtccttcaatgaaagattggagaggagggcgtggtgctggtcaaaacataattcctagctccactggtgcagcaaaggctgttgggaaagttctccctgagctaaatggaaagcttactggcatggctttccgagttccaacaccaaatgtctctgtggttgacttgacctgccggcttgagaaaagtgcctcttatgatgatgtgaaagcagccatcaaggcggcatcagagggtgcactgaaaggcattttaggctacacagatgaggatgtggtatccaacgattttgttggtgacacaaggtcaagtgtatttgatgctaatgctggcatggggctgagctcttccttcatgaagctcgtgtcgtggtacgacaacgagtggggctacagcaaccgggttcttgatctcatcgcccacatggctcttgtctccgccaagcactgatcacctccgagtgctactaataggctgcaattttgccggttctttttattttcagaatttattattgcctttgttgtgccttttgagcacaggcagaaatgggtactcggatctatgacttgcttgtagcagtggatgaaatttacaccgtagcgttatgagcacgtcgtgggatttgttgagcgaatctcatttgtatcggtggtttgatttgttgctaaagaaagaaatcacaaattgtcccctttgg

SEQ ID NO: 32523 - protein, 416 aa, Triticum aestivum
MAALSVPLRTAAALSSSGAGSRAAADPSKVSCVRSTRSAHFDCSFPSIAASSSSARNIEPLRAIATQAPPAVPQYLSGEKTKVGINGFGRIGRLVLRIATSRDDIEVVAVNDPFIDAKYMAYMFKYDSTHGPFKGSINVVDDSTLEINGKKITITSKRDPAEIPWGNFGADYVVESSGVFTTIDKASVHLKGGAKKVVISAPSADAPMFVVGVNEMSYDPKMNVVSNASCTTNCLAPLAKVVHEEFGILEGLMTTVHATTATQKTVDGPSMKDWRGGRGAGQNIIPSSTGAAKAVGKVLPELNGKLTGMAFRVPTPNVSVVDLTCRLEKSASYDDVKAAIKAASEGALKGILGYTDEDVVSNDFVGDTRSSVFDANAGMGLSSSFMKLVSWYDNEWGYSNRVLDLIAHMALVSAKH

SEQ ID NO: 32524 - protein, 297 aa, Triticum aestivum
MAYMFKYDSTHGPFKGSINVVDDSTLEINGKKITITSKRDPAEIPWGNFGADYVVESSGVFTTIDKASVHLKGGAKKVVISAPSADAPMFVVGVNEMSYDPKMNVVSNASCTTNCLAPLAKVVHEEFGILEGLMTTVHATTATQKTVDGPSMKDWRGGRGAGQNIIPSSTGAAKAVGKVLPELNGKLTGMAFRVPTPNVSVVDLTCRLEKSASYDDVKAAIKAASEGALKGILGYTDEDVVSNDFVGDTRSSVFDANAGMGLSSSFMKLVSWYDNEWGYSNRVLDLIAHMALVSAKH

SEQ ID NO: 32525 - protein, 294 aa, Triticum aestivum
MFKYDSTHGPFKGSINVVDDSTLEINGKKITITSKRDPAEIPWGNFGADYVVESSGVFTTIDKASVHLKGGAKKVVISAPSADAPMFVVGVNEMSYDPKMNVVSNASCTTNCLAPLAKVVHEEFGILEGLMTTVHATTATQKTVDGPSMKDWRGGRGAGQNIIPSSTGAAKAVGKVLPELNGKLTGMAFRVPTPNVSVVDLTCRLEKSASYDDVKAAIKAASEGALKGILGYTDEDVVSNDFVGDTRSSVFDANAGMGLSSSFMKLVSWYDNEWGYSNRVLDLIAHMALVSAKH

SEQ ID NO: 32526 - DNA, 772 bp, Triticum aestivum
aacccccgtgaagcatcatccatcttctctccttacgccgccttgcactgcattccagcctccatctccaacagcaacccatggccggcatgaaaaccatcgttctccttgccgtgatctcggccgccgccttgggcaccgcgtcagcggcgacccaccgcgtgggcgagccgggcggcgcgtgggacctcaccaccgattacggcagctgggcgtcctccagggagttccacccgggcgacgagctcatcttcaggcaccagccaggggcgcacaacgtgctcgaggtcagcgaggtcgactacgactcctgcaacgccaccagccccatcaccaccttgggctccggctttttcacctacgtcgcccttccggccgtcggcacccgctacttcatctgcggtttccctggccactgcaccaccaccggcaccggcggcatgaagctcaagatcgacgtcgtgccaggttccccctcgtcgtcgcccgccccggccatgccgccgccctcctccgccgcggcctctgccggggctacaataggatctggccttgtcgtcctgctggcggccggtctcatggcttgaaatgcatgtattcttcattagctgatgatgcccggtgcattcaaccgatgtaaagactgtagcctgtaggtttccccccttctaaaaaaacaaaaaaaaagttgagttgccgcagcagacacataccagcttatactatattgttaactggttattattgttgaatacatacaattaattttttg

SEQ ID NO: 32527 - protein, 212 aa, Triticum aestivum
TPVKHHPSSLLTPPCTAFQPPSPTATHGRHENHRSPCRDLGRRLGHRVSGDPPRGRAGRRVGPHHRLRQLGVLQGVPPGRRAHLQAPARGAQRARGQRGRLRLLQRHQPHHHLGLRLFHLRRPSGRRHPLLHLRFPWPLHHHRHRRHEAQDRRRARFPLVVARPGHAAALLRRGLCRGYNRIWPCRPAGGRSHGLKCMYSSLADDARCIQPM

SEQ ID NO: 32528 - protein, 168 aa, Triticum aestivum
MAGMKTIVLLAVISAAALGTASAATHRVGEPGGAWDLTTDYGSWASSREFHPGDELIFRHQPGAHNVLEVSEVDYDSCNATSPITTLGSGFFTYVALPAVGTRYFICGFPGHCTTTGTGGMKLKIDVVPGSPSSSPAPAMPPPSSAAASAGATIGSGLVVLLAAGLMA

SEQ ID NO: 32529 - protein, 165 aa, Triticum aestivum
MKTIVLLAVISAAALGTASAATHRVGEPGGAWDLTTDYGSWASSREFHPGDELIFRHQPGAHNVLEVSEVDYDSCNATSPITTLGSGFFTYVALPAVGTRYFICGFPGHCTTTGTGGMKLKIDVVPGSPSSSPAPAMPPPSSAAASAGATIGSGLVVLLAAGLMA

SEQ ID NO: 32530 - DNA, 1509 bp, Triticum aestivum
aagagtctctgtgcacgttgccacccttttttctccctttcccatccccatctttcgtccagccctccccgccccctcccccctctcgccgcggaccccatccgccccccgccgccgccgccgccgccgttgacactacccgcgaatctccttcttccgagtggcggagaggaggcatggcactccggaggctgcttcaggggattgtcctaccgcggacgacgggccggcatgttggggcatcgttttccacggaggctggggagactatccgcgcaaccctgtttcccggtgatggcatcgggcctgagatcgccgagtcggtcaagcaggtattcaatgttgcaggtgtaccgatagaatgggaagaacattatgttggtacggaagttgatcccagaacagagagctttttgacatgggagagcctggagtctgtgcgtagaaacaaagttggcttgaaaggtcctatggctacacctattggaaaaggccaccgttctttgaatcttacattaaggaaagaacttggactctacgccaatgtcagaccttgcaacagcctcccaggctacaagactagatatgatgatgtgaaccttgtgacaatccgtgaaaatactgaaggagagtatagtggccttgagcatcaggttgtgaggggtgttgtggaaagtttgaaaattattacccgccaagcaagtttgagagtggcagagtatgctttccattatgccaaagccaatggcagggagagggtctctgcgatacataaagctaatatcatgaggaaaacagacggacttttcctcaagtgttgccgtgaagtagctgagaagtaccctgaaatcacatatgaggaagtcattattgacaattgctgcatgacactcgtgaagaatcctggtacatttgatgtattagtgatgccaaatctgtatggtgacattattagtgatctatgtgctggtttgatcggaggattgggcttaactcccagctgcaacattggtgaaggtggcatttgtctggcagaggctgttcatggttctgcacctgatatctctggcaagaaccttgcaaacccaactgctcttatgttgagtgctgttatgatgttgcgccacttgcaattcaatgaccaagcagaccggatccacaatgccatcctccagacaattgccgaggggaagtacagaaccgctgatcttggtgggaagtcatcaacatcagactacacaaaagcagtttgcgatcatatctgagcaccagctgctctttctctcgattatttgcctcccacctaattttgttgcataccaggagctttagcctgagtaggttaagtggcaggcacctcgatttccttgggtgttaagacaccatttaaggctcctgaataattctcgcattcttgtccttggaaaagttttaccagcattgcagtcaagctgaagaatcgtatgtaataatcattggcagcatcagcgcatataatttgttcgttct

SEQ ID NO: 32531 - protein, 420 aa, Triticum aestivum
ESLCTLPPFFLPFPSPSFVQPSPPPPPSRRGPHPPPAAAAAAVDTTRESPSSEWRRGGMALRRLLQGIVLPRTTGRHVGASFSTEAGETIRATLFPGDGIGPEIAESVKQVFNVAGVPIEWEEHYVGTEVDPRTESFLTWESLESVRRNKVGLKGPMATPIGKGHRSLNLTLRKELGLYANVRPCNSLPGYKTRYDDVNLVTIRENTEGEYSGLEHQVVRGVVESLKIITRQASLRVAEYAFHYAKANGRERVSAIHKANIMRKTDGLFLKCCREVAEKYPEITYEEVIIDNCCMTLVKNPGTFDVLVMPNLYGDIISDLCAGLIGGLGLTPSCNIGEGGICLAEAVHGSAPDISGKNLANPTALMLSAVMMLRHLQFNDQADRIHNAILQTIAEGKYRTADLGGKSSTSDYTKAVCDHI

SEQ ID NO: 32532 - protein, 362 aa, Triticum aestivum
MALRRLLQGIVLPRTTGRHVGASFSTEAGETIRATLFPGDGIGPEIAESVKQVFNVAGVPIEWEEHYVGTEVDPRTESFLTWESLESVRRNKVGLKGPMATPIGKGHRSLNLTLRKELGLYANVRPCNSLPGYKTRYDDVNLVTIRENTEGEYSGLEHQVVRGVVESLKIITRQASLRVAEYAFHYAKANGRERVSAIHKANIMRKTDGLFLKCCREVAEKYPEITYEEVIIDNCCMTLVKNPGTFDVLVMPNLYGDIISDLCAGLIGGLGLTPSCNIGEGGICLAEAVHGSAPDISGKNLANPTALMLSAVMMLRHLQFNDQADRIHNAILQTIAEGKYRTADLGGKSSTSDYTKAVCDHI

SEQ ID NO: 32533 - protein, 264 aa, Triticum aestivum
MATPIGKGHRSLNLTLRKELGLYANVRPCNSLPGYKTRYDDVNLVTIRENTEGEYSGLEHQVVRGVVESLKIITRQASLRVAEYAFHYAKANGRERVSAIHKANIMRKTDGLFLKCCREVAEKYPEITYEEVIIDNCCMTLVKNPGTFDVLVMPNLYGDIISDLCAGLIGGLGLTPSCNIGEGGICLAEAVHGSAPDISGKNLANPTALMLSAVMMLRHLQFNDQADRIHNAILQTIAEGKYRTADLGGKSSTSDYTKAVCDHI

SEQ ID NO: 32534 - DNA, 1370 bp, Triticum aestivum
aaagagagagaaaagcgcacgaaaagaaaacagagagaaatgaaactgccctgctgctgctgaggtcggcctcctggcgatgagcccccgccgccgtcccccgctgctcctcctcgccgccgtcgccgtcgcctgcgcctgcgccgccgcccgcccctgcgcggccctcgtccgcctcggtgccgcctccttcctcgacgcccccgcgcgcttcgggccccgggtgaccggcgacgggatatgcgggtcgctgcgcgccgcggagcccgccgacgcgtgcgcgcccgtccggggcgcccccggcgggagcggcgggatggcgttcgtgctcatcgcgcgcgggaactgcagcttcgagggcaaggtgcgggcggcgcagcgggccggcttcgacgccgcgctcgtccacgacgacgaggacaaggccagcctctactccatggttggcgatcctgagggcatacacatacctgcggtattcgtatccaaaatggctggggaaaccttgaagaagtttgccagaggtgaagatggggaatgctgtataaactcgtcgatggatgagactgcagggacagtgttggtgatgtcgttcgtatcacttgttgtcatcatatcagttgtagcttcatttcttttcgctcggaactgccgacttttacgcaatggagttgataatcgcccaccttacatcaagaagcatgtggtggaaaagcttccttctgtggtatataaagctccctgctcaagtggcaacaattgtgaagaagcctgtgccatttgtttagaagactatgataatggtgacatgcttagacttctcccatgcaaacatgagtttcatgtggagtgtattgatccctggctgacaaagtggggcacattttgcccggtatgcaaacttgaggtactcacaggtggataagcaggcaagctaggagtaagtctcaggtgaataagcaagcctccgttactgcatactcccttcgtccggaaatacttgtagaagaaatgggtaaaaatggatatatgtagaactaaaacacatccagatacatccattcccccgacaagtatttccggatggagggagtatatacaagtagtgctcggcggcatgacggttatatccaggcgtgctgaactggttgatctgttgttggctgggtttgcaagatagatcaatgccgaacattttatcatgaggatggggtatgggctgtgcggtctctgggactgggcccgtcttgatacccagtagaagattgaattgtgtcgttaacattgagatgaactgtttaattgaggtgtagtatgtggaagccatcttgtaattatatgtcagaagttcaattgcttctttcccatgc

SEQ ID NO: 32535 - protein, 281 aa, Triticum aestivum
MSPRRRPPLLLLAAVAVACACAAARPCAALVRLGAASFLDAPARFGPRVTGDGICGSLRAAEPADACAPVRGAPGGSGGMAFVLIARGNCSFEGKVRAAQRAGFDAALVHDDEDKASLYSMVGDPEGIHIPAVFVSKMAGETLKKFARGEDGECCINSSMDETAGTVLVMSFVSLVVIISVVASFLFARNCRLLRNGVDNRPPYIKKHVVEKLPSVVYKAPCSSGNNCEEACAICLEDYDNGDMLRLLPCKHEFHVECIDPWLTKWGTFCPVCKLEVLTGG

SEQ ID NO: 32536 - protein, 202 aa, Triticum aestivum
MAFVLIARGNCSFEGKVRAAQRAGFDAALVHDDEDKASLYSMVGDPEGIHIPAVFVSKMAGETLKKFARGEDGECCINSSMDETAGTVLVMSFVSLVVIISVVASFLFARNCRLLRNGVDNRPPYIKKHVVEKLPSVVYKAPCSSGNNCEEACAICLEDYDNGDMLRLLPCKHEFHVECIDPWLTKWGTFCPVCKLEVLTGG

SEQ ID NO: 32537 - protein, 161 aa, Triticum aestivum
MVGDPEGIHIPAVFVSKMAGETLKKFARGEDGECCINSSMDETAGTVLVMSFVSLVVIISVVASFLFARNCRLLRNGVDNRPPYIKKHVVEKLPSVVYKAPCSSGNNCEEACAICLEDYDNGDMLRLLPCKHEFHVECIDPWLTKWGTFCPVCKLEVLTGG

SEQ ID NO: 32538 - DNA, 632 bp, Triticum aestivum
ctgacgccgagccctaaacgcttctactctcctcggtcctcgcccgcccgcctctccctttcccatctccctccgccttccccaaaccctcagagatggcctcgacctgcttccgcgccgccgcccgcgccgccacggcggcctgccgctcggcggcctcccgctccatgccctccgtcggccgctccgccgcccgccgcgccccgttaatctccagggtgccgctggagctggggtgctgcgcgggaatgtcgctgctgccgctgcacagcgcggtggccgcggcgaggctgacttcgcggctgagcacggcgtcccggagctcctccgctctctctcagggtatcctctgtcgcacctatcccggactttaacaatcgtaccatcgatgaagctgttgtctgtcttttcggtttggagatgggtctatctgctccaaggtgataaaacgcgggaagacctgcttgtgtcgtgcaatcagtctgatagaattttgtagagtagtgaactaaatgaacttctgtggtaatttatttgtgacacgcacaatcgcggttctgttgggcctttccaagttttgagatcatatcttttatcttgatataaacatgcaaggacaaattgcagattgc

SEQ ID NO: 32539 - protein, 92 aa, Triticum aestivum
MASTCFRAAARAATAACRSAASRSMPSVGRSAARRAPLISRVPLELGCCAGMSLLPLHSAVAAARLTSRLSTASRSSSALSQGILCRTYPGL

SEQ ID NO: 32540 - protein, 69 aa, Triticum aestivum
LTPSPKRFYSPRSSPARLSLSHLPPPSPNPQRWPRPASAPPPAPPRRPAARRPPAPCPPSAAPPPAAPR

SEQ ID NO: 32541 - protein, 68 aa, Triticum aestivum
MPSVGRSAARRAPLISRVPLELGCCAGMSLLPLHSAVAAARLTSRLSTASRSSSALSQGILCRTYPGL

SEQ ID NO: 32542 - DNA, 1798 bp, Triticum aestivum
aacctaagcttcaaattcagaatataccacctcaaactacgcagaaattcttcacgcgcccaacactcaccactgccggcgatgagcaccaccgagggaaagccggacgccgatgcggtggaggagatggcgcgggaggcggcggcgtggtgcgcgatgcacgggctcgtcgtcggggaccgcgcggacccgagatcaggaacagttcctggggttgggttggtccacgctccaatctccttgctcccgtcgcgtctcccggagtccttctggagccaggcgtgcgagctggccccgcttttcaacgagctcgtggatcgtgttagcttggatggggatttcttgcaggattccttgtccaaaacaaggcaggttgatgatttcacttccaggctcttagatattcacaggaagatgatggatgcaaacaagaaggagaatattcgactggggctgcaccgatcagattatatgctggattcagaaaccaattctcttctccaaatagagctcaacactatttcagtatcttttcctgggctttgttctatagtgactgagcttcacaggaccttgatcaatcagtatggaaatttattatgtctagatgccaaaagggttcctggaaatgaggcaagccgtcaatttgctaaagcattggccaaagcatgggatgagtttaatgttgacagtgctgtagttatgatgattgttcagcccgaagaaagaaatatgtatgaccaatactggcttgtcaaatatttgagggaatcacatggcgtaacaactattaggaaaaccttgtcagaggtggaggctgaaggccgggttctccctgatggaactcttgttgtaaatgacaggaaggtcactgtggtgtattttagagctggctatacaccaaacgattatccttcagaagcagaatggagtgcaaggcttttgatggaacaatcatctgctgtgaagtgtccttcaatatcatatcatttagtggggaccaagaagattcaacaagaactagcaaaacctaatgtgcttgaaaggtttcttgaaaataaggaggaaattgccaagctccgccaatgctttgcagggctatggagcttggatgatgaagaggttgtcaaatctgcgattgaaaaccctgacttgtttgtcttgaagcctcaacgtgaaggcggaggtaacaacatatacggtcttgatgtgcgagaagctctgatcagactcaagaaggaaggaggagatgctctctcagcctacatactgatgcaaagaatctttcccaaagcatctctcgctagtctggtccgtggtggtgtttgccatgaggccctcacagtatctgagcttgggatatatggagcctacctgcggaacaaagataaggtgatcatcaatgataagtgtggttacttgatgcgaacaaaagtttcttcttcggatgaaggcggtgttgctgcaggatttgctgttttggacagcttatacctgaccgacaagtgacataacctcaggaataccagctacaaatccgaaccagcattgacctaccatggatttagcattctgttgcatcggtcgcaacaaatgagatgaacaaagttgctgcacaatttgcagacgtcagccattagcatacagcacactgggtgaagaataaatgtcatgtatagatgacatgtttatgtatggaaaaataatccccgtgaaaaaacagattacaaattcttgtttcgtggatcactacacccttgactcggggccaggcagttgtgttatgcactgttaaggt

SEQ ID NO: 32543 - protein, 502 aa, Triticum aestivum
NLSFKFRIYHLKLRRNSSRAQHSPLPAMSTTEGKPDADAVEEMAREAAAWCAMHGLVVGDRADPRSGTVPGVGLVHAPISLLPSRLPESFWSQACELAPLFNELVDRVSLDGDFLQDSLSKTRQVDDFTSRLLDIHRKMMDANKKENIRLGLHRSDYMLDSETNSLLQIELNTISVSFPGLCSIVTELHRTLINQYGNLLCLDAKRVPGNEASRQFAKALAKAWDEFNVDSAVVMMIVQPEERNMYDQYWLVKYLRESHGVTTIRKTLSEVEAEGRVLPDGTLVVNDRKVTVVYFRAGYTPNDYPSEAEWSARLLMEQSSAVKCPSISYHLVGTKKIQQELAKPNVLERFLENKEEIAKLRQCFAGLWSLDDEEVVKSAIENPDLFVLKPQREGGGNNIYGLDVREALIRLKKEGGDALSAYILMQRIFPKASLASLVRGGVCHEALTVSELGIYGAYLRNKDKVIINDKCGYLMRTKVSSSDEGGVAAGFAVLDSLYLTDK

SEQ ID NO: 32544 - protein, 475 aa, Triticum aestivum
MSTTEGKPDADAVEEMAREAAAWCAMHGLVVGDRADPRSGTVPGVGLVHAPISLLPSRLPESFWSQACELAPLFNELVDRVSLDGDFLQDSLSKTRQVDDFTSRLLDIHRKMMDANKKENIRLGLHRSDYMLDSETNSLLQIELNTISVSFPGLCSIVTELHRTLINQYGNLLCLDAKRVPGNEASRQFAKALAKAWDEFNVDSAVVMMIVQPEERNMYDQYWLVKYLRESHGVTTIRKTLSEVEAEGRVLPDGTLVVNDRKVTVVYFRAGYTPNDYPSEAEWSARLLMEQSSAVKCPSISYHLVGTKKIQQELAKPNVLERFLENKEEIAKLRQCFAGLWSLDDEEVVKSAIENPDLFVLKPQREGGGNNIYGLDVREALIRLKKEGGDALSAYILMQRIFPKASLASLVRGGVCHEALTVSELGIYGAYLRNKDKVIINDKCGYLMRTKVSSSDEGGVAAGFAVLDSLYLTDK

SEQ ID NO: 32545 - protein, 460 aa, Triticum aestivum
MAREAAAWCAMHGLVVGDRADPRSGTVPGVGLVHAPISLLPSRLPESFWSQACELAPLFNELVDRVSLDGDFLQDSLSKTRQVDDFTSRLLDIHRKMMDANKKENIRLGLHRSDYMLDSETNSLLQIELNTISVSFPGLCSIVTELHRTLINQYGNLLCLDAKRVPGNEASRQFAKALAKAWDEFNVDSAVVMMIVQPEERNMYDQYWLVKYLRESHGVTTIRKTLSEVEAEGRVLPDGTLVVNDRKVTVVYFRAGYTPNDYPSEAEWSARLLMEQSSAVKCPSISYHLVGTKKIQQELAKPNVLERFLENKEEIAKLRQCFAGLWSLDDEEVVKSAIENPDLFVLKPQREGGGNNIYGLDVREALIRLKKEGGDALSAYILMQRIFPKASLASLVRGGVCHEALTVSELGIYGAYLRNKDKVIINDKCGYLMRTKVSSSDEGGVAAGFAVLDSLYLTDK

SEQ ID NO: 32546 - DNA, 1849 bp, Triticum aestivum
ctcgcttgataaatctatatcccgcatgatgggcacaccatccgcaacacttccaccagtgccacagggctctgttggtgataaggaaacctattcagcacctgcagcagcaaaatttgtaaatagtcaatcgttaatgacgatgtcatcattaactgcatccccttcagtgcattctattactgaaatgtcagagaatagtggtggcgctggcaggaagattgcacacaacagaagtgtttctgaaccagactttggcaaaacaccaaaaccgggtgcgcaatcggataatacacagagcagtgcatcaggttcaagatttggttggattagctccacactgcagaagacaatgggatttgtttcaaaatcccgccaggcaaaattagggcaacagaacaagttttactatgatgagaagctgaagcgatgggtagaggaaggtgctgagattcctgccgaggagcctcctctcgctccacctccaacaaaatcctcctcataccagaatggcatgccagactataacttaaatggccctactagtggaatgcatactcctaatggagtggcagaacgaagatctccaaaacatgcagatcatggtttggggatgccgccaattccgcccagccagaaccagttttccgcgcgtggacgaacgggtgtccggtccagatatgtggacacattcaacaaggctggtgcaactggagcggcccagtcttataacagaccggctgctacatctgtgacaccacctaccggtgccaggttctttgtgcccacggcggctgctgtcgctgcagagcagatgcctagccaatcagtgcagacacgtggcgaaaccttccaacgggatgaccgctcatcctcaccgccagcggaaacatcattttcatcaccccctccagcagcacaattttcatcaccaatgtcatctgccattcagcggtacccgagcatggacaacattgctacaccgaaccaggcaccctggatgtccccgggaagtaacagcagctcattcgcatcaagatcacgggcagcatcatggagtgggacatactctgaccaattcagttccacggcagaggctaggtcacctgacggaccgactgtgccctcgccacaaatgcctggcagacccccctcgcacagtcattccaacagcaactcgtccgtgcagtttaccggcttgacggaggatcttcacgaggttgagctctgacaggtgaggtgacggctcagcatgactgccgtgtcagccatgattcagcccagacaaccttggttaaccgcggctcttccagcaaaccccaactaatttaaaaaggtgaaaggagctgttcagcgaatcaagtggtgattgccaggaaaggggtgaacagacctcccctccgattttgaatgaaaccttgggggaaaccgcactgaaaccgaggtgcgccaggcgcgtacgacataagtacagtcttggtttttttgagtatttagtagctatatgtttgttgttattatgttcactagagcgcaggagaaaagagccgggcatcctttttttcgttgcgtgcgaggaaaagcaacatctggatgccattgtacagataatccgcctctaccccctgattcattgttcgaaggcgcgaaccagttcaccccctcattcttttttggttttggtgagaatagaagatagagataatctgtctgttattctagtagtgtaagaaaggaaagcccgaccacgccgtagaaagtgatgttgctgttgttgctgttgttgttatacttgtatgtacttgttaccacacaccatggtgtattgtactactgtattattctttgg

SEQ ID NO: 32547 - protein, 409 aa, Triticum aestivum
SLDKSISRMMGTPSATLPPVPQGSVGDKETYSAPAAAKFVNSQSLMTMSSLTASPSVHSITEMSENSGGAGRKIAHNRSVSEPDFGKTPKPGAQSDNTQSSASGSRFGWISSTLQKTMGFVSKSRQAKLGQQNKFYYDEKLKRWVEEGAEIPAEEPPLAPPPTKSSSYQNGMPDYNLNGPTSGMHTPNGVAERRSPKHADHGLGMPPIPPSQNQFSARGRTGVRSRYVDTFNKAGATGAAQSYNRPAATSVTPPTGARFFVPTAAAVAAEQMPSQSVQTRGETFQRDDRSSSPPAETSFSSPPPAAQFSSPMSSAIQRYPSMDNIATPNQAPWMSPGSNSSSFASRSRAASWSGTYSDQFSSTAEARSPDGPTVPSPQMPGRPPSHSHSNSNSSVQFTGLTEDLHEVEL

SEQ ID NO: 32548 - protein, 401 aa, Triticum aestivum
MMGTPSATLPPVPQGSVGDKETYSAPAAAKFVNSQSLMTMSSLTASPSVHSITEMSENSGGAGRKIAHNRSVSEPDFGKTPKPGAQSDNTQSSASGSRFGWISSTLQKTMGFVSKSRQAKLGQQNKFYYDEKLKRWVEEGAEIPAEEPPLAPPPTKSSSYQNGMPDYNLNGPTSGMHTPNGVAERRSPKHADHGLGMPPIPPSQNQFSARGRTGVRSRYVDTFNKAGATGAAQSYNRPAATSVTPPTGARFFVPTAAAVAAEQMPSQSVQTRGETFQRDDRSSSPPAETSFSSPPPAAQFSSPMSSAIQRYPSMDNIATPNQAPWMSPGSNSSSFASRSRAASWSGTYSDQFSSTAEARSPDGPTVPSPQMPGRPPSHSHSNSNSSVQFTGLTEDLHEVEL

SEQ ID NO: 32549 - protein, 400 aa, Triticum aestivum
MGTPSATLPPVPQGSVGDKETYSAPAAAKFVNSQSLMTMSSLTASPSVHSITEMSENSGGAGRKIAHNRSVSEPDFGKTPKPGAQSDNTQSSASGSRFGWISSTLQKTMGFVSKSRQAKLGQQNKFYYDEKLKRWVEEGAEIPAEEPPLAPPPTKSSSYQNGMPDYNLNGPTSGMHTPNGVAERRSPKHADHGLGMPPIPPSQNQFSARGRTGVRSRYVDTFNKAGATGAAQSYNRPAATSVTPPTGARFFVPTAAAVAAEQMPSQSVQTRGETFQRDDRSSSPPAETSFSSPPPAAQFSSPMSSAIQRYPSMDNIATPNQAPWMSPGSNSSSFASRSRAASWSGTYSDQFSSTAEARSPDGPTVPSPQMPGRPPSHSHSNSNSSVQFTGLTEDLHEVEL

SEQ ID NO: 32550 - DNA, 2707 bp, Triticum aestivum
cgcccctaaacccaccctccaccattctatcccaagtataaaccctagcccagccccttatcctttcgtctccccctcccagacaccgcgccggaacccaaaccatccgaacgaccaaccaccagcgagcgccgcgacgtctgcctctcccatggcgcccgcgctgagcaggaccctgggcccgtcctcggtggcggcgctgcggccgagcccgtcgcgggggctgctgcgggccgcgctcgcgccgcaggggaggaggcccgccggcgccagaggagtcaggtgggaggccgggaggggccggctggtcggggccaggtgcgcctccgccgttgccgagaagaccgccggggaggaggaggaggccgccggcgagaagttcgagtaccaggccgaggttagccgcttgatggatttgattgttcacagcctctacagccataaggaagtgttccttcgggagcttgtaagtaatgcgagtgatgccttggataagctgagatttctcagtgtaactgacccgtccgtgctggctgatggtggtgacatggaaataaggattaaacctgaccctgatgctggcacaataactatcactgatagtggcattgggatgacaaaggatgagctcaaggactgccttggaactatcgcacaaagtggtacctccaaatttttgaaggctctgaaggagaacaaggagcttggtgcagataatggacttattggtcaatttggtgttggattttattcggcttttcttgttgcagagaaggttgtggtgtccactaagagtcccaagacagataagcagtatatatgggaagctgaggctaacagtagctcatacgttatcagggaagagactgatcctgagaaaatgctgacacgtggaacacagattactctctttttaagagaggatgataagtatgaatttgctgaccctacgaggattcaaggtctagttaagaactactcgcagtttgtttcgttccccatttttacatggcaggagaaatctagaacagttgaggttgaagaagaggagtcaaaagaagccgaagagacagcagagggtgagaaggagaagaagaagaaaactatcactgagaagtactgggattgggaattggcaaatgaaacaaagccaatatggatgagaaatccaaaggaagtcgaggaaaccgagtacaatgaattttacaagaaggcattcaatgagtttttggatcctctagctcatgcacactttacaacagagggtgaggtggaatttagaagtgttctctacatcccaggaatggcaccacttagcaatgaggagataatgaaccctaagaccaaaaatatcaggttgtatgtcaagagggttttcatttctgatgactttgatggcgagctgttccccaggtacttgagctttgtcaaaggtgttgttgactcgaatgatctccctctgaatgtttctcgtgagattcttcaagaaagtcgtattgtcaggatcatgcgcaagagacttgttaggaagacttttgatatgattcaggatattgctgacaaggataacaaggaggactacaagaaattttgggagagctttggcaaatttatgaaacttggttgcattgaggactcaggaaatcagaagcgccttgctcctttgctgcggttttattcctctaaaaatgaaacggatttgataagtctcgatcagtatgtggagaatatgcccgagacccaaaaggctatctattatattgccacagatagtcttcagagtgcaaagaccgctccattcttggaaaagctgcttcagaaagatattgaagttctataccttatcgaaccgattgatgaggtagctattcagaatctgcagacgtacaaagagaaaaagtttgttgatatcagcaaggaagacctagaattgggcgatgaggatgaggacaaggaagaaaccaagcaggaatacactcttctttgtgactggataaagcagcagctgggtgacaaagttgccaaggtccaaatttcaaagcgactcagctcttcaccatgtgttcttgtatctggcaagtttggttggtcggctaacatggaaaggcttatgaaagcacaaacgcttggtgacacatcaagcttggagttcatgagaggaagaagaatttttgaaatcaaccccgaccaccctattgtcaaggacttgagtgctgcttgcaagaacgagcctgagagcaccgaagccaagagggcagttgagttgctgtacgagactgccctgatctccagtggatacactcctgagagtccagcggagttggggggcaagatctacgagatgatgaccatcgcccttggcgggagatggggtagatccggcaccgaggaggctgagaccaatgccgacgtcgactcttctgaaggtgttgtaacggaggtcgttgagccatccgaagtcaggactgagaacgagaatgacccatggagagattagttagttctgtaggcatccattttttttaaataccctggaggtggatgagcaaaaaatagaagtatcactggagccagagtgatgatgacatcgagcgatggactgtctttgtaagaacactgagctccaaaatcttgtttgttatcgccaaaggctaaattttgtaggtgacttttttgacggccgtgaaataatttatctttattactg

SEQ ID NO: 32551 - protein, 831 aa, Triticum aestivum
APKPTLHHSIPSINPSPAPYPFVSPSQTPRRNPNHPNDQPPASAATSASPMAPALSRTLGPSSVAALRPSPSRGLLRAALAPQGRRPAGARGVRWEAGRGRLVGARCASAVAEKTAGEEEEAAGEKFEYQAEVSRLMDLIVHSLYSHKEVFLRELVSNASDALDKLRFLSVTDPSVLADGGDMEIRIKPDPDAGTITITDSGIGMTKDELKDCLGTIAQSGTSKFLKALKENKELGADNGLIGQFGVGFYSAFLVAEKVVVSTKSPKTDKQYIWEAEANSSSYVIREETDPEKMLTRGTQITLFLREDDKYEFADPTRIQGLVKNYSQFVSFPIFTWQEKSRTVEVEEEESKEAEETAEGEKEKKKKTITEKYWDWELANETKPIWMRNPKEVEETEYNEFYKKAFNEFLDPLAHAHFTTEGEVEFRSVLYIPGMAPLSNEEIMNPKTKNIRLYVKRVFISDDFDGELFPRYLSFVKGVVDSNDLPLNVSREILQESRIVRIMRKRLVRKTFDMIQDIADKDNKEDYKKFWESFGKFMKLGCIEDSGNQKRLAPLLRFYSSKNETDLISLDQYVENMPETQKAIYYIATDSLQSAKTAPFLEKLLQKDIEVLYLIEPIDEVAIQNLQTYKEKKFVDISKEDLELGDEDEDKEETKQEYTLLCDWIKQQLGDKVAKVQISKRLSSSPCVLVSGKFGWSANMERLMKAQTLGDTSSLEFMRGRRIFEINPDHPIVKDLSAACKNEPESTEAKRAVELLYETALISSGYTPESPAELGGKIYEMMTIALGGRWGRSGTEEAETNADVDSSEGVVTEVVEPSEVRTENENDPWRD

SEQ ID NO: 32552 - protein, 781 aa, Triticum aestivum
MAPALSRTLGPSSVAALRPSPSRGLLRAALAPQGRRPAGARGVRWEAGRGRLVGARCASAVAEKTAGEEEEAAGEKFEYQAEVSRLMDLIVHSLYSHKEVFLRELVSNASDALDKLRFLSVTDPSVLADGGDMEIRIKPDPDAGTITITDSGIGMTKDELKDCLGTIAQSGTSKFLKALKENKELGADNGLIGQFGVGFYSAFLVAEKVVVSTKSPKTDKQYIWEAEANSSSYVIREETDPEKMLTRGTQITLFLREDDKYEFADPTRIQGLVKNYSQFVSFPIFTWQEKSRTVEVEEEESKEAEETAEGEKEKKKKTITEKYWDWELANETKPIWMRNPKEVEETEYNEFYKKAFNEFLDPLAHAHFTTEGEVEFRSVLYIPGMAPLSNEEIMNPKTKNIRLYVKRVFISDDFDGELFPRYLSFVKGVVDSNDLPLNVSREILQESRIVRIMRKRLVRKTFDMIQDIADKDNKEDYKKFWESFGKFMKLGCIEDSGNQKRLAPLLRFYSSKNETDLISLDQYVENMPETQKAIYYIATDSLQSAKTAPFLEKLLQKDIEVLYLIEPIDEVAIQNLQTYKEKKFVDISKEDLELGDEDEDKEETKQEYTLLCDWIKQQLGDKVAKVQISKRLSSSPCVLVSGKFGWSANMERLMKAQTLGDTSSLEFMRGRRIFEINPDHPIVKDLSAACKNEPESTEAKRAVELLYETALISSGYTPESPAELGGKIYEMMTIALGGRWGRSGTEEAETNADVDSSEGVVTEVVEPSEVRTENENDPWRD

SEQ ID NO: 32553 - protein, 695 aa, Triticum aestivum
MDLIVHSLYSHKEVFLRELVSNASDALDKLRFLSVTDPSVLADGGDMEIRIKPDPDAGTITITDSGIGMTKDELKDCLGTIAQSGTSKFLKALKENKELGADNGLIGQFGVGFYSAFLVAEKVVVSTKSPKTDKQYIWEAEANSSSYVIREETDPEKMLTRGTQITLFLREDDKYEFADPTRIQGLVKNYSQFVSFPIFTWQEKSRTVEVEEEESKEAEETAEGEKEKKKKTITEKYWDWELANETKPIWMRNPKEVEETEYNEFYKKAFNEFLDPLAHAHFTTEGEVEFRSVLYIPGMAPLSNEEIMNPKTKNIRLYVKRVFISDDFDGELFPRYLSFVKGVVDSNDLPLNVSREILQESRIVRIMRKRLVRKTFDMIQDIADKDNKEDYKKFWESFGKFMKLGCIEDSGNQKRLAPLLRFYSSKNETDLISLDQYVENMPETQKAIYYIATDSLQSAKTAPFLEKLLQKDIEVLYLIEPIDEVAIQNLQTYKEKKFVDISKEDLELGDEDEDKEETKQEYTLLCDWIKQQLGDKVAKVQISKRLSSSPCVLVSGKFGWSANMERLMKAQTLGDTSSLEFMRGRRIFEINPDHPIVKDLSAACKNEPESTEAKRAVELLYETALISSGYTPESPAELGGKIYEMMTIALGGRWGRSGTEEAETNADVDSSEGVVTEVVEPSEVRTENENDPWRD

SEQ ID NO: 32554 - DNA, 2031 bp, Triticum aestivum
tttgccctgatcataccggtagctggtacacacattcatacatacattcttcttcagcatccactcattgctagctagcttgcgaggcagtgtgtgagctgttagtttgagcgggagaagctgggtggacggagagcacggcgctagctagcttgctggtgcaagatgaggagccgtggtagcttcgctctgaaccatgcggtggcgtttctcgtgtggtggatggtgcattgcggcagtgagctcgttgccgccgtgcctcctgatggttggtacgattacactgcccacacggactgcagaggccgcccggagccggcgcagtacaacggcgggattctcaagtacggcaacggcgacgacccgaacgggtacaagacgacggagactggcgtcctgtccccggcgttcgtggtctacaacctcaacaagtccacaatgtacaccttctcaggctgggtgaagctggaaggctctccctcggctctgatcaccgcgaggctggccccggacaactccggcacacggtgcatcgggacggtcctcgccaggagcgactgctgggcgttcctcaagggtggcttcgtcctcgactggccaactcagacctccgtcatcttcttccagaatgctgataggaccccgatgaagatcaccactgcgagcgcctcgctccagccgttcacgacggatcaatggtcgatgcaccagaaagatacgatccggaagaggaggaagaggatggccaccgtccacgtcgccgacccgcacggcacccgggtggtcggcgcgtcggtgtccgtgcagcagacggctaaggacttcccgcttgggtcggcgatcgcctccaccatcctgggcaacgacgcgtaccagaagtggttcgtggaccggttcaacgcggcggtgttcgaggacgagctcaagtggtactcgacggagccggcgtcggggctgctccggttcgacgtgccggaccagatgctggcgttcgtgcggtcgcaccgggtgatggtgcgcgggcacaacatcttctgggagaaccaggacgccacgccccggtgggtcaagggcctgtcgccggacgacctccgctccgccgtgaacacgcgcatccagagcctcatgacccgctaccgcggcgagttcgcgcactgggacgtcaacaacgagatgctgcacttcaacttctacgagcagcggctgggccccaacgccaccatggagttcttcagcgtggcgcaggacgccgacccgctcgccacgctcttcatgaacgagtacaacgtggtggagacctgcgacgacgtgtcctcgaccgtcgacgcgtacgtggcccgactcaaggacctccgggccggcggcgccgtgctggaggggatcggcctcgagggccacttctccaagcccaacatcccctacatgagggccgtgctcgacaagctggccacgctcaacctgcccatctggttcaccgagatcgacatcaacaacaagttcgacgcgcagacgcaggccgtgtacctggagcaggtgctgcgggaggcgtacgcgcacccggcggtgagcggcgtcatgctctggacggcgctgcacgagaacgggtgctaccagatgtgcctcacggactggaacctcaagaacctgcccgtcggggacgtcgtcgaccgcctgctgcaggagtggcagacggggcaggtcgccgggccgacggacgtgcacggcgcctacagcttcagcggctacctcggcgagtacgtggtcaccgtgaacgccggcaacacgtcgaagcaggccaccttctcgctgtccccaggggacgagaccaggcacatcaccgttcagatatgacactggttgtgtcgtagtatatgtgagtggccggtggcacgctgtactgcccgcacttgttgtttcgggcttctacctgcgatgacacatatcgtcgcttgtgggtagtggttactaaactatatactcgagcaaacgattatgtcttcgaaaaaacaaaacaaatgattatgacatggt

SEQ ID NO: 32555 - protein, 561 aa, Triticum aestivum
MRSRGSFALNHAVAFLVWWMVHCGSELVAAVPPDGWYDYTAHTDCRGRPEPAQYNGGILKYGNGDDPNGYKTTETGVLSPAFVVYNLNKSTMYTFSGWVKLEGSPSALITARLAPDNSGTRCIGTVLARSDCWAFLKGGFVLDWPTQTSVIFFQNADRTPMKITTASASLQPFTTDQWSMHQKDTIRKRRKRMATVHVADPHGTRVVGASVSVQQTAKDFPLGSAIASTILGNDAYQKWFVDRFNAAVFEDELKWYSTEPASGLLRFDVPDQMLAFVRSHRVMVRGHNIFWENQDATPRWVKGLSPDDLRSAVNTRIQSLMTRYRGEFAHWDVNNEMLHFNFYEQRLGPNATMEFFSVAQDADPLATLFMNEYNVVETCDDVSSTVDAYVARLKDLRAGGAVLEGIGLEGHFSKPNIPYMRAVLDKLATLNLPIWFTEIDINNKFDAQTQAVYLEQVLREAYAHPAVSGVMLWTALHENGCYQMCLTDWNLKNLPVGDVVDRLLQEWQTGQVAGPTDVHGAYSFSGYLGEYVVTVNAGNTSKQATFSLSPGDETRHITVQI

SEQ ID NO: 32556 - protein, 542 aa, Triticum aestivum
MVHCGSELVAAVPPDGWYDYTAHTDCRGRPEPAQYNGGILKYGNGDDPNGYKTTETGVLSPAFVVYNLNKSTMYTFSGWVKLEGSPSALITARLAPDNSGTRCIGTVLARSDCWAFLKGGFVLDWPTQTSVIFFQNADRTPMKITTASASLQPFTTDQWSMHQKDTIRKRRKRMATVHVADPHGTRVVGASVSVQQTAKDFPLGSAIASTILGNDAYQKWFVDRFNAAVFEDELKWYSTEPASGLLRFDVPDQMLAFVRSHRVMVRGHNIFWENQDATPRWVKGLSPDDLRSAVNTRIQSLMTRYRGEFAHWDVNNEMLHFNFYEQRLGPNATMEFFSVAQDADPLATLFMNEYNVVETCDDVSSTVDAYVARLKDLRAGGAVLEGIGLEGHFSKPNIPYMRAVLDKLATLNLPIWFTEIDINNKFDAQTQAVYLEQVLREAYAHPAVSGVMLWTALHENGCYQMCLTDWNLKNLPVGDVVDRLLQEWQTGQVAGPTDVHGAYSFSGYLGEYVVTVNAGNTSKQATFSLSPGDETRHITVQI

SEQ ID NO: 32557 - protein, 470 aa, Triticum aestivum
MYTFSGWVKLEGSPSALITARLAPDNSGTRCIGTVLARSDCWAFLKGGFVLDWPTQTSVIFFQNADRTPMKITTASASLQPFTTDQWSMHQKDTIRKRRKRMATVHVADPHGTRVVGASVSVQQTAKDFPLGSAIASTILGNDAYQKWFVDRFNAAVFEDELKWYSTEPASGLLRFDVPDQMLAFVRSHRVMVRGHNIFWENQDATPRWVKGLSPDDLRSAVNTRIQSLMTRYRGEFAHWDVNNEMLHFNFYEQRLGPNATMEFFSVAQDADPLATLFMNEYNVVETCDDVSSTVDAYVARLKDLRAGGAVLEGIGLEGHFSKPNIPYMRAVLDKLATLNLPIWFTEIDINNKFDAQTQAVYLEQVLREAYAHPAVSGVMLWTALHENGCYQMCLTDWNLKNLPVGDVVDRLLQEWQTGQVAGPTDVHGAYSFSGYLGEYVVTVNAGNTSKQATFSLSPGDETRHITVQI

SEQ ID NO: 32558 - DNA, 1552 bp, Triticum aestivum
agaacccacacacctcctctgtattttctccctctttaaacccacaaatctctgtctgtccttacactcagagagaccatcaaaatggttgcggaggcgaagcagaacggcgtggccaccatggcgggcagcaaggtgcagctgatgtcggtgaagcgcggcgagccgacgctggtgtcgccggcggaggccacgccgacgggggagcagtactacctgtccaacctggaccagaacatcgcggtgatcgtgcagaccgtgtactgcttcaagtgcccatcgggccgcggcaacgaaggtgccgcggacgcgctccgggccgcgctggctcgcgtgctcgtccactaccacccgctcgccggccgcctcggcatcagcccggagatgaagctcatcgtggagtgcaccggcgagggcgtcccgttcgtggaggctgaggccgcttgcgacctcgccctcatcggggacctctccaccccggaccccgccgcgctgggccagctcgtgtactccgtccccggcgccaagagcatcctcgagatgccgcccatgacggcgcaggtgaccaggtttgaatgtggcggcttcagcatcgggttggccatgaaccactgcatgttcgacggtctgggcgccatggagttcgtcaactcctgggccgagatggcgcgcggcgccacggagctcaccgtgccaccgttcctcgaccgctccgtgctccgcgcgcgcgaccctccggtgatctccaacccgcaccacgagttcgaggagatcgctgacgtctcggaaatggcggcgctctacggcggccaggagctggtgtaccgctccttctgcttcgacccggacaggcttgagcgcgtccgcggcctcgccctcgccgacggggatctcgagcgctgcaccaccttcgaggcgctctccggcctcgtctggcgcgctcgcacccgcgcgctggggctcgcgccggagcagcagacgaagctgctgttcgccgtggacgggcgccgccgcttcgtgcctccgctcccaaaggggtacttcgggaacggcatcgtgctgaccaacgccctagcgacggcgggggatctgctgtcggcgccggtgtcgcgcgcggccgggaaggtgcaggaggccgtgcggatggtgacggacgagtatatgcggtcggcggtggactattttgaggcgacgcgctcgcggccatcgctggcgtcgacgctgctcatcaccacgtggtcgcggctcgcgttcaacggcgccgacttcggctggggcgagccgaccatgtccgggccagtcacgctgccggagaaggaggtcatactcttcctcgcgcacggcaaggagaggaagagcatcaacgtgctgctcggcctgccggcgtccgccatggacactttccaagagctcatggacgagatatgatcggcccagaccgattggatacgtcagcgactgcgctcggtgtttctatgcttgttttgcatgtgtttgttacttgttagcatggttatgttaattgtattattaagtgtgcgtcatttaattg

SEQ ID NO: 32559 - protein, 447 aa, Triticum aestivum
MVAEAKQNGVATMAGSKVQLMSVKRGEPTLVSPAEATPTGEQYYLSNLDQNIAVIVQTVYCFKCPSGRGNEGAADALRAALARVLVHYHPLAGRLGISPEMKLIVECTGEGVPFVEAEAACDLALIGDLSTPDPAALGQLVYSVPGAKSILEMPPMTAQVTRFECGGFSIGLAMNHCMFDGLGAMEFVNSWAEMARGATELTVPPFLDRSVLRARDPPVISNPHHEFEEIADVSEMAALYGGQELVYRSFCFDPDRLERVRGLALADGDLERCTTFEALSGLVWRARTRALGLAPEQQTKLLFAVDGRRRFVPPLPKGYFGNGIVLTNALATAGDLLSAPVSRAAGKVQEAVRMVTDEYMRSAVDYFEATRSRPSLASTLLITTWSRLAFNGADFGWGEPTMSGPVTLPEKEVILFLAHGKERKSINVLLGLPASAMDTFQELMDEI

SEQ ID NO: 32560 - protein, 435 aa, Triticum aestivum
MAGSKVQLMSVKRGEPTLVSPAEATPTGEQYYLSNLDQNIAVIVQTVYCFKCPSGRGNEGAADALRAALARVLVHYHPLAGRLGISPEMKLIVECTGEGVPFVEAEAACDLALIGDLSTPDPAALGQLVYSVPGAKSILEMPPMTAQVTRFECGGFSIGLAMNHCMFDGLGAMEFVNSWAEMARGATELTVPPFLDRSVLRARDPPVISNPHHEFEEIADVSEMAALYGGQELVYRSFCFDPDRLERVRGLALADGDLERCTTFEALSGLVWRARTRALGLAPEQQTKLLFAVDGRRRFVPPLPKGYFGNGIVLTNALATAGDLLSAPVSRAAGKVQEAVRMVTDEYMRSAVDYFEATRSRPSLASTLLITTWSRLAFNGADFGWGEPTMSGPVTLPEKEVILFLAHGKERKSINVLLGLPASAMDTFQELMDEI

SEQ ID NO: 32561 - protein, 427 aa, Triticum aestivum
MSVKRGEPTLVSPAEATPTGEQYYLSNLDQNIAVIVQTVYCFKCPSGRGNEGAADALRAALARVLVHYHPLAGRLGISPEMKLIVECTGEGVPFVEAEAACDLALIGDLSTPDPAALGQLVYSVPGAKSILEMPPMTAQVTRFECGGFSIGLAMNHCMFDGLGAMEFVNSWAEMARGATELTVPPFLDRSVLRARDPPVISNPHHEFEEIADVSEMAALYGGQELVYRSFCFDPDRLERVRGLALADGDLERCTTFEALSGLVWRARTRALGLAPEQQTKLLFAVDGRRRFVPPLPKGYFGNGIVLTNALATAGDLLSAPVSRAAGKVQEAVRMVTDEYMRSAVDYFEATRSRPSLASTLLITTWSRLAFNGADFGWGEPTMSGPVTLPEKEVILFLAHGKERKSINVLLGLPASAMDTFQELMDEI

SEQ ID NO: 32562 - DNA, 1168 bp, Triticum aestivum
ctccattctgtattcatatgggatatcgaccatattcagtgttatacctgcattttgtaagaaaggagatatcatagtggctgatgagggtgttcactgggcagtgcaaaatggtctctatctatcgagaagtaccgttgtttatttcaagcataatgatatggcttcactcgctagcactttggaaaaacttactcgtggaaacaaacggaccgagaagattagacgctacattgttgtggaatctatctaccagaattctggtcaaatcgcccccttggatgagatagtcaaattgaaggagaagtatctgttccgtgttattctggaggagtctcattcgtttggtgtgctcggcaagtctgggcggggccttgccgaacattatggtgtaccgattgacaaaattgatatcatcactgctggaatgggaaatgcattagctactgatggtgggttctgtacaggaagtgctagagttgttgatcatcagcgtctaagcagcgctggctatgttttctctgcctctctgccaccctatcttgccagtgccgcaatttctgctgtaaactacctggaggagaatccttcagttctcgctaacctaaggagcaatgttgcgcttctgcatgcaggactgtcagatgcaccaggacttgagatttctagccatgccctgtcaccgatcgtcttccttaagctgaagaaatcgactggttctctggccactgacctagatcttcttgaaaccattgccgagcaggttttgaaggaagattccgttttcattgtggcgtcgaagaggtcaactctggacagatgcaagctccccgtcggaatccggctgttcgtttcagctggtcacactgaatctgacatctccaaagtgtgttcatccttgaagaggatttctgcgtcggttctttcagatcacgtttgaccctggtttcccttccaaatatgacaagggcttggtggtttttgacgccgtgtgtactctaaaggctgattacgtgtttggtaaatgtacataacagttatgtacatttctggatttcatgagttccatatgttgttgtcgcccatacctgctagtgaaaattctgtaaacgctgtggttagagatgatgagttgtgctgtacatttgactaatttccatgttgtaac

SEQ ID NO: 32563 - protein, 312 aa, Triticum aestivum
SILYSYGISTIFSVIPAFCKKGDIIVADEGVHWAVQNGLYLSRSTVVYFKHNDMASLASTLEKLTRGNKRTEKIRRYIVVESIYQNSGQIAPLDEIVKLKEKYLFRVILEESHSFGVLGKSGRGLAEHYGVPIDKIDIITAGMGNALATDGGFCTGSARVVDHQRLSSAGYVFSASLPPYLASAAISAVNYLEENPSVLANLRSNVALLHAGLSDAPGLEISSHALSPIVFLKLKKSTGSLATDLDLLETIAEQVLKEDSVFIVASKRSTLDRCKLPVGIRLFVSAGHTESDISKVCSSLKRISASVLSDHV

SEQ ID NO: 32564 - protein, 259 aa, Triticum aestivum
MASLASTLEKLTRGNKRTEKIRRYIVVESIYQNSGQIAPLDEIVKLKEKYLFRVILEESHSFGVLGKSGRGLAEHYGVPIDKIDIITAGMGNALATDGGFCTGSARVVDHQRLSSAGYVFSASLPPYLASAAISAVNYLEENPSVLANLRSNVALLHAGLSDAPGLEISSHALSPIVFLKLKKSTGSLATDLDLLETIAEQVLKEDSVFIVASKRSTLDRCKLPVGIRLFVSAGHTESDISKVCSSLKRISASVLSDHV

SEQ ID NO: 32565 - protein, 170 aa, Triticum aestivum
MGNALATDGGFCTGSARVVDHQRLSSAGYVFSASLPPYLASAAISAVNYLEENPSVLANLRSNVALLHAGLSDAPGLEISSHALSPIVFLKLKKSTGSLATDLDLLETIAEQVLKEDSVFIVASKRSTLDRCKLPVGIRLFVSAGHTESDISKVCSSLKRISASVLSDHV

SEQ ID NO: 32566 - DNA, 1528 bp, Triticum aestivum
gtcaccctgtttgtccagtggacttccaactccagtctgacttcatcttcttcccaaaatcaaagaagcagcagaaatgcaggggtagcagctcacgccatgtccaaatccaaatccaaatagcttcgcctccgataggtggaggcggctactctgataggaggagaaggaagcaaaggagggaggcagcagaactgcagaagcaccatggtttccctctggcacacctccgtcattgtccttgtgctcctattcctcggaggatctgatgccaacccagctgcccgtcgacacggtcagctggatgtaaaccacaagaagaagccactacagacatccagaccttacaacattgcccacaggggttccaatggcgaaatacccgaagagacagctgcagcatatttgagggcaatcgaggaaggtgcagacttcatagagactgatatacttgcatcaaaggacggacatctgatatgtttccatgatgtaatcctggatgccacgacggacatcgtgaaccgtaccgagtttgctggcaggaagagaacctatgatgtccagggatttaagttgactgggtggtttatcgtggattttactttaagagaactgaaatcactgagggtgaaacagcgctacaatttcagggatcaacagtataattggaagtacaatattcttacatttgatgagtttattttgattgcacttcatgctgatagggtggtcggaatatacccagagatcaagaatcctattttcatcaaccagcatgtcaagtggtcaggtggcaagaagtttgaggacaagtttgtcgggacgcttctcaagcatggctacaaaggcaaatatatgtctaaagattggctcaagaagccactattcatccaatcctttgctccaacttcactaatttacatctcaaacatgacaaatgctccaaaactgcttctaatatacgataccacagttccaactcaagataccaaccagtcacactatgagataacttcgaacggctatctcgcgttcataaggaagtatgtaattgggattgggccatggaaggatacaattatccccccaaagaataaccatctaggccctgcaaccaatcttgtggcacgggcacacactctgaatcttcaggtgcatccgtacacattcagaaatgagaactcattcctgcacttcgacttccatcaagacccttatgctgaatatgagtactggctcagagaaatcggagtcgacgcgctgttcaccgatttcacgggcagcttgcacaagtaccaggagtggacagctccacacgaaaagaaggaaaagaagtgcagaggatctcctgcatgagatcgccaagacgctgaaggttgatgttcactaaagcttaggttgccaagtctgtatacctcctccctttcaggagctatttcattgttgtcagtaccgagaaaatgaactggttaataccattctatgtaattgcttcctataaatcacgagcagagcatcatagagttcg

SEQ ID NO: 32567 - protein, 382 aa, Triticum aestivum
MVSLWHTSVIVLVLLFLGGSDANPAARRHGQLDVNHKKKPLQTSRPYNIAHRGSNGEIPEETAAAYLRAIEEGADFIETDILASKDGHLICFHDVILDATTDIVNRTEFAGRKRTYDVQGFKLTGWFIVDFTLRELKSLRVKQRYNFRDQQYNWKYNILTFDEFILIALHADRVVGIYPEIKNPIFINQHVKWSGGKKFEDKFVGTLLKHGYKGKYMSKDWLKKPLFIQSFAPTSLIYISNMTNAPKLLLIYDTTVPTQDTNQSHYEITSNGYLAFIRKYVIGIGPWKDTIIPPKNNHLGPATNLVARAHTLNLQVHPYTFRNENSFLHFDFHQDPYAEYEYWLREIGVDALFTDFTGSLHKYQEWTAPHEKKEKKCRGSPA

SEQ ID NO: 32568 - DNA, 2046 bp, Triticum aestivum
ctgggatcaccaactcctccccccctcccccctcccgccgccgccgccgccatggagcccgcccccgcgtcgcccgatccggcgccccgctccccggcgccgtcgccgtcgccgtcgccggccaagaggtccgcctggaagcagccctccccctcctccgccgccgccaacggcgccccgcacgccgacgcgccgccgccgccggccgtcatggacgccgaccactggcccgcgctcgccgacgccgccaggaccaagaccctgctcccggcccccgcgcccccctccgacttgcccaagcctcccccggacccctccccctgccaacgctcgccgccgcctcatcggccatggcgaacccgtccaactcgccccggcacggcggctccgggacgcaccacggccgccacaagacgtccaggcgcgggggcgccggcggcagcggcgtcggtggagaccactccccgcgggatcaccaggagaggggcgccggcggctgggaccatggcggtggcggaggcgggaggggtgtccagagaagccaccacaacaacggtggcaggaggggcggtggcaacggtggcccgggcggcccaggaggtggtggagttcctcaccatggcgggttcggcggacgccggagaggcgggtttgatggtggcttcttccgtggcccagggatgggcatggggccgtacatgcggggcgcaccgccgccgcccccgccgctggccgtcgctcctcccttcatgggccaccctcctcccggctcgcatatgcgagcctttgctggaccgatgatggcgtttcatgatatgccatcgcccgtgtctcctgtttccccaatgtactatgttgggcctccgccgcttccagaggctcttaggggaatggcattcgcacctcatatggtcggcccacctgcttatccctactttcagcccccagctgagcctgagcctgagcctgagcctgagcttgagcctgagcccgtggctgagccagattccgaggctcgccagaagctgcagaaccagtttgagttctacttcagcaaggacaacttatgtggagatgtttacttgcggcaacatatggatgaggagggctttgtatcggtcccttttatgtcaacaactttcaataaggtccgggaaatcactgccgatattcctaacgccaatttgcagtatataatagaaacaattcagtcctcatctatactggaagtgaagggtgacaaagttaggaggaaagatgactgggacaaatggttgattccgaaagagagcaaccctaatattccgtcaagctctgcagcagctgtgccaggccccagcaccaatgtcaatgatctgacagcacagcttggaggtgtgggcctgcaagaagcagctggccctagtagcacggtgggccagaaccatcatgaggtagtccagaatggtggatcggcttccagcaataacccagcaccggcagctgaagaaagcgctggccagcgctagccgcacaccgtctccttatcacactatgactgcaagggtttttgtccgagcgcgagtgacgagagtagaaatgatgatgatactttgcgatttttggaaggtggtatggtatgcttgcggggttggcattagactgacaagtggggttcgttttgcggggttgatgtggctttctggttattggtgaaaatcggtctactagctgaagcgataggcggccaaacaaaaaggtttatcgtgtaggggggcatcaaacgcgatgagggggagaagccgaagaagaggatgcaagacgctgattagggctagttgcttagtgtgcgattcccgacggtcgtcgtcggttattttggctatgtgcgggtatttgaagtccaaaactctgtcggtttcttacccccccatttggatttggatgtaaacctccattttttgacggaggaggatgatgatgtgatgaactttcttgtcagctgtttcgccaaacgagaatgttgtacaactccttggtgtactattttacagatatttcctctcg

SEQ ID NO: 32569 - protein, 501 aa, Triticum aestivum
GITNSSPPPPSRRRRRHGARPRVARSGAPLPGAVAVAVAGQEVRLEAALPLLRRRQRRPARRRAAAAGRHGRRPLARARRRRQDQDPAPGPRAPLRLAQASPGPLPLPTLAAASSAMANPSNSPRHGGSGTHHGRHKTSRRGGAGGSGVGGDHSPRDHQERGAGGWDHGGGGGGRGVQRSHHNNGGRRGGGNGGPGGPGGGGVPHHGGFGGRRRGGFDGGFFRGPGMGMGPYMRGAPPPPPPLAVAPPFMGHPPPGSHMRAFAGPMMAFHDMPSPVSPVSPMYYVGPPPLPEALRGMAFAPHMVGPPAYPYFQPPAEPEPEPEPELEPEPVAEPDSEARQKLQNQFEFYFSKDNLCGDVYLRQHMDEEGFVSVPFMSTTFNKVREITADIPNANLQYIIETIQSSSILEVKGDKVRRKDDWDKWLIPKESNPNIPSSSAAAVPGPSTNVNDLTAQLGGVGLQEAAGPSSTVGQNHHEVVQNGGSASSNNPAPAAEESAGQR

SEQ ID NO: 32570 - protein, 385 aa, Triticum aestivum
MANPSNSPRHGGSGTHHGRHKTSRRGGAGGSGVGGDHSPRDHQERGAGGWDHGGGGGGRGVQRSHHNNGGRRGGGNGGPGGPGGGGVPHHGGFGGRRRGGFDGGFFRGPGMGMGPYMRGAPPPPPPLAVAPPFMGHPPPGSHMRAFAGPMMAFHDMPSPVSPVSPMYYVGPPPLPEALRGMAFAPHMVGPPAYPYFQPPAEPEPEPEPELEPEPVAEPDSEARQKLQNQFEFYFSKDNLCGDVYLRQHMDEEGFVSVPFMSTTFNKVREITADIPNANLQYIIETIQSSSILEVKGDKVRRKDDWDKWLIPKESNPNIPSSSAAAVPGPSTNVNDLTAQLGGVGLQEAAGPSSTVGQNHHEVVQNGGSASSNNPAPAAEESAGQR

SEQ ID NO: 32571 - protein, 275 aa, Triticum aestivum
MGMGPYMRGAPPPPPPLAVAPPFMGHPPPGSHMRAFAGPMMAFHDMPSPVSPVSPMYYVGPPPLPEALRGMAFAPHMVGPPAYPYFQPPAEPEPEPEPELEPEPVAEPDSEARQKLQNQFEFYFSKDNLCGDVYLRQHMDEEGFVSVPFMSTTFNKVREITADIPNANLQYIIETIQSSSILEVKGDKVRRKDDWDKWLIPKESNPNIPSSSAAAVPGPSTNVNDLTAQLGGVGLQEAAGPSSTVGQNHHEVVQNGGSASSNNPAPAAEESAGQR

SEQ ID NO: 32572 - DNA, 1461 bp, Triticum aestivum
aagagaccacacacgaccgtccaacgcatcccctctctacccctcaaaagatggccggctggacctccatcccggcggagctactcgcggaaatctccggccgcctgccaggtgacgcggaccggatccacatccatcaggtatgctcccactggcgcgcatccacttcccggctggccgcctgccgtccatggatcatcgccggccgcgaaccatggagcctggttggcccggtcggcgaacactcgttttggctgccccttggcggccgacggatctacttgggcacgcccacgccggcgggcctaccatattgctgcggcacgccccttggctggcttgctctcatggacaacctgcaatccccaacgcggtttgtcctctgggagcccctctctgaagctgagatctttctgccctgtttgcccgccgttgtccaagtcttcctctcaggagacccgctcacctcgcctgactggatggcgattgcaagccagaagctctacagcactggcacttgcatgggccagacgctcttcttctggcggcctggagatgccgcatggactatgcagctcgagcggccaaacggcagaatcgatagctcagcattccatcaggggaaattctacttcaccgacatcgggtggacccttcacgtctatgatcttgaccgctcccctcccaagcttgtccggagcacgtacctttacagtgctctgcgagagcgccatggatttcggcagttccctggcggtggcaggccggcgtggtatgtggtcgcattcaatggcgagttgctgcttgttgtgatgtaccgtgcgcccaacataaaggctgtcgaagtttaccgcccggattgggcagcggagcgcctggagctgcgggacaaggtcacggatctcggcgagtactcgctcttcttgggccgcggtgatgcgtttgccctctgtgcaaaggacttcactatgatcaggagaaattgtctctactttgtagagcacgatacagtcaagcatcaagattgggctattgtgttagacttggggtcaaatgttttccaacaaattccatatcccggagagcagatggagggcacgggcagaaataatcactggacggcgtattcgtggttctgtctcagaagacccttcttgaagggtgaagcccagtaaggtggtagatcttcactgaccatcttattatatgaaagtaaccgaatcagtattggagcagcaacagagcttcccatgtttgaatgatctaaacaccacaccaacaccagcacgtatgtcttgtcacttcagattattcctcccatgaatccttgttgaatcatggactccaacagcccaattactaaccctttggcatagaagtgttaagagctgatttatactcctagatagcaccattgttgtatctctatttctcttgctactaatataactgtcattatac

SEQ ID NO: 32573 - protein, 390 aa, Triticum aestivum
ETTHDRPTHPLSTPQKMAGWTSIPAELLAEISGRLPGDADRIHIHQVCSHWRASTSRLAACRPWIIAGREPWSLVGPVGEHSFWLPLGGRRIYLGTPTPAGLPYCCGTPLGWLALMDNLQSPTRFVLWEPLSEAEIFLPCLPAVVQVFLSGDPLTSPDWMAIASQKLYSTGTCMGQTLFFWRPGDAAWTMQLERPNGRIDSSAFHQGKFYFTDIGWTLHVYDLDRSPPKLVRSTYLYSALRERHGFRQFPGGGRPAWYVVAFNGELLLVVMYRAPNIKAVEVYRPDWAAERLELRDKVTDLGEYSLFLGRGDAFALCAKDFTMIRRNCLYFVEHDTVKHQDWAIVLDLGSNVFQQIPYPGEQMEGTGRNNHWTAYSWFCLRRPFLKGEAQ

SEQ ID NO: 32574 - protein, 374 aa, Triticum aestivum
MAGWTSIPAELLAEISGRLPGDADRIHIHQVCSHWRASTSRLAACRPWIIAGREPWSLVGPVGEHSFWLPLGGRRIYLGTPTPAGLPYCCGTPLGWLALMDNLQSPTRFVLWEPLSEAEIFLPCLPAVVQVFLSGDPLTSPDWMAIASQKLYSTGTCMGQTLFFWRPGDAAWTMQLERPNGRIDSSAFHQGKFYFTDIGWTLHVYDLDRSPPKLVRSTYLYSALRERHGFRQFPGGGRPAWYVVAFNGELLLVVMYRAPNIKAVEVYRPDWAAERLELRDKVTDLGEYSLFLGRGDAFALCAKDFTMIRRNCLYFVEHDTVKHQDWAIVLDLGSNVFQQIPYPGEQMEGTGRNNHWTAYSWFCLRRPFLKGEAQ

SEQ ID NO: 32575 - protein, 275 aa, Triticum aestivum
MDNLQSPTRFVLWEPLSEAEIFLPCLPAVVQVFLSGDPLTSPDWMAIASQKLYSTGTCMGQTLFFWRPGDAAWTMQLERPNGRIDSSAFHQGKFYFTDIGWTLHVYDLDRSPPKLVRSTYLYSALRERHGFRQFPGGGRPAWYVVAFNGELLLVVMYRAPNIKAVEVYRPDWAAERLELRDKVTDLGEYSLFLGRGDAFALCAKDFTMIRRNCLYFVEHDTVKHQDWAIVLDLGSNVFQQIPYPGEQMEGTGRNNHWTAYSWFCLRRPFLKGEAQ

SEQ ID NO: 32576 - DNA, 1368 bp, Triticum aestivum
atctctctctttactctgacgtgtttaccttcttcagtttctctccttcatctccggcgactttcgaggaagcgaagcttaagatttagggaactatggacagcttctggcaattgggcgatgagctccgaggtcagtcacgagcctcagaggatcacaaatggtccactgtcgcaaccaagctcgctgagcagactaggatgaaaggggaaaggatgaacaacctcgatctctccaagccctactctgagttcaggccaaccgacaagtttagtttccaggacaacaacaaccttaatttcaacatgttgaacctggacggcaagtatgtgcaaggcatgggcaaagctccgatgcagagcaatgtttacaacaacgtgaacaatgttttccagaagaacgacttcaagagtggaggcaacatgaaggttaacaagtacagtggcaatgttgttgctaacaaggagctgagcaacaacaacaacaagcacagcaataatgataatgtgaatatgaatgttgacaagaggtttaagactttgcctgcatcggagacgcttccgaggaatgaagttcttggcggctacatctttgtttgcaacaatgataccatgcaggaggacttgaaacgccacctatttggtttacctccaaggtacagggactctgtccgggcgataacacctgggttacctctgtttctttacaattacaccactcaccagctccatggtatctttgaggcaacaacttttggaggtactaatattgatgcgactgcctgggaagacaaaaagtgcaaaggagagtcaagatttccggctcaggtgaggatcagagtgaggaaaatatgcaaagccttggaagaggattccttcaggcctgttcttcaccactatgatggcccaaaattccgccttgagctctctgttcctgagacattggatctgctagatctgtgcgaacaagctggttctgcataagccgatcaaccctgcaatgccacgttgctaggggaagtgatctgaaatctatctatatatatgcatattaccataagagcgtaagcttttgggagttagataagagtcgaattcaaatgtatggtttactaagaagtgaggagttgtgtgcgtcttgaggcaagcaaaagggtgaagaagctctgccgaataagcgactacccttgttcttgttgtgtctaatgtgtgagtgtctgtgctttgtgagagatttgaaacaaacaatttatgtagagagaaagtgagactaaataacagagccaaaccaatggtatgagctactgtttgtgtttgctttgtgcaagggaaaaacaaatgttttaaatagcaagtttaacttttaagc

SEQ ID NO: 32577 - protein, 295 aa, Triticum aestivum
MDSFWQLGDELRGQSRASEDHKWSTVATKLAEQTRMKGERMNNLDLSKPYSEFRPTDKFSFQDNNNLNFNMLNLDGKYVQGMGKAPMQSNVYNNVNNVFQKNDFKSGGNMKVNKYSGNVVANKELSNNNNKHSNNDNVNMNVDKRFKTLPASETLPRNEVLGGYIFVCNNDTMQEDLKRHLFGLPPRYRDSVRAITPGLPLFLYNYTTHQLHGIFEATTFGGTNIDATAWEDKKCKGESRFPAQVRIRVRKICKALEEDSFRPVLHHYDGPKFRLELSVPETLDLLDLCEQAGSA

SEQ ID NO: 32578 - protein, 260 aa, Triticum aestivum
MKGERMNNLDLSKPYSEFRPTDKFSFQDNNNLNFNMLNLDGKYVQGMGKAPMQSNVYNNVNNVFQKNDFKSGGNMKVNKYSGNVVANKELSNNNNKHSNNDNVNMNVDKRFKTLPASETLPRNEVLGGYIFVCNNDTMQEDLKRHLFGLPPRYRDSVRAITPGLPLFLYNYTTHQLHGIFEATTFGGTNIDATAWEDKKCKGESRFPAQVRIRVRKICKALEEDSFRPVLHHYDGPKFRLELSVPETLDLLDLCEQAGSA

SEQ ID NO: 32579 - protein, 255 aa, Triticum aestivum
MNNLDLSKPYSEFRPTDKFSFQDNNNLNFNMLNLDGKYVQGMGKAPMQSNVYNNVNNVFQKNDFKSGGNMKVNKYSGNVVANKELSNNNNKHSNNDNVNMNVDKRFKTLPASETLPRNEVLGGYIFVCNNDTMQEDLKRHLFGLPPRYRDSVRAITPGLPLFLYNYTTHQLHGIFEATTFGGTNIDATAWEDKKCKGESRFPAQVRIRVRKICKALEEDSFRPVLHHYDGPKFRLELSVPETLDLLDLCEQAGSA

SEQ ID NO: 32580 - DNA, 1218 bp, Triticum aestivum
acacaagcactgccttccttccctagtcattgggaaggagaagaacacacagttagatacatccatctgatctgcttagttaccgtgctctgtactcctgatcaggatggcagaagggctcttctccatggctcacccgtgggcctccgcctttggcatcctaggcaacatcatatccttcctggtgttcctcgcgcccacgccgacgttcctgcgggtgtaccggaagaagtcgacggaggggttcagcgcggtgccgtacgtggtggcgctcttcagctgcatgctgtggatcttctacgcgctggtcaagaccaactccagcccgctgctcaccatcaacgcctttggctgcgtcgtcgagggcttctacatcctgctctacgtggtgtacgcgcccaggcacgccaggcaccgcgccctcgccttcttcctcctcctcgacgtcgccgccttcgccctcatcgtcgccgtcaccgtgttcctcgtgccccagcccagccgcgtcaaggtcctcggcagcgtctgcctcgccttctccatggccgtcttcgtcgccccgctcagcgtcatcttcgtggtgatcaagaccaagagcgccgagtacatgcccttctcgctctccttcttcctcaccctcagcgccgtcgcctggttcttctatggcctcttcaccaaggacatctacgtcaccctcccgaacgtgggcgggttcttctttggggtggcccagatgacgctctacttctgctaccgcaagccggacacgtcggccctggtgctgccgacggggatccacgacgtgtccacggagccggcggcgcagcaggaggtggagctgccggagggcacccacccggcggtggccatgctgacggtgagcacgctgccgatgctggcggagctgcagaagatggagcaggagatcagctcgcccaccccgcgcaagggctacatcaaggctttctgatccgatcgagatgaccgatgcacgcacgggcgcatgcattcaggagatgaatcaatcgctaatgattggcgaaccgaccgccagcagagatacgtttatatagttcttaatttcagtcgttcgtttgtaatggtctgtactagtagcacagtcgtgtgtgtgttgtcgtccaagggtctgatataccggccggccgggcaagtaattcatctaccaatccacgtgccctgggaaataaagttataaac

SEQ ID NO: 32581 - protein, 327 aa, Triticum aestivum
TQALPSFPSHWEGEEHTVRYIHLICLVTVLCTPDQDGRRALLHGSPVGLRLWHPRQHHILPGVPRAHADVPAGVPEEVDGGVQRGAVRGGALQLHAVDLLRAGQDQLQPAAHHQRLWLRRRGLLHPALRGVRAQARQAPRPRLLPPPRRRRLRPHRRRHRVPRAPAQPRQGPRQRLPRLLHGRLRRPAQRHLRGDQDQERRVHALLALLLPHPQRRRLVLLWPLHQGHLRHPPERGRVLLWGGPDDALLLLPQAGHVGPGAADGDPRRVHGAGGAAGGGAAGGHPPGGGHADGEHAADAGGAAEDGAGDQLAHPAQGLHQGFLIRSR

SEQ ID NO: 32582 - protein, 287 aa, Triticum aestivum
MAEGLFSMAHPWASAFGILGNIISFLVFLAPTPTFLRVYRKKSTEGFSAVPYVVALFSCMLWIFYALVKTNSSPLLTINAFGCVVEGFYILLYVVYAPRHARHRALAFFLLLDVAAFALIVAVTVFLVPQPSRVKVLGSVCLAFSMAVFVAPLSVIFVVIKTKSAEYMPFSLSFFLTLSAVAWFFYGLFTKDIYVTLPNVGGFFFGVAQMTLYFCYRKPDTSALVLPTGIHDVSTEPAAQQEVELPEGTHPAVAMLTVSTLPMLAELQKMEQEISSPTPRKGYIKAF

SEQ ID NO: 32583 - protein, 280 aa, Triticum aestivum
MAHPWASAFGILGNIISFLVFLAPTPTFLRVYRKKSTEGFSAVPYVVALFSCMLWIFYALVKTNSSPLLTINAFGCVVEGFYILLYVVYAPRHARHRALAFFLLLDVAAFALIVAVTVFLVPQPSRVKVLGSVCLAFSMAVFVAPLSVIFVVIKTKSAEYMPFSLSFFLTLSAVAWFFYGLFTKDIYVTLPNVGGFFFGVAQMTLYFCYRKPDTSALVLPTGIHDVSTEPAAQQEVELPEGTHPAVAMLTVSTLPMLAELQKMEQEISSPTPRKGYIKAF

SEQ ID NO: 32584 - DNA, 1481 bp, Triticum aestivum
actctatccgcgtcgactggtagctgaaactccaaaaagccgccaccactccggttcctgcgttcgtactccactcctgccagtccaagatccagctcaagatccaggcagggtcagccagccatgtgctgcggcgagtgcggctgctatgacgcactctgcgaccgctgctgcctctgcgtctccaccggcgcgcgcgacaccatcctctgctgcgcgtgctgcctcgccgtcctcgccggcgtcggcctcctcctcgtcctcctcgcggccttctgcttcatccgccacgccgaggtcgccgtcaccgacgcctccctcacgcgcctcgcgctggccgcgtcccccgccaccgccttcgcctacaacctctcgctcacgctcaccgtccggaacaagaactgggcaatgagcgtcaagaacacccagccgctcgaggccgactacagcttcgacggccagcgcttcgagcgggtcaggctcgccgacgagggctccacgcaccccgccggcaagacccaggtgtaccacctcgtctccggctccgacggcgcctacgtcgcgctcggcaacgccggcgtggccgagttcaaggaggagaacaagacgggggtgttccaggtggaggtggcgctgtcgggccaggtcaggtaccaggcgcacttcaccaagtgcaagttccaggccaattgcccgctcaagctgcagctcgcgccgcccggcacgccggccgtcgtcttccagaaggtcaagtgcaagctcgctccggcgagcaggtactgctagtgattggtacgattggtggctagtgatttctgtcggtagattgggaggactaagtatagttgccgggaacggggaacgatgccgcgtcccctgtaccgggaacatcgacccggatcgagggtcggggtcgacacagggaacgacgcgattcggtgacgggaacgcgacccggaaaggcaggttcgcagctccgtttcagtgatcgcaaatacactggatctcgacccaacttgccaatgaacgggaggccaaatggatagaatcgagacttacctgaagtccatggcatgagccttccgctgtcgaccaaaacgatgcgcgccggaggctagtgtgcatgtgcgaacgcggtgcccagcggcgccggcggctggtgtcgacgtgcagactgcggatgcgatgcccagcggcgccggcggctggtgtcgacgtgcagactgcggatgcggtgcccggcggcgctaacggctggtgtcgacgtgcagactatgcggtgctcggtggcggactgcggacgctgtgctagatggccggacggcggcggcggctgccgtggaccagcgaatgtggtgcccgcttcccactgcccatcctcttgattggaatttgggaatcatacggggcagatttcatggagtagattactttctgctgtcaaaactttccgcgggatatttgcacattttcccttcctc

SEQ ID NO: 32585 - protein, 220 aa, Triticum aestivum
MCCGECGCYDALCDRCCLCVSTGARDTILCCACCLAVLAGVGLLLVLLAAFCFIRHAEVAVTDASLTRLALAASPATAFAYNLSLTLTVRNKNWAMSVKNTQPLEADYSFDGQRFERVRLADEGSTHPAGKTQVYHLVSGSDGAYVALGNAGVAEFKEENKTGVFQVEVALSGQVRYQAHFTKCKFQANCPLKLQLAPPGTPAVVFQKVKCKLAPASRYC

SEQ ID NO: 32586 - protein, 136 aa, Triticum aestivum
LYPRRLVAETPKSRHHSGSCVRTPLLPVQDPAQDPGRVSQPCAAASAAAMTHSATAAASASPPARATPSSAARAASPSSPASASSSSSSRPSASSATPRSPSPTPPSRASRWPRPPPPPSPTTSRSRSPSGTRTGQ

SEQ ID NO: 32587 - protein, 125 aa, Triticum aestivum
MSVKNTQPLEADYSFDGQRFERVRLADEGSTHPAGKTQVYHLVSGSDGAYVALGNAGVAEFKEENKTGVFQVEVALSGQVRYQAHFTKCKFQANCPLKLQLAPPGTPAVVFQKVKCKLAPASRYC

SEQ ID NO: 32588 - DNA, 2027 bp, Triticum aestivum
tccgcccgatccccttccgccccctcccgacgatcgcccccgctcgtcccaccgcggtgggcgatcgctcctctcctccgtgcgcgcgattcctgaggcgaggcgaccgacaccagattccgccggccggcccacctcccccgcttcgccgatcggatcgcgtgctccatgaggtagaggtgacgataaagcatagttgttgacttagcttgcagtggttctttatcgaagctaaggcagataataattggcgttatggcatatcgaatggtatgcgctccccaagtcattgatctcgagtctgagcgagggcatcctcatgttcattctgaaagtttaattcacaatgggaatgatttgtccgaccaaggcagtcaatatactgtcagagttgtaggcaatgctatgaatgctggtctttctgatacacagggttactacaatatgagcatgaatcatccacatcagcctgttcatagttctccgccaaatttaggcgttgattcaggttttgtcttcccatcaaatatgtacaacccttgcatgtcaacatctatgaacagatatgtctctcatgctcagagctttggattgcctttaaaccaagttgtctcaggaagtatgtatggaagtactagaaatgaaaatgtcagcgaaactgctagaggattcattaaaaggaaaaatgccgcagtggcaggaacttgtcattttgttaatggatctgcaagctcaagctcatcctctcatacatctcaaaatcctacacataggccatgggatccttcttttgagtcaaatgtttttcctaatgtcacaccattcaacccatcagaatatcatagccacagcacttggccatctgtggaaggatcttccattactggatcaaatgggtttaatttgatggctgctcacccagaatcagcacagcatggtaactatacatttcaatcaagtcatgctagtcagtgctttcaacctgccagcactacttgggtttcccaggctgcaactggaattgtggaaggagtaccacagtggtcatacatcaatgcaatgtctagtgttccaggcagatttgcacattcaggggccacagaaatagtgaatggaggctttcatgaatatcagaatggcccttcaaccatttctcaagggcatttaccttattttcatcaacatgctgtgcatagcatgcaacctcataatccactggatcatacacgagtgcaagtcccttaccaacaaggccacaataatggcatcttgcatagtggggtaaatcattctggtaaccggttccacttgagtccaagaactccaggtctcttctctaattctgagcggtcttttgggcctccacagcatccgttcctggtgaacccagttaatcataggaacttaagaattttgccacctctgcagcatggtgcaatcatggatttttcgaggttgtatgaggggtcaaatgtagtagatgagcatagagatatgcgtctagatatagacagcatgacctatgaggagcttttagcattagaagagcacattggagacgtcaatacaggtctggcaaaaagccacattgtagataaattgaagactagcttatatgtgccaggagcaacctgcgtgtctaatcagtcatctgaaccttccacagagaatgaggcttgcataatatgccaggaggagtacgaggctgaggactgcgttggaatcctggattgtggccacagataccatgcggtgtgcttaaaacagtggctgacggtaaagaacctatgccccatctgcaagacaacagctttgtctgcgggtagaagaagttgataacaaacaggattaatctttatcagttatttgcttgacaaacattcagatcaattttgtacataagaagcggtagactattctgctacctgtatttgttgttcaccttgtgattgggagtaactcggcttccaaaaactgtacagacataacattgatcgttctattcaaatgtagaatgtttataaatt

SEQ ID NO: 32589 - protein, 526 aa, Triticum aestivum
MAYRMVCAPQVIDLESERGHPHVHSESLIHNGNDLSDQGSQYTVRVVGNAMNAGLSDTQGYYNMSMNHPHQPVHSSPPNLGVDSGFVFPSNMYNPCMSTSMNRYVSHAQSFGLPLNQVVSGSMYGSTRNENVSETARGFIKRKNAAVAGTCHFVNGSASSSSSSHTSQNPTHRPWDPSFESNVFPNVTPFNPSEYHSHSTWPSVEGSSITGSNGFNLMAAHPESAQHGNYTFQSSHASQCFQPASTTWVSQAATGIVEGVPQWSYINAMSSVPGRFAHSGATEIVNGGFHEYQNGPSTISQGHLPYFHQHAVHSMQPHNPLDHTRVQVPYQQGHNNGILHSGVNHSGNRFHLSPRTPGLFSNSERSFGPPQHPFLVNPVNHRNLRILPPLQHGAIMDFSRLYEGSNVVDEHRDMRLDIDSMTYEELLALEEHIGDVNTGLAKSHIVDKLKTSLYVPGATCVSNQSSEPSTENEACIICQEEYEAEDCVGILDCGHRYHAVCLKQWLTVKNLCPICKTTALSAGRRS

SEQ ID NO: 32590 - protein, 522 aa, Triticum aestivum
MVCAPQVIDLESERGHPHVHSESLIHNGNDLSDQGSQYTVRVVGNAMNAGLSDTQGYYNMSMNHPHQPVHSSPPNLGVDSGFVFPSNMYNPCMSTSMNRYVSHAQSFGLPLNQVVSGSMYGSTRNENVSETARGFIKRKNAAVAGTCHFVNGSASSSSSSHTSQNPTHRPWDPSFESNVFPNVTPFNPSEYHSHSTWPSVEGSSITGSNGFNLMAAHPESAQHGNYTFQSSHASQCFQPASTTWVSQAATGIVEGVPQWSYINAMSSVPGRFAHSGATEIVNGGFHEYQNGPSTISQGHLPYFHQHAVHSMQPHNPLDHTRVQVPYQQGHNNGILHSGVNHSGNRFHLSPRTPGLFSNSERSFGPPQHPFLVNPVNHRNLRILPPLQHGAIMDFSRLYEGSNVVDEHRDMRLDIDSMTYEELLALEEHIGDVNTGLAKSHIVDKLKTSLYVPGATCVSNQSSEPSTENEACIICQEEYEAEDCVGILDCGHRYHAVCLKQWLTVKNLCPICKTTALSAGRRS

SEQ ID NO: 32591 - protein, 476 aa, Triticum aestivum
MNAGLSDTQGYYNMSMNHPHQPVHSSPPNLGVDSGFVFPSNMYNPCMSTSMNRYVSHAQSFGLPLNQVVSGSMYGSTRNENVSETARGFIKRKNAAVAGTCHFVNGSASSSSSSHTSQNPTHRPWDPSFESNVFPNVTPFNPSEYHSHSTWPSVEGSSITGSNGFNLMAAHPESAQHGNYTFQSSHASQCFQPASTTWVSQAATGIVEGVPQWSYINAMSSVPGRFAHSGATEIVNGGFHEYQNGPSTISQGHLPYFHQHAVHSMQPHNPLDHTRVQVPYQQGHNNGILHSGVNHSGNRFHLSPRTPGLFSNSERSFGPPQHPFLVNPVNHRNLRILPPLQHGAIMDFSRLYEGSNVVDEHRDMRLDIDSMTYEELLALEEHIGDVNTGLAKSHIVDKLKTSLYVPGATCVSNQSSEPSTENEACIICQEEYEAEDCVGILDCGHRYHAVCLKQWLTVKNLCPICKTTALSAGRRS

SEQ ID NO: 32592 - DNA, 1988 bp, Triticum aestivum
acacatctcaccacgccacaaacaccaaagagaggtgtactacgagggagtgagaggcgcccggctcgcctgcgtccgtctccacttctcgcgagcccggcgtcacccgccgccgggcacgcaccacgctcaacgccaaagaaaatagtgtaggtcgtgtaggcgaaggccgacctgcaaactaaacactagtcgatcaagatggtggtggagggatacgaagccgacaagaacatccagatatggaaggtgaagaagctgatcaaggggctggacggggcgaggggcaacggcacgagcatgatctcgctcatcataccgccgcgcgaccaggtgtcccgcgtcgccaagatgctgggcgacgagtacgggaccgcctccaacatcaagagccgggtgaaccgccagtccgtgctggccgccataacctccgcccagcagaggctcaagctctacagccgggtgccccccaacggcctcgtgctctacacgggcaccgtcgtcaccgacgacggcaaggagaagaaggtcaccttcgacttcgagcccttccggcccatcaacgcgtcgctctacctctgcgataacaagttccacaccgagccgctgaacgagctcctcgagtccgacgacaggttcggcttcatcgccatggacggcaacggcacgctctacggcacgctgagcggcaacagccgggaggtggtgtacaagttcagcgtggatctgcccaagaagcacgggcggggagggcagtcggcgctccggttcgcgcgcctgcgtatggagaagcggcacaactacctgcgcaaggcggccgagctggccacgcacttcttcaccaaccccgccaccaaccagcccaacgtggtcgggctcatcctggccggctccgccgatttcaagaccgagctgggcaagtccgagatgttcgaccagcggctccaggccaagataatcaagtcggtcgacgtgtcgtacggcggggagagcggcttcaaccaggccattgagatgtctgtggaggtcctctccgaggccaagttcgtccaggagaagaagctccttcgcaagtacttcgaggagataagccaggacaccgggaagtacgtcctgggcgtgcaggacaccatggcggccctcgagatgggcgcggtccacacgctgatcgtgtgggagaacctcgacgtcaggcggtacgagctgaagaactccgccacgggggagacggtggtgaagtacatcaacggcggccaggaggcggaccagagcaacctcggtgtcgacgaggcggcgtgcggggagctggacgtcgtcgacagggtgctgctgctggagtggttcgccgagaactaccagcaatacggctgcaagctggagttcgtcaccaacaggtcccaggaaggatcgcagttctgccggggcttcggcggcatcggcgggatcctccgctacccggcggacgtcgccgcctacaacgacgacgacgacgacgacatgctggatgacgacgtctatgaaggcctcgaatagcaatcaactgaagcttcactgcacacggtctgggaggagcctgcgctggccccgaccgcgccgccgggacgagaccctgctgaaacatccaaacgatcggtgcaagggaaacgaggaggtgggacagaagaaaggatctcagcaattatagttcggaccttgagcaaagcacgatgatggcgttgatggtttggagttgaaggtctcttcctctctggatccatcccttcaaatttggttatgctactaagcagccgtggctgccttctcttgctgcatcagagaatatgcttattagagtcgtattagttgcgagtgtgagagtggtgttccttataatctactcctgagtcgccttatgagcttatatgctactacaacaactgcttgaaataatgttgtgtattattgtgttcgattttatatgtgagatttattgctatggtaagatactg

SEQ ID NO: 32593 - protein, 443 aa, Triticum aestivum
MVVEGYEADKNIQIWKVKKLIKGLDGARGNGTSMISLIIPPRDQVSRVAKMLGDEYGTASNIKSRVNRQSVLAAITSAQQRLKLYSRVPPNGLVLYTGTVVTDDGKEKKVTFDFEPFRPINASLYLCDNKFHTEPLNELLESDDRFGFIAMDGNGTLYGTLSGNSREVVYKFSVDLPKKHGRGGQSALRFARLRMEKRHNYLRKAAELATHFFTNPATNQPNVVGLILAGSADFKTELGKSEMFDQRLQAKIIKSVDVSYGGESGFNQAIEMSVEVLSEAKFVQEKKLLRKYFEEISQDTGKYVLGVQDTMAALEMGAVHTLIVWENLDVRRYELKNSATGETVVKYINGGQEADQSNLGVDEAACGELDVVDRVLLLEWFAENYQQYGCKLEFVTNRSQEGSQFCRGFGGIGGILRYPADVAAYNDDDDDDMLDDDVYEGLE

SEQ ID NO: 32594 - protein, 410 aa, Triticum aestivum
MISLIIPPRDQVSRVAKMLGDEYGTASNIKSRVNRQSVLAAITSAQQRLKLYSRVPPNGLVLYTGTVVTDDGKEKKVTFDFEPFRPINASLYLCDNKFHTEPLNELLESDDRFGFIAMDGNGTLYGTLSGNSREVVYKFSVDLPKKHGRGGQSALRFARLRMEKRHNYLRKAAELATHFFTNPATNQPNVVGLILAGSADFKTELGKSEMFDQRLQAKIIKSVDVSYGGESGFNQAIEMSVEVLSEAKFVQEKKLLRKYFEEISQDTGKYVLGVQDTMAALEMGAVHTLIVWENLDVRRYELKNSATGETVVKYINGGQEADQSNLGVDEAACGELDVVDRVLLLEWFAENYQQYGCKLEFVTNRSQEGSQFCRGFGGIGGILRYPADVAAYNDDDDDDMLDDDVYEGLE

SEQ ID NO: 32595 - protein, 393 aa, Triticum aestivum
MLGDEYGTASNIKSRVNRQSVLAAITSAQQRLKLYSRVPPNGLVLYTGTVVTDDGKEKKVTFDFEPFRPINASLYLCDNKFHTEPLNELLESDDRFGFIAMDGNGTLYGTLSGNSREVVYKFSVDLPKKHGRGGQSALRFARLRMEKRHNYLRKAAELATHFFTNPATNQPNVVGLILAGSADFKTELGKSEMFDQRLQAKIIKSVDVSYGGESGFNQAIEMSVEVLSEAKFVQEKKLLRKYFEEISQDTGKYVLGVQDTMAALEMGAVHTLIVWENLDVRRYELKNSATGETVVKYINGGQEADQSNLGVDEAACGELDVVDRVLLLEWFAENYQQYGCKLEFVTNRSQEGSQFCRGFGGIGGILRYPADVAAYNDDDDDDMLDDDVYEGLE

SEQ ID NO: 32596 - DNA, 2239 bp, Triticum aestivum
gaaccagcgcagcctccgtcgccgtcgaggcctcacgcttcacaccccccaccccacgcggccgcgcccctccgggccaggtgttgaagcgccgcggggacgaggcaggagggccgccggctcccggacccctccgcctctccgaagcggcacagtttcttaagtagtgcacaatgtctgggtgtacagcaatcttgcgtcggtcatctcagaatcttatggagttatcgattgggtccaaatctcctggcgcttctttgagggggttcaacagctgtgccaggggcaaggtaaaaccaggcaattcaattattgggcagatgaaagcaatggatcgttttcctccagccaatggtgtgtcaagggctatgatgcccctttctgcttatatgggcactaattggttgaatacttcaaggcccagttttaatgcattgccaggaccgttaggtgtttccagcatccgccgtgcatactcatcagacactggaattaagcctgaagtcccaattgttcctcccactgaaactgctgaggttggtactggaggaaccacttggatggacatttttgaaaatgctcgcaactccaccatcgatgctacgactgatgcaggcaagaaagtgaaggagatgactgatgcagtcacaccccatgttcaaagttttcttgaggcaaatccagatctagaaaaggtagttgttccacttggaggaacattatgtggtacccttttggcctggtttgtcatgcctatcatcttcaagaggcttcataagtatggttcacagaacccgatatcagcacttttggggaactcagtcaacactaatgcttcatatagcaccagcctttggagtgcattggaggatcctgcaaaatacttgatcacatttatggcattttcagagatggctgcagtgatcgcaccaagtgtatcaccttattttccacaagctttgaggggtgcatttgtattgtcagttgtctggtttcttcataggtggaaagcaaactttatcactaaagctatggccaaccaaactgccttagttactgatagagcaaggttatcagcttttaaccaagtgtcctcattgggactgattgcgcttggtgtaatgggtcttgctaggcttgtggtgtagctgttcaatcaatattaactgttggtggtgtgggaggtgttgctacggcttttgctgctagagatgtcctgggcaacgtgttgaatgggttctccttacaattttctaggccattctcagttggagaatacataaaggctgggtcaatagaaggcacggtactcgaaataggacttacttcaacttcgatgatgagtccagaaaagcttcctttcacagtacccaactctttgttctcaagtcagattatagtgaatagatcacgagctcagtggcgggtaagtgtgaccaagattcctataagacttgaggatattgagaaggttcctgctgtagcagaggagatcaaggctatgttaaggtccaacccaaaagttatcttggaaacagatgctccttactgctacctctccagattggaaagttcatatggagagcttgtcatagggtgcatcctccaaaaaatgagaaaagacgagttgatatatgcagaacaggacattcttctaggagctgccaggattatcaagtcacatggcgttgaatttggaagcaccacacagtgctgctgattctgatgttttctcaaaactcaagtagggtgaacgtcgttagcctggaggagtacatacgcggagggttagaggagattttgcttggtgcgcgtgcgaaggcagggacctcttttggaaccaaggtgggacttttgttgcctgtcctcaatttggcaaacatacatcatctgttgccggagaatcttgcgttacatcattttgctacgtgcgctgatactgcttagcgagtagtttaccacgattcgtcagtgctcagtcgtggtaacttcaaacacatggagtggcatgatccaccggaggtctgcatctgggcccaggagtatcccgtctggccttggaactctaaatgctggaacgtcgacatgcgtgcaagtgttgttttgatgcatgactaggcgtgatagacacctttgtcctgaatcggtgtgtcggggaccatgttgacacgcgtcgttcggcttttatttctagatctggctactatagtcctatgcatatgcttgttaatttgcttgt

SEQ ID NO: 32597 - protein, 324 aa, Triticum aestivum
MSGCTAILRRSSQNLMELSIGSKSPGASLRGFNSCARGKVKPGNSIIGQMKAMDRFPPANGVSRAMMPLSAYMGTNWLNTSRPSFNALPGPLGVSSIRRAYSSDTGIKPEVPIVPPTETAEVGTGGTTWMDIFENARNSTIDATTDAGKKVKEMTDAVTPHVQSFLEANPDLEKVVVPLGGTLCGTLLAWFVMPIIFKRLHKYGSQNPISALLGNSVNTNASYSTSLWSALEDPAKYLITFMAFSEMAAVIAPSVSPYFPQALRGAFVLSVVWFLHRWKANFITKAMANQTALVTDRARLSAFNQVSSLGLIALGVMGLARLVV

SEQ ID NO: 32598 - protein, 309 aa, Triticum aestivum
MELSIGSKSPGASLRGFNSCARGKVKPGNSIIGQMKAMDRFPPANGVSRAMMPLSAYMGTNWLNTSRPSFNALPGPLGVSSIRRAYSSDTGIKPEVPIVPPTETAEVGTGGTTWMDIFENARNSTIDATTDAGKKVKEMTDAVTPHVQSFLEANPDLEKVVVPLGGTLCGTLLAWFVMPIIFKRLHKYGSQNPISALLGNSVNTNASYSTSLWSALEDPAKYLITFMAFSEMAAVIAPSVSPYFPQALRGAFVLSVVWFLHRWKANFITKAMANQTALVTDRARLSAFNQVSSLGLIALGVMGLARLVV

SEQ ID NO: 32599 - protein, 275 aa, Triticum aestivum
MKAMDRFPPANGVSRAMMPLSAYMGTNWLNTSRPSFNALPGPLGVSSIRRAYSSDTGIKPEVPIVPPTETAEVGTGGTTWMDIFENARNSTIDATTDAGKKVKEMTDAVTPHVQSFLEANPDLEKVVVPLGGTLCGTLLAWFVMPIIFKRLHKYGSQNPISALLGNSVNTNASYSTSLWSALEDPAKYLITFMAFSEMAAVIAPSVSPYFPQALRGAFVLSVVWFLHRWKANFITKAMANQTALVTDRARLSAFNQVSSLGLIALGVMGLARLVV

SEQ ID NO: 32600 - DNA, 1527 bp, Triticum aestivum
accgcaaatctagcggagggtcagctcgggctcggcggcgaccagagaggaggagggaagtggcgtggttctctctcgcgcgcgcgcgtgcggcggagacggagaagggcgccggctgctccaggctgtaacctctggactggagtccttgtcgcgcctagatgctccgcgcctcctcgccacagcggcaagacggcgtcctgtgggccaaggctgcttcctcggccgccctccaccagtactatgccctcccaaagaagggcaagccgcagggccgcgagtccaccgtcctcgctgccttcctgctctcctctccagagaacccactgaaccccaccgtcctctccctcgccaccggcaccaagtgcctcggtgcagcacgcctcggacctcgcggtgacctcgtccatgacgcccacgccgaggtcgtcgcccgccgcgcgctgctccgcctcatttatgccgagattggcacagacaacccaccaagttggctggttgcatctggcgctgatgggcggtggaggctgagggacgggcatcagctgcatctctacatcacccagatcccctgtggggtcatgccggtgccgccgtcatccttggaggttcgaatggaacagctggataccatggtgaatggatgcagtgacgttggattcgtgcaaaggaagccagggcgtggtgatacaacattgtcggtgagctgttttgacaaaattactcgctggtgtgtcgttgggatccaaggtgcattgctgtcacacattcttgaacccttgtatttgtccaccattaccattggacaatcacctgatggtgcacctgacgggttttgtattgaaagtaatgttgtaaaagttcttggtgctcgcctgtcctgtctatccagaaaattccctgaccctttcaaactgaacaagccactattttttgaggcacctatcccccctcaagagtttcaacagacttcaggagatataccgcctttgacttgcgggtactcaatatgctggaataaatccggtttgcatgaagttgttttaggaacaactgggagaaaacaaggtacatcttcaaaggcagcatcctcaccctccactgagtcattgctctgcaagataagattggcagaggccttcgtatcacttgaacatccattagtcacaaaattccggcatgagaaactttcttatcgtgcaattaaggacatggcttgtgagtaccagcagatgcttgagcttcttagaaaggctccattttttggccggtggcgtgctaagccagcatccgttgatttgtttacagttccacggtgataaccaaatcttgaagttctatgctgtgtccgagaggctggttcttgaagttccttgatttcaccataattttagcagttttctgtaccagctctttcaacttatttgtagcatgtatgcttgtgcacaatactgaagtattgaacagtggtagcctgtaacaaacctataaagccctgtgatgtttcgcaccatgaggtggatgttt

SEQ ID NO: 32601 - protein, 385 aa, Triticum aestivum
MLRASSPQRQDGVLWAKAASSAALHQYYALPKKGKPQGRESTVLAAFLLSSPENPLNPTVLSLATGTKCLGAARLGPRGDLVHDAHAEVVARRALLRLIYAEIGTDNPPSWLVASGADGRWRLRDGHQLHLYITQIPCGVMPVPPSSLEVRMEQLDTMVNGCSDVGFVQRKPGRGDTTLSVSCFDKITRWCVVGIQGALLSHILEPLYLSTITIGQSPDGAPDGFCIESNVVKVLGARLSCLSRKFPDPFKLNKPLFFEAPIPPQEFQQTSGDIPPLTCGYSICWNKSGLHEVVLGTTGRKQGTSSKAASSPSTESLLCKIRLAEAFVSLEHPLVTKFRHEKLSYRAIKDMACEYQQMLELLRKAPFFGRWRAKPASVDLFTVPR

SEQ ID NO: 32602 - protein, 245 aa, Triticum aestivum
MPVPPSSLEVRMEQLDTMVNGCSDVGFVQRKPGRGDTTLSVSCFDKITRWCVVGIQGALLSHILEPLYLSTITIGQSPDGAPDGFCIESNVVKVLGARLSCLSRKFPDPFKLNKPLFFEAPIPPQEFQQTSGDIPPLTCGYSICWNKSGLHEVVLGTTGRKQGTSSKAASSPSTESLLCKIRLAEAFVSLEHPLVTKFRHEKLSYRAIKDMACEYQQMLELLRKAPFFGRWRAKPASVDLFTVPR

SEQ ID NO: 32603 - protein, 234 aa, Triticum aestivum
MEQLDTMVNGCSDVGFVQRKPGRGDTTLSVSCFDKITRWCVVGIQGALLSHILEPLYLSTITIGQSPDGAPDGFCIESNVVKVLGARLSCLSRKFPDPFKLNKPLFFEAPIPPQEFQQTSGDIPPLTCGYSICWNKSGLHEVVLGTTGRKQGTSSKAASSPSTESLLCKIRLAEAFVSLEHPLVTKFRHEKLSYRAIKDMACEYQQMLELLRKAPFFGRWRAKPASVDLFTVPR

SEQ ID NO: 32604 - DNA, 1380 bp, Triticum aestivum
acggaattcgttcctgcgcaccggacaccaaaccaattggcaccgccgccttcgtctcgagagcttcgttcggtagagtgtcgaccgatctagcgatggagtgccttgccgagatgccgcacgcgccgctcgaccgccgcccgcgcaagcgccagcgccttggctgggatgtcggccccgagatccctcagctaaaaaaactgtgtggggaagaagtcgcaaatgtgattagtgctatgacaatggggctatcttccggtggtattgttttctcccaggagacccaagggctttttcgttttgcgacccctcctctgagagaagatgacaaggatggacattatgtttttgctgtgggagacaacctcacatcacgctataggattaatgcaaaaatgggtgaaggtacctttggtcaggtgttggaatgttgggacagggaacggaaagaaatggttgctattaagatcatcagaggaattaagaagtacagggatgctgcaatgatagaaattggcatgctcgagcagctttgtaaatatgaaaaaagcagatccaggtttcatcccgttcaccgaaggagggatcctactacaaacgtgtgcccaagtccagttcaataaaggttattgattttggcagcacaacatatgatcagcaggaccagacctatgtagtttctactaggcattatcgggctccggaagttatcctgggacttggatggagttacccatgtgatatctggagcgttgggtgtatactagttgaactctgcacgggagaggcgctgtttcaaacccatgaaaatttggagcatcttgctatgatggagagggtgcttgggccgttgccatatcacatgctcaagaaggctgatcgacatggtgagaaatatgtgaggaagggccgtttaaactggcctgaaggatgtgcctcacgggaaagcatgaaagctgtcatgaagctgcctcggcttcagaatctggtgatgcaaaacgttgagcattctgctggggacttcatcaatcttttgcaagggctgctgagttatgatccagcaagccgcctaacggcccaggaggcccttgagcatccattcttgacggagcggagtgagcgaagaagatgatgtgcccaagatcctagcaaacttgtaacctgtatgtttgagccgtgacttccatttgtcgtgttcatggaatggcagagattccattctctcttccatggaatggaagaaataattaaatagataggattttagcagtagcttttctcgttgcattgcttgtgtaacgtgctcattatctgtacatatgttgacttatgtgtatgtaaccgggaggggattctcccaaagaaaattttttgggggcc

SEQ ID NO: 32605 - protein, 206 aa, Triticum aestivum
GIRSCAPDTKPIGTAAFVSRASFGRVSTDLAMECLAEMPHAPLDRRPRKRQRLGWDVGPEIPQLKKLCGEEVANVISAMTMGLSSGGIVFSQETQGLFRFATPPLREDDKDGHYVFAVGDNLTSRYRINAKMGEGTFGQVLECWDRERKEMVAIKIIRGIKKYRDAAMIEIGMLEQLCKYEKSRSRFHPVHRRRDPTTNVCPSPVQ

SEQ ID NO: 32606 - protein, 175 aa, Triticum aestivum
MECLAEMPHAPLDRRPRKRQRLGWDVGPEIPQLKKLCGEEVANVISAMTMGLSSGGIVFSQETQGLFRFATPPLREDDKDGHYVFAVGDNLTSRYRINAKMGEGTFGQVLECWDRERKEMVAIKIIRGIKKYRDAAMIEIGMLEQLCKYEKSRSRFHPVHRRRDPTTNVCPSPVQ

SEQ ID NO: 32607 - protein, 169 aa, Triticum aestivum
MPHAPLDRRPRKRQRLGWDVGPEIPQLKKLCGEEVANVISAMTMGLSSGGIVFSQETQGLFRFATPPLREDDKDGHYVFAVGDNLTSRYRINAKMGEGTFGQVLECWDRERKEMVAIKIIRGIKKYRDAAMIEIGMLEQLCKYEKSRSRFHPVHRRRDPTTNVCPSPVQ

SEQ ID NO: 32608 - DNA, 1263 bp, Triticum aestivum
ggcagaactcccgcgactatcaggatcggcggctatacaccgtgaactgcgccactagactaggaagaaaatggggtggaagggcgtcctggggttcgactacggcgtcgtgcaggcaccgctcggccccgacatctccggcccggagctcgccgccgccgtcgccaacgctggcgccataggcctcctccgccttcctgactggccggcgccggaccacgtgagggggttgatacagaggaccaggagcctgaccgagaagccgttcggggcggccatcgtgctggccttcccgcacgaggagaatctgagggtcgtgctggaggagaagctcgccgtgctgcaggtgtactggggcgagttccccaaggagcaggtcgacgaggcccatcgtgccggcgtcaaggtcttgcatcaggttggtaaccttgaggaggcagcaaaagctaaggaagctggtgtagatggaattatcgttcaaggccgcgaagcaggggggcatgtgattggtcaagagggtctgctaccgttgctgccgagagtagtggatctagtttcagatagtactgtttcggttatcgccgctggtggaatcgtagatggccgtggctatgctgctgcattggcacttggtgctcatggtgtttgcttaggaactaggtttgtagccaccgaggaaagctttgcgcatccgctgtataagaaaaagctaattgagatgaattgcacggactatacagctgtgttcgggcgtactagatggcctggtgctccacaacgtgtcctgaagacacctttctatgttgagtggaacaatcttccagatcatgaaacagaggaaaatcagcctattataggtcattctatcatccatggtgtgcacaaggatatatgccggtttgctggtactgttcctaatgcgacaacaacaggcgatatcgatagcatggccatgtatgctggccagagtgttgggctaatcaccgagattgtaccagcaagggaagttgtcaagaggctagtcgctgaagcacagcgtgtcattggagaaaagctttctggtttccccaaatcatcagagtagtgctggtgaagtccttggtaattaaactgttaaggtatctaatggtgtacgctgcgtgttatttgtaggcaatagccaatgaaaataaatgggttttccaaggtattccctttttaccacagttttgtacttgtatgtgttgtttgtaagtatatattcaataaaggtaaatgatttcg

SEQ ID NO: 32609 - protein, 337 aa, Triticum aestivum
MGWKGVLGFDYGVVQAPLGPDISGPELAAAVANAGAIGLLRLPDWPAPDHVRGLIQRTRSLTEKPFGAAIVLAFPHEENLRVVLEEKLAVLQVYWGEFPKEQVDEAHRAGVKVLHQVGNLEEAAKAKEAGVDGIIVQGREAGGHVIGQEGLLPLLPRVVDLVSDSTVSVIAAGGIVDGRGYAAALALGAHGVCLGTRFVATEESFAHPLYKKKLIEMNCTDYTAVFGRTRWPGAPQRVLKTPFYVEWNNLPDHETEENQPIIGHSIIHGVHKDICRFAGTVPNATTTGDIDSMAMYAGQSVGLITEIVPAREVVKRLVAEAQRVIGEKLSGFPKSSE

SEQ ID NO: 32610 - DNA, 1360 bp, Triticum aestivum
attcatccatccatcttgccgagcgctacaatggcgagcatcagaagtgtctcccctctcctcgctccgctcgccgccgcggccacggtgctcgccgtgttgatgtctgcgccggtgtccgccaggagcttgccggagggcctcccggacatcaagccgctgctgtccaacccgtggtcggcgttccagaacctgtccggctgccagttcggggaccagcggcaggggctcgcgaggctcaaggactacctcagccgcttcggctacctccccgcgccgccggccaagttcaacgacatgttcgacgccgacatggagtccgccatccggacctaccagcacaacttcggcctcgaggccacgggccagctggacgcgtccaccgtcgccaagatgatgtccccgcgctgcggcgtcgccgacatcatcaacggcacctccgccatgggcaagacgacggtccacggccggaacctctactcctacttcccggggtccccctcgtggccgcgctccaagaagagcctccggtacgccatcacggcggccaccgagacgaccatcgaccgggccacgctgagcaaggtgttcgccagcgccttcgcacgctggtcggcggccaccacgctcaacttcaccgagacggcgtcggcgtccgacgccgacatcaccatcgggttccactcgggcgaccacggcgacggcgaggccttcgacgggccgctgggcacgttggcgcacgccttctcgcccaccgacggccggttccacctggacgcgtcggaggcctgggtggccggcggcgacgtgtcgcgcgcctcgctggacgccgccgtcgacctggagtcggtggccgtgcacgagatcggccacctgctggggctcggccactcgtcggtggagggcgccatcatgtacccgaccatcacgtcgcgcacgcagaaggtggagctggccaaagacgacgtcgacggcatccagagcctctacggcggcaaccccaacttcaagggcgtcacgccgccggccaccagcagcgaggagacccacagcgccgccccgcgcgcgctctccggcccgtggagcggcctggccggggcggctgcgctcgcactagccttgtcgtgctagttcttcttgcgtcgatcgattcacgaccatttttttaacgggcatatattcactttgctctaggatttgtgttgtacaaacattagtcactgggtgtgcaagatagtgtagatacgtgaattttgcgtgtatagatcgaatcatatagtacgatagtggtgcgcccatgtggccatgtgatatcatatgagttttgcagaatgtgccattgtgagttgtcaaaaaaaat

SEQ ID NO: 32611 - protein, 388 aa, Triticum aestivum
SSIHLAERYNGEHQKCLPSPRSARRRGHGARRVDVCAGVRQELAGGPPGHQAAAVQPVVGVPEPVRLPVRGPAAGAREAQGLPQPLRLPPRAAGQVQRHVRRRHGVRHPDLPAQLRPRGHGPAGRVHRRQDDVPALRRRRHHQRHLRHGQDDGPRPEPLLLLPGVPLVAALQEEPPVRHHGGHRDDHRPGHAEQGVRQRLRTLVGGHHAQLHRDGVGVRRRHHHRVPLGRPRRRRGLRRAAGHVGARLLAHRRPVPPGRVGGLGGRRRRVARLAGRRRRPGVGGRARDRPPAGARPLVGGGRHHVPDHHVAHAEGGAGQRRRRRHPEPLRRQPQLQGRHAAGHQQRGDPQRRPARALRPVERPGRGGCARTSLVVLVLLASIDSRPFF

SEQ ID NO: 32612 - protein, 376 aa, Triticum aestivum
IHPSILPSATMASIRSVSPLLAPLAAAATVLAVLMSAPVSARSLPEGLPDIKPLLSNPWSAFQNLSGCQFGDQRQGLARLKDYLSRFGYLPAPPAKFNDMFDADMESAIRTYQHNFGLEATGQLDASTVAKMMSPRCGVADIINGTSAMGKTTVHGRNLYSYFPGSPSWPRSKKSLRYAITAATETTIDRATLSKVFASAFARWSAATTLNFTETASASDADITIGFHSGDHGDGEAFDGPLGTLAHAFSPTDGRFHLDASEAWVAGGDVSRASLDAAVDLESVAVHEIGHLLGLGHSSVEGAIMYPTITSRTQKVELAKDDVDGIQSLYGGNPNFKGVTPPATSSEETHSAAPRALSGPWSGLAGAAALALALSC

SEQ ID NO: 32613 - protein, 366 aa, Triticum aestivum
MASIRSVSPLLAPLAAAATVLAVLMSAPVSARSLPEGLPDIKPLLSNPWSAFQNLSGCQFGDQRQGLARLKDYLSRFGYLPAPPAKFNDMFDADMESAIRTYQHNFGLEATGQLDASTVAKMMSPRCGVADIINGTSAMGKTTVHGRNLYSYFPGSPSWPRSKKSLRYAITAATETTIDRATLSKVFASAFARWSAATTLNFTETASASDADITIGFHSGDHGDGEAFDGPLGTLAHAFSPTDGRFHLDASEAWVAGGDVSRASLDAAVDLESVAVHEIGHLLGLGHSSVEGAIMYPTITSRTQKVELAKDDVDGIQSLYGGNPNFKGVTPPATSSEETHSAAPRALSGPWSGLAGAAALALALSC

SEQ ID NO: 32614 - DNA, 1271 bp, Triticum aestivum
gcactcaacacactctctgcttcagctaacattagcagtccagcgcacacacatacagatatcgagagtgtgtgtgtaagagagacattagatcgagagcgatggcaattcctgctgatgctgctgtctcgttgaacttcccggtgatcaacatggagaagcttgagaccggggagaggggcgcggccatggaggtcatccgcgacgcctgcgagaactggggattcttcgagctgctgaaccatggcatctcgcacgagctgatggacgaggtggagcgggtgagcaaggcgaactacacggcgtgccgagaggggcagttcaaggagtttgcggcgcggacgctggaggccggcgagaagggcgccgacgtgaaggacgtggactgggagagcaccttcttcgtccgccacctccccgcctccaaccttgccgacctgcccgacctcgaccaccactacaggcaactgatcaaggaattcgcgtcggagatcgagaagctggcagagaaggtgctggacctgctgtgcgagaacctgggtctggagcagggctacctgaagcgggcgttcgccgggtccaggggcccgacgttcggcaccaaggtgagcagctacccaccgtgcccacgccccgacctggttgacggcctccgcgcgcacaccgacgccggcggcgtcatcctgctgttccaggacgaccaggtgagcgggctgcagctccttaaggacggggcctgggttgaggtgccgcccatgcgccacgccatcgtcgtcaatatcggcgaccagctggaggtgatcaccaacgggcggtacaagagcgtgatgcaccgcgtgctcacccgcgccgacggcaaccgcatgtccatcgcgtcattctacaaccccggggccgacgccgtcatcttcccggccccggcgcttgtggccgctgccggcgccacggagaagaacgagggcgaggagggcggcgccgtgtacccgaagttcgtgttcgaggactacatgaacctgtacgtgcgccacaagttcgaggccaaggagccacggttcaaggccatgaaggcagacgccgcgcccatcgccatcgcgtgataacgccgcgcccatcgagtacaagagtattttgagacgtgtttactttcttttgggcgtgccatgtatccggttagctttatgggtaatgtattttcgagtccgactcacagattcttgtccgggcatttctattttgctgattatggcatgctgttacgtgaagttaggaac

SEQ ID NO: 32615 - protein, 331 aa, Triticum aestivum
MAIPADAAVSLNFPVINMEKLETGERGAAMEVIRDACENWGFFELLNHGISHELMDEVERVSKANYTACREGQFKEFAARTLEAGEKGADVKDVDWESTFFVRHLPASNLADLPDLDHHYRQLIKEFASEIEKLAEKVLDLLCENLGLEQGYLKRAFAGSRGPTFGTKVSSYPPCPRPDLVDGLRAHTDAGGVILLFQDDQVSGLQLLKDGAWVEVPPMRHAIVVNIGDQLEVITNGRYKSVMHRVLTRADGNRMSIASFYNPGADAVIFPAPALVAAAGATEKNEGEEGGAVYPKFVFEDYMNLYVRHKFEAKEPRFKAMKADAAPIAIA

SEQ ID NO: 32616 - protein, 314 aa, Triticum aestivum
MEKLETGERGAAMEVIRDACENWGFFELLNHGISHELMDEVERVSKANYTACREGQFKEFAARTLEAGEKGADVKDVDWESTFFVRHLPASNLADLPDLDHHYRQLIKEFASEIEKLAEKVLDLLCENLGLEQGYLKRAFAGSRGPTFGTKVSSYPPCPRPDLVDGLRAHTDAGGVILLFQDDQVSGLQLLKDGAWVEVPPMRHAIVVNIGDQLEVITNGRYKSVMHRVLTRADGNRMSIASFYNPGADAVIFPAPALVAAAGATEKNEGEEGGAVYPKFVFEDYMNLYVRHKFEAKEPRFKAMKADAAPIAIA

SEQ ID NO: 32617 - protein, 302 aa, Triticum aestivum
MEVIRDACENWGFFELLNHGISHELMDEVERVSKANYTACREGQFKEFAARTLEAGEKGADVKDVDWESTFFVRHLPASNLADLPDLDHHYRQLIKEFASEIEKLAEKVLDLLCENLGLEQGYLKRAFAGSRGPTFGTKVSSYPPCPRPDLVDGLRAHTDAGGVILLFQDDQVSGLQLLKDGAWVEVPPMRHAIVVNIGDQLEVITNGRYKSVMHRVLTRADGNRMSIASFYNPGADAVIFPAPALVAAAGATEKNEGEEGGAVYPKFVFEDYMNLYVRHKFEAKEPRFKAMKADAAPIAIA

SEQ ID NO: 32618 - DNA, 1635 bp, Triticum aestivum
aaacaagtgtacctctatctcgccgtcgcctccccgctccttgcttccgcccggccgtttctctagggtttaacgccatggacgtcgaggacgagctcccgaccgcccccgcgtccgcggacggcggcgaatcctcgcacgcgctggtgtccggcgaccagttcgacgtggaggcgtacgcggcgcagtactcggggcgcacgcgcgtggcgcggcttctcttcatcgcggagaagtgcgggtcggagcagatgcggctggatgcgctccggctggcctacgactgggccctcaagggagaggacacggccctccaccgcgacgtctccgccaagatcgccggccgcctcggcccccgctacgcagccgaccaggcctggtccgacgccgtcgagcgccgcgccctgctgcgcaaggataagcttgacagcgagctcaatgtctacaggaccaatctgatcaaagagagtattcggatgggctacaatgaccttggtgatttccactatgctcaaggccacctttcagacgccttcaagagctatatcaggacccgcgattactgcacgacctccaagcatgttgttcagatgtgcttgaatgtcatacttgttagcattgagctggggcaatttatgcacgtgtcaaattatgtcatcaaggcggagcagaccccagacgatatggatcctattactgccgccaagttgcgagctgctgctggattagcctacatggaaacaaacaagtacaaacttgctgcccggaagtttatagagacaggatcagagctaaggagcaactattctgaagttatagctccacaagatgttgctgtctatggtgcactatgcgcgcttgcttcttttgatcgctcagagctgaagagcaaagttattgacaactacaattttcgcaattttttggagttagtgcctgaagtaagggagctggtaaatgatttttatgcaagccgctatgggtcatgtctgggatatcttgagaagctgaagtcaaacctgctgctggatatgcatttgcatgcgcatatagaaactctgtacaaggacattcgacacaaagccatcatacagtacacattcccattcatatctgttgatctcaacttgatggctgttgccttccagacctccgtgtccctgctagagaaagagctggcagcgcttatcactgataacaaaatacaggctcgtatcgactcgcacaacaagattctatacgcaagccacgccgaccaaaggaacggaactttccagcgtgctctgcagactggcattgagtttgagagggatgtcaagtccatgcttctgagggcgaacctcctcaagcacgagtacagccagaaggcagcagaaaggaaggtgtgaaaacaagttctccttggtttggacctgaggtgcattgagagattttagtgatgatttgtgccatagtcaagtgtttcatgtcatgatcttccatattcaagctaagatactagatttaagtatgttttagagcacacaaagataatataacttctgccatgcacgtcttttgcggagactatgtggttaattttgtactacgtactggcattcattttggagttttcgtatagactcatttgaagct

SEQ ID NO: 32619 - protein, 461 aa, Triticum aestivum
TSVPLSRRRLPAPCFRPAVSLGFNAMDVEDELPTAPASADGGESSHALVSGDQFDVEAYAAQYSGRTRVARLLFIAEKCGSEQMRLDALRLAYDWALKGEDTALHRDVSAKIAGRLGPRYAADQAWSDAVERRALLRKDKLDSELNVYRTNLIKESIRMGYNDLGDFHYAQGHLSDAFKSYIRTRDYCTTSKHVVQMCLNVILVSIELGQFMHVSNYVIKAEQTPDDMDPITAAKLRAAAGLAYMETNKYKLAARKFIETGSELRSNYSEVIAPQDVAVYGALCALASFDRSELKSKVIDNYNFRNFLELVPEVRELVNDFYASRYGSCLGYLEKLKSNLLLDMHLHAHIETLYKDIRHKAIIQYTFPFISVDLNLMAVAFQTSVSLLEKELAALITDNKIQARIDSHNKILYASHADQRNGTFQRALQTGIEFERDVKSMLLRANLLKHEYSQKAAERKV

SEQ ID NO: 32620 - protein, 436 aa, Triticum aestivum
MDVEDELPTAPASADGGESSHALVSGDQFDVEAYAAQYSGRTRVARLLFIAEKCGSEQMRLDALRLAYDWALKGEDTALHRDVSAKIAGRLGPRYAADQAWSDAVERRALLRKDKLDSELNVYRTNLIKESIRMGYNDLGDFHYAQGHLSDAFKSYIRTRDYCTTSKHVVQMCLNVILVSIELGQFMHVSNYVIKAEQTPDDMDPITAAKLRAAAGLAYMETNKYKLAARKFIETGSELRSNYSEVIAPQDVAVYGALCALASFDRSELKSKVIDNYNFRNFLELVPEVRELVNDFYASRYGSCLGYLEKLKSNLLLDMHLHAHIETLYKDIRHKAIIQYTFPFISVDLNLMAVAFQTSVSLLEKELAALITDNKIQARIDSHNKILYASHADQRNGTFQRALQTGIEFERDVKSMLLRANLLKHEYSQKAAERKV

SEQ ID NO: 32621 - protein, 378 aa, Triticum aestivum
MRLDALRLAYDWALKGEDTALHRDVSAKIAGRLGPRYAADQAWSDAVERRALLRKDKLDSELNVYRTNLIKESIRMGYNDLGDFHYAQGHLSDAFKSYIRTRDYCTTSKHVVQMCLNVILVSIELGQFMHVSNYVIKAEQTPDDMDPITAAKLRAAAGLAYMETNKYKLAARKFIETGSELRSNYSEVIAPQDVAVYGALCALASFDRSELKSKVIDNYNFRNFLELVPEVRELVNDFYASRYGSCLGYLEKLKSNLLLDMHLHAHIETLYKDIRHKAIIQYTFPFISVDLNLMAVAFQTSVSLLEKELAALITDNKIQARIDSHNKILYASHADQRNGTFQRALQTGIEFERDVKSMLLRANLLKHEYSQKAAERKV

SEQ ID NO: 32622 - DNA, 1396 bp, Triticum aestivum
atctagaagagcctgccagtctttgattcggctcaacaatggagatggtcctcgccgcagcagcaaactgtaccggtgccttgtcgtccaaccaccccaaaacgttcctcaaatcgcgtcgatcctcgctccaaatgcgggcctgcagatcgggccccgacgcgccgctcgccgtgtcgtccgccgccgcgccggaggagccgcgcccggtgcgcctgggcatcatgggctgcggctccatcgcgcgcaaggtcgcgcgctcaatgctgctcgtccccgccgccgacgtggccgccgtcgccagccgctccgagggcaaggcgcgcctcttcgccgccgacaacggccttcggagcggcacgcgcatccacggctcctacgaggcgctcctcgacgacccggacgtcgacgccgtctacatgccgctccccaccagcctccacgtcaagtgggcgaccgccgccgccgagcggggcaagcacctgctcctcgagaagcccaccgcgccctgcgccgccgacctcgagcccatcctcgccgcctgcgaggccaacggcgtccagttcatggactccaccatgtggatgcaccacccccgcactgccaagatgcgtcagctcgtcgccgatcaggacacaatcggagacgtcagatttataaacaccatggtcagctttctagcaaacgaagatttcctccagaatgacatccgggtaaagccagaccttgatggcctgggtgtgcttggtgacatcgggtggtactgcatccgtggaatcctgtgggctgttgactatgagctgcccaagaatgtggttgctctccatcaccctgtcaagaaccaagccggcgtgctccttgcttgcggcgcatcgctctactgggccgacggcaaggtcgccaccttccactgttctttccttaccaacctgaccatggacctcaccgtcgtcggcaccaacggtactattcatgtcaccgacttggtcatcccgtacgaagagaagtctgctccgttcagcgtcgcctccaagacgaacttcgccgaactctctaccggatgggatccacatccgagcaagcatgttgtcaccacggacctaccccaggaggggctcatggtccaggagttctgtaggctggtgcagggcatcagagatgccggtgtcaagcctgaggggaagtggccgggcatcacccgaaagacacagattgtcgtggatgcagtgaaggcttctattgacaatggatttgagtccgtcgatgttgccagctaaatacaacacataactggtgttcccacgttgtatcttcaccatgataaatctatttactgaaataatttgaacgattcttgtcatattgaggacaatattgcaatgatcaagtaagagct

SEQ ID NO: 32623 - protein, 412 aa, Triticum aestivum
MEMVLAAAANCTGALSSNHPKTFLKSRRSSLQMRACRSGPDAPLAVSSAAAPEEPRPVRLGIMGCGSIARKVARSMLLVPAADVAAVASRSEGKARLFAADNGLRSGTRIHGSYEALLDDPDVDAVYMPLPTSLHVKWATAAAERGKHLLLEKPTAPCAADLEPILAACEANGVQFMDSTMWMHHPRTAKMRQLVADQDTIGDVRFINTMVSFLANEDFLQNDIRVKPDLDGLGVLGDIGWYCIRGILWAVDYELPKNVVALHHPVKNQAGVLLACGASLYWADGKVATFHCSFLTNLTMDLTVVGTNGTIHVTDLVIPYEEKSAPFSVASKTNFAELSTGWDPHPSKHVVTTDLPQEGLMVQEFCRLVQGIRDAGVKPEGKWPGITRKTQIVVDAVKASIDNGFESVDVAS

SEQ ID NO: 32624 - protein, 410 aa, Triticum aestivum
MVLAAAANCTGALSSNHPKTFLKSRRSSLQMRACRSGPDAPLAVSSAAAPEEPRPVRLGIMGCGSIARKVARSMLLVPAADVAAVASRSEGKARLFAADNGLRSGTRIHGSYEALLDDPDVDAVYMPLPTSLHVKWATAAAERGKHLLLEKPTAPCAADLEPILAACEANGVQFMDSTMWMHHPRTAKMRQLVADQDTIGDVRFINTMVSFLANEDFLQNDIRVKPDLDGLGVLGDIGWYCIRGILWAVDYELPKNVVALHHPVKNQAGVLLACGASLYWADGKVATFHCSFLTNLTMDLTVVGTNGTIHVTDLVIPYEEKSAPFSVASKTNFAELSTGWDPHPSKHVVTTDLPQEGLMVQEFCRLVQGIRDAGVKPEGKWPGITRKTQIVVDAVKASIDNGFESVDVAS

SEQ ID NO: 32625 - protein, 380 aa, Triticum aestivum
MRACRSGPDAPLAVSSAAAPEEPRPVRLGIMGCGSIARKVARSMLLVPAADVAAVASRSEGKARLFAADNGLRSGTRIHGSYEALLDDPDVDAVYMPLPTSLHVKWATAAAERGKHLLLEKPTAPCAADLEPILAACEANGVQFMDSTMWMHHPRTAKMRQLVADQDTIGDVRFINTMVSFLANEDFLQNDIRVKPDLDGLGVLGDIGWYCIRGILWAVDYELPKNVVALHHPVKNQAGVLLACGASLYWADGKVATFHCSFLTNLTMDLTVVGTNGTIHVTDLVIPYEEKSAPFSVASKTNFAELSTGWDPHPSKHVVTTDLPQEGLMVQEFCRLVQGIRDAGVKPEGKWPGITRKTQIVVDAVKASIDNGFESVDVAS

SEQ ID NO: 32626 - DNA, 1101 bp, Triticum aestivum
gtcctgtactagtagagtacatctctgtcccaatcgccgtgatccagctagcttactacacaggcaagggcgattcgatcgaggccgccgccgccgccgccggagacgaccccgccgccttcagttagttaagatacaaaaatggcctcattggacaccgtcacaggagatcttggcctggttgttttgtacctaagcaaggctgaggcaagagataagatctgcagagctatacaatatggatccaagttcctgagcaacggacaaccaggacctgcacagaatgtcgacaaatcaactagtcttgctcggaaagttttccggctgtttaagtttgttaatgatctccaagctctgattagcccccctgccaaaggaactccacttccgctgatcttacttggaaagtcgaagaacgcgatgctgtcaactttcctctttctggaccaaattgtttgggctgggagaacaggagtatacaagaacaaggagcgagcagaattccttggcaggattgccttttattgctttcttggatctaatacatgtactaccatcatcgagctagcggagcttcagcggctttccaaatcgatgaagaagttagagaaggacctcaagcaccaagagctgtacaagaacgagcagtatcggatgaagctgaagaagtccaatgagaggctgcttgctctcatcaaatcgagccttgacatagttgttgcagtggggctgctgcaactggccccgaaaaaggtcactcctcgcgtcactggggcctttgggttcgctagctcgctcatcgcctgttaccagttgcttccagccccagccaaatccaagtgatctgcctgcccacctcgggccaggcagctggtgcatcgattggtgaaacggcggttgctgtcgctgatacttgataagaaataaatctggaccaaattgtccgtcctgtaggatataaccgaggattattgttgtggaagtcggcattgcccagggccatctcatagcctggttgatctgccttgccttatgacttgattatgtagcacgcttgtatttgtatggtctggtgtgccactatcatactataactgttgc

SEQ ID NO: 32627 - protein, 233 aa, Triticum aestivum
MASLDTVTGDLGLVVLYLSKAEARDKICRAIQYGSKFLSNGQPGPAQNVDKSTSLARKVFRLFKFVNDLQALISPPAKGTPLPLILLGKSKNAMLSTFLFLDQIVWAGRTGVYKNKERAEFLGRIAFYCFLGSNTCTTIIELAELQRLSKSMKKLEKDLKHQELYKNEQYRMKLKKSNERLLALIKSSLDIVVAVGLLQLAPKKVTPRVTGAFGFASSLIACYQLLPAPAKSK

SEQ ID NO: 32628 - protein, 140 aa, Triticum aestivum
MLSTFLFLDQIVWAGRTGVYKNKERAEFLGRIAFYCFLGSNTCTTIIELAELQRLSKSMKKLEKDLKHQELYKNEQYRMKLKKSNERLLALIKSSLDIVVAVGLLQLAPKKVTPRVTGAFGFASSLIACYQLLPAPAKSK

SEQ ID NO: 32629 - DNA, 1856 bp, Triticum aestivum
ctagaacatcctaatcgagaaaattaaaacgacatgaaccccctcaagaactcgcgctccgccctctcccgtctcctccgccacaaccccgccgccggccggccgcagcccccggcccctcccccgccggtgccgcgggaaacggccgctcggcactaccacgccgccccgcgccgcccagggttcattcagtccttcagccgagggcccctccgccacgagcccgccgccctcttccggcagccgccggcgcgggcgcaggcgccgcctccccggcactacttcacctcctcgcgccgcccggaggtcatccacttcgcgcgccgccgcggcggggcgcggtggtaccacgacaggcggaaggtcgccgcggtggtcctcctcgccggcggcgggacaatcgtcgtctacttcggcaacctcgagaccgtgccctacaccaaccgcacccacttcgtcctcgtctcgccccagctcgagcgccagctcggcgagtcccagttcgctgatctcaagaaggagctcgcccccaagatcctgcccccgctccaccccgacagtgtgggggtgcgcctcatcgcctccgagatcgtccgcgcgctccaccgcggcctcgccgaccgccgcagcgacgacttcgatgacgcctcctacggcgacatctccaccgacatcgccgtcaaggcccgggacatggatgccgacgacgtgatgcatcgggtctcgcctggcaagaccgcgggcacggccgctagggctcagcgagacgacgagcttctcgatgacaggtgggtcgccgagagccggagacgggggaaggcacgcggagcgcagccacagacgaagcacctcaatgagctcaattgggaggtcatcgtcgtcagagataagctcatcaatgcaatgtgcttgcctggtggtaaaattgtagtcttcactggattgctcgaccatttcaagacagatgctgagattgcgacagtgctttcgcatgagattgggcacgctatcgcgaggcacttgccagagatgatcaccaagggcatgtggtttactatcctgcagcttatcgtcctacagtttatttacatgccagacctaattaatgcaatgtcgacattactcctcagattgcccttctcacgaaggatggaggtagaggcggatcacatcgggctcatgcttcaagcttctgctggtttcgacccacgcacagctcccaaggtctacgagaagctaggacaaatcgcgggcaatcagtcagtgctgaaaagctacctctccacccatccttcgagtaagaagcgatcggagctcttgtctcgagccaaggtaatggaggaggcgatgcaactatacagggaagcttgcgccggccacgggaccgaaggcttcctgtaggttgcagctttgaactctcctgcctgtggctgcgtggtaagtcgctcggtggcggtgcctggcacggaaacatgtcctttgttacctgcacggtgacgtccagtaagaagagtgcattctgtgtctgaagatgttcgttctgtgcgttgttactgtctgttcttgtcaggctgaatcagccgcactttggtagcaggatgtgatcgagctgcatcatttgtgattaggagagaacagggaataggagaagagtttctgttaataattgtcttccaagagcagcttttatagtcccatcttccttgggtttaccggcgttgatgatcgtcacgttggttagtttttgtcatctacgccagctagtagtcagctggtgacggaatattcatataatatcgatgtttgaagtagtcagtcacaactcacaaggtatataatatactccatcggtttcc

SEQ ID NO: 32630 - protein, 455 aa, Triticum aestivum
MNPLKNSRSALSRLLRHNPAAGRPQPPAPPPPVPRETAARHYHAAPRRPGFIQSFSRGPLRHEPAALFRQPPARAQAPPPRHYFTSSRRPEVIHFARRRGGARWYHDRRKVAAVVLLAGGGTIVVYFGNLETVPYTNRTHFVLVSPQLERQLGESQFADLKKELAPKILPPLHPDSVGVRLIASEIVRALHRGLADRRSDDFDDASYGDISTDIAVKARDMDADDVMHRVSPGKTAGTAARAQRDDELLDDRWVAESRRRGKARGAQPQTKHLNELNWEVIVVRDKLINAMCLPGGKIVVFTGLLDHFKTDAEIATVLSHEIGHAIARHLPEMITKGMWFTILQLIVLQFIYMPDLINAMSTLLLRLPFSRRMEVEADHIGLMLQASAGFDPRTAPKVYEKLGQIAGNQSVLKSYLSTHPSSKKRSELLSRAKVMEEAMQLYREACAGHGTEGFL

SEQ ID NO: 32631 - protein, 235 aa, Triticum aestivum
MDADDVMHRVSPGKTAGTAARAQRDDELLDDRWVAESRRRGKARGAQPQTKHLNELNWEVIVVRDKLINAMCLPGGKIVVFTGLLDHFKTDAEIATVLSHEIGHAIARHLPEMITKGMWFTILQLIVLQFIYMPDLINAMSTLLLRLPFSRRMEVEADHIGLMLQASAGFDPRTAPKVYEKLGQIAGNQSVLKSYLSTHPSSKKRSELLSRAKVMEEAMQLYREACAGHGTEGFL

SEQ ID NO: 32632 - protein, 229 aa, Triticum aestivum
MHRVSPGKTAGTAARAQRDDELLDDRWVAESRRRGKARGAQPQTKHLNELNWEVIVVRDKLINAMCLPGGKIVVFTGLLDHFKTDAEIATVLSHEIGHAIARHLPEMITKGMWFTILQLIVLQFIYMPDLINAMSTLLLRLPFSRRMEVEADHIGLMLQASAGFDPRTAPKVYEKLGQIAGNQSVLKSYLSTHPSSKKRSELLSRAKVMEEAMQLYREACAGHGTEGFL

SEQ ID NO: 32633 - DNA, 1628 bp, Triticum aestivum
cactaggaacaaaaagaaaaaagaaaaagaggaaggaaggaaaaaatctcccggggcgcaagcaaacgtgacgccacgcctcactccggccttcgtcgtcctcctcttcctccccccactttccccacaatagtttggcgatcgctcgctgccgccgccgcgaccgcgactgaagcctctgctccgctccgctccgctcgccgctggaagatggagcctgaccagagtggcaccgggcagacttctccccgtgggaacgactgggaggtcgtgcagctcaccgcgtcgaactacgcgtctgcgcctggcccggctagaactgaaccttctgacgaggagtctgaaggccaagtgtatggcgcagaagggggtgattcggcagccgcggcactgctgatgtctggccacttctcggttccgcagaatgaggctgagaatctcctcatgggagctgatactagcatagagcagcaggaggcgcgcggcagccagtacgcagtctctgacaagggtgatgatggtgatagggaggaagacccgcaggagaaactgaaggatgatgttcttgacaggatcccgtccttcgacaaagggaaaagcctttcctctgttgatatggaacctgatgatggcagcgagttgcacaggggtagtctggttggaaaagacccagttacgttctcatcctctgtttacaatgcaactgacgctgagaaagaagctaccgagagtgccaaggagaagactgaagaaagtccaactctccaaaatattgaccctgtcactgattcgtccaatattgttgcttccggtgacgagagcaagcctgacggttctggagccccacgcaatgcatggtggcagaagcaacttatatcgctctacaggagcgctaaagagagcaacaagctctggcctatcgttgtggctgctgctgctctgatggggatggcgtatttccggcggcgctggcagaagggcaagctgcagcttcagcaggtcaaattgcaacctgccagcagcaaggaggtaatcgtgggacgccttccttttgatcatactagccaaattttccatgcaactgaacagactagtttggcctgaaattcagagaatcaaccaggccaccgtaccgcttaaccgaatcaaggacattcttgtcgccggcaaccacccgagtccggctcctcacggaaatgctcgattgggctgatgatgataaccatcccgcctgacggatgatgtatcctgaaactagtgtatgcaatggagaaatagccgatgccgcagaacgtatgggcgtttatgcgtgctggctgtgtaattaaaccccaaaactcctcctgggcatgtaaatatacacgagttttgtgtggttgctttccctcctttggaagaactctctccttggccaggttcagtgtgctgctgcttcagtttgtcggccactgtaacttcttccgttgctcccgtggatattttttatctgtcttgttgcgggttgcagtttgtcaggttgtcggccgatatatacacgatgaacttatgatattattgggtgccgaatttttggtttgtgttaaaggaaattttagcctatatatagttgagattacatttgggtccac

SEQ ID NO: 32634 - protein, 297 aa, Triticum aestivum
MEPDQSGTGQTSPRGNDWEVVQLTASNYASAPGPARTEPSDEESEGQVYGAEGGDSAAAALLMSGHFSVPQNEAENLLMGADTSIEQQEARGSQYAVSDKGDDGDREEDPQEKLKDDVLDRIPSFDKGKSLSSVDMEPDDGSELHRGSLVGKDPVTFSSSVYNATDAEKEATESAKEKTEESPTLQNIDPVTDSSNIVASGDESKPDGSGAPRNAWWQKQLISLYRSAKESNKLWPIVVAAAALMGMAYFRRRWQKGKLQLQQVKLQPASSKEVIVGRLPFDHTSQIFHATEQTSLA

SEQ ID NO: 32635 - protein, 235 aa, Triticum aestivum
MSGHFSVPQNEAENLLMGADTSIEQQEARGSQYAVSDKGDDGDREEDPQEKLKDDVLDRIPSFDKGKSLSSVDMEPDDGSELHRGSLVGKDPVTFSSSVYNATDAEKEATESAKEKTEESPTLQNIDPVTDSSNIVASGDESKPDGSGAPRNAWWQKQLISLYRSAKESNKLWPIVVAAAALMGMAYFRRRWQKGKLQLQQVKLQPASSKEVIVGRLPFDHTSQIFHATEQTSLA

SEQ ID NO: 32636 - protein, 219 aa, Triticum aestivum
MGADTSIEQQEARGSQYAVSDKGDDGDREEDPQEKLKDDVLDRIPSFDKGKSLSSVDMEPDDGSELHRGSLVGKDPVTFSSSVYNATDAEKEATESAKEKTEESPTLQNIDPVTDSSNIVASGDESKPDGSGAPRNAWWQKQLISLYRSAKESNKLWPIVVAAAALMGMAYFRRRWQKGKLQLQQVKLQPASSKEVIVGRLPFDHTSQIFHATEQTSLA

SEQ ID NO: 32637 - DNA, 1536 bp, Triticum aestivum
aaaacggatgttcggtcgtgccgtcgtggagtttggctaggcaacgcagctcggatcccgcggaaaaggcaggcaacacaggcagcggcacacggtacagcctcaggagacacagaggcgagatcccgtggcggatcagcggctgcctgtctgaaccggcaacgcatctcctccctcccccctctccagtctccctactccgacgatctatccgtcgagcctcctcaccgcgcgactcgcagcagcgccggagggggaggatggggcggccgccaagcagcgggggccccgcgttccggttcacgcacgcggaggtggcggagatggaggagcacctccgccacctcaacaacgccatcccgcagcgcaacgtcatccagggcctcgccgagaagttcaccgcctccgccgcccgcgccggcaagatccccgtccagtacaagcaggtctggaactggttccagaaccggaggtactcgcagcgggccaggacccccaggggcgcgccgccgccgcaggggaagatgctgcccacgggggccgaggaacaccacccggcctccttcagggctcaggggtcttcctcgtcctaccccggatcccactcaggaaagagtccttcggatggtggccaggccgagtttgaagcaaagtcagctagagatggtgcatggtacgatgttgctgcctttctgtcccacaggctctttgaaacaggggacccggaagtaaaagttcgattttctggatttgggcctgaggaggatgaatggattaatgttcgtaaatgtgtgaggctgcgttctcttccatgtgaatctgcagaatgtgttgctgtgcttcctggggatctcattctttgttttcaggaaggcaaagagcaggccctctattttgacgctcgtgttcttgatgctcaaaggcgcaggcatgatgtaagagggtgccgctgcaggtttcttgttcgttatgatcatgatcactctgaggagattgttcctctgaggaaggtatgccgtcgaccagaaactgatttcaggctccagatcttgcacgcatctagagcggcggcctctgcggatgctcagaatgttagcccagttgagcagaaaccccaaaaggcgcacaagatgatggatgtgaacactgccgaggtgaccgtggttcgcaacccagatcaaggagggccatctgacaagccggctgctcccttaccagctgcgcctgctggcacccacggtgattcagtttcagatgtgcagatggggaatgtggaggttattccaaaagttgaagctgcaaatgaagcacatgatgacaacatgaacgtgggagcgtagttgtttcgcttccctgtgcgcttcggtgtgtacttactaagtccaaaaaaatgtttgcttaggaacttccggtcgaggaaggatggtcgcccggtaactgtaatgtgccgatgtcgacttgtttgctgatgtgtgtacaaagtcttggattgtcggtatctatatagctatatcgtgagacgaatgttgttttcag

SEQ ID NO: 32638 - protein, 445 aa, Triticum aestivum
NGCSVVPSWSLARQRSSDPAEKAGNTGSGTRYSLRRHRGEIPWRISGCLSEPATHLLPPPSPVSLLRRSIRRASSPRDSQQRRRGRMGRPPSSGGPAFRFTHAEVAEMEEHLRHLNNAIPQRNVIQGLAEKFTASAARAGKIPVQYKQVWNWFQNRRYSQRARTPRGAPPPQGKMLPTGAEEHHPASFRAQGSSSSYPGSHSGKSPSDGGQAEFEAKSARDGAWYDVAAFLSHRLFETGDPEVKVRFSGFGPEEDEWINVRKCVRLRSLPCESAECVAVLPGDLILCFQEGKEQALYFDARVLDAQRRRHDVRGCRCRFLVRYDHDHSEEIVPLRKVCRRPETDFRLQILHASRAAASADAQNVSPVEQKPQKAHKMMDVNTAEVTVVRNPDQGGPSDKPAAPLPAAPAGTHGDSVSDVQMGNVEVIPKVEAANEAHDDNMNVGA

SEQ ID NO: 32639 - protein, 359 aa, Triticum aestivum
MGRPPSSGGPAFRFTHAEVAEMEEHLRHLNNAIPQRNVIQGLAEKFTASAARAGKIPVQYKQVWNWFQNRRYSQRARTPRGAPPPQGKMLPTGAEEHHPASFRAQGSSSSYPGSHSGKSPSDGGQAEFEAKSARDGAWYDVAAFLSHRLFETGDPEVKVRFSGFGPEEDEWINVRKCVRLRSLPCESAECVAVLPGDLILCFQEGKEQALYFDARVLDAQRRRHDVRGCRCRFLVRYDHDHSEEIVPLRKVCRRPETDFRLQILHASRAAASADAQNVSPVEQKPQKAHKMMDVNTAEVTVVRNPDQGGPSDKPAAPLPAAPAGTHGDSVSDVQMGNVEVIPKVEAANEAHDDNMNVGA

SEQ ID NO: 32640 - protein, 338 aa, Triticum aestivum
MEEHLRHLNNAIPQRNVIQGLAEKFTASAARAGKIPVQYKQVWNWFQNRRYSQRARTPRGAPPPQGKMLPTGAEEHHPASFRAQGSSSSYPGSHSGKSPSDGGQAEFEAKSARDGAWYDVAAFLSHRLFETGDPEVKVRFSGFGPEEDEWINVRKCVRLRSLPCESAECVAVLPGDLILCFQEGKEQALYFDARVLDAQRRRHDVRGCRCRFLVRYDHDHSEEIVPLRKVCRRPETDFRLQILHASRAAASADAQNVSPVEQKPQKAHKMMDVNTAEVTVVRNPDQGGPSDKPAAPLPAAPAGTHGDSVSDVQMGNVEVIPKVEAANEAHDDNMNVGA

SEQ ID NO: 32641 - DNA, 1723 bp, Triticum aestivum
aaaaaaccctgcccctctctgtttttctctctccctccgaggtttttagggtttcgcatccgcatcagccgccgccggaaccggggaggcggcgatacgtcgcgatgcagccaacataccagccgccaatgaacggccagcacgcgcctcagccgaaggcctctggggctccgccgcctcctctgcagcaggcacccccgccgcagcagtactaccaggcgccgccgcagtactaccagcagggacccccgccggcgatgtggggccacccgcagcagcatatgcctccgcagtacgcgcctccgccgcagcagtacgcgcctcagcctcctcagcagtacgcgccgccgccgcagcattacgcgccgccgccgccgcagtacggagcgcagatggctggcgggccgcctcccggaggcgaggatatcaggtcgctgtggatcggagatctccagtactggatggatgagacctacctctacaacgcctttgcgcctgtggggccgcagcaggtcacctcagtgaaaattatccgcaacaaacatactgggcagcctgagggttatggttttattgaatttcaatctcgagctgctgcggaatatgctcttgggacctttaatgggcagatgatgcctaatgttgaacaagttttcaagctaaactgggcttcttgtagtgctggtgacaagcggggtgacgatggttctgatcacacaatatttgttggtgatttggctgctgatgttactgacgccatgttggaagagatattcaaagccacctacccatcagttaaaggtgctaatgttgttactgacagggccactggtcgctccaaaggatatggttttgtacgttttggagatctaaatgagcagacacgtgctatgactgagatgaatggagtgctattgtctacaagacaaatgaggattgggcctgcagctaacaagaagaatatgggtactcagcagacatattcaactaatgcagggtaccagagctctcaagtaaatgaggcggcgaatgatcccaacaatactacaatctttgtgggcgggttagattccaatatagatgagaactatctaaggcaagtttttactccatatggcgaagttggttatgtgaagattcctgtaggcaagcgttgtggatttgtccaatttaccagcagggcgtgcgctgagcaggccatcagtgcgctgaatgggtctcagattggtagttccaatgttcgtctttcatggggccgtagccaaaacaaacaggctccccagcaggatgcaaaccagggtaatggcaacagctactatggatatcaacagggtcctgatgcatactatggtgcacccaatgtgcaagatcctagcatgcaaaactatggatactctggttatggcagttacgagcagcaacagcagccatctcagcagcagcaacctcctcagcagcagccaccacagcagcaacagcagcagcccccacagcagtgaccattgaggcaatggagcgcaatcacagattcagagctgcatgaactgaatgctaccgcgtcatgagttatcgtataggtgtccttgtttgtaagatgggtcgtatctagtagtactttgaccgttgggcagtagctctagttctattcagtgcttctcttggttttaaattatcaaactatgtccatgactgagttaagcttttaatgttattttggatcacc

SEQ ID NO: 32642 - protein, 498 aa, Triticum aestivum
KTLPLSVFLSPSEVFRVSHPHQPPPEPGRRRYVAMQPTYQPPMNGQHAPQPKASGAPPPPLQQAPPPQQYYQAPPQYYQQGPPPAMWGHPQQHMPPQYAPPPQQYAPQPPQQYAPPPQHYAPPPPQYGAQMAGGPPPGGEDIRSLWIGDLQYWMDETYLYNAFAPVGPQQVTSVKIIRNKHTGQPEGYGFIEFQSRAAAEYALGTFNGQMMPNVEQVFKLNWASCSAGDKRGDDGSDHTIFVGDLAADVTDAMLEEIFKATYPSVKGANVVTDRATGRSKGYGFVRFGDLNEQTRAMTEMNGVLLSTRQMRIGPAANKKNMGTQQTYSTNAGYQSSQVNEAANDPNNTTIFVGGLDSNIDENYLRQVFTPYGEVGYVKIPVGKRCGFVQFTSRACAEQAISALNGSQIGSSNVRLSWGRSQNKQAPQQDANQGNGNSYYGYQQGPDAYYGAPNVQDPSMQNYGYSGYGSYEQQQQPSQQQQPPQQQPPQQQQQQPPQQ

SEQ ID NO: 32643 - protein, 464 aa, Triticum aestivum
MQPTYQPPMNGQHAPQPKASGAPPPPLQQAPPPQQYYQAPPQYYQQGPPPAMWGHPQQHMPPQYAPPPQQYAPQPPQQYAPPPQHYAPPPPQYGAQMAGGPPPGGEDIRSLWIGDLQYWMDETYLYNAFAPVGPQQVTSVKIIRNKHTGQPEGYGFIEFQSRAAAEYALGTFNGQMMPNVEQVFKLNWASCSAGDKRGDDGSDHTIFVGDLAADVTDAMLEEIFKATYPSVKGANVVTDRATGRSKGYGFVRFGDLNEQTRAMTEMNGVLLSTRQMRIGPAANKKNMGTQQTYSTNAGYQSSQVNEAANDPNNTTIFVGGLDSNIDENYLRQVFTPYGEVGYVKIPVGKRCGFVQFTSRACAEQAISALNGSQIGSSNVRLSWGRSQNKQAPQQDANQGNGNSYYGYQQGPDAYYGAPNVQDPSMQNYGYSGYGSYEQQQQPSQQQQPPQQQPPQQQQQQPPQQ

SEQ ID NO: 32644 - protein, 456 aa, Triticum aestivum
MNGQHAPQPKASGAPPPPLQQAPPPQQYYQAPPQYYQQGPPPAMWGHPQQHMPPQYAPPPQQYAPQPPQQYAPPPQHYAPPPPQYGAQMAGGPPPGGEDIRSLWIGDLQYWMDETYLYNAFAPVGPQQVTSVKIIRNKHTGQPEGYGFIEFQSRAAAEYALGTFNGQMMPNVEQVFKLNWASCSAGDKRGDDGSDHTIFVGDLAADVTDAMLEEIFKATYPSVKGANVVTDRATGRSKGYGFVRFGDLNEQTRAMTEMNGVLLSTRQMRIGPAANKKNMGTQQTYSTNAGYQSSQVNEAANDPNNTTIFVGGLDSNIDENYLRQVFTPYGEVGYVKIPVGKRCGFVQFTSRACAEQAISALNGSQIGSSNVRLSWGRSQNKQAPQQDANQGNGNSYYGYQQGPDAYYGAPNVQDPSMQNYGYSGYGSYEQQQQPSQQQQPPQQQPPQQQQQQPPQQ

SEQ ID NO: 32645 - DNA, 1289 bp, Triticum aestivum
atcttttccaagcgcagaggcaaagttgtgcacgaggagggcgtgcggcatcggccaactgcagcgcagcggcgccggcggatcttctctccccgcgccgtcccggagtgctccgtccgtgccagtaagcaaaacctacaggattagaagaagccacaatggaaggaagcatcagcggtccgtcagagaaaagggttgccgtggtgaccggagggaaccgggggatggggctggagatatgccggcagcttgcggggcacgggctcgccgtcgtcttgacggcgagggacgacaagaggggcgctgaggcagccgaaacgctccgggaggaggggctatcggacgtcgcgtttcatcagctggagatcagcgagcccgccagtgccgctcgtctggctgctttcgtaaagaagaagttcggcaagcttgacatactggtcaacaatgccggagtgctcggggtgaccacggacgtcggcgacccggcgacccttcaggaaacgcttgcaggcaaggatgggatggagagagccgaatggctgaggcaacggaccacacagaccacccaggatgcagaggactgcctgaggatcaactaccacggcaacaagaccgtcacggaagccctcctcccgctcctccgatcatcctccgacggcagaattgtcaacgtaacctcagcctgggggctgctcaggtatttcagcggcgacgagctccggcgggagctggacgacgtcgcaaacctcacgacgcagcggctcgacgagatgtcggacctgttcctcgaggacctgggcaagggcaatggcgcgctggagcgccgcgggtggccggccgacccggtctacgcggcctacatggcgtccaaggcgctggtgtgcgcctacaccagggtgatcgccagggaggagggcgccgcgctgcgggtcaactgcgtgcaccccggatacgtcgtcaccgggatgaacgactacaccggcgtgctcacggccgcggagggcgccgccgccgcggttgcagttgcactcgcggagaaggggggcgtcaccggcgcctacttcgaccgcactgaactcggagcgtcctttgtgtgatttctccgtggagcagttgtgacataagtatatctagaattatgttatctttgcaataacacaatgtcatgagttgttccagatatggagaattatgttgtgttcacttttttttctctccgctctcagaagtactctccgttcactattatatgatgttctaacttttttataaatcagatgtttttagac

SEQ ID NO: 32646 - protein, 312 aa, Triticum aestivum
MEGSISGPSEKRVAVVTGGNRGMGLEICRQLAGHGLAVVLTARDDKRGAEAAETLREEGLSDVAFHQLEISEPASAARLAAFVKKKFGKLDILVNNAGVLGVTTDVGDPATLQETLAGKDGMERAEWLRQRTTQTTQDAEDCLRINYHGNKTVTEALLPLLRSSSDGRIVNVTSAWGLLRYFSGDELRRELDDVANLTTQRLDEMSDLFLEDLGKGNGALERRGWPADPVYAAYMASKALVCAYTRVIAREEGAALRVNCVHPGYVVTGMNDYTGVLTAAEGAAAAVAVALAEKGGVTGAYFDRTELGASFV

SEQ ID NO: 32647 - protein, 290 aa, Triticum aestivum
MGLEICRQLAGHGLAVVLTARDDKRGAEAAETLREEGLSDVAFHQLEISEPASAARLAAFVKKKFGKLDILVNNAGVLGVTTDVGDPATLQETLAGKDGMERAEWLRQRTTQTTQDAEDCLRINYHGNKTVTEALLPLLRSSSDGRIVNVTSAWGLLRYFSGDELRRELDDVANLTTQRLDEMSDLFLEDLGKGNGALERRGWPADPVYAAYMASKALVCAYTRVIAREEGAALRVNCVHPGYVVTGMNDYTGVLTAAEGAAAAVAVALAEKGGVTGAYFDRTELGASFV

SEQ ID NO: 32648 - protein, 191 aa, Triticum aestivum
MERAEWLRQRTTQTTQDAEDCLRINYHGNKTVTEALLPLLRSSSDGRIVNVTSAWGLLRYFSGDELRRELDDVANLTTQRLDEMSDLFLEDLGKGNGALERRGWPADPVYAAYMASKALVCAYTRVIAREEGAALRVNCVHPGYVVTGMNDYTGVLTAAEGAAAAVAVALAEKGGVTGAYFDRTELGASFV

SEQ ID NO: 32649 - DNA, 1210 bp, Triticum aestivum
acatcgatgagaaaaaggcagccaaggcgcacacttccaccacacaacgcgcgctttacgagagcagggaaccagaggggaactcgtgcttagctttcctgtagcttcgtttgcaccatccatggccgatccagccgaggagaccgtcgccgcgcccccgccgaccccggcagctcccgccgagggcgccccgccgctgtcggcggagccgccggctagcaccgacgcctcgccggagaaggcggccccgcctgcgcctgcgccggacacgacggtgaggtcccgggggttcaggctgctcggcgaggacacctccgtgcacaaggtgctcggtggcggtaaaactgctgatgtactgttatggaaggacaagaaaacaactgctgtagtgatcggtggcacaactgtcatatgggttttatttgaagtgcttgattaccatctcttaactctgctatcccatgtgatgattggtgtcctggccatcttgttcgtgtggtcgaaagctatgaccttcatcaagaagagtccgccagatattcctgtagtcgagatacctgaagacctcgctgtgaatgtatcacgggcactacgcagcgatgtcaacagatcacttcacttgttgcgcgagattgcaatggggcatgatctgaagaaattccttggtgtgattgctggtctctgggttctgtcagaagttggaagctgctgtgatttcctcaccttgatatatattgctgtcctgatgatccacacggtgccgatcttgtacgacaagtaccaggacaaggtggatcacttcgccggaaaggcccataccgaggcgtgcaagcactacgaggtgctggaccagaaggttctgagcaagataccccgaggaccggcgaaaaccaagaagacctagaatgctgggtgtctcgtgagtgcatgctgggtcgcttgtggttccgtgatcatatgcgtaatgcgacgagacgtcactcgtcttacggtcttgccttctgctcagcattgtattagctatttgtatatgcaactctgaaaacttcgaactgctacctttctactatcgcagtcgcttgtagatacctgtcctgttacttgtgtgtacgtgcggcagatgtgttctcgtgtggatgttcttagtgaaaacctgaatggatgttcttgaaagaaaataacctgctgaatactactggactattaatcc

SEQ ID NO: 32650 - protein, 260 aa, Triticum aestivum; identical to SEQ ID NO: 18097

SEQ ID NO: 32651 - protein, 145 aa, Triticum aestivum; identical to SEQ ID NO: 18098

SEQ ID NO: 32652 - protein, 131 aa, Triticum aestivum
MTFIKKSPPDIPVVEIPEDLAVNVSRALRSDVNRSLHLLREIAMGHDLKKFLGVIAGLWVLSEVGSCCDFLTLIYIAVLMIHTVPILYDKYQDKVDHFAGKAHTEACKHYEVLDQKVLSKIPRGPAKTKKT

SEQ ID NO: 32653 - DNA, 1341 bp, Triticum aestivum
atttctgttaggatgcgtatctgagtttgttattcctttttctgtttctgttaagcgtggcaggaggcgaggcggaggaggaggagaagatagagacgcaacccacgcgcggctagctagggtttgttccatctcccccctctctcgctcgctccctctctctcccgaggagcggaggaaggcggagggccggaggaggaagagaggcgggggatgtcgtcgtcgaactcgccgtgcgcggcgtgcaagctgctgaggcgcaagtgcacgcaggggtgcgtgttcgcgccctacttcccgccggaccagccggccaagttcgccaacgtgcacaaggtgttcggcgccagcaacgtctccaagctgctcaacgagatccccgtggcgcagcgggaggacgccgtcaactcgctcgcctacgaggccgaggcgcgcctgcgcgaccccgtctacggctgcgtcgcctacatctccgtcctccagctcaagatcaagcaggtgcgcgaggagatcgccaacgcgcgcaaggagctcgccggctacatcggccaggcagcctacgcgcccgtcgtccccgtgcagcacccccacgcgcagtacgccgccgccggcatgggcctcgtccagccccacccgcacccgcaccagcagatggcgatgcagcagcagcagcacccgtaccaccagcagcagatcgccgaggcgcagcacctggcggccgtcgtcgaggtggcgcgcgccgggcagcagcagcagcagcagcagcatcaccaccagcaccagcagcacgagatgatgatgatgcgccagacctacgccaacgtccacggcggggccgccgccgggccaacggtggccgtcgagcctccccagcaggccgcggcctacgacggcaccgccccgttcctcatccagcagcaagcgtcgccttccgccctgacctaccgcatggaggagccgtccccgccgccgcagtcctcgggccactcccacgtcgacatgtcccacgcgtcgcagcagcagcgtcatcagcacacggacggcagcgacgaggggagcgggggcgccccgacggcctgatggccatgctcccgcctccttcgcctccctgtgtcgatatttcccccctagctttttttccacggtttctttgatgttcgtttgttgggcacgagtcttttcgtcttcttgatcatatgatatcgaactggcatcgccatggctccccggaaagcatatccatggctcccggaggcggacaagctggtgatcttgctcaagcatatccatggcacactcagaacgatgtcactgttgcattagtttgtgtttggattcatc

SEQ ID NO: 32654 - protein, 288 aa, Triticum aestivum
MSSSNSPCAACKLLRRKCTQGCVFAPYFPPDQPAKFANVHKVFGASNVSKLLNEIPVAQREDAVNSLAYEAEARLRDPVYGCVAYISVLQLKIKQVREEIANARKELAGYIGQAAYAPVVPVQHPHAQYAAAGMGLVQPHPHPHQQMAMQQQQHPYHQQQIAEAQHLAAVVEVARAGQQQQQQQHHHQHQQHEMMMMRQTYANVHGGAAAGPTVAVEPPQQAAAYDGTAPFLIQQQASPSALTYRMEEPSPPPQSSGHSHVDMSHASQQQRHQHTDGSDEGSGGAPTA

SEQ ID NO: 32655 - protein, 155 aa, Triticum aestivum
MGLVQPHPHPHQQMAMQQQQHPYHQQQIAEAQHLAAVVEVARAGQQQQQQQHHHQHQQHEMMMMRQTYANVHGGAAAGPTVAVEPPQQAAAYDGTAPFLIQQQASPSALTYRMEEPSPPPQSSGHSHVDMSHASQQQRHQHTDGSDEGSGGAPTA

SEQ ID NO: 32656 - DNA, 1410 bp, Triticum aestivum
aggcttgtggtgctcccatcccatggcgccgtggctgctgctcccctccttcccgtggcctcccccgccccctcccggctcctcctctggccgcggcggcggaggcggtggaggcgacggcggagattggaagcccaacgtcgtcacggccatcgccggcgtccacctcggccgctccctccgccgtcgcctcgccggcctcctctgctcgccggaggtgcggtctcttgatgtcttaccgagaataggtgacatttggtttggaggatcacagccacttgacacacagcaccttcttgggacgctgggaaatgtgttctccacatcgtttgtttgcagttctgcttttttcggtgggaataggtcaggtgggagatacgtcggtagcggaaatttgcagcccagacggtctcatgggatcaactcgaagaagaggctgtggactaatgtccttcttgctgttaacatcctggcttatatcgctcagatagcatcgcaaggaaagcttcttatgtggggagcaaaggtcaacagcctgattgatagaggggagttttggcgtttggctacatcaacaattcttcatggaaatcttactcatcttgctttcaattgtttttctttgaattcgattggccctactgtggagctcgttactggtcctaaaagatttcttgctgtttatttcacttccgcactggcaggttcactaatgagttatcgctattgtcaatcaccttctgttggcgcatcaggggccatttttggactggttggtgcctatgctgtttatacatggaggcacagaaagcttttggggcatggaagggaaagtttagagcagatcgcacgtgtggtcatcttaaacatgggtatgggtctcctttcaaggggcattgacaactggggtcatctaggaggcttgctcgggggagtggctgcggcatggtttcttggtccagcttggcaaaatcagtatgtaccaaaggagggaagaatggtgttcaaagacagggcacccattcaccagctaataggcagtaaacgatcgcggtaacagcgtgtatgataaccgtgctcctatttttactgtgtatattagctgagaaacgtgggagaggaaggataaaagaaagtaagaaggaagatcgagacaacataccaagcaaagggagcagccgaaaaccatggctgatacctagttttgcagaagaaatcacccaccatgtccatgtgtggcggctgctgagctagctctagctcagaggagaagagcagtgcctctcgagctagttggtgtgtttggatcatttgcaactgttacacttgtgacagggtaggtcaggcgatactgacaattgtattttacgtacatgtttatttatcaagcattgctagcgcctcgttgat

SEQ ID NO: 32657 - protein, 351 aa, Triticum aestivum
GLWCSHPMAPWLLLPSFPWPPPPPPGSSSGRGGGGGGGDGGDWKPNVVTAIAGVHLGRSLRRRLAGLLCSPEVRSLDVLPRIGDIWFGGSQPLDTQHLLGTLGNVFSTSFVCSSAFFGGNRSGGRYVGSGNLQPRRSHGINSKKRLWTNVLLAVNILAYIAQIASQGKLLMWGAKVNSLIDRGEFWRLATSTILHGNLTHLAFNCFSLNSIGPTVELVTGPKRFLAVYFTSALAGSLMSYRYCQSPSVGASGAIFGLVGAYAVYTWRHRKLLGHGRESLEQIARVVILNMGMGLLSRGIDNWGHLGGLLGGVAAAWFLGPAWQNQYVPKEGRMVFKDRAPIHQLIGSKRSR

SEQ ID NO: 32658 - protein, 344 aa, Triticum aestivum
MAPWLLLPSFPWPPPPPPGSSSGRGGGGGGGDGGDWKPNVVTAIAGVHLGRSLRRRLAGLLCSPEVRSLDVLPRIGDIWFGGSQPLDTQHLLGTLGNVFSTSFVCSSAFFGGNRSGGRYVGSGNLQPRRSHGINSKKRLWTNVLLAVNILAYIAQIASQGKLLMWGAKVNSLIDRGEFWRLATSTILHGNLTHLAFNCFSLNSIGPTVELVTGPKRFLAVYFTSALAGSLMSYRYCQSPSVGASGAIFGLVGAYAVYTWRHRKLLGHGRESLEQIARVVILNMGMGLLSRGIDNWGHLGGLLGGVAAAWFLGPAWQNQYVPKEGRMVFKDRAPIHQLIGSKRSR

SEQ ID NO: 32659 - protein, 181 aa, Triticum aestivum
MWGAKVNSLIDRGEFWRLATSTILHGNLTHLAFNCFSLNSIGPTVELVTGPKRFLAVYFTSALAGSLMSYRYCQSPSVGASGAIFGLVGAYAVYTWRHRKLLGHGRESLEQIARVVILNMGMGLLSRGIDNWGHLGGLLGGVAAAWFLGPAWQNQYVPKEGRMVFKDRAPIHQLIGSKRSR

SEQ ID NO: 32660 - DNA, 1762 bp, Triticum aestivum
gttagaggatccacttctgtcttcgtggccgtggccgtggccgcgcaaaaaccactgggcatcggcgcacgaacgcagcatcctcccccatcaccaccaccttcccaaagtccaaactccaatccccttgctcgccaaacccccgttccccaaatacaatccctactcccaccgcgattcccaaatggtaacgctgagcgcctccttttccgccgcgctcgtagtcgaggatttcccatcgttggagagcgatgacaagatggagatgccactggtcaagcaccgcgaggtgttcgacctcgcacagtgtggcgcccgcgccttccgggagcgccgcttcgacgaggctatttcattttattctaaagctcacaatttgagatcaggagatccgattatccttagcaatcgaagttctgctttctgtttgataagtcaagttctgagggagagatcagcagccgactcagagtaccagccattgaatggccttgatcctacaacacatgcagagttagcactgaaggatgcagagaaggtagtaactacccacggtaattctcctaggccatatcttctcaaggcatacgcacttattctgctggagcgatatcaggaagcacgtgagtccccttctggctggtcttcaagttgatcccctcagccatatcctgcaaacctgcctcagtgatctggatagaaatacaaatgctgcagccggagcaagatgcccaaggctagataggactgatgattttgagtgcacattgtgttttaaactattgtttgaaccagttaccacaccatgtgggcacacgttctgtcgctcttgtttacatcagtcaatggatcacggcaataagtgccccatgtgtcggacagttctttttattggtccaagaacttatcctataagcgtaacattgagcaacataattcagaaaaatttccctgaagaatatgctgagaggaggtcagaacatgaaaatatgacatatgcaggcattgatttgatgcctctctttgttatggatgtcgtattaccatgccaaaagatggcactgaacatatttgaacctcgctacaggctgatggtaaggagaataatggaagggagtcatcggatgggaatggttgctattgattctgcgacgggaactgtagctgactgtggttgtgaggtggaaattcttgagtgcgagccccttccagatggacgtttttatctagaggtggaaggttcacgacggtttcgtatcttgcgatcctgggatgaagatgggtaccgtgttgctgaaattgaatggttccaagatgtttctttaccagaaggatcacaagagagaagagatctaattgaaagggccaatgaagcttcagaactggctaggacgtacattaggcgtaccagagaaaccataaggcctgtgggccgggcaagacactttgatcttgagagcattcctggaccacgggaccctgagaagttcagtttttggcttgtcaacttgattaatttgaggccatcggataaattagaactattacgcctctgtgatactcgggagagaatatctcttagccttagattgctgggcaatgcagaacaaggttgccgtgtacagtaacggatttatatttgacgcacaaccattgactaacaatgttaatttgtaatattattttatcacatattctgatgcttgtgaaattcttatgattttatatatgttcttttattctcttacctgcaaaaaaagcc

SEQ ID NO: 32661 - protein, 260 aa, Triticum aestivum
MDHGNKCPMCRTVLFIGPRTYPISVTLSNIIQKNFPEEYAERRSEHENMTYAGIDLMPLFVMDVVLPCQKMALNIFEPRYRLMVRRIMEGSHRMGMVAIDSATGTVADCGCEVEILECEPLPDGRFYLEVEGSRRFRILRSWDEDGYRVAEIEWFQDVSLPEGSQERRDLIERANEASELARTYIRRTRETIRPVGRARHFDLESIPGPRDPEKFSFWLVNLINLRPSDKLELLRLCDTRERISLSLRLLGNAEQGCRVQ

SEQ ID NO: 32662 - protein, 252 aa, Triticum aestivum
MCRTVLFIGPRTYPISVTLSNIIQKNFPEEYAERRSEHENMTYAGIDLMPLFVMDVVLPCQKMALNIFEPRYRLMVRRIMEGSHRMGMVAIDSATGTVADCGCEVEILECEPLPDGRFYLEVEGSRRFRILRSWDEDGYRVAEIEWFQDVSLPEGSQERRDLIERANEASELARTYIRRTRETIRPVGRARHFDLESIPGPRDPEKFSFWLVNLINLRPSDKLELLRLCDTRERISLSLRLLGNAEQGCRVQ

SEQ ID NO: 32663 - protein, 217 aa, Triticum aestivum
LEDPLLSSWPWPWPRKNHWASAHERSILPHHHHLPKVQTPIPLLAKPPFPKYNPYSHRDSQMVTLSASFSAALVVEDFPSLESDDKMEMPLVKHREVFDLAQCGARAFRERRFDEAISFYSKAHNLRSGDPIILSNRSSAFCLISQVLRERSAADSEYQPLNGLDPTTHAELALKDAEKVVTTHGNSPRPYLLKAYALILLERYQEARESPSGWSSS

SEQ ID NO: 32664 - DNA, 1979 bp, Triticum aestivum
atgagaagatcaccatagcactggacaacctcccgatcccgagcagctccgattggaaggccgccgtggcgagatcccgcgcgggcagggcctcgatgggaccaccgccgaccaggtggcccctgctggccgccctcgtcgcggcggcgctgctcgccggcgcggcggcggcgacggaggaggcctacgtcacgctgctctacggcgacgagttcgtcctcggcgtgcgcgtcctgggcaagtccatccgcgacaccggcacgcggcgggacatggtcgtgctcgtctccgacggcgtctccgagtactcgcgggagctcctcgaggctgatggttggatcgtgaagcgtataactttactggctaatcctaaccaagtgagaccaacgaggttttggggtgtctacacaaagttgaagatattcaacatgacaagctacaaaaaggttgtttatcttgatgcagatactgtagttgtaaaaagtatcgaggatgttttcaagtgtaggaagttctgtgggaacttgaagcattctgaaagaatgaattccggagtgatggttgtggagccatctgaaactgttttcaaggatatgattagccaagtagaccggttgccttcctacactggaggggatcaaggttttcttaattcatattatgctgattttgctaactcccgcgtgtatgagccagactcacctttaacacctgaaccggagacacagcgcctttctaccttgtataatgctgatgttggtctttacatgctagccaacaagtggatggttgatgaaaaggaacttagagttattcactacacactaggtccccttaaaccctgggactggtggacagcttggcttgtaaaacctgtggagatatggcaggatgttaggcaaaaacttgaagaatctcttccgggaaccggtgggggaaggaaccctcatgatcagctggtggtcaaatttttattcattcttcccttctgcctgctgttatttggttattaccaatcatgctttcagaactataaggattttccaagtgtgcagtctttatgtgcgtttgcaagaagaggccgtcataagtataagtctgaagaggcacttccatcttattcagcagttggtgtttcatcatctacattttctacttcaaatcaaagaatctcaaacgggccacatctgaagctgccttcttatttcggggcgattgctgtgctaatctgttttatgtctgctggtgtctctcttgcctttgctttcactatcattccacgacaaattatgccatggacaggtctgctactgatgtttgagtggaccttcgtggcattcttcttattgtttggtagctatctccgttttgtctatcgatggggaagtatcagtgcaactcatgtgggatatagcaattctgattcatcagagaatcacatggctacaggccatcatcagcgcaatatatctgacttcgacatggaggcgacattttactggacagggatggctgtcatagctatcattactgtattttcaccaactatcttgggtataactgcattatttacaaagctagggttgatggttgccggtggtgttctgctggcatcttttatgacgtatgcttcggtgcatcttgctatctcagccttccacaagggtcaaaaagataggaatgggtcgagaactagaagaatttgtttctggtgtttgtagtaagctttgtgcctgcattgttaatttagttcatgttgttgtacatttttactcaaggaaattttggtggttccgttggcacagatattccacttttgtaacactgatgccaaatcaaaggtacataggttccaatagttgacatgcagctcgcaggcctgcaagtgtaaagctttttgtctataaaactcttcctgccatttgctcgttgtacaatatgatcggcggttctatattggaactatggaacatgaactc

SEQ ID NO: 32665 - protein, 572 aa, Triticum aestivum
EKITIALDNLPIPSSSDWKAAVARSRAGRASMGPPPTRWPLLAALVAAALLAGAAAATEEAYVTLLYGDEFVLGVRVLGKSIRDTGTRRDMVVLVSDGVSEYSRELLEADGWIVKRITLLANPNQVRPTRFWGVYTKLKIFNMTSYKKVVYLDADTVVVKSIEDVFKCRKFCGNLKHSERMNSGVMVVEPSETVFKDMISQVDRLPSYTGGDQGFLNSYYADFANSRVYEPDSPLTPEPETQRLSTLYNADVGLYMLANKWMVDEKELRVIHYTLGPLKPWDWWTAWLVKPVEIWQDVRQKLEESLPGTGGGRNPHDQLVVKFLFILPFCLLLFGYYQSCFQNYKDFPSVQSLCAFARRGRHKYKSEEALPSYSAVGVSSSTFSTSNQRISNGPHLKLPSYFGAIAVLICFMSAGVSLAFAFTIIPRQIMPWTGLLLMFEWTFVAFFLLFGSYLRFVYRWGSISATHVGYSNSDSSENHMATGHHQRNISDFDMEATFYWTGMAVIAIITVFSPTILGITALFTKLGLMVAGGVLLASFMTYASVHLAISAFHKGQKDRNGSRTRRICFWCL

SEQ ID NO: 32666 - protein, 541 aa, Triticum aestivum
MGPPPTRWPLLAALVAAALLAGAAAATEEAYVTLLYGDEFVLGVRVLGKSIRDTGTRRDMVVLVSDGVSEYSRELLEADGWIVKRITLLANPNQVRPTRFWGVYTKLKIFNMTSYKKVVYLDADTVVVKSIEDVFKCRKFCGNLKHSERMNSGVMVVEPSETVFKDMISQVDRLPSYTGGDQGFLNSYYADFANSRVYEPDSPLTPEPETQRLSTLYNADVGLYMLANKWMVDEKELRVIHYTLGPLKPWDWWTAWLVKPVEIWQDVRQKLEESLPGTGGGRNPHDQLVVKFLFILPFCLLLFGYYQSCFQNYKDFPSVQSLCAFARRGRHKYKSEEALPSYSAVGVSSSTFSTSNQRISNGPHLKLPSYFGAIAVLICFMSAGVSLAFAFTIIPRQIMPWTGLLLMFEWTFVAFFLLFGSYLRFVYRWGSISATHVGYSNSDSSENHMATGHHQRNISDFDMEATFYWTGMAVIAIITVFSPTILGITALFTKLGLMVAGGVLLASFMTYASVHLAISAFHKGQKDRNGSRTRRICFWCL

SEQ ID NO: 32667 - protein, 482 aa, Triticum aestivum
MVVLVSDGVSEYSRELLEADGWIVKRITLLANPNQVRPTRFWGVYTKLKIFNMTSYKKVVYLDADTVVVKSIEDVFKCRKFCGNLKHSERMNSGVMVVEPSETVFKDMISQVDRLPSYTGGDQGFLNSYYADFANSRVYEPDSPLTPEPETQRLSTLYNADVGLYMLANKWMVDEKELRVIHYTLGPLKPWDWWTAWLVKPVEIWQDVRQKLEESLPGTGGGRNPHDQLVVKFLFILPFCLLLFGYYQSCFQNYKDFPSVQSLCAFARRGRHKYKSEEALPSYSAVGVSSSTFSTSNQRISNGPHLKLPSYFGAIAVLICFMSAGVSLAFAFTIIPRQIMPWTGLLLMFEWTFVAFFLLFGSYLRFVYRWGSISATHVGYSNSDSSENHMATGHHQRNISDFDMEATFYWTGMAVIAIITVFSPTILGITALFTKLGLMVAGGVLLASFMTYASVHLAISAFHKGQKDRNGSRTRRICFWCL

SEQ ID NO: 32668 - DNA, 1643 bp, Triticum aestivum
atgctacaagcagttctacaacactgtacggacgcaggaattcaatggcggttgactccatggaatcggtggccttcgtcgcggtgcccttcccggcgcagggccacctgaaccagctcatgcacctctccctgctggccgcgtcgcgggggctctccgtgcactacgcggcgcccgcggcgcacctccggcaggcccgctcgcgcctgcacggctgggatccgcaggccctcggctccctccagttccacgacctcggcgtctccacgttcgagtccccggcgcccgacccgaccgccccgtgccccttcccgaaccacctcatgtccatgtggcagaccttcaccaccgccgcgcgcgccccgctcgccgccctcctggagagcctctcggccacccaccgccgcgtggtcgtcgtgcacgacaggctcaactccttcgccgccgtcgaggcggcgcggctgagcaacggcgagtcgttcgcgctgcagtgcgtggccatctcgtacaacatcgggtggctggacaccgagcacccgctcctgcgcgacaacgacctccagttccaccccatcgacgcctgcatgtccaaggagttcctggagtacgtcttccagacggagaaggagatggaggaacaggggggcgtgcccaccgccggcatggtcatgaacacgtgccgcgcactcgagggcgacttcatggacgccattgcggcccacccggtgttcaaggaccagaagctcttcgcagttgggccactgaacccgctgctggacgcgagcgcccggacgccggcgacgacgcggcacgactgcatggagtggctcgacaagcagccgccgtcatcggtgctctacgtgtccttcgggacgacgtcgtctctcctgggagagcaaatcgcggagctggcagcggcactcaagggcagcaagcagaggttcatctgggtattgcgcgaggctgaccgtgccgacatattcaaggagcccggcgagagcctgcacgacaagctgctctctgagttcactaaagaaaccgaggggactgggctggtgatcaccgggtgggcgccgcagctggagatcctggcgcacggcgccacggcggcattcatgagccactgcggctggaactcgaccatggagagcctgagccacggcaagccgattctggcatggccaatgcattccgaccagccgtgggacgcggagcttctctgcaagtacctcaaggccgggctcctggtgaggccatgggagaagcacagcgaggtggtgccggcggcggccatccaggaggtgatcgaggaggcgatgctcacggacaaagggatggcggtgcggcagcgggcgaaggtgctcggcgaggccgttcgcgccgccgtggcagacggcggctcctcgagcaaaggcctcgacgacttcgttgcttacgtcacgaggtgatcagcgtatctgtgcgtgccatagacagatacgcattgggcggtttgatcattgcttcggatgtgtttgaaactttgaatcatgctttctacgaaagctggatttcagtatacaatgatttgtcgttttcaatgtattcatctactactcatttttaattacacacaagggccgagaagaaagatttggaggaac

SEQ ID NO: 32669 - protein, 481 aa, Triticum aestivum
ATSSSTTLYGRRNSMAVDSMESVAFVAVPFPAQGHLNQLMHLSLLAASRGLSVHYAAPAAHLRQARSRLHGWDPQALGSLQFHDLGVSTFESPAPDPTAPCPFPNHLMSMWQTFTTAARAPLAALLESLSATHRRVVVVHDRLNSFAAVEAARLSNGESFALQCVAISYNIGWLDTEHPLLRDNDLQFHPIDACMSKEFLEYVFQTEKEMEEQGGVPTAGMVMNTCRALEGDFMDAIAAHPVFKDQKLFAVGPLNPLLDASARTPATTRHDCMEWLDKQPPSSVLYVSFGTTSSLLGEQIAELAAALKGSKQRFIWVLREADRADIFKEPGESLHDKLLSEFTKETEGTGLVITGWAPQLEILAHGATAAFMSHCGWNSTMESLSHGKPILAWPMHSDQPWDAELLCKYLKAGLLVRPWEKHSEVVPAAAIQEVIEEAMLTDKGMAVRQRAKVLGEAVRAAVADGGSSSKGLDDFVAYVTR

SEQ ID NO: 32670 - protein, 467 aa, Triticum aestivum
MAVDSMESVAFVAVPFPAQGHLNQLMHLSLLAASRGLSVHYAAPAAHLRQARSRLHGWDPQALGSLQFHDLGVSTFESPAPDPTAPCPFPNHLMSMWQTFTTAARAPLAALLESLSATHRRVVVVHDRLNSFAAVEAARLSNGESFALQCVAISYNIGWLDTEHPLLRDNDLQFHPIDACMSKEFLEYVFQTEKEMEEQGGVPTAGMVMNTCRALEGDFMDAIAAHPVFKDQKLFAVGPLNPLLDASARTPATTRHDCMEWLDKQPPSSVLYVSFGTTSSLLGEQIAELAAALKGSKQRFIWVLREADRADIFKEPGESLHDKLLSEFTKETEGTGLVITGWAPQLEILAHGATAAFMSHCGWNSTMESLSHGKPILAWPMHSDQPWDAELLCKYLKAGLLVRPWEKHSEVVPAAAIQEVIEEAMLTDKGMAVRQRAKVLGEAVRAAVADGGSSSKGLDDFVAYVTR

SEQ ID NO: 32671 - protein, 462 aa, Triticum aestivum
MESVAFVAVPFPAQGHLNQLMHLSLLAASRGLSVHYAAPAAHLRQARSRLHGWDPQALGSLQFHDLGVSTFESPAPDPTAPCPFPNHLMSMWQTFTTAARAPLAALLESLSATHRRVVVVHDRLNSFAAVEAARLSNGESFALQCVAISYNIGWLDTEHPLLRDNDLQFHPIDACMSKEFLEYVFQTEKEMEEQGGVPTAGMVMNTCRALEGDFMDAIAAHPVFKDQKLFAVGPLNPLLDASARTPATTRHDCMEWLDKQPPSSVLYVSFGTTSSLLGEQIAELAAALKGSKQRFIWVLREADRADIFKEPGESLHDKLLSEFTKETEGTGLVITGWAPQLEILAHGATAAFMSHCGWNSTMESLSHGKPILAWPMHSDQPWDAELLCKYLKAGLLVRPWEKHSEVVPAAAIQEVIEEAMLTDKGMAVRQRAKVLGEAVRAAVADGGSSSKGLDDFVAYVTR

SEQ ID NO: 32672 - DNA, 1599 bp, Triticum aestivum
acacacgcgcgcgcgcacacgcaagaaccgcccaagccgaacacacaagcaaagggagggacagcgcgcgagatcgagatgaaggtggaggtggtggacacgacgctggtgacgccgagcgagccgacgccgcggcacacgctgtggctctccaacctcgacctcgccgtgcccaagacgcacacgccgctcgtctactactacccggcgccccccgccggcgacggcggcgagaagcaggaagagttcttcgcgccggagaggctgcgggaggcgctggcgagggcgctggtgccgttctacccgctggcagggcggatggcgacgggccccgagggccggctcgagatcgactgcaacggcgagggcgcgctgttcgtcgtcgcgcgggccgacttcaccggcgacgagatgttccgggacttcgagccctccccggaggcgcgccgcctgctcgtccccttcgccgcctccggcgacccgccctgcctcctcgccatggtccaggtgacgttcctcaagtgcggcggcgtggccgtgggcacgggcatgcaccacgtgaccatggacggcgcgggcgcgatccagttcatccggacgtggacgaccctggcgcgcggcctggacgccgcgtccgtgcacccgtccccgccggtgcacgaccgcacggtgctgcgcgcgcgctctcccccgcatgccaccttcgagcacccggtctactccccgagcaacctcaacggcctgccccgccccttcgtcacccgcgtctacgccgtgtcccccaagctcctcgccggcatcaagtccagctgcgcgcccggcgtgtccacctactgcgcgctcaccgcgcacctgtggcgcgccatgtgcgtggcccgcgggctggcccccgacgccgagtcgcggctgcgcgtgccggccaacatccggcagcgcctgcgcccgcagctgccggccaactacttcggcaacgccatcgtgcgggacctggtgacggtgcgcgtcggcgacgtgctgtcgcagccgctggggttcgtggcggagcggatcaagcgcgcggtggcgcgggtggacgacgccttcgtgcgctccgtcatcgactacctggaggtggagtcggagaagggcagccaggcggcgcgcgggcagttcatgccggagacggacctgtgggtggtgagctggctgggcatgcccatccacgacgccgacttcggctggggctgccccaagttcgtggcgccggcgcagatgttcggcagcggcacggcctacgtcacgcaggcgcccgacaaggacgacggcgtgtccgtgctgttcgcgctcgagccagagtacctgcagtgcttcgagaaggccttctacggggagtgaccgaccaaagccttctacggtgatgcgcctttcaaagagccacttgggagttgggatctcgagtccgtcgatagtgtggagtgctgtatcataacgcaacagatactgcggaagtgtcgaggttgctgcttgtttctcgcgcctttcttcactgctactatgtgacattgtgggctaactattatctatacaaagtctaaatgaaaatggcctcaggtttagctc

SEQ ID NO: 32673 - protein, 464 aa, Triticum aestivum
TRARAHARTAQAEHTSKGRDSARDRDEGGGGGHDAGDAERADAAAHAVALQPRPRRAQDAHAARLLLPGAPRRRRRREAGRVLRAGEAAGGAGEGAGAVLPAGRADGDGPRGPARDRLQRRGRAVRRRAGRLHRRRDVPGLRALPGGAPPARPLRRLRRPALPPRHGPGDVPQVRRRGRGHGHAPRDHGRRGRDPVHPDVDDPGARPGRRVRAPVPAGARPHGAARALSPACHLRAPGLLPEQPQRPAPPLRHPRLRRVPQAPRRHQVQLRARRVHLLRAHRAPVARHVRGPRAGPRRRVAAARAGQHPAAPAPAAAGQLLRQRHRAGPGDGARRRRAVAAAGVRGGADQARGGAGGRRLRALRHRLPGGGVGEGQPGGARAVHAGDGPVGGELAGHAHPRRRLRLGLPQVRGAGADVRQRHGLRHAGARQGRRRVRAVRARARVPAVLREGLLRGVTDQSLLR

SEQ ID NO: 32674 - protein, 457 aa, Triticum aestivum
THARAHTQEPPKPNTQAKGGTAREIEMKVEVVDTTLVTPSEPTPRHTLWLSNLDLAVPKTHTPLVYYYPAPPAGDGGEKQEEFFAPERLREALARALVPFYPLAGRMATGPEGRLEIDCNGEGALFVVARADFTGDEMFRDFEPSPEARRLLVPFAASGDPPCLLAMVQVTFLKCGGVAVGTGMHHVTMDGAGAIQFIRTWTTLARGLDAASVHPSPPVHDRTVLRARSPPHATFEHPVYSPSNLNGLPRPFVTRVYAVSPKLLAGIKSSCAPGVSTYCALTAHLWRAMCVARGLAPDAESRLRVPANIRQRLRPQLPANYFGNAIVRDLVTVRVGDVLSQPLGFVAERIKRAVARVDDAFVRSVIDYLEVESEKGSQAARGQFMPETDLWVVSWLGMPIHDADFGWGCPKFVAPAQMFGSGTAYVTQAPDKDDGVSVLFALEPEYLQCFEKAFYGE

SEQ ID NO: 32675 - protein, 431 aa, Triticum aestivum
MKVEVVDTTLVTPSEPTPRHTLWLSNLDLAVPKTHTPLVYYYPAPPAGDGGEKQEEFFAPERLREALARALVPFYPLAGRMATGPEGRLEIDCNGEGALFVVARADFTGDEMFRDFEPSPEARRLLVPFAASGDPPCLLAMVQVTFLKCGGVAVGTGMHHVTMDGAGAIQFIRTWTTLARGLDAASVHPSPPVHDRTVLRARSPPHATFEHPVYSPSNLNGLPRPFVTRVYAVSPKLLAGIKSSCAPGVSTYCALTAHLWRAMCVARGLAPDAESRLRVPANIRQRLRPQLPANYFGNAIVRDLVTVRVGDVLSQPLGFVAERIKRAVARVDDAFVRSVIDYLEVESEKGSQAARGQFMPETDLWVVSWLGMPIHDADFGWGCPKFVAPAQMFGSGTAYVTQAPDKDDGVSVLFALEPEYLQCFEKAFYGE

SEQ ID NO: 32676 - DNA, 1178 bp, Triticum aestivum
agcttccggactccacgcgaaccttgatctcgtctccttcctcccctctggcggcgccactccgatcgatcctccccgtccgcgaccaatatgaggagaggctacagctacagcccatccccaccaccgagaggctacaggggaagggcccgtagcccaagtccccgtgatcgttatgatggtcggggtagagatctcccaaccagtcttttggtcaggaaccttcgtcgtgactgcaggccagatgaccttcgccggccatttgcacagtttggtcgtcttaaagacgtatatattccaagggattactatactcatggaagtaatcttttgaagacaagtgttaagagtactgttgaagagaaggaaagatagagaagttgcaagttaagaaacatgcagttaaagattattgttgaagagaatggaagaaatagagacttgcaagttaagagacatacaaatgcaactaagatcactattgaagagaacggaagatatagttacaggtttaagagatttgcaagtgatcatgaagagttcgaagtctgtattagaactcttatgaagtgcaagggagccacggggatttgggtttgtgcagtactttgatcccaacgatgcggcagacgcaaaatactacatggatggacaggtcattcttggtagagaagttgcagttgtttttgcacaggagaacagaaagaagcctgctgagatgagaaccagagaaagtagcagaggtcggtcttacgatcggcggcactctccttccccaagggggcggccatcttaccgcggccgtagctactcaaggtctccatcacctcggcccgcaaggcggaggttcagagacgagtctccctcgcgctcccgctcgcccagcggatcgaggagtgcgagtccattggatgggaagtacggcaggtcctcacgaagagagaggtcgatttcggttagcggttgaagcatcagtagctctgctcgggtctctagaactgtagtggacttgctcgtgggaatctaagtttgctatcgcttttgtgaaccgcgctaaccgtggatttatagagagaagattgccgtcgtgtatcagcaagagtatgtcaaactgtgtctgcggctctgtacctttgcactagattatttagcgcataaataaaatgactctgcattgc

SEQ ID NO: 32677 - protein, 107 aa, Triticum aestivum
MDGQVILGREVAVVFAQENRKKPAEMRTRESSRGRSYDRRHSPSPRGRPSYRGRSYSRSPSPRPARRRFRDESPSRSRSPSGSRSASPLDGKYGRSSRRERSISVSG

SEQ ID NO: 32678 - protein, 94 aa, Triticum aestivum
MRRGYSYSPSPPPRGYRGRARSPSPRDRYDGRGRDLPTSLLVRNLRRDCRPDDLRRPFAQFGRLKDVYIPRDYYTHGSNLLKTSVKSTVEEKER

SEQ ID NO: 32679 - protein, 82 aa, Triticum aestivum
MRTRESSRGRSYDRRHSPSPRGRPSYRGRSYSRSPSPRPARRRFRDESPSRSRSPSGSRSASPLDGKYGRSSRRERSISVSG

SEQ ID NO: 32680 - DNA, 2011 bp, Triticum aestivum
atccctgtctcccccctccctcttaactgcaagcaagcaatgggggctcccaaatgggtggttgcgccattggcgctgctgctcctcctgcagctcgccggcgcgtcccatgacgtccgacggagccttgaggccgaggcggcgacgccgtccgtgccggcctccattcttagccccctgctccggacgggctaccacttccaaccccccatgaactggatcaacgatccgaatggtccgctctactacaagggatggtaccacctgttctaccagtacaaccccaagggcgcggtgtggggcaacatcatctgggcgcactcggtgtcgcgcgacctcatcaactggatggccctcgaccccgccatcaagcccagcattccgaccgaccagtacggcgtctggtccggctcggcgacgatcctgcccaacggcacggtggcgatgctctacaccggcatcgaccgcccgggcaccaactaccagatccagaacatcgccttccccaaggacccctccgacccgctgctccgcgagtgggtcaagcccggctacaaccccatcgccgtccccgaggccggcatcaacgccacgcagttccgcgacccgaccaccgcctggcacgccggcgatggcctctggcgcatgctcgtgggcgggctcaagcccggcacgctccgcggcatggccatcctgtaccggagcagggacttcaagcactgggtccgcgccaagcacccgctccactcggccctcaccggcatgtgggagtgccccgacttcttccccgtgcgcgagcccgggaagacggacggcctcgacacctccgagttcggcccgcgctacaagtacgtgctcaagaacagcctcgacctcacccgctacgactactacaccgtgggcacctacaacaaccgcacggagcggtacgtgcccgacaaccccaccggcgacgtctaccagcggctccagtacgactacggcaacttctacgcgtccaagaccttctacgacccggccaagaaccgccgcgtgctgctgggctgggccaacgagtccgacagcgtcgcgcacgacaacgccaagggatgggccggcatccacgcgatcccgaggaagatatggctggaccccagcggcaagcagctgctgcagtggcccgtggaggagctggaccagctgaggggcaaggctgtcagcgtgggtgacaagctcgtcaagcccggccagcactttgaggtcactggcctgcagtcctaccagtctgacgtggaggtgagcttcgaggtgtcgagcctggacaaggcggagccgttcgatccggcctacgccaacgacgcgcagaagctctgcgggatgaagaacgccgacgtcaagggcggggtggggcccttcggcctctgggtcctggcctctgacaacctggccgagaagaccgccgtgttcttcagagtcttcaaggatgggcatggcaagcctctcgtcctcatgtgcagtgaccccaccaagtcatctctcaccccgggtctatacaagccgacttttgccgggtttgtcgacaccgacatttcgtccgggaagatctctctgagaagcttgatcgaccgatcggtggttgagagcttcggcgccggagggaagacctgcatcctatcgagagtgtacccatccatggcgatcgggaaagacgcacacctttatgtgttcaacaacggggtgaccgatatcaaggtgtccaaactaacggcgtgggagatgaaaaaaccaatgatgaatggtgcctaagtagtatataccgtatatgttttctcatgagtttaagtttttgttgaatgccattcgacatcgatgcacaccacgcaactgattgctcgtcttaatgaagacctctttgagtagaagtggttagagaaatttgttgtacaattgataatttctgtcacgtgttgtacgaataaacatgatgatcccacgctgaagacaataaagaccttaatgaatttcttctttc

SEQ ID NO: 32681 - protein, 594 aa, Triticum aestivum
IPVSPLPLNCKQAMGAPKWVVAPLALLLLLQLAGASHDVRRSLEAEAATPSVPASILSPLLRTGYHFQPPMNWINDPNGPLYYKGWYHLFYQYNPKGAVWGNIIWAHSVSRDLINWMALDPAIKPSIPTDQYGVWSGSATILPNGTVAMLYTGIDRPGTNYQIQNIAFPKDPSDPLLREWVKPGYNPIAVPEAGINATQFRDPTTAWHAGDGLWRMLVGGLKPGTLRGMAILYRSRDFKHWVRAKHPLHSALTGMWECPDFFPVREPGKTDGLDTSEFGPRYKYVLKNSLDLTRYDYYTVGTYNNRTERYVPDNPTGDVYQRLQYDYGNFYASKTFYDPAKNRRVLLGWANESDSVAHDNAKGWAGIHAIPRKIWLDPSGKQLLQWPVEELDQLRGKAVSVGDKLVKPGQHFEVTGLQSYQSDVEVSFEVSSLDKAEPFDPAYANDAQKLCGMKNADVKGGVGPFGLWVLASDNLAEKTAVFFRVFKDGHGKPLVLMCSDPTKSSLTPGLYKPTFAGFVDTDISSGKISLRSLIDRSVVESFGAGGKTCILSRVYPSMAIGKDAHLYVFNNGVTDIKVSKLTAWEMKKPMMNGA

SEQ ID NO: 32682 - protein, 581 aa, Triticum aestivum
MGAPKWVVAPLALLLLLQLAGASHDVRRSLEAEAATPSVPASILSPLLRTGYHFQPPMNWINDPNGPLYYKGWYHLFYQYNPKGAVWGNIIWAHSVSRDLINWMALDPAIKPSIPTDQYGVWSGSATILPNGTVAMLYTGIDRPGTNYQIQNIAFPKDPSDPLLREWVKPGYNPIAVPEAGINATQFRDPTTAWHAGDGLWRMLVGGLKPGTLRGMAILYRSRDFKHWVRAKHPLHSALTGMWECPDFFPVREPGKTDGLDTSEFGPRYKYVLKNSLDLTRYDYYTVGTYNNRTERYVPDNPTGDVYQRLQYDYGNFYASKTFYDPAKNRRVLLGWANESDSVAHDNAKGWAGIHAIPRKIWLDPSGKQLLQWPVEELDQLRGKAVSVGDKLVKPGQHFEVTGLQSYQSDVEVSFEVSSLDKAEPFDPAYANDAQKLCGMKNADVKGGVGPFGLWVLASDNLAEKTAVFFRVFKDGHGKPLVLMCSDPTKSSLTPGLYKPTFAGFVDTDISSGKISLRSLIDRSVVESFGAGGKTCILSRVYPSMAIGKDAHLYVFNNGVTDIKVSKLTAWEMKKPMMNGA

SEQ ID NO: 32683 - protein, 524 aa, Triticum aestivum
MNWINDPNGPLYYKGWYHLFYQYNPKGAVWGNIIWAHSVSRDLINWMALDPAIKPSIPTDQYGVWSGSATILPNGTVAMLYTGIDRPGTNYQIQNIAFPKDPSDPLLREWVKPGYNPIAVPEAGINATQFRDPTTAWHAGDGLWRMLVGGLKPGTLRGMAILYRSRDFKHWVRAKHPLHSALTGMWECPDFFPVREPGKTDGLDTSEFGPRYKYVLKNSLDLTRYDYYTVGTYNNRTERYVPDNPTGDVYQRLQYDYGNFYASKTFYDPAKNRRVLLGWANESDSVAHDNAKGWAGIHAIPRKIWLDPSGKQLLQWPVEELDQLRGKAVSVGDKLVKPGQHFEVTGLQSYQSDVEVSFEVSSLDKAEPFDPAYANDAQKLCGMKNADVKGGVGPFGLWVLASDNLAEKTAVFFRVFKDGHGKPLVLMCSDPTKSSLTPGLYKPTFAGFVDTDISSGKISLRSLIDRSVVESFGAGGKTCILSRVYPSMAIGKDAHLYVFNNGVTDIKVSKLTAWEMKKPMMNGA

SEQ ID NO: 32684 - DNA, 2057 bp, Triticum aestivum
acgaaccaatccatccaatccctagtccctaggaaacaaggaggcgaaggaccaccagaccggcctcttctcgacgcggctccgccgctccgccgctccggccccgccgaccagcacgagggtttactgtcgttggctgaatcgagagctcgcgcgttcgtgctagtcgctaatccgcggaccggcggtcgttgtgtcagttgattcgccatggggagcaaggggcgcatgcctcctccttaccaccaccggccgctcccaggtcccggctctggcccgccgcatggcatgatgcaccatgatccgtacggcccgagcatgcaccaaccgccagggccggggccatacccctacgatatgttgccgccgcctgagatcctggagcagaagctcgcggcgcagtgtggagagatacagaagctggcggtggagaacgaacggctcgccgcgagccatgcgtctctgaggaaagagctcgctgccgcgcagcaggagctgcagaggatacaggcgcagggggaggcggcgaaggccgcccaggagcaggagatgagggggctccttgataaggctgccaagatggaggccgatttgaagtcctacgagtctgtcaagggcggacctgcagcaggtgcacgccgaggcgcagaacctggcggcgggcaaggcagcatttgttggcggatgcgcagaagctgaacaaagacctgcagaggaactttggggaggcgcagcagctgccagcactcacggctgatcttgatgctgctagacaggaatatcagcacctcagggccgcatatgagtatgaaaggaaactgaaggtggaccactccgagtcgctgcagggaatgaagaaaaattatgactccatggttacagagttagagaagcttcgtgctgagttgacaaacacaactaatattgacagaagtggtactttgtacaatcctaattttgctcagaaggatggcggtacatctagccaccattctgcttatgatggtggctatggggttgcacaggctaggacgccccctggtatgccagaccctttaagcggaagcccagctggaactgctcctcgttctggatatgatccatcaagagggaattcatatgagacttctcgtcttgctagagtccatgatgcatcaaggggtgctactggttacgactctctgaaagttgctggatatgatacttctagaatgcctgcacttggagctcaggcagcggctccaactgctcatgggagtagtgctggttactatggatcaagtcaggtcacaccaccttcgcatgcacgggcaccaggtgcacccacctatggatctgcacaggtgccaccatcatatgcttctgggctagtcccatcttcatcatacggcgcaacaacagctcagggactaccatcatatggacaaacacaggctccatcttatgcacacacacagatgccaccatcctatggactagcacaggcatcatcacattttgccccaacccagggggggtcaccgtacgggttgtctgcacagcctcagggctatggatccgcgcaagcagcacctaacattggtggtgcttatcaagctccacatggacgcagataaattggtgataaccgtactttgttgtgatcttgttggcgagagagacatggcgctgcttccttgtttaccagagtcaaatttagtttctgcagctaccacggtaccaaactgctgttttatcggtctgatacaaatctttcttgcaatctgtaagagattatatgtgcaagcacatttgtttctgagatggcgatgacttccataaatatgtgttgtgatggttttaaaccattttctatgagatggtgatgtctcgaggttaggcaagaagtaacaatactgtaaatttcagctagttgtatactgtttattttgcattttagttaccaggtgatattcagtgactgccaattgagttgcatgtatggtatgatctgtgcacctgctagtccttattctaaaatatttatcgtatccagtaaccatcttggttgttcgagc

SEQ ID NO: 32685 - protein, 254 aa, Triticum aestivum
MKKNYDSMVTELEKLRAELTNTTNIDRSGTLYNPNFAQKDGGTSSHHSAYDGGYGVAQARTPPGMPDPLSGSPAGTAPRSGYDPSRGNSYETSRLARVHDASRGATGYDSLKVAGYDTSRMPALGAQAAAPTAHGSSAGYYGSSQVTPPSHARAPGAPTYGSAQVPPSYASGLVPSSSYGATTAQGLPSYGQTQAPSYAHTQMPPSYGLAQASSHFAPTQGGSPYGLSAQPQGYGSAQAAPNIGGAYQAPHGRR

SEQ ID NO: 32686 - protein, 247 aa, Triticum aestivum
MVTELEKLRAELTNTTNIDRSGTLYNPNFAQKDGGTSSHHSAYDGGYGVAQARTPPGMPDPLSGSPAGTAPRSGYDPSRGNSYETSRLARVHDASRGATGYDSLKVAGYDTSRMPALGAQAAAPTAHGSSAGYYGSSQVTPPSHARAPGAPTYGSAQVPPSYASGLVPSSSYGATTAQGLPSYGQTQAPSYAHTQMPPSYGLAQASSHFAPTQGGSPYGLSAQPQGYGSAQAAPNIGGAYQAPHGRR

SEQ ID NO: 32687 - protein, 190 aa, Triticum aestivum
MPDPLSGSPAGTAPRSGYDPSRGNSYETSRLARVHDASRGATGYDSLKVAGYDTSRMPALGAQAAAPTAHGSSAGYYGSSQVTPPSHARAPGAPTYGSAQVPPSYASGLVPSSSYGATTAQGLPSYGQTQAPSYAHTQMPPSYGLAQASSHFAPTQGGSPYGLSAQPQGYGSAQAAPNIGGAYQAPHGRR

SEQ ID NO: 32688 - DNA, 1315 bp, Triticum aestivum
actgagacaaagacaacttcatcttgcttactgcatcctctttcttcaagagagcacaaccaccaaggagagcaagaccaggatcagcaaagaaacatccaagaaatccaacggctgacgagtcatggaggctgccgagttcagtgcagcaactggctgccagcatacaggagccaccaaggcagtacttgctcagagagcaagaaccgcttggtgggaacctggctggtaccgagatgccggagcccattccaacaatcgatctcggcttgctgtccgcatccaacgatgcggaggaggccgccaagctgcggtcagcgctgcagacctggggattcttcaaggtttctgaccatggaatggagacctctctcatggattctgtgatgaacgcatcaagggattttttccgcctgccgctcgaagagaagagaaagtacagtaacataataggcgggaaacatttccagatggaagggtatggaactgaccaggtgaaaactcaagatcaaaggctggactggtccgatcggctgcatcttaaagtggagccagaggatgagagaaaccttgcccattggcccatacatccaaaatctttcagggatgacctgcatgagtacacatcgaagagcaagagaatcaaagacgacatccttcgggcagtggccaagctattggagctcgatgaagattgcctagttaaccagtttagcaacagggctctcacttatgctagattcaattactatcctccatgtccaagacctgatcctgtcttgggcatcaaacctcattctgatgtctatgctcttacagttcttctaatggacaaggatgtcgctgggctgcagtttgtcagagatggaacgtggtacaatgttccatctgcgtctaactacaccttactgatcaacgttggtgttacaatggagataatgaccaacgggatcttcaagggaccagtacatagggttgtgactaattctgagaaagagaggatgtcagtggccgtgttctatggtctggatcctgaaagagagattggaccgatagctcagatgttgactgaggaccaaccggcgcgatacagggaaatgaaggtcaaggatttcctagtcgcgcaccttgagcatttctctcgaggagaaagagttgtcgattcgttaaggatatgatcaaggtgagtttggtttggtgccgcaatacccatggaataaagaatttgtgacttgccgattcgttaaggatataaaacaaggtgactttacttctataaggcgatgaatctggtgaaaataaagaatttgatccc

SEQ ID NO: 32689 - protein, 313 aa, Triticum aestivum
MPEPIPTIDLGLLSASNDAEEAAKLRSALQTWGFFKVSDHGMETSLMDSVMNASRDFFRLPLEEKRKYSNIIGGKHFQMEGYGTDQVKTQDQRLDWSDRLHLKVEPEDERNLAHWPIHPKSFRDDLHEYTSKSKRIKDDILRAVAKLLELDEDCLVNQFSNRALTYARFNYYPPCPRPDPVLGIKPHSDVYALTVLLMDKDVAGLQFVRDGTWYNVPSASNYTLLINVGVTMEIMTNGIFKGPVHRVVTNSEKERMSVAVFYGLDPEREIGPIAQMLTEDQPARYREMKVKDFLVAHLEHFSRGERVVDSLRI

SEQ ID NO: 32690 - protein, 272 aa, Triticum aestivum
METSLMDSVMNASRDFFRLPLEEKRKYSNIIGGKHFQMEGYGTDQVKTQDQRLDWSDRLHLKVEPEDERNLAHWPIHPKSFRDDLHEYTSKSKRIKDDILRAVAKLLELDEDCLVNQFSNRALTYARFNYYPPCPRPDPVLGIKPHSDVYALTVLLMDKDVAGLQFVRDGTWYNVPSASNYTLLINVGVTMEIMTNGIFKGPVHRVVTNSEKERMSVAVFYGLDPEREIGPIAQMLTEDQPARYREMKVKDFLVAHLEHFSRGERVVDSLRI

SEQ ID NO: 32691 - protein, 267 aa, Triticum aestivum
MDSVMNASRDFFRLPLEEKRKYSNIIGGKHFQMEGYGTDQVKTQDQRLDWSDRLHLKVEPEDERNLAHWPIHPKSFRDDLHEYTSKSKRIKDDILRAVAKLLELDEDCLVNQFSNRALTYARFNYYPPCPRPDPVLGIKPHSDVYALTVLLMDKDVAGLQFVRDGTWYNVPSASNYTLLINVGVTMEIMTNGIFKGPVHRVVTNSEKERMSVAVFYGLDPEREIGPIAQMLTEDQPARYREMKVKDFLVAHLEHFSRGERVVDSLRI

SEQ ID NO: 32692 - DNA, 1429 bp, Triticum aestivum
cttttttcgcttcactccattctcaaaccatggcggagcacaagcgtacagtttccaccctcgttctcctcctcctcttcttctcggcgccgacgaatgccacacggccaccagcaacgctccgcatccccgtcgtccaccgcgacgcggtcttcccgccgccgccgggcgccagccgtggtagcctcctaagccgccgcgcggctgccgacgccgcgcggctgccgacgccgcgcgctacgcctccctcaaggcgtccctcgggcctcggcctccgctcctcctccgcgcacgacgaccgcctccactccccggtcatgtccgggctccccttcgacagcggcgagtacttcgcgtccgtcggcgtgggcaccccgtccaccagcgcgctgctggtcatcgacaccgggagcgacctcatctggctccagtgcaaaccctgccgccgctgccaccgccagatgagcccgctctacgaccccaagggctccagcacctaccgccagatcccctgctcgtcgccgcggtgcttccctcgccatggctgcgacaccagcaccggggcctgcgggtacgccatggtctacggcgacggctccggcagcaggggcaacctcgccaccgacaggctcgtcttctccaacgacacgtccgtggacagcgtcgtcatcgggtgcggccacgacaacgcggagctgttcgactcgtcggccggggtgctgggcgtcggccgcggcgccggctccctggcgacgcaggtggcgccgacctacgggcgctacttcgcctactgcctcggcgaccgcacgtccgtcgcgcggagcagcgcctcgtacctcgccttcggccgcacgccggagccgccgtccacggccttcaccccgctgctgtccaacccgcggcgccccaacctgtactacgtgaacatggccggcttcagcgtcggcggcgagcgtgtcgccggcgggttctgcagctccagcctctggctcgacccggcgaccgggcggggcggcgtggtggtggactcgggcacgtccatatcgcggctccccagggatgtgtacgcggcgctgcgcgacgccttcgacgcgcgcgcggccgcggccgggatgcggaggctggcgcggggcatctcggtgttcgacgcgtgctacgagctccgaggcgccagcgtgccggcggtggtgctgcacttcgctggcggcgcggacgtggcgctgcccccggagaactacttcatacccgagcagggcgggaagtaccactgcctggcgctggaggcgacggacgacgggctcagcgtgctcggcaacgtcctgcagcagggattccgggtcgtgttcgatgtcgagaaagaacgtgtcgggttcgcgccaaatggctgctaagcttgatcaacatttatttacacggttgtttaacctgc

SEQ ID NO: 32693 - protein, 462 aa, Triticum aestivum
FFASLHSQTMAEHKRTVSTLVLLLLFFSAPTNATRPPATLRIPVVHRDAVFPPPPGASRGSLLSRRAAADAARLPTPRATPPSRRPSGLGLRSSSAHDDRLHSPVMSGLPFDSGEYFASVGVGTPSTSALLVIDTGSDLIWLQCKPCRRCHRQMSPLYDPKGSSTYRQIPCSSPRCFPRHGCDTSTGACGYAMVYGDGSGSRGNLATDRLVFSNDTSVDSVVIGCGHDNAELFDSSAGVLGVGRGAGSLATQVAPTYGRYFAYCLGDRTSVARSSASYLAFGRTPEPPSTAFTPLLSNPRRPNLYYVNMAGFSVGGERVAGGFCSSSLWLDPATGRGGVVVDSGTSISRLPRDVYAALRDAFDARAAAAGMRRLARGISVFDACYELRGASVPAVVLHFAGGADVALPPENYFIPEQGGKYHCLALEATDDGLSVLGNVLQQGFRVVFDVEKERVGFAPNGC

SEQ ID NO: 32694 - protein, 453 aa, Triticum aestivum
MAEHKRTVSTLVLLLLFFSAPTNATRPPATLRIPVVHRDAVFPPPPGASRGSLLSRRAAADAARLPTPRATPPSRRPSGLGLRSSSAHDDRLHSPVMSGLPFDSGEYFASVGVGTPSTSALLVIDTGSDLIWLQCKPCRRCHRQMSPLYDPKGSSTYRQIPCSSPRCFPRHGCDTSTGACGYAMVYGDGSGSRGNLATDRLVFSNDTSVDSVVIGCGHDNAELFDSSAGVLGVGRGAGSLATQVAPTYGRYFAYCLGDRTSVARSSASYLAFGRTPEPPSTAFTPLLSNPRRPNLYYVNMAGFSVGGERVAGGFCSSSLWLDPATGRGGVVVDSGTSISRLPRDVYAALRDAFDARAAAAGMRRLARGISVFDACYELRGASVPAVVLHFAGGADVALPPENYFIPEQGGKYHCLALEATDDGLSVLGNVLQQGFRVVFDVEKERVGFAPNGC

SEQ ID NO: 32695 - protein, 357 aa, Triticum aestivum
MSGLPFDSGEYFASVGVGTPSTSALLVIDTGSDLIWLQCKPCRRCHRQMSPLYDPKGSSTYRQIPCSSPRCFPRHGCDTSTGACGYAMVYGDGSGSRGNLATDRLVFSNDTSVDSVVIGCGHDNAELFDSSAGVLGVGRGAGSLATQVAPTYGRYFAYCLGDRTSVARSSASYLAFGRTPEPPSTAFTPLLSNPRRPNLYYVNMAGFSVGGERVAGGFCSSSLWLDPATGRGGVVVDSGTSISRLPRDVYAALRDAFDARAAAAGMRRLARGISVFDACYELRGASVPAVVLHFAGGADVALPPENYFIPEQGGKYHCLALEATDDGLSVLGNVLQQGFRVVFDVEKERVGFAPNGC

SEQ ID NO: 32696 - DNA, 1937 bp, Triticum aestivum
ctattccaccgccccccttcctcccgccaccagcccaacctcgccgccggcctcactctccctctatcctccgccccaccgcccggcctcccaccaccggagcgcgccgccctccccgtcgaagaaaccagaacccctcgccctccgcgtgccctcgtcagctcggccgcgatgatctccgccatgtcctgggtccccaggggcgccgccaagagcgtccccatcgaggcggagccgcccaccaaggaggagatcgaggaggccatgaagaaaatcgccctcggcagagaggccgggagcgacgccgacgacgcggacggggacgaggacgacgacgccgtgatggaggtcgacggcgccgaggacgaggaggtcgacgaggtcgcccaggccaaggccgccgccaaggcgctcgggaccaagagcagctcgggctcggccgccgtcggcgacgtttccgacgggctcgccgagctcaacatggacgcctacgacgacgaggaggatgggctcgagcttttcagcaccgggctgggggacttgtactacaagagcaacgaggaggacccctatatcatcaagaacgaagaagatgatgatggcgaggatgacgatgaggagattgaggacatgactatcaaacctactgatatagtcattgtttgtgctcataacgaggatgaattcaattctctccaggttagtatagtggaagaactggaagatggggatcctaatatgtttgtgcaccatgaggtccctctctcagattttccgctctgcacagcttggatggattttaaccgtcaggatggcgaacagaaaggaaatttcatagctgttggcaccatggatcctacaattgaaatatggaacttggatgtcgtcgacgaggtcgaaccacattatgtgctaggaggagtttcaaaaaagaagaagaaagttaaggggaaaaagggaaaaacatataagaagggtagccatagaagttctgtgcttggtcttgcgtggaacacggtggtgaggaatgctctagctagtgcaagtgcagacaaaactgtgaaagtttgggacttaagtgctggtaaatgtttagtcacactgcaacatcatgatgacaaggttcaatcagttgcctggaggtcacctgaagttcttctcagtggatcttttgatagaacaattgccatgacagatatgaaagacagtggacaatgttgtcataaatggcctgtcgaagcagatgtagagagcttagtttgtgatccacacaatgaacactcctttgtggttagtcttgaaaatgggatggttcaagtatttgatattcggacagcttcatcaaattcaaatcctggacagccgatttttactctgcatgcacacgaaaaggccgtttcttccatatctttcgcaccttctacccctaattttcttgcgactggttcaactgacaaaatggtgaagctctgggatctatcgaataaccagccttcgtgtgtctcgtcgctgaatcctaagcttggagctatattctcggtgtcgttttcgatcgacaaccccttcctgttagcgtgcggaggatcgaaaggcaaactgaaggtctggaacacactgtctgaacccgccgtcgccaacaaatttggtaaggggcggcaaattgcaccagctctgcgaagcgaatcccccacagaatgatgggctcgagctgtttctggctatgtggtagaatagattttttcgcgtttcagttttgttactgggtgcaatgtaatgggagcatggatttatttatatatgtacaaccaaacgacagctgaaatggatctgtagcgggagttcgcagtttatcatggattccgttttatttggacctagaaaaaggaagtcaaagatagctgttttatactccctctgtttcaaatgtttcaaaatgc

SEQ ID NO: 32697 - protein, 565 aa, Triticum aestivum
LFHRPPSSRHQPNLAAGLTLPLSSAPPPGLPPPERAALPVEETRTPRPPRALVSSAAMISAMSWVPRGAAKSVPIEAEPPTKEEIEEAMKKIALGREAGSDADDADGDEDDDAVMEVDGAEDEEVDEVAQAKAAAKALGTKSSSGSAAVGDVSDGLAELNMDAYDDEEDGLELFSTGLGDLYYKSNEEDPYIIKNEEDDDGEDDDEEIEDMTIKPTDIVIVCAHNEDEFNSLQVSIVEELEDGDPNMFVHHEVPLSDFPLCTAWMDFNRQDGEQKGNFIAVGTMDPTIEIWNLDVVDEVEPHYVLGGVSKKKKKVKGKKGKTYKKGSHRSSVLGLAWNTVVRNALASASADKTVKVWDLSAGKCLVTLQHHDDKVQSVAWRSPEVLLSGSFDRTIAMTDMKDSGQCCHKWPVEADVESLVCDPHNEHSFVVSLENGMVQVFDIRTASSNSNPGQPIFTLHAHEKAVSSISFAPSTPNFLATGSTDKMVKLWDLSNNQPSCVSSLNPKLGAIFSVSFSIDNPFLLACGGSKGKLKVWNTLSEPAVANKFGKGRQIAPALRSESPTE

SEQ ID NO: 32698 - protein, 508 aa, Triticum aestivum
MISAMSWVPRGAAKSVPIEAEPPTKEEIEEAMKKIALGREAGSDADDADGDEDDDAVMEVDGAEDEEVDEVAQAKAAAKALGTKSSSGSAAVGDVSDGLAELNMDAYDDEEDGLELFSTGLGDLYYKSNEEDPYIIKNEEDDDGEDDDEEIEDMTIKPTDIVIVCAHNEDEFNSLQVSIVEELEDGDPNMFVHHEVPLSDFPLCTAWMDFNRQDGEQKGNFIAVGTMDPTIEIWNLDVVDEVEPHYVLGGVSKKKKKVKGKKGKTYKKGSHRSSVLGLAWNTVVRNALASASADKTVKVWDLSAGKCLVTLQHHDDKVQSVAWRSPEVLLSGSFDRTIAMTDMKDSGQCCHKWPVEADVESLVCDPHNEHSFVVSLENGMVQVFDIRTASSNSNPGQPIFTLHAHEKAVSSISFAPSTPNFLATGSTDKMVKLWDLSNNQPSCVSSLNPKLGAIFSVSFSIDNPFLLACGGSKGKLKVWNTLSEPAVANKFGKGRQIAPALRSESPTE

SEQ ID NO: 32699 - protein, 504 aa, Triticum aestivum
MSWVPRGAAKSVPIEAEPPTKEEIEEAMKKIALGREAGSDADDADGDEDDDAVMEVDGAEDEEVDEVAQAKAAAKALGTKSSSGSAAVGDVSDGLAELNMDAYDDEEDGLELFSTGLGDLYYKSNEEDPYIIKNEEDDDGEDDDEEIEDMTIKPTDIVIVCAHNEDEFNSLQVSIVEELEDGDPNMFVHHEVPLSDFPLCTAWMDFNRQDGEQKGNFIAVGTMDPTIEIWNLDVVDEVEPHYVLGGVSKKKKKVKGKKGKTYKKGSHRSSVLGLAWNTVVRNALASASADKTVKVWDLSAGKCLVTLQHHDDKVQSVAWRSPEVLLSGSFDRTIAMTDMKDSGQCCHKWPVEADVESLVCDPHNEHSFVVSLENGMVQVFDIRTASSNSNPGQPIFTLHAHEKAVSSISFAPSTPNFLATGSTDKMVKLWDLSNNQPSCVSSLNPKLGAIFSVSFSIDNPFLLACGGSKGKLKVWNTLSEPAVANKFGKGRQIAPALRSESPTE

SEQ ID NO: 32700 - DNA, 1478 bp, Triticum aestivum
ctcacccacactcacgctcgcacccacaccaccggccggccgcccgcgtctgtcaaccgaaagcagcacagcgcccccacggtcggtctacatctactacccaccgcctggttctcctccgaaaccacgcccgtctactagttgtgtgccgatcgaactagcgcgtacgtgaaaaatgcaccgccagatggccgcgccggtggctgccgctgtggcgtgggcgccgctgctgctggtgctgctctgggcggcggggtgcgcgggccaggcgctggtgccgggcgtgatgatcttcggggactcggtggtggacgccggcaacaacaaccggctggccacgctggtgcgcgccgacttcccgccctacggccgcgacttcccggccacccacgcgcccaccggccgcttctgcaacggcaagctcgccaccgactacaccgtggagagcctggggctcagctcgtacccgccggcgtacctgagcgaggaggcgcagagcgacaacaggaccctcctccacggcgccaacttcgcctccggcgccgccggctacctcgacgccaccgccgcgctctacggcgccatctcgctggggcggcagctggactacttcaaggagtaccagtccaaggtggcggcggtggccggcgagaagcgcgcggcggcgctcacgtccgggtccatctacgtggtgagcgccgggacgagcgactacgtgcagaactactacgtgaacgccatgctggccgccgcctacacccccgaccagttcgccgacgcgctcatgcagccattcacggccttcgtcgagaggctgtacgggctgggagcgcggcggatcggggtgacgtcgctgccgcccatggggtgcctgccggcgtccgtcaccctcttcggcggcggcggcgggggcggctgcgtggagcggctcaacaacgactccctcaccttcaacgccaagctgcaggcggcgtcggacgcggccaagaagcgccactcggacctcaagctcgtcgtcttcgacatctacaacccgctcctcaacctcgtcgccgaccccatgagcgccgggttcttcgagtctcggcgcgcgtgctgtgggacggggaccatcgagacgtcggtgctgtgccaccagggggcgccggggacgtgcgccaacgccaccggctacgtcttctgggacggcttccaccccaccgacgccgccaacaaggtgctcgccgacgcgctgctcctccagggactccagctcatctcctagctagctgctcagtccttcctcgccgctccaatggcgctctgacaccgcaccgaccgtcttgtgcatgtctgtccgtttacctcctggcttttcttgcttgtcatctctactaccggatcatctctcctgctgttttgtttgctttcaactactactgtgtttccgtgcttttgtgtgatgtgaatgtgatccgtaatgtgatatagcggcactc

SEQ ID NO: 32701 - protein, 362 aa, Triticum aestivum
MHRQMAAPVAAAVAWAPLLLVLLWAAGCAGQALVPGVMIFGDSVVDAGNNNRLATLVRADFPPYGRDFPATHAPTGRFCNGKLATDYTVESLGLSSYPPAYLSEEAQSDNRTLLHGANFASGAAGYLDATAALYGAISLGRQLDYFKEYQSKVAAVAGEKRAAALTSGSIYVVSAGTSDYVQNYYVNAMLAAAYTPDQFADALMQPFTAFVERLYGLGARRIGVTSLPPMGCLPASVTLFGGGGGGGCVERLNNDSLTFNAKLQAASDAAKKRHSDLKLVVFDIYNPLLNLVADPMSAGFFESRRACCGTGTIETSVLCHQGAPGTCANATGYVFWDGFHPTDAANKVLADALLLQGLQLIS

SEQ ID NO: 32702 - protein, 358 aa, Triticum aestivum
MAAPVAAAVAWAPLLLVLLWAAGCAGQALVPGVMIFGDSVVDAGNNNRLATLVRADFPPYGRDFPATHAPTGRFCNGKLATDYTVESLGLSSYPPAYLSEEAQSDNRTLLHGANFASGAAGYLDATAALYGAISLGRQLDYFKEYQSKVAAVAGEKRAAALTSGSIYVVSAGTSDYVQNYYVNAMLAAAYTPDQFADALMQPFTAFVERLYGLGARRIGVTSLPPMGCLPASVTLFGGGGGGGCVERLNNDSLTFNAKLQAASDAAKKRHSDLKLVVFDIYNPLLNLVADPMSAGFFESRRACCGTGTIETSVLCHQGAPGTCANATGYVFWDGFHPTDAANKVLADALLLQGLQLIS

SEQ ID NO: 32703 - protein, 325 aa, Triticum aestivum
MIFGDSVVDAGNNNRLATLVRADFPPYGRDFPATHAPTGRFCNGKLATDYTVESLGLSSYPPAYLSEEAQSDNRTLLHGANFASGAAGYLDATAALYGAISLGRQLDYFKEYQSKVAAVAGEKRAAALTSGSIYVVSAGTSDYVQNYYVNAMLAAAYTPDQFADALMQPFTAFVERLYGLGARRIGVTSLPPMGCLPASVTLFGGGGGGGCVERLNNDSLTFNAKLQAASDAAKKRHSDLKLVVFDIYNPLLNLVADPMSAGFFESRRACCGTGTIETSVLCHQGAPGTCANATGYVFWDGFHPTDAANKVLADALLLQGLQLIS

SEQ ID NO: 32704 - DNA, 2140 bp, Triticum aestivum
gtctccttccccacatcgtcgtcaatccccaattcccaaatcacgcgctccgacgaccaaaccctaacctcggatccccggaagcacgccaaattcgccaaccctcccctcagattgggcatgccagccccccgaaactccagcccgtgacctcgccggagacgatggcctcgctgccgccgcatccccgccggattcggcccatcgccgtggcctccctggtgctcttcctcctcttcctctacacccgctcggatgggaaccctccgcggctcccgggctccgattcgcgcccgctccaccggaggctcctctccggtgccgatcccgccagccccgccgcgtccagaggcgggaacctttcggaggtcaccgggctgaacggcgagcagctggagaacccctccaccgcgtgcgccggcatcgaccgccacgagggtttcgggtcccagtgcgagttcctccgggctcacccgcagtgcagctccggcgggttcgtcgactacctggacttcttctactgcaggtgcgagagattcaggctgcttggatatgccgtgcttgcagtgtgcctcgcggcgctgttctacatgctcggtaacacggccgcggactacttctgttgcagcctagagaagatgtctgcgctgctgcggctaccgccgacagtggctggtgttaccctgctcccctttggtaatggtgctcctgatgtgtttgccagcattgcagcgtttatggggtctggcgccggggatgtcgggctgaacagcgtgctgggcggagcggtgtttgttacctgcgtcgttgttggggcagtatcattgtccgtcgcggagaagaatgtgcagattgattggaggtgctttgtgagggatgttggattcttcctgatcactttggtggcactgtctattatgttgattgtcgggaaggtgaccgtttggggagctatgctgtttgtatcgatttatgtggtttatgcatttgtggtggctgcaaatgagttattaaggaagcatgcacggatgctgaagtttgatgtagtcacaccattgcttccggtgaggggaagtatcttctcacacggactagaggatgatgattctgtgtacagttcacttcttgaggaggatacaagtgatgacgcggcccaggtaaacacatcattgccgcagtggatgtgggcttctcatgtggctatctactcaaatcaagggagagatggttcacctgacaggcctttgtggggttggaatgaagaaggaagagtggatacctccacgcttaactactccaaactgtttctgtttttggagctacccttgacaataccaagaaagttgacgattccaatagttgaggaagaccgctggtcacaagaatatgctgttgccagtgctggcttggcacctctactcttagcatttctgtggaacagccaggatggagtatccacgggtgccagcgtagcagcatatgtgattgctggtatttttgggattgcacttgcaggtcttgcttttacattcaccagtcccgaccgccctccaaggagatacttactcccatgggtgtttggagggtttgtgatgagcatcgtttggttctacatcattgccaatgagctggttgcactgttggttgcatttggagtgatacttgggattaatccttcaattctcggtttaacggtgttagcatggggcaattcgatgggtgacttaatgtcaaatgtggccttggcaatgaatggtggagatggtgtacagattgctatgtctggctgttatgcaggacctatgtttaatacacttgctggcctaggaatatcgatgctacttggagcttggtcgacggcacccaactcttatgttcttccgcaggaccgctctcttatttacacgatgagcttcctggttgctgggttgatctgggcgcttgttacgctgccacgaagcggcatgcgacctaacaagacgcttggagttggcctcattgctctctactcagttttccttttcattagagtaagcagtgctatggggatattgccactcccgggcttgaattagttgtttgtgtctattgtacatgactgtcctttatacagatgaaatggagttgtacattgttcctc

SEQ ID NO: 32705 - protein, 690 aa, Triticum aestivum
LLPHIVVNPQFPNHALRRPNPNLGSPEARQIRQPSPQIGHASPPKLQPVTSPETMASLPPHPRRIRPIAVASLVLFLLFLYTRSDGNPPRLPGSDSRPLHRRLLSGADPASPAASRGGNLSEVTGLNGEQLENPSTACAGIDRHEGFGSQCEFLRAHPQCSSGGFVDYLDFFYCRCERFRLLGYAVLAVCLAALFYMLGNTAADYFCCSLEKMSALLRLPPTVAGVTLLPFGNGAPDVFASIAAFMGSGAGDVGLNSVLGGAVFVTCVVVGAVSLSVAEKNVQIDWRCFVRDVGFFLITLVALSIMLIVGKVTVWGAMLFVSIYVVYAFVVAANELLRKHARMLKFDVVTPLLPVRGSIFSHGLEDDDSVYSSLLEEDTSDDAAQVNTSLPQWMWASHVAIYSNQGRDGSPDRPLWGWNEEGRVDTSTLNYSKLFLFLELPLTIPRKLTIPIVEEDRWSQEYAVASAGLAPLLLAFLWNSQDGVSTGASVAAYVIAGIFGIALAGLAFTFTSPDRPPRRYLLPWVFGGFVMSIVWFYIIANELVALLVAFGVILGINPSILGLTVLAWGNSMGDLMSNVALAMNGGDGVQIAMSGCYAGPMFNTLAGLGISMLLGAWSTAPNSYVLPQDRSLIYTMSFLVAGLIWALVTLPRSGMRPNKTLGVGLIALYSVFLFIRVSSAMGILPLPGLN

SEQ ID NO: 32706 - protein, 636 aa, Triticum aestivum
MASLPPHPRRIRPIAVASLVLFLLFLYTRSDGNPPRLPGSDSRPLHRRLLSGADPASPAASRGGNLSEVTGLNGEQLENPSTACAGIDRHEGFGSQCEFLRAHPQCSSGGFVDYLDFFYCRCERFRLLGYAVLAVCLAALFYMLGNTAADYFCCSLEKMSALLRLPPTVAGVTLLPFGNGAPDVFASIAAFMGSGAGDVGLNSVLGGAVFVTCVVVGAVSLSVAEKNVQIDWRCFVRDVGFFLITLVALSIMLIVGKVTVWGAMLFVSIYVVYAFVVAANELLRKHARMLKFDVVTPLLPVRGSIFSHGLEDDDSVYSSLLEEDTSDDAAQVNTSLPQWMWASHVAIYSNQGRDGSPDRPLWGWNEEGRVDTSTLNYSKLFLFLELPLTIPRKLTIPIVEEDRWSQEYAVASAGLAPLLLAFLWNSQDGVSTGASVAAYVIAGIFGIALAGLAFTFTSPDRPPRRYLLPWVFGGFVMSIVWFYIIANELVALLVAFGVILGINPSILGLTVLAWGNSMGDLMSNVALAMNGGDGVQIAMSGCYAGPMFNTLAGLGISMLLGAWSTAPNSYVLPQDRSLIYTMSFLVAGLIWALVTLPRSGMRPNKTLGVGLIALYSVFLFIRVSSAMGILPLPGLN

SEQ ID NO: 32707 - protein, 494 aa, Triticum aestivum
MLGNTAADYFCCSLEKMSALLRLPPTVAGVTLLPFGNGAPDVFASIAAFMGSGAGDVGLNSVLGGAVFVTCVVVGAVSLSVAEKNVQIDWRCFVRDVGFFLITLVALSIMLIVGKVTVWGAMLFVSIYVVYAFVVAANELLRKHARMLKFDVVTPLLPVRGSIFSHGLEDDDSVYSSLLEEDTSDDAAQVNTSLPQWMWASHVAIYSNQGRDGSPDRPLWGWNEEGRVDTSTLNYSKLFLFLELPLTIPRKLTIPIVEEDRWSQEYAVASAGLAPLLLAFLWNSQDGVSTGASVAAYVIAGIFGIALAGLAFTFTSPDRPPRRYLLPWVFGGFVMSIVWFYIIANELVALLVAFGVILGINPSILGLTVLAWGNSMGDLMSNVALAMNGGDGVQIAMSGCYAGPMFNTLAGLGISMLLGAWSTAPNSYVLPQDRSLIYTMSFLVAGLIWALVTLPRSGMRPNKTLGVGLIALYSVFLFIRVSSAMGILPLPGLN

SEQ ID NO: 32708 - DNA, 2114 bp, Triticum aestivum
gcctggttcaccaccaccgctgcttagcccggaagattcctcctaccctccctcgtctcgtgcgtcgtgtccaaaccccaaaccctcacgcgaagtcacgcacccccggcgacggcgatggatctccgccgcccgccgcgctcgacgtccggcggcgtcgagcccaagatccgccaggtcggcttcgtcacccctggcgtttcggccccgtccgagccgcccgccgccgccgccgcggcggtatcactgcctggcgcggccgccgggtcgcctccggcgtcggacctctccccgggctcgctctcccccgtcatgatccctcctccgcggcacgtggatcacctctcccccgactccccctctcccccggcgtccgacgtcctcctcctcgcgtcctcggcgcctcagccttcctccatgcgcttcgccgctgcatccgagttcggagaggaggattcgaggtccctggccccttccgcgggggagctagaaacaaacaagggagatttggctgaaataaggaatgaagatgctccagcgtccattccgcaaaagcagaaaccttctaaagcagagaggcgtgctattcaggaggctcagcgtgctgcgaaagctgctgcgaaggaggcaggtttatcaggaaagtcaacaggcgctgcttctggggctaatcctgcaacatccaagcaagccaagccagctaaaatttctcagaagaaagatgtgccccatgctccaagtacagttgcttctgagaagaaggttactgaacgccaaccagagagagatagaaaaaaagatgttcctcatccgagaatgcagtttgatgatgtgcatcgggtggagaaagcaaaaaaacgtgcaattgtcaaccaatcagaggctcgaaacagagttgaattgtttaggcatctgccacagtacgtccatggcactcaacttcctgacctcgagtcaaaattctttcagctggaaccaattcatccttctgtgtacaaggtcggtctccaatatttgtctggtgaggtatctggtggcaatggtcgttgcatagcaatgcttcttgcgttcagagaggcaataaaagattactccacaccgccaaataaaactctcagcagagaccttactgcaaaagtcagtagttatgtgtcattttttatcgagtgccgtccactatcaattagcatgggcaatgctatcaggttcctgaaaaacaggattgccaagctaccaattacattgtcggagtcagaagccaaggccagtcttcagtctgatattgatcgttttattaatgagaagatagttgttgcagatcaggttattgtcagtcatgccatcacaaaagtcagagacgatgatgtcttgctaacatatgggtcatcatcagttgttgaaatgattttggagcatgctcatgaacttggtaggaagttccgtgttatagtgatggattctcgtcccaagctcgaggggcaaggattactgcgtagattagtggcaaagggcattaactgcacatatactcatataaatgcagtttcatacatcatgcatgaagttacaagagtcttcttgggtgcatcctcaatattatcaaatggaacagtttattcccgagttggcacagcatccgtggctatggtggcacatgcatttggaattcctgttttggtttgctgcgaggcatacaaatttcatgagagggtgcaacttgattctatatgcgctaatgagcttggtgatccagatgtgatttcgaaaattcctgggagggcagacttgggcgatcttaagaactgggctgacaacgagaatctccaactgttaaatctcacgtatgatgcaaccccttctgattatgtgtcgatgatcataacggattatggaatgcttccacctacaagtgtgccggtcatcgtgagagagtaccgcaaggagcagctgtgggtatagatctacttgcagtgtgatcgcagttttggcaactgttgctgcctaggtgcagcatgagtggacatatacaacttgtatgtttttgagatgtgggctgtcaaacctctttgccgacttaccgttttgtctactcaaaatggtcgtctagttttgtc

SEQ ID NO: 32709 - protein, 613 aa, Triticum aestivum
MDLRRPPRSTSGGVEPKIRQVGFVTPGVSAPSEPPAAAAAAVSLPGAAAGSPPASDLSPGSLSPVMIPPPRHVDHLSPDSPSPPASDVLLLASSAPQPSSMRFAAASEFGEEDSRSLAPSAGELETNKGDLAEIRNEDAPASIPQKQKPSKAERRAIQEAQRAAKAAAKEAGLSGKSTGAASGANPATSKQAKPAKISQKKDVPHAPSTVASEKKVTERQPERDRKKDVPHPRMQFDDVHRVEKAKKRAIVNQSEARNRVELFRHLPQYVHGTQLPDLESKFFQLEPIHPSVYKVGLQYLSGEVSGGNGRCIAMLLAFREAIKDYSTPPNKTLSRDLTAKVSSYVSFFIECRPLSISMGNAIRFLKNRIAKLPITLSESEAKASLQSDIDRFINEKIVVADQVIVSHAITKVRDDDVLLTYGSSSVVEMILEHAHELGRKFRVIVMDSRPKLEGQGLLRRLVAKGINCTYTHINAVSYIMHEVTRVFLGASSILSNGTVYSRVGTASVAMVAHAFGIPVLVCCEAYKFHERVQLDSICANELGDPDVISKIPGRADLGDLKNWADNENLQLLNLTYDATPSDYVSMIITDYGMLPPTSVPVIVREYRKEQLWV

SEQ ID NO: 32710 - protein, 548 aa, Triticum aestivum
MIPPPRHVDHLSPDSPSPPASDVLLLASSAPQPSSMRFAAASEFGEEDSRSLAPSAGELETNKGDLAEIRNEDAPASIPQKQKPSKAERRAIQEAQRAAKAAAKEAGLSGKSTGAASGANPATSKQAKPAKISQKKDVPHAPSTVASEKKVTERQPERDRKKDVPHPRMQFDDVHRVEKAKKRAIVNQSEARNRVELFRHLPQYVHGTQLPDLESKFFQLEPIHPSVYKVGLQYLSGEVSGGNGRCIAMLLAFREAIKDYSTPPNKTLSRDLTAKVSSYVSFFIECRPLSISMGNAIRFLKNRIAKLPITLSESEAKASLQSDIDRFINEKIVVADQVIVSHAITKVRDDDVLLTYGSSSVVEMILEHAHELGRKFRVIVMDSRPKLEGQGLLRRLVAKGINCTYTHINAVSYIMHEVTRVFLGASSILSNGTVYSRVGTASVAMVAHAFGIPVLVCCEAYKFHERVQLDSICANELGDPDVISKIPGRADLGDLKNWADNENLQLLNLTYDATPSDYVSMIITDYGMLPPTSVPVIVREYRKEQLWV

SEQ ID NO: 32711 - protein, 513 aa, Triticum aestivum
MRFAAASEFGEEDSRSLAPSAGELETNKGDLAEIRNEDAPASIPQKQKPSKAERRAIQEAQRAAKAAAKEAGLSGKSTGAASGANPATSKQAKPAKISQKKDVPHAPSTVASEKKVTERQPERDRKKDVPHPRMQFDDVHRVEKAKKRAIVNQSEARNRVELFRHLPQYVHGTQLPDLESKFFQLEPIHPSVYKVGLQYLSGEVSGGNGRCIAMLLAFREAIKDYSTPPNKTLSRDLTAKVSSYVSFFIECRPLSISMGNAIRFLKNRIAKLPITLSESEAKASLQSDIDRFINEKIVVADQVIVSHAITKVRDDDVLLTYGSSSVVEMILEHAHELGRKFRVIVMDSRPKLEGQGLLRRLVAKGINCTYTHINAVSYIMHEVTRVFLGASSILSNGTVYSRVGTASVAMVAHAFGIPVLVCCEAYKFHERVQLDSICANELGDPDVISKIPGRADLGDLKNWADNENLQLLNLTYDATPSDYVSMIITDYGMLPPTSVPVIVREYRKEQLWV

SEQ ID NO: 32712 - DNA, 1244 bp, Triticum aestivum
acgttagcgagaggtaaaaatccgactgcccaggggacgaaccggaacaagggttccgggcccgtctcttcttcgtttcgtttccatccacagctcgtcctccccccaaaccttaccccatgtccgacggcggcggcgagcccggggccggcggctcggcgccggtgtgcaacttcgttcagaagccgccgaagaatattcggaagcgtcccgccgcctccgtcggctctgatgacgaagaaggtagcggcggcgacgattccggggccatcgcggcggcgcgatctaagaagccgccgcctactaccagcaagctcttcttctcctccgccgacaactcacacgagccccgccgtttccagttcgagtcgtcccggactattcagtcctctaccgacaaccgcgccactgcgacgcttgagacggagacggcgtacgaccgtgatgcgcgcgccatccgcgagcgacagctcaagcaggctgaggaatccctcaagaagaacccctctgcctcctcctcctccggggagctctacaaggggatccacggctacacggatcacaaggccggcttccggcgggagcacacggtttccggagagaaggccggcggcgctcacggccccctgcgggcgtcagcgcacatacgcctctccacgcggttcgactaccaacccgacatctgcaaggattataaggagaccggctattgtggctatggcgattcctgcaagttcatgcacgacagaggtgactacaagtccggatggcagctcgagagggagtgggacgaggccgagaaagcccgcaaacggcgcatagcgatgcgtgagttgggtggtagtgatggcgaggcagaggaggaagacagcgacgacgaggaggcactgccctttgcctgcttcatatgcagggagccctttgttgacccggtggtcacaaagtgtaagcattatttctgcgagcattgcgcattaaagcatcactcgaagaacaagaagtgctttgtctgcaataaaccgacgcttggcatcttcaatgcagcgcaggagatccggaagaagattgcccaggacaagaagcagcaggacctttgatgactgctgcacaatgtagcttgtatcatggaggattacttctcttctgtaattgtattgtttgaaaatgagggggaaatgtccaggaatcagttttgtttctttagctctgtactagctcctacttaccattagccattttgccgc

SEQ ID NO: 32713 - protein, 325 aa, Triticum aestivum; identical to SEQ ID NO: 15410

SEQ ID NO: 32714 - protein, 273 aa, Triticum aestivum; identical to SEQ ID NO: 15411

SEQ ID NO: 32715 - protein, 196 aa, Triticum aestivum; identical to SEQ ID NO: 15412

SEQ ID NO: 32716 - DNA, 1602 bp, Triticum aestivum
accaaacaatggcggcgtgcaacggcctgttcgtgtaccacatcctcggcctggcctccctggtggccgtcttctacttctccctcctcggcgaggtggacctccgcttccccggcctcctcccgtcctccggcgcgtcccagcactcccacgacgcgtccctgccgttcgtggagcggcgcggcgcgcagctcttcctggagggccgcccgttctacatcaacgggtggaactcgtactggctcatggaccaggcggtggagccggccagccgccaccgtgtgtccgacatgttccgcgccgccaccgggatggggctcacggtgtgccgcacctgggccttcaacgacggcgcctacaacgcgctccagctctccccgggacacttcgacgagcgcgtcttcagggcgctggacctggtggtcgtggaggcccggcggcacggcgtgcggctcgtcctcagcctggccaacaacctggaggcgtacggcgggaagacgcagtacgtgcggtgggcgtgggacgaaggcgtcggcctcaccgcctccaacgactccttcttcttcgaccccgccatccgtgactacttcaaagtctacctcaaggcattgttgacgaggacgaaccacttgacgggggtgcagtacaaggacgaccctaccatcttggcgtgggagctgatgaacgagcccagatgcatctccgatccgtctggtaacactctgcagcgctggatcgaggagatggcggggtacgtgaaatcgatcgaccgtcggcatctgctgaccgtcggcacggaggggttctacggccccacgagccctccggagaagctgagcgtgaatccggggcactggttcaacaactacggcctcgacttcatccgcaactccaagatctccgacatcgacttcgcctccgtccacctttacccggacacctggctgctgcacgcggatctggaagagaagctcaagttcgtgacgcagtgggtgagctcccacttcgaggacggcgacacggagctcggcggcaagcccgtggtgctgacggagttcgggctgtcgcatttggtcaagggcttcgagcagtcgcagcgcgacgccttctacaagtcggtgtacgacatcgtccacgcgtcggccaagaggggcggcgccggcgccggcgcgatagtgtggcagctcgccgccgaggacatggaggagtaccacgacggcttcgccatcgtgcccagcgagacgccgtcgatgcagaagctgctgacggagcagtcgtgccggctggccgcgctgaggcacggggaggaggaggccaagaggatcctcaaggcggtgtgcggctgacccgtgatctgtcttgcgaggtgtggcttttttgcgtgctcatgtcatgtactgttactgtgtgtccgtaggaaatcgacacgaaatggaccgaagggatccatgaaaggtggcgtgctcggcgccgacgtcggcagatctgcctctgtattttccttgctgtgttgttgtactcgtacgtgcccttgacctttggtgtttaagtcattgtcgagtggcagcggaggctagttatattctatagtcctcgaatagc

SEQ ID NO: 32717 - protein, 447 aa, Triticum aestivum
QTMAACNGLFVYHILGLASLVAVFYFSLLGEVDLRFPGLLPSSGASQHSHDASLPFVERRGAQLFLEGRPFYINGWNSYWLMDQAVEPASRHRVSDMFRAATGMGLTVCRTWAFNDGAYNALQLSPGHFDERVFRALDLVVVEARRHGVRLVLSLANNLEAYGGKTQYVRWAWDEGVGLTASNDSFFFDPAIRDYFKVYLKALLTRTNHLTGVQYKDDPTILAWELMNEPRCISDPSGNTLQRWIEEMAGYVKSIDRRHLLTVGTEGFYGPTSPPEKLSVNPGHWFNNYGLDFIRNSKISDIDFASVHLYPDTWLLHADLEEKLKFVTQWVSSHFEDGDTELGGKPVVLTEFGLSHLVKGFEQSQRDAFYKSVYDIVHASAKRGGAGAGAIVWQLAAEDMEEYHDGFAIVPSETPSMQKLLTEQSCRLAALRHGEEEAKRILKAVCG

SEQ ID NO: 32718 - protein, 445 aa, Triticum aestivum
MAACNGLFVYHILGLASLVAVFYFSLLGEVDLRFPGLLPSSGASQHSHDASLPFVERRGAQLFLEGRPFYINGWNSYWLMDQAVEPASRHRVSDMFRAATGMGLTVCRTWAFNDGAYNALQLSPGHFDERVFRALDLVVVEARRHGVRLVLSLANNLEAYGGKTQYVRWAWDEGVGLTASNDSFFFDPAIRDYFKVYLKALLTRTNHLTGVQYKDDPTILAWELMNEPRCISDPSGNTLQRWIEEMAGYVKSIDRRHLLTVGTEGFYGPTSPPEKLSVNPGHWFNNYGLDFIRNSKISDIDFASVHLYPDTWLLHADLEEKLKFVTQWVSSHFEDGDTELGGKPVVLTEFGLSHLVKGFEQSQRDAFYKSVYDIVHASAKRGGAGAGAIVWQLAAEDMEEYHDGFAIVPSETPSMQKLLTEQSCRLAALRHGEEEAKRILKAVCG

SEQ ID NO: 32719 - protein, 366 aa, Triticum aestivum
MDQAVEPASRHRVSDMFRAATGMGLTVCRTWAFNDGAYNALQLSPGHFDERVFRALDLVVVEARRHGVRLVLSLANNLEAYGGKTQYVRWAWDEGVGLTASNDSFFFDPAIRDYFKVYLKALLTRTNHLTGVQYKDDPTILAWELMNEPRCISDPSGNTLQRWIEEMAGYVKSIDRRHLLTVGTEGFYGPTSPPEKLSVNPGHWFNNYGLDFIRNSKISDIDFASVHLYPDTWLLHADLEEKLKFVTQWVSSHFEDGDTELGGKPVVLTEFGLSHLVKGFEQSQRDAFYKSVYDIVHASAKRGGAGAGAIVWQLAAEDMEEYHDGFAIVPSETPSMQKLLTEQSCRLAALRHGEEEAKRILKAVCG

SEQ ID NO: 32720 - DNA, 1318 bp, Triticum aestivum
aaggacagagaagccaggcggcagcaacccctttcctccaatctccgtccattcgagacgtctgcggggccgggcaaggcatggtcgccatgctgcccgccgcgaggggggacgccgccccagccgccagcgccggcgccgccgacaagctcgtccacgggcctgtcaccgacggcaagtgcaagaagaaggccccgaggatgatccacaaggccgagagggagaagcacaagcgcgacctgctcaacgatctcttcagcgagcttgacgaaatgctagaagcagacaggcagaccaatgggaaggcatgtatattgactgacaccactcgaatccttcgagacctgctttcgcaattagaatctctccgaaaggagaatagcaccctgcagaatgaatcccattatgttacgatggagaggaatgagctgcaggatgagaacggtgtgctccgcaatgaaattctggagctacaaaatgagctggcgacgcttcccgcaggcaacccaggttggggccatgctactgctggatcgcctcaccctgcgggcacagttttcccgtcacagcaaccaatgcagccgaccaccatcgcaagcgcagtattccccttgcagcagcctctgcaacagacaacaatcctggagcacccttatgcaccaccaccaccaccacgggaacttaagctcttcccagatgctgcgtctgatatcgaaggccttgaaccatcagaagatcaggaggccgccaaccatattgcgcgaccgctggcgaggtacccaacacagtcagcgttgtggcctgtaagcctgggtctcccgaggatggaagacgaacagtgtagcagtggcacaaccggcagtagcaaggaaggtagtagctctgcctctagtagagattgagtagatcagctccaaccagtcaggaagtttctctttgagcgtagcgaatatacacagatgagcatgtggcatgtaaataccagactccatcttggatctgggaatgttatgttagatgagaagatgacactccaatgggaatcagaatagcagcatttctcatcctttgtgttgcaccgtatcatatatatgaactgatctagatttgatatttgcaaagaaaaactacagcaataagcaatggattatatttatcggtgggggtaaccagaagcggaactgaagaggaaattgcaggcgactctcttcaaccatgtagagggttgcgtagagggtttcctttccttgcattggggccaatctcttcaaccgtgtacttccctgatccaaacccaaagagaaaatatatgagtttc

SEQ ID NO: 32721 - protein, 299 aa, Triticum aestivum
GQRSQAAATPFLQSPSIRDVCGAGQGMVAMLPAARGDAAPAASAGAADKLVHGPVTDGKCKKKAPRMIHKAEREKHKRDLLNDLFSELDEMLEADRQTNGKACILTDTTRILRDLLSQLESLRKENSTLQNESHYVTMERNELQDENGVLRNEILELQNELATLPAGNPGWGHATAGSPHPAGTVFPSQQPMQPTTIASAVFPLQQPLQQTTILEHPYAPPPPPRELKLFPDAASDIEGLEPSEDQEAANHIARPLARYPTQSALWPVSLGLPRMEDEQCSSGTTGSSKEGSSSASSRD

SEQ ID NO: 32722 - protein, 273 aa, Triticum aestivum
MVAMLPAARGDAAPAASAGAADKLVHGPVTDGKCKKKAPRMIHKAEREKHKRDLLNDLFSELDEMLEADRQTNGKACILTDTTRILRDLLSQLESLRKENSTLQNESHYVTMERNELQDENGVLRNEILELQNELATLPAGNPGWGHATAGSPHPAGTVFPSQQPMQPTTIASAVFPLQQPLQQTTILEHPYAPPPPPRELKLFPDAASDIEGLEPSEDQEAANHIARPLARYPTQSALWPVSLGLPRMEDEQCSSGTTGSSKEGSSSASSRD

SEQ ID NO: 32723 - protein, 270 aa, Triticum aestivum
MLPAARGDAAPAASAGAADKLVHGPVTDGKCKKKAPRMIHKAEREKHKRDLLNDLFSELDEMLEADRQTNGKACILTDTTRILRDLLSQLESLRKENSTLQNESHYVTMERNELQDENGVLRNEILELQNELATLPAGNPGWGHATAGSPHPAGTVFPSQQPMQPTTIASAVFPLQQPLQQTTILEHPYAPPPPPRELKLFPDAASDIEGLEPSEDQEAANHIARPLARYPTQSALWPVSLGLPRMEDEQCSSGTTGSSKEGSSSASSRD

SEQ ID NO: 32724 - DNA, 733 bp, Triticum aestivum
ctaccacccaaactccaaaccctagcttcctagcctacgcgtccccgagcgagcatggatcggatcgtcggtagcaagtacaagctgggccgcaagatcgggagcggctccttcggggagatatatctcgccacgcacgtcgacacgtacgagattgtagccgtcaagatcgaaaacagcaaaaccaaccatccccaattgttatacgaggctaaactgtataatgctcttcagggagggactggtattgcaaacataaaatggtgtggcattgatggcgaagaaaatgttcttgttattgatttgcttgggccaagccttgaggatctgtttgttttattgtggccggagattctcactgaagacagttttgatgttggcagatcagatgataacaagaatagagtttttgcattctaaggggtacttgcacagggacatcaagcccgacaactttcttatgggccttggtcggaaagctaaccaggtctacatcattgacttcggacttgccaagagataccgtgactcaaccacgaatcgccatataccctatagagaaaataaaaatttgactggcacagctcgctatgcaagttgcaacactcatcttgggattgagcaaagccgaagggatgatctggagtccattggatatgttctcttgtattttctaaggggaagtcttccttggcagggtttaaaagctgccacaaagaagcagaaatatgac

SEQ ID NO: 32725 - protein, 153 aa, Triticum aestivum
MAKKMFLLLICLGQALRICLFYCGRRFSLKTVLMLADQMITRIEFLHSKGYLHRDIKPDNFLMGLGRKANQVYIIDFGLAKRYRDSTTNRHIPYRENKNLTGTARYASCNTHLGIEQSRRDDLESIGYVLLYFLRGSLPWQGLKAATKKQKYD

SEQ ID NO: 32726 - protein, 149 aa, Triticum aestivum
MFLLLICLGQALRICLFYCGRRFSLKTVLMLADQMITRIEFLHSKGYLHRDIKPDNFLMGLGRKANQVYIIDFGLAKRYRDSTTNRHIPYRENKNLTGTARYASCNTHLGIEQSRRDDLESIGYVLLYFLRGSLPWQGLKAATKKQKYD

SEQ ID NO: 32727 - protein, 121 aa, Triticum aestivum
MDRIVGSKYKLGRKIGSGSFGEIYLATHVDTYEIVAVKIENSKTNHPQLLYEAKLYNALQGGTGIANIKWCGIDGEENVLVIDLLGPSLEDLFVLLWPEILTEDSFDVGRSDDNKNRVFAF

SEQ ID NO: 32728 - DNA, 1249 bp, Triticum aestivum
agaaacaaataagaaaagggtaaagcgggtcggaaggggagaaaagtaagcgccgcgcaccgcaatcggaacggaaatcccccgaatccgtcgccggaatccatccatcgagcgatccatccggccggacggcgaggcgggagcaggaggggagcggcggagatggtgagcgccttcttcctcttctgcgggtgcgtggagcaggccaacgtggcggtggtcgagaagtggggccgcttcctccgcctcgccgagccgggcctccacttcttcaaccccttcgccggcgagctcgtcgccgggaccctctccacccgcgtccagtcgctcgacgtcaaggtcgagaccaagaccaaggataatgtgtttgttcagctgatctgtacaattcaataccgggttgttaaggagaatgcagacgatgcattctacgagttgcagaatccccaacagcaaattcagtcctacgtctttgatgtggttcgagccatagttccaagaatggagctggacagtctttttgagcaaaagaatgatgtcgcaaaggctgtactgagggagcttgaaaaggtgatgtcagattatggttacagcattgagcacattctcatggttgacatcatccctgatgctgctgttcgcagagcaatgaacgacataaatgcagcccaacggctccagcttgcgagcgtctacaaaggagaagcggagaagatccatctggtgaagaaggcggaaggggaggccgaggccaagtacctgtcgggggtcggcatcgccaagcagcggcaggccatcacggacggcctgcgggagaacatcctcaacttctcgcactcggtgtcgggcacgagcgccaaggaggtgatggacctgatcatggtcacccagtacttcgacaccatcaaggagctcggggacaactcgaagaccaccacggtgttcatcccccacggcccgggccacgtcaaggacatcggcgaccagatccgcaccggcatgatggaggcgtcgagcagcggcctgtaggcccatggccgtctgccacgtgtatggtttggctggatgggttttctgcgtgaggcggggagagttgatctgtttatatatatattgttagagttatagtagactacttatttatttgtttttagtgtgtaataatacgggcgcagggacttggttgtgcatgaagattgtcgaattctggtattatataatcataaaatggggaacatttttgtgttag

SEQ ID NO: 32729 - protein, 288 aa, Triticum aestivum
MVSAFFLFCGCVEQANVAVVEKWGRFLRLAEPGLHFFNPFAGELVAGTLSTRVQSLDVKVETKTKDNVFVQLICTIQYRVVKENADDAFYELQNPQQQIQSYVFDVVRAIVPRMELDSLFEQKNDVAKAVLRELEKVMSDYGYSIEHILMVDIIPDAAVRRAMNDINAAQRLQLASVYKGEAEKIHLVKKAEGEAEAKYLSGVGIAKQRQAITDGLRENILNFSHSVSGTSAKEVMDLIMVTQYFDTIKELGDNSKTTTVFIPHGPGHVKDIGDQIRTGMMEASSSGL

SEQ ID NO: 32730 - protein, 175 aa, Triticum aestivum
MELDSLFEQKNDVAKAVLRELEKVMSDYGYSIEHILMVDIIPDAAVRRAMNDINAAQRLQLASVYKGEAEKIHLVKKAEGEAEAKYLSGVGIAKQRQAITDGLRENILNFSHSVSGTSAKEVMDLIMVTQYFDTIKELGDNSKTTTVFIPHGPGHVKDIGDQIRTGMMEASSSGL

SEQ ID NO: 32731 - protein, 151 aa, Triticum aestivum
MSDYGYSIEHILMVDIIPDAAVRRAMNDINAAQRLQLASVYKGEAEKIHLVKKAEGEAEAKYLSGVGIAKQRQAITDGLRENILNFSHSVSGTSAKEVMDLIMVTQYFDTIKELGDNSKTTTVFIPHGPGHVKDIGDQIRTGMMEASSSGL

SEQ ID NO: 32732 - DNA, 1632 bp, Triticum aestivum
aaaaaagaagcaaagctttcctcctccacacaacgcactcacaggctcacagcccaacacaatcaccatggccccaaccagcagcaccaaccgcggccgccgccgcgtggtcctcttaccgctgccataccaaggccacatcaaccccatgctgcgcctcgccgccgcgctgcactcccgcggcctcgcggtcactatcctccacccggagacccgcgcgccggaccgcgggaagctccctgcggactaccgcctggtcaccatcccggacagcataccgccggagctcgccgcgtccgaggacatcgcgtcgttcgtcttcgcgctgaacaagaactgtgcggcgccgttccgggactacctggccggcgcccttagagaggaggaggacggccacgtcgccttcgtggtcgccgacgtcgactggttcgcgccgctctccgtggccagggagctgggcgtggccgctctggccctcatgaccagcagcgccgccaggttcctggtgtacttggcgtacccaagcctgtgccacaagggctatttgcccgtccaagagtcgaatttcaacactacagttgaggagcttccccccttccttgtacgagacttggatcgcgtgatggacatggctcgacacctcgcgtacgccgatctcctcgctcacatcgtcgccggcgtgaggcaatcatccggcctaataatcaacacatccgaagacatggagggcatggagatcgagaggatccgcagcgagatcgcccgcccggtgttcgccgtcggccctctgcacatgatgacgccgtctctatccgtccatagcagcctactgacagaagatcgcagctgtttggactggttggacacacaacggccaaactctgtgctctacgtgagctttgggagcctggtgggcatcgacacagacgagttcttggagatggcctggggcctggccgacagccagcgcccgttcgtgtgggtggtccggccggggctggtgcacggctgtgagctcagcgcgctccctgaagagctgcaagagaagataggtagcataggtagagtagtcagttgggctccgcagcaggaggtgctgaagcatccgtctgtggtcgcttttctcacgcactgcggctggaactcggcgacggagagcatatccgaaggcgtgccgatgatatgcagaccgttgtccagcgatcagatgggcactagcaggtatgtgtgtgatgtgtggaaggtgggggttagggtggaggtggagaaccagctgaagagagggggcgtccaggcggccatcacaagactgatggaaggaaaggaaggtgaagaggtcagggaaagaatgaaagatctgaggcatgcgatgagcaagtgtactgatgaaggtgggacatctgatgttgctttgcaacgtttagtggatttcagtgtttaagctagcacttaactatttagactatggctagaaaacatgtccgtgaattgcaacagaagaaatgtctctagctcatggaccagtgcaatgcaacgggacgggagtcaagtgatgcttttttctttttgcggggacggtaaacatgctcagtgcggctcttcctcaatcatcaatgcaagatttctataaag

SEQ ID NO: 32733 - protein, 479 aa, Triticum aestivum
KKKQSFPPPHNALTGSQPNTITMAPTSSTNRGRRRVVLLPLPYQGHINPMLRLAAALHSRGLAVTILHPETRAPDRGKLPADYRLVTIPDSIPPELAASEDIASFVFALNKNCAAPFRDYLAGALREEEDGHVAFVVADVDWFAPLSVARELGVAALALMTSSAARFLVYLAYPSLCHKGYLPVQESNFNTTVEELPPFLVRDLDRVMDMARHLAYADLLAHIVAGVRQSSGLIINTSEDMEGMEIERIRSEIARPVFAVGPLHMMTPSLSVHSSLLTEDRSCLDWLDTQRPNSVLYVSFGSLVGIDTDEFLEMAWGLADSQRPFVWVVRPGLVHGCELSALPEELQEKIGSIGRVVSWAPQQEVLKHPSVVAFLTHCGWNSATESISEGVPMICRPLSSDQMGTSRYVCDVWKVGVRVEVENQLKRGGVQAAITRLMEGKEGEEVRERMKDLRHAMSKCTDEGGTSDVALQRLVDFSV

SEQ ID NO: 32734 - protein, 457 aa, Triticum aestivum
MAPTSSTNRGRRRVVLLPLPYQGHINPMLRLAAALHSRGLAVTILHPETRAPDRGKLPADYRLVTIPDSIPPELAASEDIASFVFALNKNCAAPFRDYLAGALREEEDGHVAFVVADVDWFAPLSVARELGVAALALMTSSAARFLVYLAYPSLCHKGYLPVQESNFNTTVEELPPFLVRDLDRVMDMARHLAYADLLAHIVAGVRQSSGLIINTSEDMEGMEIERIRSEIARPVFAVGPLHMMTPSLSVHSSLLTEDRSCLDWLDTQRPNSVLYVSFGSLVGIDTDEFLEMAWGLADSQRPFVWVVRPGLVHGCELSALPEELQEKIGSIGRVVSWAPQQEVLKHPSVVAFLTHCGWNSATESISEGVPMICRPLSSDQMGTSRYVCDVWKVGVRVEVENQLKRGGVQAAITRLMEGKEGEEVRERMKDLRHAMSKCTDEGGTSDVALQRLVDFSV

SEQ ID NO: 32735 - protein, 430 aa, Triticum aestivum
MLRLAAALHSRGLAVTILHPETRAPDRGKLPADYRLVTIPDSIPPELAASEDIASFVFALNKNCAAPFRDYLAGALREEEDGHVAFVVADVDWFAPLSVARELGVAALALMTSSAARFLVYLAYPSLCHKGYLPVQESNFNTTVEELPPFLVRDLDRVMDMARHLAYADLLAHIVAGVRQSSGLIINTSEDMEGMEIERIRSEIARPVFAVGPLHMMTPSLSVHSSLLTEDRSCLDWLDTQRPNSVLYVSFGSLVGIDTDEFLEMAWGLADSQRPFVWVVRPGLVHGCELSALPEELQEKIGSIGRVVSWAPQQEVLKHPSVVAFLTHCGWNSATESISEGVPMICRPLSSDQMGTSRYVCDVWKVGVRVEVENQLKRGGVQAAITRLMEGKEGEEVRERMKDLRHAMSKCTDEGGTSDVALQRLVDFSV

SEQ ID NO: 32736 - DNA, 1549 bp, Triticum aestivum
acacgccccggctccaaagcgcaggccttctctttccccacaccacaccacccaccggcctcctcccacccgaacccccattaaccccagaggagagatcccccgtcctctgacgccagcggccatgtccgtcacgcgggttcttgcgctgcttgtcgcggcggcgctggcggccgcggcgccggcgcgcgtgggcgcggcgggggcgtgcgcggcggagaggttctccaagaaccgcgtgtacgccgcctgcaccgacctgcccaccctgggcgcgtccgtgcactggacctacgacccggcggcctcctccctctccgtggcgttcgtcgccgcgccgccctcgtccggcggctgggtcgcctggggcctcaacccctccggcgacggcatgagcggcacgcaggcgctcgtcgcctcgcccacgggcagcggcggcgcgtacggcgtccagacgttcgacatccagggcacatcgctcggatcgccgggccccatcgcctacaagacgtccgacctcgccgccgaggtcggcgccgacggccgcgtccagatgttcgggaagctcgcgctccagaacggcaccggggaggtgaaccaggtctggcaggtgggaccggcgtcgggcgggagcatcggcatacacgccatggccgccgccaacatgggggccaaggggaagctcaacctcgtcacgggggcgaccacagccgtcagcggaggcagcatcctcaggaagaaaaatacccatggaattctgaatgctgtgagctgggggattcttctgccaatgggaggcatagttgctagatacctcaagacattcaaatcagccgaccctgcctggttctaccttcacgttgcttgccagctgatcgggtatgctgtgggagtgtctggctgggccaccggcattcatctaggaaatctgtccaagggaatcacctactcgcttcacaggaacatcgggatcgccgtatttgctctcggtaccgttcagatctttgcgctgttcctgaggccgaagaaggatcacaagctgcgggtgtactggaacgtgtaccaccactcggtgggctacaccatcatcatcctgggcatcgtcaacatcttcaagggcatgagcatcctggacgtggcgcagaagtggaagacgggctacatcatcgccatcggcatcctgggcggcgtcgcggtggcgctggaggtgatcacctgggccatcgtgctcaagaggaggaagacggaggacaaggcctacaacggcggcgcctccaacaacaacaacggccatctgcccatgtgatgcgatgtgatgtgattctttctcggtggccggagtctgtgggctgtgttgagctgagctgcgtgtgtgtgagcatggattggcagatgctatgtaggttagggccgggccttagtggccttcgtctctctgtttctttttttatgatgatgatgatgattgatagatctgtgtgtatagtactgctgcacattatattagttattatatactggaatgagagaggtgatgccggtcgatgct

SEQ ID NO: 32737 - protein, 434 aa, Triticum aestivum
HAPAPKRRPSLSPHHTTHRPPPTRTPINPRGEIPRPLTPAAMSVTRVLALLVAAALAAAAPARVGAAGACAAERFSKNRVYAACTDLPTLGASVHWTYDPAASSLSVAFVAAPPSSGGWVAWGLNPSGDGMSGTQALVASPTGSGGAYGVQTFDIQGTSLGSPGPIAYKTSDLAAEVGADGRVQMFGKLALQNGTGEVNQVWQVGPASGGSIGIHAMAAANMGAKGKLNLVTGATTAVSGGSILRKKNTHGILNAVSWGILLPMGGIVARYLKTFKSADPAWFYLHVACQLIGYAVGVSGWATGIHLGNLSKGITYSLHRNIGIAVFALGTVQIFALFLRPKKDHKLRVYWNVYHHSVGYTIIILGIVNIFKGMSILDVAQKWKTGYIIAIGILGGVAVALEVITWAIVLKRRKTEDKAYNGGASNNNNGHLPM

SEQ ID NO: 32738 - protein, 393 aa, Triticum aestivum
MSVTRVLALLVAAALAAAAPARVGAAGACAAERFSKNRVYAACTDLPTLGASVHWTYDPAASSLSVAFVAAPPSSGGWVAWGLNPSGDGMSGTQALVASPTGSGGAYGVQTFDIQGTSLGSPGPIAYKTSDLAAEVGADGRVQMFGKLALQNGTGEVNQVWQVGPASGGSIGIHAMAAANMGAKGKLNLVTGATTAVSGGSILRKKNTHGILNAVSWGILLPMGGIVARYLKTFKSADPAWFYLHVACQLIGYAVGVSGWATGIHLGNLSKGITYSLHRNIGIAVFALGTVQIFALFLRPKKDHKLRVYWNVYHHSVGYTIIILGIVNIFKGMSILDVAQKWKTGYIIAIGILGGVAVALEVITWAIVLKRRKTEDKAYNGGASNNNNGHLPM

SEQ ID NO: 32739 - protein, 304 aa, Triticum aestivum
MSGTQALVASPTGSGGAYGVQTFDIQGTSLGSPGPIAYKTSDLAAEVGADGRVQMFGKLALQNGTGEVNQVWQVGPASGGSIGIHAMAAANMGAKGKLNLVTGATTAVSGGSILRKKNTHGILNAVSWGILLPMGGIVARYLKTFKSADPAWFYLHVACQLIGYAVGVSGWATGIHLGNLSKGITYSLHRNIGIAVFALGTVQIFALFLRPKKDHKLRVYWNVYHHSVGYTIIILGIVNIFKGMSILDVAQKWKTGYIIAIGILGGVAVALEVITWAIVLKRRKTEDKAYNGGASNNNNGHLPM

SEQ ID NO: 32740 - DNA, 1292 bp, Triticum aestivum
attgccaactccacgcatcatcgtctcggcaattagacaccacttccaagttccaactacaaacctccggcgagcggcggacaggttcacggccatggcttcttcttcttctccgaggacgatgagagccgtgcagtacgacaggtacggcggaggagccgaaggcctcaagcatgtggaggtgccgatcccgtcgcccaagaagggcgagctgctgctcaggatggaggcggccagcatcaaccgggtggactggaagttccagaacggcaaggcgcggcccttcctgcccagcaagttccccttcacccccgtctgcgagctcgccggcgaagtcgtggagctgggcgccggagtcagcggcttcagccagggcgacaaggtcatcgccgtcaacttcccgggtggcggcgggctggccgagtacgcggtggtgccggcgtcgcaagcagcgctgaggcctccagaggtgtccgcggtggagggcgcctgcctgccgatcgccgcgttcacggcgctcgccgcgctcagggcggccggggtcggcctcgacgccggcgacggccgtcccaagaacgtgctggtgaccgcggcctcgggcggcgtcggcaccttcgccgtgcagctggcgagcctcgcggggcaccaccacgtcacggccacctgcggcgcgcgcaacctggacctcatccggagcctgggggccgacgaggcgctggactatgacaccccggagggcgccgcgctgcgcgggccgtccggcccgaagcacgacgcggtggtgcactgcggggaggggttcccgtggtcggccttcaagccggcgctggccgacgccggcggcgtggtggtggacctcaccccgcgcctcgcgtccgtcgccgtcgcggtgctccattgggtgctcttctccaggaagaagctggtgccgctgatcgcgtctgccaaggaggaggacatggaggcgctgctgggcatggtgagtcaggggaagctccgggtggtgatcgactcgcggtacccgctgagcagggcgcacgagggctgggctaagagcatgagcggccacgccaccggcaaggtcgtcgtcgacatgggcgtcgccgatgacacagagtgatgatgctagtactactacaatacgtaaattcaaagtaaatagttgcagtgataccgattgccgaagatgatagagctgctcccatctgtccaagaatgtaaagaagcccattgcgatacatcatgtgattaatgacgtcttgataatcttcaacaggctgaagtttctacag

SEQ ID NO: 32741 - protein, 372 aa, Triticum aestivum
LPTPRIIVSAIRHHFQVPTTNLRRAADRFTAMASSSSPRTMRAVQYDRYGGGAEGLKHVEVPIPSPKKGELLLRMEAASINRVDWKFQNGKARPFLPSKFPFTPVCELAGEVVELGAGVSGFSQGDKVIAVNFPGGGGLAEYAVVPASQAALRPPEVSAVEGACLPIAAFTALAALRAAGVGLDAGDGRPKNVLVTAASGGVGTFAVQLASLAGHHHVTATCGARNLDLIRSLGADEALDYDTPEGAALRGPSGPKHDAVVHCGEGFPWSAFKPALADAGGVVVDLTPRLASVAVAVLHWVLFSRKKLVPLIASAKEEDMEALLGMVSQGKLRVVIDSRYPLSRAHEGWAKSMSGHATGKVVVDMGVADDTE

SEQ ID NO: 32742 - protein, 341 aa, Triticum aestivum
MASSSSPRTMRAVQYDRYGGGAEGLKHVEVPIPSPKKGELLLRMEAASINRVDWKFQNGKARPFLPSKFPFTPVCELAGEVVELGAGVSGFSQGDKVIAVNFPGGGGLAEYAVVPASQAALRPPEVSAVEGACLPIAAFTALAALRAAGVGLDAGDGRPKNVLVTAASGGVGTFAVQLASLAGHHHVTATCGARNLDLIRSLGADEALDYDTPEGAALRGPSGPKHDAVVHCGEGFPWSAFKPALADAGGVVVDLTPRLASVAVAVLHWVLFSRKKLVPLIASAKEEDMEALLGMVSQGKLRVVIDSRYPLSRAHEGWAKSMSGHATGKVVVDMGVADDTE

SEQ ID NO: 32743 - protein, 332 aa, Triticum aestivum
MRAVQYDRYGGGAEGLKHVEVPIPSPKKGELLLRMEAASINRVDWKFQNGKARPFLPSKFPFTPVCELAGEVVELGAGVSGFSQGDKVIAVNFPGGGGLAEYAVVPASQAALRPPEVSAVEGACLPIAAFTALAALRAAGVGLDAGDGRPKNVLVTAASGGVGTFAVQLASLAGHHHVTATCGARNLDLIRSLGADEALDYDTPEGAALRGPSGPKHDAVVHCGEGFPWSAFKPALADAGGVVVDLTPRLASVAVAVLHWVLFSRKKLVPLIASAKEEDMEALLGMVSQGKLRVVIDSRYPLSRAHEGWAKSMSGHATGKVVVDMGVADDTE

SEQ ID NO: 32744 - DNA, 1783 bp, Triticum aestivum
acgcaaaaagggacgaaaaaccaaacttctcccgcaagactggctcgcaccaaatcgcatcgcccttggagtcgcccctcactgatcccttggcgtcctgcttcccaagccacagcccacaggcccccacgcccagctcctcccgctccgatttcacagcctgcgagctagccatgtcgattcggccgctgttgctgccggagccgccgggcgaggtggatcgggcgccggagatcttcgcgggtggcgtggccgcggtgcgccgcgcagttgtcatcgggaacggctgcgccggcgccgagaaccagtgcctcggcctcgtccgcgccctcggcctggccgaccgcctcacgctctaccgtattatcaggccaaccggaggaatcaacaagtggctgcactttctccctatctccttgcataaaatggtggaccaagtactcagacatatactgtctaacacgacattcacaacactgtttcaaggaaaactgtcggcaccttatcctgtcagtaatgttcaatctcttggattgtcttctgtactggaagcagattccaaaaggatagtgacaatggtccgtgataccttcgagaaggaaggcctggcgatagttgttgcttgtggccgtgataccataccatatgcaagctctgtaaggtgtttagctccagataatgtctttgtcattcagatacaacaccccaggtatcgccttgataggtttgatttggtggtgactcctcgccatgattactacgctttaactgcaaagggacaacaagaagtaccgtggctttttcggagatggattactccacgagaaccacccggtcctaatgtggtcctgacgtctggagcacttcaccaagcagattctgctgcactacgcattgctgctacaaactggcatgatgaacttgctcccttgccaaagccattggtagtagtaaatattggagaaccaacaagaaactgtaattatggtgtagaccttgccaagcagttggtaagctcactgcacaatgtttcagagacctgtggaagtgtcagaatttcattttccaggagaacgccacaaaacgtgtccgatcttatattgagagagttcagcacacatccaaagttctacatttggggtggtgaagaacctaacccacacctagggcatcttgcatgggccgatgctttcatcataacagcagactcgataagtatgctaagtgaggcgtgcagcactgggaagccggtctatgtcgttggaactgagcattgcaggtggaaattctcagattttcacaacactctgcagaaacgaggggctgttcgtcctttcactggatcagaagatatgtcagacagctggagctaccctcctctgaacgatgccattgatgtggctgcacgggttcgtgaagtgcttgcacaacgtggatggacagtgggttaatagcggtcgaagcagagaaaaagagtgccatttttgctcagttacgttccaagcccagacaattcagagcctgcatttcagttatcttagttgcatctgcatgaggattttttttgccatatgaccgttgcaagacgacatcgcttcttttcaaaagatggctatatttttgggaacatactgtgtaaagttttgagcaatcacacatagacagcagtgtttattcttggcatattcatgcattattgtacctagtgttatgctgtaaagaagccgatagaagtgcgaacggaagttaaaaatctttgtccttggaacgaggtgacatcatg

SEQ ID NO: 32745 - protein, 482 aa, Triticum aestivum
AKRDEKPNFSRKTGSHQIASPLESPLTDPLASCFPSHSPQAPTPSSSRSDFTACELAMSIRPLLLPEPPGEVDRAPEIFAGGVAAVRRAVVIGNGCAGAENQCLGLVRALGLADRLTLYRIIRPTGGINKWLHFLPISLHKMVDQVLRHILSNTTFTTLFQGKLSAPYPVSNVQSLGLSSVLEADSKRIVTMVRDTFEKEGLAIVVACGRDTIPYASSVRCLAPDNVFVIQIQHPRYRLDRFDLVVTPRHDYYALTAKGQQEVPWLFRRWITPREPPGPNVVLTSGALHQADSAALRIAATNWHDELAPLPKPLVVVNIGEPTRNCNYGVDLAKQLVSSLHNVSETCGSVRISFSRRTPQNVSDLILREFSTHPKFYIWGGEEPNPHLGHLAWADAFIITADSISMLSEACSTGKPVYVVGTEHCRWKFSDFHNTLQKRGAVRPFTGSEDMSDSWSYPPLNDAIDVAARVREVLAQRGWTVG

SEQ ID NO: 32746 - protein, 425 aa, Triticum aestivum
MSIRPLLLPEPPGEVDRAPEIFAGGVAAVRRAVVIGNGCAGAENQCLGLVRALGLADRLTLYRIIRPTGGINKWLHFLPISLHKMVDQVLRHILSNTTFTTLFQGKLSAPYPVSNVQSLGLSSVLEADSKRIVTMVRDTFEKEGLAIVVACGRDTIPYASSVRCLAPDNVFVIQIQHPRYRLDRFDLVVTPRHDYYALTAKGQQEVPWLFRRWITPREPPGPNVVLTSGALHQADSAALRIAATNWHDELAPLPKPLVVVNIGEPTRNCNYGVDLAKQLVSSLHNVSETCGSVRISFSRRTPQNVSDLILREFSTHPKFYIWGGEEPNPHLGHLAWADAFIITADSISMLSEACSTGKPVYVVGTEHCRWKFSDFHNTLQKRGAVRPFTGSEDMSDSWSYPPLNDAIDVAARVREVLAQRGWTVG

SEQ ID NO: 32747 - protein, 341 aa, Triticum aestivum
MVDQVLRHILSNTTFTTLFQGKLSAPYPVSNVQSLGLSSVLEADSKRIVTMVRDTFEKEGLAIVVACGRDTIPYASSVRCLAPDNVFVIQIQHPRYRLDRFDLVVTPRHDYYALTAKGQQEVPWLFRRWITPREPPGPNVVLTSGALHQADSAALRIAATNWHDELAPLPKPLVVVNIGEPTRNCNYGVDLAKQLVSSLHNVSETCGSVRISFSRRTPQNVSDLILREFSTHPKFYIWGGEEPNPHLGHLAWADAFIITADSISMLSEACSTGKPVYVVGTEHCRWKFSDFHNTLQKRGAVRPFTGSEDMSDSWSYPPLNDAIDVAARVREVLAQRGWTVG

SEQ ID NO: 32748 - DNA, 2057 bp, Triticum aestivum
gtgcagtgacagaatcacaaaaaatacagctctctgcgcactcgtccattcggcgactagtcgacgcagctgacgccaccacgcggcggcggcgcttgttcccatcgccgccaccggcatggccgagggcaccgacacggtgcgcgcgcccggcgacgcggaggagatggagaagggagagatcgcaggcgccgccgccggtgccgacggcgactccgccgcgccccagccggtggagcccacctgggctttctggatcggcaacggcaacccgcaggaggattccgccggccgggggaacaccgtccacaccttctccaccgtcgacgacttcttgagcctttacaataatatcctccaccctagtaaattgggtgtgggagctgacctccattgcttcaagaataagattgagccgaaatgcgaaggccccatatgtgctaatggaggtgcatggaccatcagttgtggcgaagggaaatcgcagccattgtggttggatacactactggcattgattggtggacaattcgaatatggtaatgaaatttgtggagcggtccttagcgtgtgtgggaagcaggaaacaatagctatatggattaaagatgctactaacgaagctgctcagctaagcattggcaagcagtggaaggaatttctggagtacaaggactcagttgagttcattgttcatgatagtgatgcaacggcagtacaatgctggtcttccacgtttcccgatgatccccttgacgtcatctacaacaaggtccccagtcactgcagccgcgtgcgctttgctgccgtctgcagatcgtggtgcactgcagcttcgcggcaccccgcgctgcctgaactcccgtggctgctcctctcaccacgcgaccgtgacacaacgaagcgcctctactgtcctgaggacagcaagatcctgtgcatctcgctcccgagcgatttcatcggcaactggttcgtcggctgtcatggtggtggctgggttgcatcattcgaaccaccaccgttcaggatcttgaacattttctccagtgttgaggttgcgctctccgagaaacagaaggggatcgtttgcccaggccgccttggccagatcatcatttggaaaatcatcttctccaaaccacccacctcaagtgactgtatcattgctgccatcaccgacaatcacggcatcgcgctctgcagggttgggtgtccgaacggtgggtggacaacaaaaggacatgtaagctacaccatggagcttgcagacatcgccttttgcaacggtaagctctatggtctcacacgggacagatgggaacttgtcaagtttgagatcggtgctgatgaagatggtgcgcccgtggtcacagccgttgatcggctagtggtcactgtcgagcaccagcagccccccagtgtctgggccaaccgggtggatgccagctacatttttgagctacacggcaagcttgcgacggcggtgaggtccccatggtcacccaacctcagacctttcttcaaagtgttcgaacttgttgacatcgacaccagcgaggggatggcacatggcacacacaaatggacagaggtgatgagcttgggtgactttgccctattcctgggtccaaacagctccaaggcggtgcatgtgtcagcagacaggcgcggcggtgtgaagagaaaccacatctactactcctaccatcgccgcttagcacagaaggaggtccttctcagcactgacctggtgttcctgacaagctccaacgctgatggtgattccgtgtactacagggaagatgaaagcttatccgcagccgtgggcggggttcataggattggggcagtaggatactatgtcaggggtagccctaatcctccagtgtggcttctccccctagcatagtggctttttatatacattgtattgcttagctgctgcacatgcctgaaaattgtaccgttagctgtataaccgtaaatgctctatggtttcaaccatgttgtatttagaacgaatgtacagcaattataattaatctgtactcatg

SEQ ID NO: 32749 - protein, 597 aa, Triticum aestivum
MAEGTDTVRAPGDAEEMEKGEIAGAAAGADGDSAAPQPVEPTWAFWIGNGNPQEDSAGRGNTVHTFSTVDDFLSLYNNILHPSKLGVGADLHCFKNKIEPKCEGPICANGGAWTISCGEGKSQPLWLDTLLALIGGQFEYGNEICGAVLSVCGKQETIAIWIKDATNEAAQLSIGKQWKEFLEYKDSVEFIVHDSDATAVQCWSSTFPDDPLDVIYNKVPSHCSRVRFAAVCRSWCTAASRHPALPELPWLLLSPRDRDTTKRLYCPEDSKILCISLPSDFIGNWFVGCHGGGWVASFEPPPFRILNIFSSVEVALSEKQKGIVCPGRLGQIIIWKIIFSKPPTSSDCIIAAITDNHGIALCRVGCPNGGWTTKGHVSYTMELADIAFCNGKLYGLTRDRWELVKFEIGADEDGAPVVTAVDRLVVTVEHQQPPSVWANRVDASYIFELHGKLATAVRSPWSPNLRPFFKVFELVDIDTSEGMAHGTHKWTEVMSLGDFALFLGPNSSKAVHVSADRRGGVKRNHIYYSYHRRLAQKEVLLSTDLVFLTSSNADGDSVYYREDESLSAAVGGVHRIGAVGYYVRGSPNPPVWLLPLA

SEQ ID NO: 32750 - protein, 581 aa, Triticum aestivum
MEKGEIAGAAAGADGDSAAPQPVEPTWAFWIGNGNPQEDSAGRGNTVHTFSTVDDFLSLYNNILHPSKLGVGADLHCFKNKIEPKCEGPICANGGAWTISCGEGKSQPLWLDTLLALIGGQFEYGNEICGAVLSVCGKQETIAIWIKDATNEAAQLSIGKQWKEFLEYKDSVEFIVHDSDATAVQCWSSTFPDDPLDVIYNKVPSHCSRVRFAAVCRSWCTAASRHPALPELPWLLLSPRDRDTTKRLYCPEDSKILCISLPSDFIGNWFVGCHGGGWVASFEPPPFRILNIFSSVEVALSEKQKGIVCPGRLGQIIIWKIIFSKPPTSSDCIIAAITDNHGIALCRVGCPNGGWTTKGHVSYTMELADIAFCNGKLYGLTRDRWELVKFEIGADEDGAPVVTAVDRLVVTVEHQQPPSVWANRVDASYIFELHGKLATAVRSPWSPNLRPFFKVFELVDIDTSEGMAHGTHKWTEVMSLGDFALFLGPNSSKAVHVSADRRGGVKRNHIYYSYHRRLAQKEVLLSTDLVFLTSSNADGDSVYYREDESLSAAVGGVHRIGAVGYYVRGSPNPPVWLLPLA

SEQ ID NO: 32751 - DNA, 1410 bp, Triticum aestivum
tgagttcccagcgccctcagagccacagactcgagcgcgcccccatcctgctccccaaccaagaagcgagacgacggtgaccagtccccagaggccagagcgcactcccatcccatggatctgcagaccttcgtgctgagggtgaccatccactgccatggctgcaagaagaaggtccggaaggtgctcaagagcgtcgaaggcgtgcaggacgtgaaggtggatgcccagctgcacaaggtgatggtgaccggcaccgtggacgccgagacgctcatcaagaggctcaacaagtctggcaagcaggccctgccatggcaacacacgcctgccaagaatcccgaccctgcgccagccgacgcccccgcgccggccgaggacggcagcaaggatgctgctgtggccgacaagaagccggcggaggagccgcaggccgacagctcagacaagaagccggagcaggagacggcctcggagaagaagccggagcaggagacggcctcggagaagaagcctgagacggagaaggaagcagagtctgagaagaaggctgacaaggaggaggcgaaaccaagcgacgaggcaaagaaagacggcggcgagggcgcggcggccgagcccaaacccaaagcaaagggcaccgagcccgccgccgctgcaaaggaggccggcgatgacgagggcgaggcgaagaagaaacagagcaagcccaaggacgcggataggtccctggccccagcgccggcgccggcccatgcgccgaggtacgcgcaccaggaattcaacgcgccgcagccggtgatgagctacaacatggcgcagccgagagcgagcgtgtcccactacgcgccgcagccggagcagggctactcgcagcagcagcaggccgggtactcctcctcctcctccatgatggtgacgcagcacccaccgccaccggcgcagcaggcctactcccagcaggcgcagccaatgcagcaatggtcgccgtcctacctctacatgccgtacccgcacgcgtcgccggagtcctactaccaggactactacagcccgcccgggacgcacgcgtcgccgccgcccccgccgccgctccaggactcgtaccgcctattcgacgacgagaaccccaactcgtgcagcgtcatgtgatctgatcacggctccggccaccggcggaaaagtagaggcggccgtcctcataatcgtaatagagacggacctctctggttgtaggtagagtagcttgttactctcttcgattgggaggtcaaagctctccttgaccaatcctttttcttctcacttcttcctctttaatttcttcttttgttattgctactattactgttctaaatagagcatgtaattgtaatttacatgtagaatagtagcatcaatgagatctcc

SEQ ID NO: 32752 - protein, 345 aa, Triticum aestivum
MDLQTFVLRVTIHCHGCKKKVRKVLKSVEGVQDVKVDAQLHKVMVTGTVDAETLIKRLNKSGKQALPWQHTPAKNPDPAPADAPAPAEDGSKDAAVADKKPAEEPQADSSDKKPEQETASEKKPEQETASEKKPETEKEAESEKKADKEEAKPSDEAKKDGGEGAAAEPKPKAKGTEPAAAAKEAGDDEGEAKKKQSKPKDADRSLAPAPAPAHAPRYAHQEFNAPQPVMSYNMAQPRASVSHYAPQPEQGYSQQQQAGYSSSSSMMVTQHPPPPAQQAYSQQAQPMQQWSPSYLYMPYPHASPESYYQDYYSPPGTHASPPPPPPLQDSYRLFDDENPNSCSVM

SEQ ID NO: 32753 - protein, 302 aa, Triticum aestivum
MVTGTVDAETLIKRLNKSGKQALPWQHTPAKNPDPAPADAPAPAEDGSKDAAVADKKPAEEPQADSSDKKPEQETASEKKPEQETASEKKPETEKEAESEKKADKEEAKPSDEAKKDGGEGAAAEPKPKAKGTEPAAAAKEAGDDEGEAKKKQSKPKDADRSLAPAPAPAHAPRYAHQEFNAPQPVMSYNMAQPRASVSHYAPQPEQGYSQQQQAGYSSSSSMMVTQHPPPPAQQAYSQQAQPMQQWSPSYLYMPYPHASPESYYQDYYSPPGTHASPPPPPPLQDSYRLFDDENPNSCSVM

SEQ ID NO: 32754 - DNA, 1774 bp, Triticum aestivum
ggagggttcttgcagtattatcgctatccagctcgtgagtcggctatcgtcaatggcggcctctgcaaagatcgccacggagtttctcaaggatccactgatctggttgttcctcgcctcgctggctttcgtcattctgcagaggcggcggctgggcagcgcgccatttcctccgggtccgaagccgctgccagtcatcggcaacatgacgttagtggaccagctgacccaccgcggcctagcggcgctagcgaagcactacggcgggctgctgcaccttcgcctcggcaggctccacgtcttcgcggtgtcgacgccggagtacgcgcgcgaggtgctgcacgtgcaggacgccgccttctcgaaccgcccggccaccatcgccgtcgtctacctcacctacggccgctccgacatggcgttcgcgcacaacggcgcctactggcgccagatgcgcaagctctgcgtcaccaagatcttcagccgccgccgcgccgagacgtggctcgccgtgcgcgacgggtacggggcgctggcccgcgccgtcggcaggcgcagcggcgaggccgtcaacctcggcgagctcatcttcaacctcaccgtcggtgtcatcttccgcgccgccttcagcacccgcgacgaggatgggctcgacgagttcatcgccatcctccaggagttctccagcctcctaggattgttccacatcggtgacttcttcccgtggctcggctgggtgggccggcggggcttcaaccgccgcctccgcacggggcgcggcgctctcgataaatttatcgacaggatcatcgacgagcacatgaggaggggcaagaacgccgccgaccccgacgccgacttggtagacggcctgctcgcgtttctcgccgaggcaaacccaatcagcgggaagcacagagaggacgccctccgcttcacccgcgataacgtcagggccatgattatggacatgttgtttggtgggccagagacagtggggtccatgaccgagtgggcgatggcagagatgatgcgtagcccagacgacctacgacggctgcagcaggagctcgccaatgtgctggggctcgaccgtaccgtggatgagcccgacctcgacaagctccctttcctcagatgtgtcgtcaaggagacgctccgcatgcacccgcccatcccactgctcctccacgagtctgctaaagactgcgtcgtcggtggctactttgtgcccaaaggctcccgcgtgttggtgaatgcatgggcgatcaaccgtgaccccggggcctggaaggacggcgacacgttccgaccttcgcggttcatgcccggcgagcgagaggccgccgggctggacctcaagggtggctgctacgagttcttgccgtttgggtccggacggcgctcctgccctgcgcaggggcttggccaacatgcggtggagttcgctgtcgcgcagctcgcgcacggattcaactgggagctgcccgatggcatgaagcccgcggagcttgacatgggtgacatctttggcctcaccgcattacgtgccacgcggctctacgccgtgccaccacaccacgcctcacatgccccatgtaagtattgcctcacatgccccatgtaagtatcgcaccagacttgttccttgtaaccgttggtccgttcattgtgtaccccgatctgcttggtttgttttggacttgatctccgagtcctaattcgcaagaagagactttctatcaataaagagcacggtcatagatgtggatcc

SEQ ID NO: 32755 - protein, 541 aa, Triticum aestivum
EGSCSIIAIQLVSRLSSMAASAKIATEFLKDPLIWLFLASLAFVILQRRRLGSAPFPPGPKPLPVIGNMTLVDQLTHRGLAALAKHYGGLLHLRLGRLHVFAVSTPEYAREVLHVQDAAFSNRPATIAVVYLTYGRSDMAFAHNGAYWRQMRKLCVTKIFSRRRAETWLAVRDGYGALARAVGRRSGEAVNLGELIFNLTVGVIFRAAFSTRDEDGLDEFIAILQEFSSLLGLFHIGDFFPWLGWVGRRGFNRRLRTGRGALDKFIDRIIDEHMRRGKNAADPDADLVDGLLAFLAEANPISGKHREDALRFTRDNVRAMIMDMLFGGPETVGSMTEWAMAEMMRSPDDLRRLQQELANVLGLDRTVDEPDLDKLPFLRCVVKETLRMHPPIPLLLHESAKDCVVGGYFVPKGSRVLVNAWAINRDPGAWKDGDTFRPSRFMPGEREAAGLDLKGGCYEFLPFGSGRRSCPAQGLGQHAVEFAVAQLAHGFNWELPDGMKPAELDMGDIFGLTALRATRLYAVPPHHASHAPCKYCLTCPM

SEQ ID NO: 32756 - protein, 524 aa, Triticum aestivum
MAASAKIATEFLKDPLIWLFLASLAFVILQRRRLGSAPFPPGPKPLPVIGNMTLVDQLTHRGLAALAKHYGGLLHLRLGRLHVFAVSTPEYAREVLHVQDAAFSNRPATIAVVYLTYGRSDMAFAHNGAYWRQMRKLCVTKIFSRRRAETWLAVRDGYGALARAVGRRSGEAVNLGELIFNLTVGVIFRAAFSTRDEDGLDEFIAILQEFSSLLGLFHIGDFFPWLGWVGRRGFNRRLRTGRGALDKFIDRIIDEHMRRGKNAADPDADLVDGLLAFLAEANPISGKHREDALRFTRDNVRAMIMDMLFGGPETVGSMTEWAMAEMMRSPDDLRRLQQELANVLGLDRTVDEPDLDKLPFLRCVVKETLRMHPPIPLLLHESAKDCVVGGYFVPKGSRVLVNAWAINRDPGAWKDGDTFRPSRFMPGEREAAGLDLKGGCYEFLPFGSGRRSCPAQGLGQHAVEFAVAQLAHGFNWELPDGMKPAELDMGDIFGLTALRATRLYAVPPHHASHAPCKYCLTCPM

SEQ ID NO: 32757 - protein, 473 aa, Triticum aestivum
MTLVDQLTHRGLAALAKHYGGLLHLRLGRLHVFAVSTPEYAREVLHVQDAAFSNRPATIAVVYLTYGRSDMAFAHNGAYWRQMRKLCVTKIFSRRRAETWLAVRDGYGALARAVGRRSGEAVNLGELIFNLTVGVIFRAAFSTRDEDGLDEFIAILQEFSSLLGLFHIGDFFPWLGWVGRRGFNRRLRTGRGALDKFIDRIIDEHMRRGKNAADPDADLVDGLLAFLAEANPISGKHREDALRFTRDNVRAMIMDMLFGGPETVGSMTEWAMAEMMRSPDDLRRLQQELANVLGLDRTVDEPDLDKLPFLRCVVKETLRMHPPIPLLLHESAKDCVVGGYFVPKGSRVLVNAWAINRDPGAWKDGDTFRPSRFMPGEREAAGLDLKGGCYEFLPFGSGRRSCPAQGLGQHAVEFAVAQLAHGFNWELPDGMKPAELDMGDIFGLTALRATRLYAVPPHHASHAPCKYCLTCPM

SEQ ID NO: 32758 - DNA, 1133 bp, Triticum aestivum
cagatcaaacacctagggtttggttcgtgagagagaagagagggtgcgatgaagcttgcggggctcaagtcggtggacggagctcacgaggactcgatctgggcggccgcgtgggtgcccgctgctgaccaccgccccacggcgctgctcctcaccggctccatcgacgagaccgtccgcgcctggcaacccgacgacctcgccgccgcgtcccccccggcgggagggcacgcgctcggagtgatatccctcgcggcgcatcctgccggggtcatagccgccgcggtctccatcgacagccacgtccgcgtcttcgacgtcgactccggcgcatccgtcgccacgctcgatgccgcgccctccgaggtctggggcgtccagttccaccccaagggtgttgctctggctgcagctggtggtggcagtggatcagtaaaactctgggacacggagaagtggcaacctattgccagccttcctgttccgcgtccagagggagcccgcgctgataaaacaggcagcggcaagtttgttctttcagtggcctggagtccagatggcaagctcttagcatgtggatccatggatggcacgattgcggtgtatgatgcggtccgcatgaagttcctccaccacctggaggggcaccacatgccagtgaggtccatggtgttctcgccggtggacccccacgtgctcttgaccggatgtgacgactcccacatccacatctacgatgccaaggagaagggcctgatcggggccatgtcgggtcatgcgagctgggtgctgagcatcgacgtgagcccggatggcatggcggtggcgacaggctccagcgaccgcaccgtccggctctgggacatcaatgcgagggcgtcagttcagaccatgagcaaccactcagaccaggtctgggccgttgcattccggccgccgggaggggaaggagtccgtgctggccggctcgccagcgcttcggatgacaagagcatctccctgtacgattactcctagttttacagatttggcgagctgtgatacagccctctgttattgccgtctgttgtaccatgacctgtaccactgtacgatgctgactaaagccgacacttgcaagttgagcgggtttt

SEQ ID NO: 32759 - protein, 322 aa, Triticum aestivum
MKLAGLKSVDGAHEDSIWAAAWVPAADHRPTALLLTGSIDETVRAWQPDDLAAASPPAGGHALGVISLAAHPAGVIAAAVSIDSHVRVFDVDSGASVATLDAAPSEVWGVQFHPKGVALAAAGGGSGSVKLWDTEKWQPIASLPVPRPEGARADKTGSGKFVLSVAWSPDGKLLACGSMDGTIAVYDAVRMKFLHHLEGHHMPVRSMVFSPVDPHVLLTGCDDSHIHIYDAKEKGLIGAMSGHASWVLSIDVSPDGMAVATGSSDRTVRLWDINARASVQTMSNHSDQVWAVAFRPPGGEGVRAGRLASASDDKSISLYDYS

SEQ ID NO: 32760 - DNA, 1704 bp, Triticum aestivum
agtacacagctacgcagaatcataagaggaccggactaaccaccacaggcccatggtagtacagtgtggtagtcccccatgagccccttcgtttgcactctactcttccccgatacaccccttctcccgcggaagcccgcgcctttcaaacgcgctacaaccatccgatgccgcgccgcgccgcccccgggagacgccgctctccgcgccttccgcgtgcaccacatcgctgggcacttcctcggcgccaaccccgccctgttgcccgccctcgcggcctgcgcgcggctgctgacggcggcggccgaagccgagcagatccacgccctcctcttcaagtccggcctccctagttccgtctccggcgtctacgcctccacctccctcgcccgtgtctactcgcggctcggccgcctgggtgacgcgcggaaggtgtttgatggaatgcctgagaggacgttggtttcttggaacgtgcttcttgacggccttgtcagagccagcgatttggatgccgcctgggaggtgtttgcggaaatgccggagcggaatgtgtcttcttggaatactgttatggctggtttcgttagtcatgggtgggctcaagaggcagtggagttgttttctgagatgacagaggtttatggtttgacgccggatgaggccacgatggttggctttgtatctgctgttcgcagtctcggtctacttggacttgggaggaccgcacatggttatgtaatccggcaggagttctcactggatggtgctcttggtgttgctctgatcaacatgtacacaaggtgtgggtgcatgggtgcggcataccaatgcttctcaagcgtcatcagcaagaatgtggagcactggacctctgtcatcgggggtttcgcagcacatggtcacccagagatggcactgaaattgtttgccgagatgaggcaattgggcgtcaagcctaatggtgtcaccttcgtggccgtcttgaatgcctgcagccatggtggtcttgttgatgaaggttttaggtacttcaacctaatgcgcaacatgggtatcaggccatcgatccagcactatggctgcttggtggatcttcttggtcgtgctgggttcttggaagaagccttcaacctcgctagcagtctaccagaagagcagggctttgtgatgtggagctcactactagctgcttgccaaacccatggcaatgtcgacatggcagaggttgctgcccagaagttggcagacacaaagccaagccatggcagctcatatattttgctatcaaacgcctatgcacgtgctggtcaatgggacgacttgaagaggacaagaagcaggatggaggagcatagggtggtgaagaagcctgggctcagctggatcgaggttgatggcagtttacattcctttgtcactgcagacaagttacacacagaatgcgaagatatttatcatatgttggaagacttgaaacttaatttgatatcagctggttccgaacctgaaacatttgatcttcctgaagtttgattcagtaagttactgttgtttatattgaatatatcgtttttcttttttggaagggttacattttttgttgttgatagaaatacatcacatgagaggtctgttcatgatcatgtgaacaatggggcatcggaatatatcatattgatttggtaaatttcaggttggttt

SEQ ID NO: 32761 - protein, 485 aa, Triticum aestivum
MSPFVCTLLFPDTPLLPRKPAPFKRATTIRCRAAPPPGDAALRAFRVHHIAGHFLGANPALLPALAACARLLTAAAEAEQIHALLFKSGLPSSVSGVYASTSLARVYSRLGRLGDARKVFDGMPERTLVSWNVLLDGLVRASDLDAAWEVFAEMPERNVSSWNTVMAGFVSHGWAQEAVELFSEMTEVYGLTPDEATMVGFVSAVRSLGLLGLGRTAHGYVIRQEFSLDGALGVALINMYTRCGCMGAAYQCFSSVISKNVEHWTSVIGGFAAHGHPEMALKLFAEMRQLGVKPNGVTFVAVLNACSHGGLVDEGFRYFNLMRNMGIRPSIQHYGCLVDLLGRAGFLEEAFNLASSLPEEQGFVMWSSLLAACQTHGNVDMAEVAAQKLADTKPSHGSSYILLSNAYARAGQWDDLKRTRSRMEEHRVVKKPGLSWIEVDGSLHSFVTADKLHTECEDIYHMLEDLKLNLISAGSEPETFDLPEV

SEQ ID NO: 32762 - protein, 363 aa, Triticum aestivum
MPERTLVSWNVLLDGLVRASDLDAAWEVFAEMPERNVSSWNTVMAGFVSHGWAQEAVELFSEMTEVYGLTPDEATMVGFVSAVRSLGLLGLGRTAHGYVIRQEFSLDGALGVALINMYTRCGCMGAAYQCFSSVISKNVEHWTSVIGGFAAHGHPEMALKLFAEMRQLGVKPNGVTFVAVLNACSHGGLVDEGFRYFNLMRNMGIRPSIQHYGCLVDLLGRAGFLEEAFNLASSLPEEQGFVMWSSLLAACQTHGNVDMAEVAAQKLADTKPSHGSSYILLSNAYARAGQWDDLKRTRSRMEEHRVVKKPGLSWIEVDGSLHSFVTADKLHTECEDIYHMLEDLKLNLISAGSEPETFDLPEV

SEQ ID NO: 32763 - protein, 332 aa, Triticum aestivum
MPERNVSSWNTVMAGFVSHGWAQEAVELFSEMTEVYGLTPDEATMVGFVSAVRSLGLLGLGRTAHGYVIRQEFSLDGALGVALINMYTRCGCMGAAYQCFSSVISKNVEHWTSVIGGFAAHGHPEMALKLFAEMRQLGVKPNGVTFVAVLNACSHGGLVDEGFRYFNLMRNMGIRPSIQHYGCLVDLLGRAGFLEEAFNLASSLPEEQGFVMWSSLLAACQTHGNVDMAEVAAQKLADTKPSHGSSYILLSNAYARAGQWDDLKRTRSRMEEHRVVKKPGLSWIEVDGSLHSFVTADKLHTECEDIYHMLEDLKLNLISAGSEPETFDLPEV

SEQ ID NO: 32764 - DNA, 1635 bp, Triticum aestivum
gagaaaaggactcgaataataaaaactcataaacaactccgccctcgggaccgagaccgagacccgaagaagagggagatcgctcgctcgctgcacaacgcccgcccacgccgccgtctccctctccctctccgcctccctccgtccaaccgcagcccgctccacctcatggcgtcgctctccctctccctccgcgcctccgcctcctcggccgcagccggatcccgcgccgccgccccaatcaaggcgtcgtgtgtgaggagcaaggttacctgcagcttaccatccatcagagctacctcctcacctgctagaagcattgagcccgtaagagccaccgccacacaggcgccccctgccacccctcaatcttctagcggagagaagacaaaggtcggcatcaatggttttgggcggattgggaggttagttctgcgaattgcaattgatagagatgacattgaagttgtggctgtcaatgatccgtttatcgatgctaagtacatggcctacatgtttaagtatgattccacacacggtccattcaaaggaaccataacagttctggatgagtcaaccttggagattaatgggaagaaagtctcagttacaagcaaaagggacccgtcagatatcccttggggtaactttggagctgaatatgttgttgaatcatctggtgtttttacaacagttgagaaagcttcagcacatttgaaggggggtgcaaagaaagtggtgatatcggctccgtcagcggatgctcccatgtttgttgttggagtaaatgagaagaattacaaccctagcatggatgtcgtctctaatgctagttgtaccaccaactgtcttgctcctgttgccaaggttgtccacgaggagtttggcattcttgaaggcctaatgacaactgtccatgccacaacatccactcaaaagactgttgatggtccttcaatgaaggactggaggggaggacgtggtgctggtcaaaacatcatccctagctctacgggtgcagcaaaggctgttggaaaggtccttccagctttaaatggaaagctcactggcatggccttccgggttcctacacctaacgtatctgttgttgatctgacctgccgacttgagaaaaatgcttcatatgaagatgtgaaagcagctatcaaggacgcatcagaaggttcgcttaaaggtattctaggctacacagatgaggatgttgtttcaaacgatttcgttggtgacacaaggtcgagcatatttgatgccaatgctggtatgggactaagttcatctttcatgaagctcgtctcctggtacgacaacgagtggggctacagcaaccgtgtcctcgatctgatcgggcacatgtctcttgttgcctaacgatgatgccacgatacgatttagcacagaaggtctcctcgcgtagtgtaggaagtgaaggctgcaattttgatggccattttcgtatcctggaataataataattctgtacgatgaaaacaatcaaatcaatcggcgtcgacttgaagctgcagaacgctcatgctggtctgtaaaaccccataattgaactgttgtgggtggacaataaacccaatctccgactcgtcgagtcatagtgctgtt

SEQ ID NO: 32765 - protein, 462 aa, Triticum aestivum
EKRTRIIKTHKQLRPRDRDRDPKKREIARSLHNARPRRRLPLPLRLPPSNRSPLHLMASLSLSLRASASSAAAGSRAAAPIKASCVRSKVTCSLPSIRATSSPARSIEPVRATATQAPPATPQSSSGEKTKVGINGFGRIGRLVLRIAIDRDDIEVVAVNDPFIDAKYMAYMFKYDSTHGPFKGTITVLDESTLEINGKKVSVTSKRDPSDIPWGNFGAEYVVESSGVFTTVEKASAHLKGGAKKVVISAPSADAPMFVVGVNEKNYNPSMDVVSNASCTTNCLAPVAKVVHEEFGILEGLMTTVHATTSTQKTVDGPSMKDWRGGRGAGQNIIPSSTGAAKAVGKVLPALNGKLTGMAFRVPTPNVSVVDLTCRLEKNASYEDVKAAIKDASEGSLKGILGYTDEDVVSNDFVGDTRSSIFDANAGMGLSSSFMKLVSWYDNEWGYSNRVLDLIGHMSLVA

SEQ ID NO: 32766 - protein, 406 aa, Triticum aestivum
MASLSLSLRASASSAAAGSRAAAPIKASCVRSKVTCSLPSIRATSSPARSIEPVRATATQAPPATPQSSSGEKTKVGINGFGRIGRLVLRIAIDRDDIEVVAVNDPFIDAKYMAYMFKYDSTHGPFKGTITVLDESTLEINGKKVSVTSKRDPSDIPWGNFGAEYVVESSGVFTTVEKASAHLKGGAKKVVISAPSADAPMFVVGVNEKNYNPSMDVVSNASCTTNCLAPVAKVVHEEFGILEGLMTTVHATTSTQKTVDGPSMKDWRGGRGAGQNIIPSSTGAAKAVGKVLPALNGKLTGMAFRVPTPNVSVVDLTCRLEKNASYEDVKAAIKDASEGSLKGILGYTDEDVVSNDFVGDTRSSIFDANAGMGLSSSFMKLVSWYDNEWGYSNRVLDLIGHMSLVA

SEQ ID NO: 32767 - protein, 294 aa, Triticum aestivum
MAYMFKYDSTHGPFKGTITVLDESTLEINGKKVSVTSKRDPSDIPWGNFGAEYVVESSGVFTTVEKASAHLKGGAKKVVISAPSADAPMFVVGVNEKNYNPSMDVVSNASCTTNCLAPVAKVVHEEFGILEGLMTTVHATTSTQKTVDGPSMKDWRGGRGAGQNIIPSSTGAAKAVGKVLPALNGKLTGMAFRVPTPNVSVVDLTCRLEKNASYEDVKAAIKDASEGSLKGILGYTDEDVVSNDFVGDTRSSIFDANAGMGLSSSFMKLVSWYDNEWGYSNRVLDLIGHMSLVA

SEQ ID NO: 32768 - DNA, 496 bp, Zea mays subsp. mays
gactccacgccgccagtcacgaccacgccgcgcctccgcctggaaccctttagccgagcggagcaagggaagaaatggggaagggtacgggcagcttcggcaagcgccggaacaagacgcacacgctctgcatccgctgcggccgccgcagcttccacctccagaagagcacctgctcctcctgcggctaccccgccgcccgcatccgcaagtataactggagtgtgaaggccatcaggcgtaagacaactggtaccggaaggatgaggtacatgcgacacgtgcctcgccgtttcaagagcaacttcagagaagggactgaggctgccccaaagaagggtgttgctgctgccaactaagtgtggtcttgctgccatcaagaagcgctagaacttgagactttttgattgaattgtacttctgaactatttagcccataatactatgcttgaattaatttcagacgccctggaggaggtatatgtatctttttggc

SEQ ID NO: 32769 - protein, 94 aa, Zea mays subsp. mays
MGKGTGSFGKRRNKTHTLCIRCGRRSFHLQKSTCSSCGYPAARIRKYNWSVKAIRRKTTGTGRMRYMRHVPRRFKSNFREGTEAAPKKGVAAAN

SEQ ID NO: 32770 - protein, 75 aa, Zea mays subsp. mays
DSTPPVTTTPRLRLEPFSRAEQGKKWGRVRAASASAGTRRTRSASAAAAAASTSRRAPAPPAATPPPASASITGV

SEQ ID NO: 32771 - protein, 71 aa, Zea mays subsp. mays
TPRRQSRPRRASAWNPLAERSKGRNGEGYGQLRQAPEQDAHALHPLRPPQLPPPEEHLLLLRLPRRPHPQV

SEQ ID NO: 32772 - DNA, 1376 bp, Zea mays subsp. mays
atggaaaggctgggtggagtctcgccttcgcactcttgtattaaagattgagcgttattcacacgagatgatccttgcacacccatatcccaaagatttctcagacaaatccaggcccttacattgcttttacttcatgggtctttggagaaaacaaaccacccaagctcaagaagctgagcaatttgatatcaggggaattgtaaatgagtttaggaatactatttgtgcatatcaacattggaaagaaggaatggacattgaagtgtcccatgtaaaaagaaaagaaatccctttgtttgtttttcctggcggagtgcgtccttctcgtacttctagaacaacgcacaagaacagccgtgccattccaacacgtgatgtttcagctgatgatcaagtgggaaacctattgggcgttgccagttgtagtgatgctcaacatgtaccatgtaaaggcagctatatgaaacaaccagaaccagattttgctggaggctttcagttgccaggaagtatttctctgttgccccctagcttacccaataaagtagttctgaatgggtctgctaattttcatgcagaatctattgagagtgaacatccagaacactatcaggaaagtaagtttgtggctgtgcagaataccgtgtgccttgtagtcaagcaacctaacagtttgctcccaaattcaaacaacaattcacaattgtatggatctgattcctctcttaacagttcaaaaagggaatgtgcaggcagtgctgcaaacaacttgctgaagttatccccagctattccagccacacctgatgaacttgatgagctgatatcctatcaaactaatcagaaagatgtaaatgctgaaaataacttggagatcggttctgaaaataacttggaacaaatatgcagtctgaggccccaagaatctaataataatctgaagcgtaaagccaatcaagagctcgagccacttgagcttgccgtcccatccactggtgctgcgccgcaatcgacaggaactgccccaagaaaaccactcaggttgaggttaacgactttggggaaaccgaagccagctgaaggaacttcctgaatggaattgcccaggagccaacatacctagagcttgtttttccttgtattgaagcaaggatatgtggaagcgctcggcacatagcctgctttggcactgcgagttgaaacgaaatggaaaacggaggccgcctgacgtaaatgagtgcgattgtaataaattgtatgtagttcatagctgggttggtatcagagttcaccatttcgtttttgctgtagcgaatttcgtttttttaaccaaagtttgactcttatattttttgaatttggaaccaaaatcc

SEQ ID NO: 32773 - protein, 364 aa, Zea mays subsp. mays
WKGWVESRLRTLVLKIERYSHEMILAHPYPKDFSDKSRPLHCFYFMGLWRKQTTQAQEAEQFDIRGIVNEFRNTICAYQHWKEGMDIEVSHVKRKEIPLFVFPGGVRPSRTSRTTHKNSRAIPTRDVSADDQVGNLLGVASCSDAQHVPCKGSYMKQPEPDFAGGFQLPGSISLLPPSLPNKVVLNGSANFHAESIESEHPEHYQESKFVAVQNTVCLVVKQPNSLLPNSNNNSQLYGSDSSLNSSKRECAGSAANNLLKLSPAIPATPDELDELISYQTNQKDVNAENNLEIGSENNLEQICSLRPQESNNNLKRKANQELEPLELAVPSTGAAPQSTGTAPRKPLRLRLTTLGKPKPAEGTS

SEQ ID NO: 32774 - protein, 342 aa, Zea mays subsp. mays
MILAHPYPKDFSDKSRPLHCFYFMGLWRKQTTQAQEAEQFDIRGIVNEFRNTICAYQHWKEGMDIEVSHVKRKEIPLFVFPGGVRPSRTSRTTHKNSRAIPTRDVSADDQVGNLLGVASCSDAQHVPCKGSYMKQPEPDFAGGFQLPGSISLLPPSLPNKVVLNGSANFHAESIESEHPEHYQESKFVAVQNTVCLVVKQPNSLLPNSNNNSQLYGSDSSLNSSKRECAGSAANNLLKLSPAIPATPDELDELISYQTNQKDVNAENNLEIGSENNLEQICSLRPQESNNNLKRKANQELEPLELAVPSTGAAPQSTGTAPRKPLRLRLTTLGKPKPAEGTS

SEQ ID NO: 32775 - protein, 319 aa, Zea mays subsp. mays
MGLWRKQTTQAQEAEQFDIRGIVNEFRNTICAYQHWKEGMDIEVSHVKRKEIPLFVFPGGVRPSRTSRTTHKNSRAIPTRDVSADDQVGNLLGVASCSDAQHVPCKGSYMKQPEPDFAGGFQLPGSISLLPPSLPNKVVLNGSANFHAESIESEHPEHYQESKFVAVQNTVCLVVKQPNSLLPNSNNNSQLYGSDSSLNSSKRECAGSAANNLLKLSPAIPATPDELDELISYQTNQKDVNAENNLEIGSENNLEQICSLRPQESNNNLKRKANQELEPLELAVPSTGAAPQSTGTAPRKPLRLRLTTLGKPKPAEGTS

SEQ ID NO: 32776 - DNA, 1322 bp, Zea mays subsp. mays
atcgcaaaaaccccaatccatccaaacccatttccctcgctcccatcccgtcccgccccttgtctcttccgcttccccccgaccccgcgcgccgcggaccagcagccatgtcgtgctcccacctctccaccgcctggtcctcctcggcgctcgccagcagcgcctccaccacccgacggcgctcccccccgcgctcgggtctcctggtgcggtgttccctccgtgagctccgcacccgcatcgactccgtcaggaacacgcagaagatcacggaggccatgaagctggtggccgccgccaaggtccggcgcgcgcaggaggccgtcgtctcctctcgccctttctcggaggcgctggtggaggtgctcctacaacatgaaccaggagatccagacggaggacatcgacctgcccctcacccgcacccgccccgtcaagaaggtggccctcgtggtcctgaccggcgagcgcggcctctgcgggagcttcaacaacaacgtgctcaagaaggcggaaacccgcatcgatgagctcaagcagctgggcctccagtacaccgtcgtcagcgtggggaagaagggcaacgcctacttccagcgccgcccctacatcccgttggagcgcgatctagaggtgagcagcgtgcccaccgtcaaggactcgcaggccatctgcgacctcgtctactcgctcttcgtctccgaggaggtggacaaggtggagctgctctactccaagttcgtgtcgctggtgcgctccgaccccatcatccagacgctgctccccatgtcgcccaagggcgagatctgcgacgtcaacggcgtctgcgtggacgccaccgaggacgagctcttccgcctcaccaccaaggaggggaagctcaccgtggagcgcgagaaggtgaagatcgagacgcagcccttctcccccgtggtgcagttcgagcaggaccccgtgcagatcctggacgcgctgctcccgctctacctcaacagccagatcctccgtgccctgcaggagtcgctcgccagcgagctcgccgcccggatgagcgccatgagcagcgccaccgacaacgccatcgagctccgcaagaacctctccatcgcctacaaccgacagcgccaggccaagatcaccggggagatcctcgagatcgtcgccggtgccgacgccctcgctggctgagcctgagtccccttggtggtgcggtgctcctgctatatataattctttttcctcattttctccactctgcctgtaattcctgataatagcaaacacaacggagttctgtgttccttgcgacacacaagaatttc

SEQ ID NO: 32777 - protein, 270 aa, Zea mays subsp. mays
MNQEIQTEDIDLPLTRTRPVKKVALVVLTGERGLCGSFNNNVLKKAETRIDELKQLGLQYTVVSVGKKGNAYFQRRPYIPLERDLEVSSVPTVKDSQAICDLVYSLFVSEEVDKVELLYSKFVSLVRSDPIIQTLLPMSPKGEICDVNGVCVDATEDELFRLTTKEGKLTVEREKVKIETQPFSPVVQFEQDPVQILDALLPLYLNSQILRALQESLASELAARMSAMSSATDNAIELRKNLSIAYNRQRQAKITGEILEIVAGADALAG

SEQ ID NO: 32778 - protein, 175 aa, Zea mays subsp. mays
RKNPNPSKPISLAPIPSRPLSLPLPPDPARRGPAAMSCSHLSTAWSSSALASSASTTRRRSPPRSGLLVRCSLRELRTRIDSVRNTQKITEAMKLVAAAKVRRAQEAVVSSRPFSEALVEVLLQHEPGDPDGGHRPAPHPHPPRQEGGPRGPDRRARPLRELQQQRAQEGGNPHR

SEQ ID NO: 32779 - protein, 140 aa, Zea mays subsp. mays
MSCSHLSTAWSSSALASSASTTRRRSPPRSGLLVRCSLRELRTRIDSVRNTQKITEAMKLVAAAKVRRAQEAVVSSRPFSEALVEVLLQHEPGDPDGGHRPAPHPHPPRQEGGPRGPDRRARPLRELQQQRAQEGGNPHR

SEQ ID NO: 32780 - DNA, 961 bp, Zea mays subsp. mays
gaacctcagccttccgacatcaccgccgacgccatggccggctctccccgccacctctccctctttcccctgcgcctcctgttacttcttccgctgctcgctgcgggtaaacccgtcctcgaggacggttacacggtcaccaccttcgccgacctcaacccgctcccggcctccgggccacacccctacgcagtcctcccgcggtcccgcgccggcgacctcctcctcctcgactccgccggctccgcgctctacactatctccctctcctcctcccccggcgagccgcgcaggctggcagggggcaaacgaggctccgggttcaacgacggcgggcccggcgacgccgcctttgaccgcccgcgcagcgtcgccgtcgatgccgccgacaacgtatacgtcgccgaccgcctccatggtgccgtccgcaaggtcgcgccctccggttacactactacaattgctggagggttctcatcagggcctggtcacagggatggaccagcacagaatgctactttctcgtcagattttgcacttgtttatgtcccgaagatttgtgccttgttagtagctgacagaggaaatcgaatggttagacaaattaatctaaagccagaagattgtgcacatgaaaaacaatcaggtaaatactgaatgggcctccaacttgctgtataggcaccgtaacttagtatcttactcgtgtctagtgcttaagttattgtgttttaccatggccacttgttttgtcaataaaatctgtgttgtggtatcactgtctttcaatttacaaatttcacgcatagcctgagatgtgcagaaaggctttgtagaatgtgctgattcttccagtgtgtataagtagcttctttgatatgtacattgccttatctggatatgcattaaggcattggtccatcatttaacttatattttagacacttggagattcaattat

SEQ ID NO: 32781 - protein, 218 aa, Zea mays subsp. mays
EPQPSDITADAMAGSPRHLSLFPLRLLLLLPLLAAGKPVLEDGYTVTTFADLNPLPASGPHPYAVLPRSRAGDLLLLDSAGSALYTISLSSSPGEPRRLAGGKRGSGFNDGGPGDAAFDRPRSVAVDAADNVYVADRLHGAVRKVAPSGYTTTIAGGFSSGPGHRDGPAQNATFSSDFALVYVPKICALLVADRGNRMVRQINLKPEDCAHEKQSGKY

SEQ ID NO: 32782 - protein, 207 aa, Zea mays subsp. mays
MAGSPRHLSLFPLRLLLLLPLLAAGKPVLEDGYTVTTFADLNPLPASGPHPYAVLPRSRAGDLLLLDSAGSALYTISLSSSPGEPRRLAGGKRGSGFNDGGPGDAAFDRPRSVAVDAADNVYVADRLHGAVRKVAPSGYTTTIAGGFSSGPGHRDGPAQNATFSSDFALVYVPKICALLVADRGNRMVRQINLKPEDCAHEKQSGKY

SEQ ID NO: 32783 - protein, 189 aa, Zea mays subsp. mays
NLSLPTSPPTPWPALPATSPSFPCASCYFFRCSLRVNPSSRTVTRSPPSPTSTRSRPPGHTPTQSSRGPAPATSSSSTPPAPRSTLSPSPPPPASRAGWQGANEAPGSTTAGPATPPLTARAASPSMPPTTYTSPTASMVPSARSRPPVTLLQLLEGSHQGLVTGMDQHRMLLSRQILHLFMSRRFVPC

SEQ ID NO: 32784 - DNA, 902 bp, Zea mays subsp. mays
ccctaataatcggctatcctgtcagtttccctctcccctcccgaaaccggattccgtaccgaatctggtctcgccttggagccgaggttgcacgcggttcgtcctgcggccatggatgacgaggagcacgaggtgtacggacaggagatccccgttgacggcgaggacgtcgacatgtctgccggcgacgacgccaccaagcttcaggagctcgatgagatgaagcgccggctcaaggagatggaggaggaagccgccgcgctccgcgagatgcaggctaaggtcgccaaggatatgcaagatcccaatgcaaccacatctgaaaacaaagaggagatggattctcggtcggtattcgttggaaatgttgactatgcatgcactccagaagaagtgcagcagcacttcaattcttgtggaactgttaacagagtgacaatcctgactgacaagtttgggcaaccaaaaggttttgcttatgtggaatttgttgaagttgaagctgttcaggaagctattaagttgaatgaatcagaattgcatggtcgccagctcaaggtggcaccgaagaggactaacattcctgggatgaagcaactccgcggtcgaggtttcaatccataccggccatatggttatagtccttatggttatggctatggctacgggagattccccagattccgccgcccgcgaagaccttatttttgaagctcgtatgtccatatggtttgcagaacatggacgatgagacggcttgaccttatattcccgcgttctattacttcatagcttattcgggatgttctaagacatgttatttccatattgacgatgcttaagatttgtactgtattgtttcagtgacagttatgcaaaacgattatggtctagttacgcgg

SEQ ID NO: 32785 - protein, 199 aa, Zea mays subsp. mays
MDDEEHEVYGQEIPVDGEDVDMSAGDDATKLQELDEMKRRLKEMEEEAAALREMQAKVAKDMQDPNATTSENKEEMDSRSVFVGNVDYACTPEEVQQHFNSCGTVNRVTILTDKFGQPKGFAYVEFVEVEAVQEAIKLNESELHGRQLKVAPKRTNIPGMKQLRGRGFNPYRPYGYSPYGYGYGYGRFPRFRRPRRPYF

SEQ ID NO: 32786 - protein, 178 aa, Zea mays subsp. mays
MSAGDDATKLQELDEMKRRLKEMEEEAAALREMQAKVAKDMQDPNATTSENKEEMDSRSVFVGNVDYACTPEEVQQHFNSCGTVNRVTILTDKFGQPKGFAYVEFVEVEAVQEAIKLNESELHGRQLKVAPKRTNIPGMKQLRGRGFNPYRPYGYSPYGYGYGYGRFPRFRRPRRPYF

SEQ ID NO: 32787 - protein, 163 aa, Zea mays subsp. mays
MKRRLKEMEEEAAALREMQAKVAKDMQDPNATTSENKEEMDSRSVFVGNVDYACTPEEVQQHFNSCGTVNRVTILTDKFGQPKGFAYVEFVEVEAVQEAIKLNESELHGRQLKVAPKRTNIPGMKQLRGRGFNPYRPYGYSPYGYGYGYGRFPRFRRPRRPYF

SEQ ID NO: 32788 - DNA, 567 bp, Zea mays subsp. mays
gccatctgcaaacctacttctatactttcaggaggatgtatctgtggtagatcattggcttgtcagtggcacgcattatgctagaactagcgaggagtggctaaaacgtatggacaagagcatcacttcagtaaggctgatcttcgaggaaacttatgggaaggaatcgactaccaaatggatagcttattggcggacgttcttcatctcggtagctgaactttttggatacaacaatggagatgaatggatggttgcccattacttgttccgaaagaagtagaggctactgcttggaagtacccaatcaaaaatcaatgttttcagtaattttgtcatgtacactgacgaacaactccttttctggcacgtagttgtatctcgtaccgacttcgtagtggtttcaaaaacaaaatctggaatccctgttgtgaaatttcatcttggacagcgcctgcatatgctttgcagagttacgctaattcttgcaactatgccttcagatgtttgtagagttaggctcattcttgaaagaaaacaaaggattgtttttttagataataatgg

SEQ ID NO: 32789 - protein, 93 aa, Zea mays subsp. mays
PSANLLLYFQEDVSVVDHWLVSGTHYARTSEEWLKRMDKSITSVRLIFEETYGKESTTKWIAYWRTFFISVAELFGYNNGDEWMVAHYLFRKK

SEQ ID NO: 32790 - protein, 76 aa, Zea mays subsp. mays
MYTDEQLLFWHVVVSRTDFVVVSKTKSGIPVVKFHLGQRLHMLCRVTLILATMPSDVCRVRLILERKQRIVFLDNN

SEQ ID NO: 32791 - protein, 57 aa, Zea mays subsp. mays
MDKSITSVRLIFEETYGKESTTKWIAYWRTFFISVAELFGYNNGDEWMVAHYLFRKK

SEQ ID NO: 32792 - DNA, 1502 bp, Zea mays subsp. mays
gaagctgcccagagctaccacccctcttatccccacccctcctcctcctaccttttctccttcagacctcaaaatctgtgtgataggaacaagagcatgcacatccgagaagaggaggctacaccatccacagtaacaggcatcatgtcgaccctgacttcggcggggcagcagaagctgaaggagcccatatcccctggtggcggctccgcgtcggtcgctgggtccgctgcggagaggaacaacggcggcaggggcaagggcaagactgagatcaagcgcatcgagaacacgaccaacaggcaggtcaccttctgcaagcgccgcaacggcctcctcaagaaggcgtacgagctctccgtgctctgcgacgccgaggtcgcgctcatcgtcttctccagccgcggccgcctctacgagtacgccaacaacagcgtgaagggcaccattgagaggtacaagaaggcaaccagtgacaactccagcgcagctggtacgattgcagaggtcaccattcagcattacaagcaggaatctgctaggctgaggcagcagatcgttaacttgcagaactccaacagggccctgataggtgattctatcacaaccatgagccacaaggaacttaagcacttggagactaggttagacaaagctctcggaaagattagagcaaaaaagaacgatgtgctgtgttctgaagtcgagtacatgcagagaagggaaatggagttgcagaatgacaacttgtacttaaggagccgggttgatgagaatgaaagggcacaacagacagcgaacatgatgggggcaccatcgacaagtgagtatcagcagcacggttttactccttatgatccaataaggagcttcctgcagttcaacatcgtgcagcagcctcagttctattctcagcaggaggaccggaaagacttcaacgaccaaggtggaagataaatattggacctctcaagcttcagtacttatccgtgatgatgcatgacgtactgccagtgagaaactgagctacattactgtggaattatatgtaaagactagtactactgcttcatatgtgcatggcacacgcgcacgtagtatgcacaatttcatcccactattatggcttggcaccaactatgtctccttaattatcataggagaaaaataagtcacgcacaaaaaaattctaaagatgaggcgcagtgttggatgactgaaactgaaagataggattctcgtggatggcggtggtcatatacggcctgttttggttgatgtacccgagcgcacccgcggaatcttaaagcaagttgtgtttaattgactgcactttatatacgggttgaacagatgtaattcgagggctgcaaccaggctaagggcatacgcggctggcagccgtatgcccgcgtgcaggcgctgccaatgcagcagcacacaaaacgatgtatagtttatgtgtgtttttctattatatctttcaataaaaagatttaacc

SEQ ID NO: 32793 - protein, 318 aa, Zea mays subsp. mays
EAAQSYHPSYPHPSSSYLFSFRPQNLCDRNKSMHIREEEATPSTVTGIMSTLTSAGQQKLKEPISPGGGSASVAGSAAERNNGGRGKGKTEIKRIENTTNRQVTFCKRRNGLLKKAYELSVLCDAEVALIVFSSRGRLYEYANNSVKGTIERYKKATSDNSSAAGTIAEVTIQHYKQESARLRQQIVNLQNSNRALIGDSITTMSHKELKHLETRLDKALGKIRAKKNDVLCSEVEYMQRREMELQNDNLYLRSRVDENERAQQTANMMGAPSTSEYQQHGFTPYDPIRSFLQFNIVQQPQFYSQQEDRKDFNDQGGR

SEQ ID NO: 32794 - protein, 286 aa, Zea mays subsp. mays
MHIREEEATPSTVTGIMSTLTSAGQQKLKEPISPGGGSASVAGSAAERNNGGRGKGKTEIKRIENTTNRQVTFCKRRNGLLKKAYELSVLCDAEVALIVFSSRGRLYEYANNSVKGTIERYKKATSDNSSAAGTIAEVTIQHYKQESARLRQQIVNLQNSNRALIGDSITTMSHKELKHLETRLDKALGKIRAKKNDVLCSEVEYMQRREMELQNDNLYLRSRVDENERAQQTANMMGAPSTSEYQQHGFTPYDPIRSFLQFNIVQQPQFYSQQEDRKDFNDQGGR

SEQ ID NO: 32795 - protein, 270 aa, Zea mays subsp. mays
MSTLTSAGQQKLKEPISPGGGSASVAGSAAERNNGGRGKGKTEIKRIENTTNRQVTFCKRRNGLLKKAYELSVLCDAEVALIVFSSRGRLYEYANNSVKGTIERYKKATSDNSSAAGTIAEVTIQHYKQESARLRQQIVNLQNSNRALIGDSITTMSHKELKHLETRLDKALGKIRAKKNDVLCSEVEYMQRREMELQNDNLYLRSRVDENERAQQTANMMGAPSTSEYQQHGFTPYDPIRSFLQFNIVQQPQFYSQQEDRKDFNDQGGR

SEQ ID NO: 32796 - DNA, 464 bp, Zea mays subsp. mays
ttcaaattatatctttaagcatccatttttcgccctactggtgcaaacaagaatttgcaatgggtaggttactggctgcacttgtttttgaatacttggagtgaccacaactaagtcacacaatgaaactttactttccagagtgtaacctgccggacttctgatagaatgaactgaaagacttctctaacaaaagtggagctgaggggagcaagagtgctgaaagtggtccaatgtttttagatgttctcgaatgttatctgaaatatgaggtttatctcttgcttgatcaacaatagaagcaaaaaatcatccttttgtttatttatgtttcccaatataaaggaaaaggggaaatattttggtgcagtgtgcccaattcttttgtctctagaaaactatgtagtcacctatagcaggcgctatagtcagttttagctattttagacaccactactatttgt

SEQ ID NO: 32797 - protein, 56 aa, Zea mays subsp. mays
MRFISCLINNRSKKSSFCLFMFPNIKEKGKYFGAVCPILLSLENYVVTYSRRYSQF

SEQ ID NO: 32798 - protein, 36 aa, Zea mays subsp. mays
MFPNIKEKGKYFGAVCPILLSLENYVVTYSRRYSQF

SEQ ID NO: 32799 - protein, 33 aa, Zea mays subsp. mays
QIISLSIHFSPYWCKQEFAMGRLLAALVFEYLE

SEQ ID NO: 32800 - DNA, 1385 bp, Zea mays subsp. mays
acagtttgcatttccactttcatccgtcagactcagacatcgcagtcaccgcgcacccaagtgctgcaaaccacatctaaccccaatcctcccaaattctccaccgccatggctctctcctccctcttcatcatcctccccgtccccaaggtcccctactccaactactcccgccgcttgctcactgcccgggcgtcctctgacgctcccgctgcctctgcgtcattcgacctgcgccgctattggacctctctgatcgccgatgtggagtccgaactcgacgccgcgatgcccatgcagcctccggagagcatccactccgccatgcggtacgcggtgctcccgggcgccggcaaggagggagccgccaagcgggcgccccccgtgctctgcgtcgccgcgtgcgagctcctcggcgccccgcgcgcggccgcactccccgccgccgccgcgctggagatgctccacgcggcgtcgctcgtgcacgacgacctgccctgcttcgacgcagcccccacgcgacgtgggcgcccatccacgcacgcggcgtacggcaccgacatggccgtcctcgcgggcgacgctctcttcccgctcgcctacacccacgtcatctcccacaccccgtgcccggacccggtcccccacgccgtcctcctgcgcgtcctcgcggagctcgctcgtgcggtcggatccacgggcatggcggccggtcagttcctcgatctggccggcgctaccgcccttggtgaggccgaggtcatgcaggtcctgacgaagaagttcggcgagatggccgagtgctccgccgcctgcggcgccatgctcggtggggccgggcccgacgaggaggccgcgttgcggcgctacggccgcaccatcggcgtcctgtacgagctcgtggacgacatccggagcgcatcgggaaacggcaagatgaggagcaacgccagcgtcctgcgctcgctggggatggaccgcgcgctcggcattgtggaggagctcaaggctcaggccaagacagaggctgacaagttctcggataagtacggcgatcgggtgctgcctttatacagctttgtggactacgcggtggagagagggtttgagctccaggatgcagcggcaactctgtagagtggacgatcgctgttgctactgaacattggaggcttcgagctagtgagatgtacatggcccaggaatttggtgagagctttatctggcatagatctaatccctattttatctagatgttctgaagctcgtaattcgggggatggttcataatggagaattgttatcccggcattagatgtttagaacttgaaattgggtttgatacttgtagtaagctaataaaactaagtggtaaatgctcatgc

SEQ ID NO: 32801 - protein, 378 aa, Zea mays subsp. mays
TVCISTFIRQTQTSQSPRTQVLQTTSNPNPPKFSTAMALSSLFIILPVPKVPYSNYSRRLLTARASSDAPAASASFDLRRYWTSLIADVESELDAAMPMQPPESIHSAMRYAVLPGAGKEGAAKRAPPVLCVAACELLGAPRAAALPAAAALEMLHAASLVHDDLPCFDAAPTRRGRPSTHAAYGTDMAVLAGDALFPLAYTHVISHTPCPDPVPHAVLLRVLAELARAVGSTGMAAGQFLDLAGATALGEAEVMQVLTKKFGEMAECSAACGAMLGGAGPDEEAALRRYGRTIGVLYELVDDIRSASGNGKMRSNASVLRSLGMDRALGIVEELKAQAKTEADKFSDKYGDRVLPLYSFVDYAVERGFELQDAAATL

SEQ ID NO: 32802 - protein, 342 aa, Zea mays subsp. mays
MALSSLFIILPVPKVPYSNYSRRLLTARASSDAPAASASFDLRRYWTSLIADVESELDAAMPMQPPESIHSAMRYAVLPGAGKEGAAKRAPPVLCVAACELLGAPRAAALPAAAALEMLHAASLVHDDLPCFDAAPTRRGRPSTHAAYGTDMAVLAGDALFPLAYTHVISHTPCPDPVPHAVLLRVLAELARAVGSTGMAAGQFLDLAGATALGEAEVMQVLTKKFGEMAECSAACGAMLGGAGPDEEAALRRYGRTIGVLYELVDDIRSASGNGKMRSNASVLRSLGMDRALGIVEELKAQAKTEADKFSDKYGDRVLPLYSFVDYAVERGFELQDAAATL

SEQ ID NO: 32803 - protein, 282 aa, Zea mays subsp. mays
MPMQPPESIHSAMRYAVLPGAGKEGAAKRAPPVLCVAACELLGAPRAAALPAAAALEMLHAASLVHDDLPCFDAAPTRRGRPSTHAAYGTDMAVLAGDALFPLAYTHVISHTPCPDPVPHAVLLRVLAELARAVGSTGMAAGQFLDLAGATALGEAEVMQVLTKKFGEMAECSAACGAMLGGAGPDEEAALRRYGRTIGVLYELVDDIRSASGNGKMRSNASVLRSLGMDRALGIVEELKAQAKTEADKFSDKYGDRVLPLYSFVDYAVERGFELQDAAATL

SEQ ID NO: 32804 - DNA, 1097 bp, Zea mays subsp. mays
acatcctaatcgaaaagtaccttctgcagcaagtagtgaccaggagcgagcagccgaggaaaggagtcaagcgaatcccaaagttgagctattttctcaagcacgtgattgtcttctcccaatgggcctcacatctgagaatgttgcacaccgttttggcataacacgactggagcaagatcaagctgctgttgagtcacatagaaaggctgctgccgcagcagctgctggtaaattcaaagaggaaattgtgccagttcatacaaagattgttgatccaaaaactggtgaggaaaagaagatcgtaatctcagcagatgatggaatccgagtggatacttctcttgcagtcctgtcaaaactcaaaccagcattttcaaaggatggcagcactactgctgggaatgcaagccaagtgagcgatggcgctggggccgtcttgctaatgagacgggatgttgctatgaaaaagggtcttccagttcttggtgtctttaggacctttgccgctgttggagttgatccagctgtaatgggtattggtcctgccgttgcaatccctgcagcagtgaaagctgctggccttcagatggatgatatcgatcttttcgaaatcaacgaggcttttgcatctcagtatgtctactgctgcaagaagttggaacttgatcctgctaaagtcaatgttaatggcggtgcaatggctcttggacatcctttgggtgctacaggtgcacggtgcgtcagtactcttctcaatgagataaagcgccgcggcaaagattgccggttcggagtgatttctatgtgcataggttctgggatgggtgctgctgctgtgttcgagcggggagacggcgttgatgagctcaccaatgctcggggaatctcgacccacaactggctttccaaggacgccatgtaaagctacacccaccaaaatttgccggaactggtagcattgtttccagatcgctgtagggagcgaattggggaataaaatgattttgtatctgtcgcccctgctggggatttaggaagatttttacgccactggtatttgaacttgcttacctggaaagatgcgtgaataactg

SEQ ID NO: 32805 - protein, 307 aa, Zea mays subsp. mays
HPNRKVPSAASSDQERAAEERSQANPKVELFSQARDCLLPMGLTSENVAHRFGITRLEQDQAAVESHRKAAAAAAAGKFKEEIVPVHTKIVDPKTGEEKKIVISADDGIRVDTSLAVLSKLKPAFSKDGSTTAGNASQVSDGAGAVLLMRRDVAMKKGLPVLGVFRTFAAVGVDPAVMGIGPAVAIPAAVKAAGLQMDDIDLFEINEAFASQYVYCCKKLELDPAKVNVNGGAMALGHPLGATGARCVSTLLNEIKRRGKDCRFGVISMCIGSGMGAAAVFERGDGVDELTNARGISTHNWLSKDAM

SEQ ID NO: 32806 - protein, 267 aa, Zea mays subsp. mays
MGLTSENVAHRFGITRLEQDQAAVESHRKAAAAAAAGKFKEEIVPVHTKIVDPKTGEEKKIVISADDGIRVDTSLAVLSKLKPAFSKDGSTTAGNASQVSDGAGAVLLMRRDVAMKKGLPVLGVFRTFAAVGVDPAVMGIGPAVAIPAAVKAAGLQMDDIDLFEINEAFASQYVYCCKKLELDPAKVNVNGGAMALGHPLGATGARCVSTLLNEIKRRGKDCRFGVISMCIGSGMGAAAVFERGDGVDELTNARGISTHNWLSKDAM

SEQ ID NO: 32807 - protein, 159 aa, Zea mays subsp. mays
MRRDVAMKKGLPVLGVFRTFAAVGVDPAVMGIGPAVAIPAAVKAAGLQMDDIDLFEINEAFASQYVYCCKKLELDPAKVNVNGGAMALGHPLGATGARCVSTLLNEIKRRGKDCRFGVISMCIGSGMGAAAVFERGDGVDELTNARGISTHNWLSKDAM

SEQ ID NO: 32808 - DNA, 1691 bp, Zea mays subsp. mays
agtttctcctgggagcttgcctgtgtcgaacatggcggtggctgcgacgacggttctggacatcgcggagctctccttctccgacttagtcgccctcctatctcccgagactcttgctgacgacggccgctgccgacgtgttgtggacaccgtcgcaaccgagctcggccgaggtgggtccgggttgctggccatcgacggagtgccgcgcatgggcgccctccggcgacgactcctccccttggcccgacgcgtcgccctcatggatcacctgacccgctcccaactcctcaagaagcacgggttgggcagcgacgttcctttgaagaagctcgatcggtccgtatcctcgttcgcgcagcttctaaggcattcaggtgaactcgtcttgctagagtcggtaaacaacaatgggttcaattcttctgatagggtacaggattgtaaccaatccgaggatgttaatgatgatgatgctgatgatatggataatctgggtgacctcattaaggagcttggtttgtacatgatggagcttggaatcttgattgcacgagcttgcgatattgtcatcggtagaggtcagctagagcagagcatcactgactttgggacggcaaaggctaggctcattcactaccactctgagctggataacattgtgatcagggataacagtgcaaagaggaaagtttcggcaagtaaagtggcagtacagccttaccagtcatgctctggaagtaggtccgggtcagtgtgcccgtgctgtattaagtcagaagatgggactactgtaatgccaatagaagaaaataattctaatgatgcctcgattcagggtcaggctgctgaaatttccctgttaaacctatggcaggaatggcactatgactatggaatcttcactgttttaacagcaccgttgttcatgagcgtctctgaggatgaaaaaagtttggtcaatctggaatatcatcctcctgatggccacacacacttacagttatgcaatggaaggaagatattctccattagatgctctcctgagagcttcattgttcaagttggagaggcagcagacatcttgtcccaagggaaattgaaatctacacttcatgctgtgagtagaccttcgagttccacagacatcagccgtgagacttttgttgtcttcctacagccctcgtgggacaaacttttagcttatcctggttactctttagatgctgaaggtgaacccattcttagcaagcagacttcaatcatcagtgatggatcagcagggccttgtaatgaagatgcatttatgcaagaaattctgaaaaaagttccacctctatcatcaaggctaaaagaagggatgacatttgcagaattttctcgtcagacaacaaaacagtattatggtggcaatggcatccaacagaacaattgagcacttgcaatacaatggcaatgcatgtagcacacaatgaactgatgtattgacttgcattttgatactgatttggatgcacaaaactaaagcatcctggcaaacaatgcatactgctgatcctccttgatgactaagttttgcaattgtttgttgggaatagtcccacattgtgagttgtgggtgggcaaacatgatttatatggttgaggttacaaccttctaataggctaactttttggtgagtattggatcg

SEQ ID NO: 32809 - protein, 477 aa, Zea mays subsp. mays
VSPGSLPVSNMAVAATTVLDIAELSFSDLVALLSPETLADDGRCRRVVDTVATELGRGGSGLLAIDGVPRMGALRRRLLPLARRVALMDHLTRSQLLKKHGLGSDVPLKKLDRSVSSFAQLLRHSGELVLLESVNNNGFNSSDRVQDCNQSEDVNDDDADDMDNLGDLIKELGLYMMELGILIARACDIVIGRGQLEQSITDFGTAKARLIHYHSELDNIVIRDNSAKRKVSASKVAVQPYQSCSGSRSGSVCPCCIKSEDGTTVMPIEENNSNDASIQGQAAEISLLNLWQEWHYDYGIFTVLTAPLFMSVSEDEKSLVNLEYHPPDGHTHLQLCNGRKIFSIRCSPESFIVQVGEAADILSQGKLKSTLHAVSRPSSSTDISRETFVVFLQPSWDKLLAYPGYSLDAEGEPILSKQTSIISDGSAGPCNEDAFMQEILKKVPPLSSRLKEGMTFAEFSRQTTKQYYGGNGIQQNN

SEQ ID NO: 32810 - protein, 467 aa, Zea mays subsp. mays
MAVAATTVLDIAELSFSDLVALLSPETLADDGRCRRVVDTVATELGRGGSGLLAIDGVPRMGALRRRLLPLARRVALMDHLTRSQLLKKHGLGSDVPLKKLDRSVSSFAQLLRHSGELVLLESVNNNGFNSSDRVQDCNQSEDVNDDDADDMDNLGDLIKELGLYMMELGILIARACDIVIGRGQLEQSITDFGTAKARLIHYHSELDNIVIRDNSAKRKVSASKVAVQPYQSCSGSRSGSVCPCCIKSEDGTTVMPIEENNSNDASIQGQAAEISLLNLWQEWHYDYGIFTVLTAPLFMSVSEDEKSLVNLEYHPPDGHTHLQLCNGRKIFSIRCSPESFIVQVGEAADILSQGKLKSTLHAVSRPSSSTDISRETFVVFLQPSWDKLLAYPGYSLDAEGEPILSKQTSIISDGSAGPCNEDAFMQEILKKVPPLSSRLKEGMTFAEFSRQTTKQYYGGNGIQQNN

SEQ ID NO: 32811 - protein, 407 aa, Zea mays subsp. mays
MGALRRRLLPLARRVALMDHLTRSQLLKKHGLGSDVPLKKLDRSVSSFAQLLRHSGELVLLESVNNNGFNSSDRVQDCNQSEDVNDDDADDMDNLGDLIKELGLYMMELGILIARACDIVIGRGQLEQSITDFGTAKARLIHYHSELDNIVIRDNSAKRKVSASKVAVQPYQSCSGSRSGSVCPCCIKSEDGTTVMPIEENNSNDASIQGQAAEISLLNLWQEWHYDYGIFTVLTAPLFMSVSEDEKSLVNLEYHPPDGHTHLQLCNGRKIFSIRCSPESFIVQVGEAADILSQGKLKSTLHAVSRPSSSTDISRETFVVFLQPSWDKLLAYPGYSLDAEGEPILSKQTSIISDGSAGPCNEDAFMQEILKKVPPLSSRLKEGMTFAEFSRQTTKQYYGGNGIQQNN

SEQ ID NO: 32812 - DNA, 1534 bp, Zea mays subsp. mays
tccaaattccccggtcacctacctcctctgccctctcactctcagatccgcgtcctcggctcctcctcctcctcctcctcctcccttccttcgttccttccagatctccctcccagtcgagagtcgagatccaccgcctccgcgccccctcaccggtgcagcgcgaggaagcggggggccagaggccagccatgggcaaggaaggggccagcgacggcggcatgtcggagtcggtgatccgcaaggtcctggtctcgtacatgtacgtggcggtgtggatcttcctctccttctccgtgatcgtctacaacaagtacatcctcgaccccaagatgtacaactggcccttccccatctccctcaccatggtgcacatggccttctgctcctccctcgccgtggcgctcgtccgcgtcctccgcgtcgtcgacctcccgtcctcgcccgccatgacgtcgcagctctacgtctcctccgtgctccctatcggcgcgctctactcgctctcgctctggttctccaactccgcctacatctacctctccgtctccttcatccagatgctcaaggcgctcatgcccgtcgccgtctactccatcggggtcctcttcaagaaggagaccttcaagtcctccgccatgctcaacatgctctccatctcgttcggcgtcgccatcgccgcctacggagaggcccgcttcgacgcccgcggcgtcgccctgcagctcgccgccgtcgccttcgaggccacgcgcctcgtcctcatccagatcctcctcacctccaagggcatctccctcaaccccatcacctcgctctactacgtcgcgccctgctgcctcgctttcctcgtcgtgccctgggtcttcgtcgagctgcccaggctgcgcgccgtcggcatcttccagccggacctcttcgtcttcggcaccaactccctctgcgccttcgcgctcaacctcgccgtcttcctgctcgtcggcaagacgtcggctctcaccatgaacgtcgccggcgtcgtcaaggactggctgctcatcgccttctcctggtccgtcatccgcgacaccgtcacccccatcaacctcttcggctacgggatcgccttcctcggggtgggatactacaaccacgtcaagctgcaggcgctcaaggccaaggaggcgcagaagaaggcgacgcaggccgacgaggaggccgggtcgctgctgcaggagcgcgactcgcacggcgaccgcaagactgacaaccaggcctagcgagtgtgccggatctcatgatccaattcgctcggttctgaacccagtgtactccaaatatgtgatccaacccttacacgtttgatgcaaaatttgttcatttcttgtctttgacttgatctggtggtaccaaggaaataagcacgggaaagatgcaagctttgtgtcgaacatgtgaaaaaaaatatatatgtatgagcaattttttgtcttttttttggggccagttgtagctgttactaccattaaacagtaagcaaaactgtttgcatttt

SEQ ID NO: 32813 - protein, 418 aa, Zea mays subsp. mays
QIPRSPTSSALSLSDPRPRLLLLLLLLPSFVPSRSPSQSRVEIHRLRAPSPVQREEAGGQRPAMGKEGASDGGMSESVIRKVLVSYMYVAVWIFLSFSVIVYNKYILDPKMYNWPFPISLTMVHMAFCSSLAVALVRVLRVVDLPSSPAMTSQLYVSSVLPIGALYSLSLWFSNSAYIYLSVSFIQMLKALMPVAVYSIGVLFKKETFKSSAMLNMLSISFGVAIAAYGEARFDARGVALQLAAVAFEATRLVLIQILLTSKGISLNPITSLYYVAPCCLAFLVVPWVFVELPRLRAVGIFQPDLFVFGTNSLCAFALNLAVFLLVGKTSALTMNVAGVVKDWLLIAFSWSVIRDTVTPINLFGYGIAFLGVGYYNHVKLQALKAKEAQKKATQADEEAGSLLQERDSHGDRKTDNQA

SEQ ID NO: 32814 - protein, 414 aa, Zea mays subsp. mays
PNSPVTYLLCPLTLRSASSAPPPPPPPPFLRSFQISLPVESRDPPPPRPLTGAARGSGGPEASHGQGRGQRRRHVGVGDPQGPGLVHVRGGVDLPLLLRDRLQQVHPRPQDVQLALPHLPHHGAHGLLLLPRRGARPRPPRRRPPVLARHDVAALRLLRAPYRRALLALALVLQLRLHLPLRLLHPDAQGAHARRRLLHRGPLQEGDLQVLRHAQHALHLVRRRHRRLRRGPLRRPRRRPAARRRRLRGHAPRPHPDPPHLQGHLPQPHHLALLRRALLPRFPRRALGLRRAAQAARRRHLPAGPLRLRHQLPLRLRAQPRRLPARRQDVGSHHERRRRRQGLAAHRLLLVRHPRHRHPHQPLRLRDRLPRGGILQPRQAAGAQGQGGAEEGDAGRRGGRVAAAGARLARRPQD

SEQ ID NO: 32815 - protein, 355 aa, Zea mays subsp. mays
MGKEGASDGGMSESVIRKVLVSYMYVAVWIFLSFSVIVYNKYILDPKMYNWPFPISLTMVHMAFCSSLAVALVRVLRVVDLPSSPAMTSQLYVSSVLPIGALYSLSLWFSNSAYIYLSVSFIQMLKALMPVAVYSIGVLFKKETFKSSAMLNMLSISFGVAIAAYGEARFDARGVALQLAAVAFEATRLVLIQILLTSKGISLNPITSLYYVAPCCLAFLVVPWVFVELPRLRAVGIFQPDLFVFGTNSLCAFALNLAVFLLVGKTSALTMNVAGVVKDWLLIAFSWSVIRDTVTPINLFGYGIAFLGVGYYNHVKLQALKAKEAQKKATQADEEAGSLLQERDSHGDRKTDNQA

SEQ ID NO: 32816 - DNA, 1048 bp, Zea mays subsp. mays
aaccgcaaggatccaccacaacagcgaaggagaaagcagaccaacctagccacccagggagaaaggccaaaagggaggggagagtgtcgtcatggcttccattgtcgcttccaggagggccgttcctctagttcgctctctggagaagctcatcgcagcgtcctccgcgcccgggactggctccgccctcaggccggtggcagtcgccggcggcctccgtggctacaacaccggcgctccgctccgacgctacgagggggccgagtcggaagacgatagcgtccgcgagtacgatgggcggcacggcggccgggactacgccgtgcccagcctgttctcagatattttccgtgatccgcttagtgcgccgcacagcattggccgcctgctgaacctgatggacgacttggcggtggcggcgccaggtcgtgcggtgcgccgtggctggaacgcgaaggaggacgaggaggcgctgcacctgagggtggacatgccgggcctggggaaggagcacgtcaaggtgtgggcggagcagaacagcctggtgatcaagggcgagggcgagaaggaggatagcgaggacgaggccgccccgcctccgagatacagcggtcgcatcgagctcgcgccagaggtttacaggatggacaagatcaaggcggagatgaagaacggcgtgctcaaggtggtcgtgccgaaggtgaaggagcagcagcgcaaggacgtgttccaagtcaacgtcgagtagatgtttccaaatagaagcaagtgccggtacgggatggaggattggagcctggaggggcactgccaaactaggattcctctctctcaatctgatctggattctggaatcagatttctcttctttcatttttctcgtctatcttctatcagtatgaaataagcaacgtcgcttcagttttcgtgtcaaggccggtggagtcgcctatgtttattttattttctttgtatttcctacctggacacacgttctctatgccgtgtttggtttccgcagatttttaaaatatgcatgttcaaaccc

SEQ ID NO: 32817 - protein, 218 aa, Zea mays subsp. mays
MASIVASRRAVPLVRSLEKLIAASSAPGTGSALRPVAVAGGLRGYNTGAPLRRYEGAESEDDSVREYDGRHGGRDYAVPSLFSDIFRDPLSAPHSIGRLLNLMDDLAVAAPGRAVRRGWNAKEDEEALHLRVDMPGLGKEHVKVWAEQNSLVIKGEGEKEDSEDEAAPPPRYSGRIELAPEVYRMDKIKAEMKNGVLKVVVPKVKEQQRKDVFQVNVE

SEQ ID NO: 32818 - protein, 116 aa, Zea mays subsp. mays
MDDLAVAAPGRAVRRGWNAKEDEEALHLRVDMPGLGKEHVKVWAEQNSLVIKGEGEKEDSEDEAAPPPRYSGRIELAPEVYRMDKIKAEMKNGVLKVVVPKVKEQQRKDVFQVNVE

SEQ ID NO: 32819 - DNA, 991 bp, Zea mays subsp. mays
attttactcttaagttacatagacggagtgcttgcagcgggcggcaggtaagccaaccgaaaccgatggcgtcgggctccggcagcgggagcgacttctccgtggtcgtggtgggatccgacttcgcggtcgacgccggcgccgcgctcctcgcccccgccgaccacgaggtgtggcacgactgcctccccgtcctcgctgaggcggacgcctgcttctccgacctcgaggagcgccaggtcgtgcgcatccagggcacggatagggcaggccgaaccatcgtccgcgtcgtcggcaagtttttcccggctccagtaattgatggtgaacgtctgaagaagtatgtgttctacaaactgcgcaccgaattgcctgtgggtccattctgcattttgtacatccacagcaccgtacagtctgatgataacaaccctgggatgtcgatcttgaggacaatttatgaggagcttccacctgaatacaaggaaaggcttcaagttttctacttcttgcatcctgggcttcgctccagactggccatcgccacacttggcaggctatttttaagtggagggttgtattggaaaatcaagtatattagtcgactggagtatctctggggggatataaaaaagagagaggttgaaattccagattttgttattgaacatgataaggttcttgagcaccggccactgactgattatggcatagaaccagatcccctacatcttgctgatgtacctgctgtgggatactcgcttggaagatatgaagataaatggactccagaagatcgatggtattcaaggaattacatgtgaaattttctgttgtagcttaaaagatgattgtatagtaacacggtactatgagatttgtattagattgctatgaaaaccttgtcaaggtcctgtatttccaactaaatttatacctgtttgaagatttttgagcagacgctatatgctgtctgtggttaacccgccgt

SEQ ID NO: 32820 - protein, 273 aa, Zea mays subsp. mays
FTLKLHRRSACSGRQVSQPKPMASGSGSGSDFSVVVVGSDFAVDAGAALLAPADHEVWHDCLPVLAEADACFSDLEERQVVRIQGTDRAGRTIVRVVGKFFPAPVIDGERLKKYVFYKLRTELPVGPFCILYIHSTVQSDDNNPGMSILRTIYEELPPEYKERLQVFYFLHPGLRSRLAIATLGRLFLSGGLYWKIKYISRLEYLWGDIKKREVEIPDFVIEHDKVLEHRPLTDYGIEPDPLHLADVPAVGYSLGRYEDKWTPEDRWYSRNYM

SEQ ID NO: 32821 - protein, 252 aa, Zea mays subsp. mays
MASGSGSGSDFSVVVVGSDFAVDAGAALLAPADHEVWHDCLPVLAEADACFSDLEERQVVRIQGTDRAGRTIVRVVGKFFPAPVIDGERLKKYVFYKLRTELPVGPFCILYIHSTVQSDDNNPGMSILRTIYEELPPEYKERLQVFYFLHPGLRSRLAIATLGRLFLSGGLYWKIKYISRLEYLWGDIKKREVEIPDFVIEHDKVLEHRPLTDYGIEPDPLHLADVPAVGYSLGRYEDKWTPEDRWYSRNYM

SEQ ID NO: 32822 - DNA, 1449 bp, Zea mays subsp. mays
aaaaaaaaccgtaatagcaaaaacgactccacacggtccacggcgtcttctccggcgaaccttcgcgagccctcggctcccctctaccaccgctgccgcgaccccgcctccagagcatcctcgggtagcgctctggcttcccgtgccgccggacgtcctgcaggaggcggcggcctccgtggcatgttgatgagggccgccgctgccctccctcgccgatcgtcgcggccctcgggagccggggtcctcctcctcccgggctcccgcccctggggcctcctccagccgggctcctgccccctggggcctccttcgacccccttcgatgtcgataccgacccgccatcacggcctgagctgacgcccgagcagatcgggctctgcgtcgacgcgctcgcgcatttcgagtacaaggggaagcgccgggatgacttgtccgacgagttcagaagcctctcggtatcggatattagacatatgaaaacgatcagtgtagctcattatcctgttaatagagaaaagaaccgatatattgatgtcttaccatttgacaataccagagtacagctaaaatcctcagcacggcctccaaacaacgattacatcaatgcaagctttataaaggctactgagaacaacagagttgcaacatttatttctacacaaggtccactagtgaagacatttggagatttttgggaaatggtctttgaatatcagtgccctgcaattgtcatgctcacccactttgacagtattaagtgtgataaatatcttccaccgggaagtgaacggcgaacatatgggaattatgatatcaagattacaaagacaagaacagacagccaccatttacagttgcgtgatgtcaaggtgcaaaacatcgagacaggcaaggttcattctgtactccatatagaatatcctgattggcccgaccatggagtggcaactaatacagatgctgtacgggaaatctggaaacgactgcatcacattccaacggaacatcctatagttatccattgcagtgcaggaatcggaaggactggtacttacatcacaatccatactacaattgagcgaattcttcttggagataaaagctcttacgatcttgccaaaactgtaaagaattttagatcccaacgacctgggatggtccaaacagaggaacaatacaagttctgctacagggcaattgttgacgagctgaaagacctgctaaattcagatcattgaggtgggtcacatgagacggacagcaacgctgttagcatttattacgtttttttagacatttctatgtgaaggaacacttaccctttagaggagtgaattagtcaatctcagttctctttaaactatgtttgttctagtcaaaatctatgtaataaaaaatctatcatatgtgaagctatgctatgtttttgactaatcgttgctatt

SEQ ID NO: 32823 - protein, 413 aa, Zea mays subsp. mays
KKNRNSKNDSTRSTASSPANLREPSAPLYHRCRDPASRASSGSALASRAAGRPAGGGGLRGMLMRAAAALPRRSSRPSGAGVLLLPGSRPWGLLQPGSCPLGPPSTPFDVDTDPPSRPELTPEQIGLCVDALAHFEYKGKRRDDLSDEFRSLSVSDIRHMKTISVAHYPVNREKNRYIDVLPFDNTRVQLKSSARPPNNDYINASFIKATENNRVATFISTQGPLVKTFGDFWEMVFEYQCPAIVMLTHFDSIKCDKYLPPGSERRTYGNYDIKITKTRTDSHHLQLRDVKVQNIETGKVHSVLHIEYPDWPDHGVATNTDAVREIWKRLHHIPTEHPIVIHCSAGIGRTGTYITIHTTIERILLGDKSSYDLAKTVKNFRSQRPGMVQTEEQYKFCYRAIVDELKDLLNSDH

SEQ ID NO: 32824 - protein, 352 aa, Zea mays subsp. mays
MLMRAAAALPRRSSRPSGAGVLLLPGSRPWGLLQPGSCPLGPPSTPFDVDTDPPSRPELTPEQIGLCVDALAHFEYKGKRRDDLSDEFRSLSVSDIRHMKTISVAHYPVNREKNRYIDVLPFDNTRVQLKSSARPPNNDYINASFIKATENNRVATFISTQGPLVKTFGDFWEMVFEYQCPAIVMLTHFDSIKCDKYLPPGSERRTYGNYDIKITKTRTDSHHLQLRDVKVQNIETGKVHSVLHIEYPDWPDHGVATNTDAVREIWKRLHHIPTEHPIVIHCSAGIGRTGTYITIHTTIERILLGDKSSYDLAKTVKNFRSQRPGMVQTEEQYKFCYRAIVDELKDLLNSDH

SEQ ID NO: 32825 - protein, 350 aa, Zea mays subsp. mays
MRAAAALPRRSSRPSGAGVLLLPGSRPWGLLQPGSCPLGPPSTPFDVDTDPPSRPELTPEQIGLCVDALAHFEYKGKRRDDLSDEFRSLSVSDIRHMKTISVAHYPVNREKNRYIDVLPFDNTRVQLKSSARPPNNDYINASFIKATENNRVATFISTQGPLVKTFGDFWEMVFEYQCPAIVMLTHFDSIKCDKYLPPGSERRTYGNYDIKITKTRTDSHHLQLRDVKVQNIETGKVHSVLHIEYPDWPDHGVATNTDAVREIWKRLHHIPTEHPIVIHCSAGIGRTGTYITIHTTIERILLGDKSSYDLAKTVKNFRSQRPGMVQTEEQYKFCYRAIVDELKDLLNSDH

SEQ ID NO: 32826 - DNA, 698 bp, Zea mays subsp. mays
accggatcaccagcctacagctcgtcacatctctctctctccgcccggccgcggcctctagactcactctaaccgccatggccacggcgcacggcagcaggctcatcttcctcttcgaggccacgctcttctcggcgctgctgctcgtcccggcacgccctgcttccgccgcagacggcagcgcgtacccggccggcgactgcccctacccgtgcctgccgccgcccgccgtcaccgccaactgcccgccgcctccgccggctgcggcgtcgtactcgtacccgccaccgccgggggcttacattccctacttccagcctgcggcgggtggcggtggtggcggcggtagtggggggtacggcggctacccggcgccgccgccgcccaaccccatcctgccgtggtacccatggtactacaagacgccgccgtcgtccgcggccgccacgtcgggcagggggagtcgcgttcttcttgggtcggccgccatggtagctgctgctgccctgctgatcatggcttagccgcagcccgcagcagtcgttctttttgcatcttcgatcttgttctcacccccaggttttttttcctcttgttaatttactgctcaggatttatattcagaggtatataacgagggagcattatatatattgcttgtactcctaatttatcagctacatgtctctagttccttg

SEQ ID NO: 32827 - protein, 173 aa, Zea mays subsp. mays
RITSLQLVTSLSLRPAAASRLTLTAMATAHGSRLIFLFEATLFSALLLVPARPASAADGSAYPAGDCPYPCLPPPAVTANCPPPPPAAASYSYPPPPGAYIPYFQPAAGGGGGGGSGGYGGYPAPPPPNPILPWYPWYYKTPPSSAAATSGRGSRVLLGSAAMVAAAALLIMA

SEQ ID NO: 32828 - protein, 148 aa, Zea mays subsp. mays
MATAHGSRLIFLFEATLFSALLLVPARPASAADGSAYPAGDCPYPCLPPPAVTANCPPPPPAAASYSYPPPPGAYIPYFQPAAGGGGGGGSGGYGGYPAPPPPNPILPWYPWYYKTPPSSAAATSGRGSRVLLGSAAMVAAAALLIMA

SEQ ID NO: 32829 - DNA, 2985 bp, Zea mays subsp. mays
ttcataccctcgcgaagacactagggccgccgccggcgaatctcaagttcttaacacctggcagaagcaaatcggcgtggcactcgccgggcaccgctcccttctccctcctcccacttcccagttctcaatcgtctcaactttgcgggctgcggttccgcctccgcctccgcctcctgacaaccgctgcccgcttcgctcgtagcccacaccgccgttctctcccccagggacgaggaggagcaagcaaacaggaagcagccgagcatcttgccagtatattatatgcgttgaggtggcattgctgatgaaagtgaagacatgaggcttgaatgaaccctaagctgcccccgccaaccgccgccgccgcagcagtcaccgactcctccagtcaaatcagccatgtcgccgccgccctgtgacgccctgcccaccgctgccaacaacatccagccatttcttgtccttcacaaggctgctgcctcctcggtgccatcttcccggtctcagcgccagattcagacctcacagccatcctcacccaaccgcaaatcagcaaacagatgtcgtcaaccagcgggtgaggagtgtgaggacgaaggggattcggagctatatgagcagctgcgtgctgaggccttccaccgaacttggtccaagatccagtccaccatcgacgaggtcctcagggccatcaacctcaagctgttcgaccaggtgctgcagtgggcgaaggagtccttcgcttcggcccatgccatcacgaaaaagcaccacactgaagtccagcagccataccctctcctgactgatgtgatctgcagaaggatcccgacggtattcgtcctcaccaagaatgcagagtttgttgatgatatcacaacgtttcatgaccttgcagggcatatgaagtccaatggatgtcacatagtcaagctgtcagcggctgagttatcagcaaaacatggagttggtggttgcttcaggagcctgctgggacagctattatccgatgttccagatgtcgctgatgtatctgcgctagcatcatggtattgtgaagctgagaactttgatcagcctatcattgtcataattgatgatttggagcaatgttctggcgatgtgcttggagagtttgtgatgatgctgagtgagtgggtgtttaaaattccagtcttctttgtaatggggatagcaactacccttgatgctccaaagaagcttctctcgtcagaggctcttcaacgattagagccctgcaaacttaccttggggtctccctcagatagattgaatgcacttgttgaggctgtccttgttaaaccatgcactggattttgcatcagtcatgaagtcgcactgttcctcagaaattacttttttaggcacgatgggacaataacttcttttattactgctctcaagcttgcatgcagtaagcacttctccatggaacctctaagctttttgtgcataggaatggtggaggaagattctgaggaattttggcacgataagtttgaatcgctccctcaaacaatacggaaacatgctttcgatctaccctcatccaaaaatgcaaggaattcttgcaacatggtagaaggattgtctaggctgctgaaatcgcaaaaggattggagttctgttctcttgtgcctgtatgaagctggaaggcatgacaaagtgcagcttttggatatcttctgtgaggcagccagcccagattggcaaactgaaaatgcaccagataattacctatttgcttctaaagtggctttattaggagtaaagtcagggtctgctaaaagatttatagcccaagtaatgaatacaataaggtacttgcctacagaaattttgttacacatcctcgaggtttggagcatccatttaaaaggaatgagtgagatcaacgacagagtgaaggagcttctgtcaaaaggttgtggtgcagatagtgttagggccaaaaggaaatcaaccgccaatactggaaatggagtggttctaataaacgaggaagcggctgcgctgttacaggatgttatcaggaaatatttggtacctgctgaatgcttacctttccatgaaatagtctgcttcaagaatgttgacatcctccgatctgcgctgattggaaacccaagaagaatgattcaactcgatcttctgaggtcacagagccatctgaaatgctcttgttgcagtaggagtggtgctgccgtgtcaggatcgttgcacgacacatcaatcctgtgcagtctagcccaagagtatggtgacatgattaacctccatgactggtacacggcctttgaagggattataaagagcacaaactcaaaagccaaagggaaatcttgcagctctccctcgaagaagaagaagaaatcgaaccccacgcctctggagggtgatggcatgatccaagcaaggttctgcagcgccgttactgagatgcaggtcactggccttgttcggatgccgagcaagagaaggcccgatcttgtgcagagaatcgcgttcggtccttaacagctcggtgattacatgcatgctatacagacgaaacgttttgtgcacgctgacgataatcccaccatgtggtaaattgggcagccgtggaaggaaggtttggttacttgtatcggtgcttcgaagagagctgtgagatggagcagcagccgccgcttcagatatgcagtgctggtgttgcgtctgatggctaagctatgtcgttatttttttcctcttaagagccgtactaaacatgttttagctattgattcggctctctgtagagctgacatgggctcatgtagcccaaggggtacatttgagaaatttttatccttgaaacaaagggcatttcgaattatttcccctttttctgatctgttttcagttgcagcacagcatggaacaacgtatgaaaagcaaagcatagctgcaaagctgtgatgatgtgtcggtatggtc

SEQ ID NO: 32830 - protein, 712 aa, Zea mays subsp. mays
MSPPPCDALPTAANNIQPFLVLHKAAASSVPSSRSQRQIQTSQPSSPNRKSANRCRQPAGEECEDEGDSELYEQLRAEAFHRTWSKIQSTIDEVLRAINLKLFDQVLQWAKESFASAHAITKKHHTEVQQPYPLLTDVICRRIPTVFVLTKNAEFVDDITTFHDLAGHMKSNGCHIVKLSAAELSAKHGVGGCFRSLLGQLLSDVPDVADVSALASWYCEAENFDQPIIVIIDDLEQCSGDVLGEFVMMLSEWVFKIPVFFVMGIATTLDAPKKLLSSEALQRLEPCKLTLGSPSDRLNALVEAVLVKPCTGFCISHEVALFLRNYFFRHDGTITSFITALKLACSKHFSMEPLSFLCIGMVEEDSEEFWHDKFESLPQTIRKHAFDLPSSKNARNSCNMVEGLSRLLKSQKDWSSVLLCLYEAGRHDKVQLLDIFCEAASPDWQTENAPDNYLFASKVALLGVKSGSAKRFIAQVMNTIRYLPTEILLHILEVWSIHLKGMSEINDRVKELLSKGCGADSVRAKRKSTANTGNGVVLINEEAAALLQDVIRKYLVPAECLPFHEIVCFKNVDILRSALIGNPRRMIQLDLLRSQSHLKCSCCSRSGAAVSGSLHDTSILCSLAQEYGDMINLHDWYTAFEGIIKSTNSKAKGKSCSSPSKKKKKSNPTPLEGDGMIQARFCSAVTEMQVTGLVRMPSKRRPDLVQRIAFGP

SEQ ID NO: 32831 - protein, 544 aa, Zea mays subsp. mays
MKSNGCHIVKLSAAELSAKHGVGGCFRSLLGQLLSDVPDVADVSALASWYCEAENFDQPIIVIIDDLEQCSGDVLGEFVMMLSEWVFKIPVFFVMGIATTLDAPKKLLSSEALQRLEPCKLTLGSPSDRLNALVEAVLVKPCTGFCISHEVALFLRNYFFRHDGTITSFITALKLACSKHFSMEPLSFLCIGMVEEDSEEFWHDKFESLPQTIRKHAFDLPSSKNARNSCNMVEGLSRLLKSQKDWSSVLLCLYEAGRHDKVQLLDIFCEAASPDWQTENAPDNYLFASKVALLGVKSGSAKRFIAQVMNTIRYLPTEILLHILEVWSIHLKGMSEINDRVKELLSKGCGADSVRAKRKSTANTGNGVVLINEEAAALLQDVIRKYLVPAECLPFHEIVCFKNVDILRSALIGNPRRMIQLDLLRSQSHLKCSCCSRSGAAVSGSLHDTSILCSLAQEYGDMINLHDWYTAFEGIIKSTNSKAKGKSCSSPSKKKKKSNPTPLEGDGMIQARFCSAVTEMQVTGLVRMPSKRRPDLVQRIAFGP

SEQ ID NO: 32832 - protein, 465 aa, Zea mays subsp. mays
MMLSEWVFKIPVFFVMGIATTLDAPKKLLSSEALQRLEPCKLTLGSPSDRLNALVEAVLVKPCTGFCISHEVALFLRNYFFRHDGTITSFITALKLACSKHFSMEPLSFLCIGMVEEDSEEFWHDKFESLPQTIRKHAFDLPSSKNARNSCNMVEGLSRLLKSQKDWSSVLLCLYEAGRHDKVQLLDIFCEAASPDWQTENAPDNYLFASKVALLGVKSGSAKRFIAQVMNTIRYLPTEILLHILEVWSIHLKGMSEINDRVKELLSKGCGADSVRAKRKSTANTGNGVVLINEEAAALLQDVIRKYLVPAECLPFHEIVCFKNVDILRSALIGNPRRMIQLDLLRSQSHLKCSCCSRSGAAVSGSLHDTSILCSLAQEYGDMINLHDWYTAFEGIIKSTNSKAKGKSCSSPSKKKKKSNPTPLEGDGMIQARFCSAVTEMQVTGLVRMPSKRRPDLVQRIAFGP

SEQ ID NO: 32833 - DNA, 1433 bp, Zea mays subsp. mays
aagaaaaaaaaacgttttctttccttcgtttatgtatgcagggcctgcggttctatttaaagcttgttatcgcaggtagtagaggcacatcccagttggaagggcagccaataaggtaaggggtgacgaaaatggctccaacgaccgccaccaaggacgacagtggctacggcgacgagcgccggcgcgagctgcaggcgttcgacgacacgaagctgggggtgaaaggtctggtggactccggcgtcaagtccatcccgtccatcttccaccacccgccggaagccctgagcgacataatttctccggcgcctctgccgtcgtcgccaccctccggcgccgccatcccggtggtggacctctcggtgacgcggcgcgaggacctagtcgagcaggtgaggcacgcggccgggacggtgggcttcttctggctggtgaaccacggcgtggcggaggagctgatgggcggcatgctccgcggggtgcgccagttcaacgagggccccgtggaggcgaagcaggcgctctactccagggacctggctcgcaacctgcgcttcgcctccaacttcgacctcttcaaggccgctgcggccgactggcgcgacacgctcttctgcgaggtggctccgaacccgccgccgcgggaggagctgccggagccactgaggaacgtgatgctggagtacggcgcggcggtgacgaagctggcgcggttcgtgttcgagctgctgtccgagtccctcggcatgcccagcgaccacctgtacgagatggagtgcatgcagaacctgaacgtggtgtgccagtactacccgccgtgcccggagccgcaccgcaccgtgggcgtcaagaggcacacggaccctggcttcttcaccatcctcctgcaggacggcatgggcggcctgcaggtgcgcctcggcaacaacgggcagagcggcggctgctgggtggacatcgctccccggcctggggcgctcatggtcaacatcggtgatcttctgcagctcgtgaccaatgaccggttcaggagcgtggagcaccgggtgccagccaacaagagcagcgacacggcgagggtctccgtggcgtccttcttcaacacggacgtgaggaggtccgagaggatgtacggccccattccagaccccagcaagcccccgctgtacaggagcgtcagggcccgagacttcatcgcaaagttcaacaccataggactcgatggccgcgcgctcgaccacttcaggctctagctacctggctacgtttcagattcgtcctttcatttgctttggtctctaattaataattccaaataataagcccgcggatggacctctgtctgtctgtctgtaatttagtttccaagtttagtttgttgtggtaattcctgtatcaattatgtcataaataaaagctagggaaccttg

SEQ ID NO: 32834 - protein, 374 aa, Zea mays subsp. mays
MAPTTATKDDSGYGDERRRELQAFDDTKLGVKGLVDSGVKSIPSIFHHPPEALSDIISPAPLPSSPPSGAAIPVVDLSVTRREDLVEQVRHAAGTVGFFWLVNHGVAEELMGGMLRGVRQFNEGPVEAKQALYSRDLARNLRFASNFDLFKAAAADWRDTLFCEVAPNPPPREELPEPLRNVMLEYGAAVTKLARFVFELLSESLGMPSDHLYEMECMQNLNVVCQYYPPCPEPHRTVGVKRHTDPGFFTILLQDGMGGLQVRLGNNGQSGGCWVDIAPRPGALMVNIGDLLQLVTNDRFRSVEHRVPANKSSDTARVSVASFFNTDVRRSERMYGPIPDPSKPPLYRSVRARDFIAKFNTIGLDGRALDHFRL

SEQ ID NO: 32835 - protein, 264 aa, Zea mays subsp. mays
MGGMLRGVRQFNEGPVEAKQALYSRDLARNLRFASNFDLFKAAAADWRDTLFCEVAPNPPPREELPEPLRNVMLEYGAAVTKLARFVFELLSESLGMPSDHLYEMECMQNLNVVCQYYPPCPEPHRTVGVKRHTDPGFFTILLQDGMGGLQVRLGNNGQSGGCWVDIAPRPGALMVNIGDLLQLVTNDRFRSVEHRVPANKSSDTARVSVASFFNTDVRRSERMYGPIPDPSKPPLYRSVRARDFIAKFNTIGLDGRALDHFRL

SEQ ID NO: 32836 - protein, 261 aa, Zea mays subsp. mays
MLRGVRQFNEGPVEAKQALYSRDLARNLRFASNFDLFKAAAADWRDTLFCEVAPNPPPREELPEPLRNVMLEYGAAVTKLARFVFELLSESLGMPSDHLYEMECMQNLNVVCQYYPPCPEPHRTVGVKRHTDPGFFTILLQDGMGGLQVRLGNNGQSGGCWVDIAPRPGALMVNIGDLLQLVTNDRFRSVEHRVPANKSSDTARVSVASFFNTDVRRSERMYGPIPDPSKPPLYRSVRARDFIAKFNTIGLDGRALDHFRL

SEQ ID NO: 32837 - DNA, 1431 bp, Zea mays subsp. mays
caaagatgatattagcgttgaagctggaactttagatgaattgctgcacaaggagtctgcagtacctacattagagaaggatcatagctctgacaatcctgagggtttatcaagggaagagttaggtcgcatggtagcttcacgttggactggagaaagtgtaagtgaggttagtaaagatgataagaagggacatgaagatgagcaagaaataccagaacctgcaaaagaagcacttgaagacgaattagaaattccagaacctgctgaagaaaattatgatggatatcattcagaagttgaggatgacaggcataaatatgaagatgaagagtttgatcataagtcagaagatgaatatgttgatgaccatgatgagcatgttgagtcctatagatctgatgatgaccagaaagatttaactgagccaggacatgcatcgtggttggacaaaattcagcagactgtacagaatgtttttcaaaaattcaacttttttaggacccctgtagatttgtcagaggcttctcgcgttcgtaaggagtatgacgatgccaactcaaagctttcaaaaattcagtctaagatatccaatttagctgagaagctaaaacatgattttggcaaagacaaggagttctattccttttatgatcagtgctttgagaccaaggaaggaaagtatacttacaaggtctgtgcatataagaaagcatcacaggctgaagggcacagttccaccaacctggggagatgggacaaatttgaagaatcgtacagagtaatgcacttttcaggtggagacaaatgctggaatggtcctgaccgaagcctaaaggttaggcttagatgtgggctgagcaatgagcttaatgatgtcgatgagcctagcagatgcgagtatgtggctgtattgtcgacgcccgcactctgcgttgaggagaagctgaaggagctgcaaaacaaactggatgccatgtcttcgaagcagcccgggcatgatgaactttaaacggttccggcgtggacaaagaaaatgtcaccaggaagcatagattgacagttacactcataaccttaagggtggaagtcaatggggcatatggacaggaaagggccaagctgaagaaatgggaatgtagggttcaggtcgcctacctggcaatgttagctggcatagagctgtttttttagctgaatttgattggatgctgcaatttttccaggctcatcccgagttgtttggtggaggcgactgcaaccgtgcttttctttgtggtttaacattgctctatttaattagggagagacgctaggcttttgcgtctccagcttcattgccagccattacacatttgatggaatatatagtaagaaacagtacactctgaaccatcataatttgaagatgccagttaaccccgggttgtc

SEQ ID NO: 32838 - protein, 336 aa, Zea mays subsp. mays
KDDISVEAGTLDELLHKESAVPTLEKDHSSDNPEGLSREELGRMVASRWTGESVSEVSKDDKKGHEDEQEIPEPAKEALEDELEIPEPAEENYDGYHSEVEDDRHKYEDEEFDHKSEDEYVDDHDEHVESYRSDDDQKDLTEPGHASWLDKIQQTVQNVFQKFNFFRTPVDLSEASRVRKEYDDANSKLSKIQSKISNLAEKLKHDFGKDKEFYSFYDQCFETKEGKYTYKVCAYKKASQAEGHSSTNLGRWDKFEESYRVMHFSGGDKCWNGPDRSLKVRLRCGLSNELNDVDEPSRCEYVAVLSTPALCVEEKLKELQNKLDAMSSKQPGHDEL

SEQ ID NO: 32839 - protein, 293 aa, Zea mays subsp. mays
MVASRWTGESVSEVSKDDKKGHEDEQEIPEPAKEALEDELEIPEPAEENYDGYHSEVEDDRHKYEDEEFDHKSEDEYVDDHDEHVESYRSDDDQKDLTEPGHASWLDKIQQTVQNVFQKFNFFRTPVDLSEASRVRKEYDDANSKLSKIQSKISNLAEKLKHDFGKDKEFYSFYDQCFETKEGKYTYKVCAYKKASQAEGHSSTNLGRWDKFEESYRVMHFSGGDKCWNGPDRSLKVRLRCGLSNELNDVDEPSRCEYVAVLSTPALCVEEKLKELQNKLDAMSSKQPGHDEL

SEQ ID NO: 32840 - DNA, 661 bp, Zea mays subsp. mays
  misc_feature (31)..(31): n is a, c, g, or t
  misc_feature (368)..(368): n is a, c, g, or t
  misc_feature (615)..(615): n is a, c, g, or t
tcgacctgcagggggggggggggtgcagcantgcatccatcgcgtgcgtacattaatctaagcgatcttcatccagccttctgctctgctccctcgaaatggaggcgacgagcaaggcgatggcttcaggcctcctcgttctgctgcttctcatcaacacaggctttgtcctgcccgtccgttccgaggactgctgggccgacacccgcgtcatctgcaccaagacgcacaactgccgggacgacacttgcgcggggcgcggcatgccggacggccgctgccactgggagttccccaacctggtgcccttctgccagtgcctgcgccccaactgccactagtccgggcgcctcggattggctcacttnggccggcgatgatggatggtgcccaactgcgactgcccagtctgctccattcgttgttgtttcaggcagaatataaactgccaaattcacatgtattttgggatatttgttatcatactatgaaatgactgtgaatcgttgttctgattgtctttcaccacatgtttccttgcatgaagtaatatatgatatttatgtatttcttgttttccgagaataatagtcaaaacatcttgtgatttgaacnggttaaaaaaaaaaaaaaaaaaaaaaaaccccccctgcagccaagc

SEQ ID NO: 32841 - protein, 147 aa, Zea mays subsp. mays
  misc_feature (11)..(11): Xaa can be any naturally occurring amino acid
  misc_feature (123)..(123): Xaa can be any naturally occurring amino acid
STCRGGGGAAXHPSRAYINLSDLHPAFCSAPSKWRRRARRWLQASSFCCFSSTQALSCPSVPRTAGPTPASSAPRRTTAGTTLARGAACRTAAATGSSPTWCPSASACAPTATSPGASDWLTXAGDDGWCPTATAQSAPFVVVSGRI

SEQ ID NO: 32842 - protein, 80 aa, Zea mays subsp. mays
MEATSKAMASGLLVLLLLINTGFVLPVRSEDCWADTRVICTKTHNCRDDTCAGRGMPDGRCHWEFPNLVPFCQCLRPNCH

SEQ ID NO: 32843 - protein, 73 aa, Zea mays subsp. mays
MASGLLVLLLLINTGFVLPVRSEDCWADTRVICTKTHNCRDDTCAGRGMPDGRCHWEFPNLVPFCQCLRPNCH

SEQ ID NO: 32844 - DNA, 1845 bp, Zea mays subsp. mays
atctgctctgctccggtccgttccgctccttcctccccctatctagctagccttcccgttcctgcatcgcggcggagatgggcgcctccaccacgccgctcgcgtcggcggcggcgctgcttctgctgctgctcgcgccgctcgccgcggcggcggacagcatgtcgatcgtctcctacggcgagcggagcgaggaggaggcgcggcggatgtacgccgagtggatggcggcgcacggccggacctacaacgccgtcggcgaggaggagcgcaggttcgaggtgttcagggacaacctccgctacgtcgacgcccacaacgccgccgccgacgcgggcgtccactccttccgcctcgggctcaaccgcttcgccgacctcaccaacgacgagtaccgcgccacctacctcggcgtcaggagcaggccgcagagggagaggaggctcggtgacaggtacctggccggcgacaacgaggacctgccggagtccgtcgactggcgggccaagggcgccgtcgcggagatcaaggaccagggcagctgcgggagttgctgggctttctcaacaatagcggctgtggaaggcatcaaccagattgttactggcgacatgatctccttgtctgagcaggagcttgttgactgtgacacttcatacaaccaggggtgcaatggaggtctgatggactatgcgtttgagttcatcatcaacaatggcggaatcgacaccgaggaggattacccttacaagggcacggacggacggtgtgatgtcaacaggaaaaacgccaaggttgttactatcgacagctatgaagatgtaccagcgaacagtgagaaaagtctgcagaaggcagttgcgaaccagcccatcagtgttgcaattgaggctggtggcagagcatttcagctctacaactcgggtatcttcacaggaacctgtggaacagcgttggaccatggtgtcacggccgtcggctacggcacagagaacggcaaggactactggatcgtgaagaactcttggggcagcagctggggcgagtccggctacgtcaggatggagcgcaacatcaaggcgtccagcggcaagtgtggtatcgccgttgagccgtcgtaccctctgaagaagggcgccaaccccccgaaccctgggccgaccccgccttcccccaccccgccgcccaccgtctgcgacaactactactcgtgccccgacagcaccacctgctgctgcatctacgagtacggcaagtactgcttcgcctggggctgctgcccgctcgagggcgccacctgctgcgacgaccactacagctgctgcccccatgactaccccgtctgcaacgtcaagcagggaacctgcctcatgggcaaggacagcccactgtcactgtcagtgaaggctacgaagcgcaccctggccaagccgcactgggctttctctggcaacacagctgctgatggcatgaagagcagcgcatgagaaaaacgcagcatggcattaggccgtcaacagccagcatgattagagcccccctgcatgcagaatgatcacccggtcccgtagttcacgacgaaagcatggctgggcggccgctgtttacggatttacttatatcactatagtaggtactcctcctgtacataagcctgaaaaaaaaatgggttcagttgtttatggaactctgccaaatttgcttttgcatgccatgtaaaaatccagctagctcttgccaagcttcacctgcgcagttcaacaggactgcgattgatattcggtgtaatggaagtatttatcggaacaatcagcaatgttatgctatattcatttcttggacgtg

SEQ ID NO: 32845 - protein, 469 aa, Zea mays subsp. mays
MGASTTPLASAAALLLLLLAPLAAAADSMSIVSYGERSEEEARRMYAEWMAAHGRTYNAVGEEERRFEVFRDNLRYVDAHNAAADAGVHSFRLGLNRFADLTNDEYRATYLGVRSRPQRERRLGDRYLAGDNEDLPESVDWRAKGAVAEIKDQGSCGSCWAFSTIAAVEGINQIVTGDMISLSEQELVDCDTSYNQGCNGGLMDYAFEFIINNGGIDTEEDYPYKGTDGRCDVNRKNAKVVTIDSYEDVPANSEKSLQKAVANQPISVAIEAGGRAFQLYNSGIFTGTCGTALDHGVTAVGYGTENGKDYWIVKNSWGSSWGESGYVRMERNIKASSGKCGIAVEPSYPLKKGANPPNPGPTPPSPTPPPTVCDNYYSCPDSTTCCCIYEYGKYCFAWGCCPLEGATCCDDHYSCCPHDYPVCNVKQGTCLMGKDSPLSLSVKATKRTLAKPHWAFSGNTAADGMKSSA

SEQ ID NO: 32846 - protein, 441 aa, Zea mays subsp. mays
MSIVSYGERSEEEARRMYAEWMAAHGRTYNAVGEEERRFEVFRDNLRYVDAHNAAADAGVHSFRLGLNRFADLTNDEYRATYLGVRSRPQRERRLGDRYLAGDNEDLPESVDWRAKGAVAEIKDQGSCGSCWAFSTIAAVEGINQIVTGDMISLSEQELVDCDTSYNQGCNGGLMDYAFEFIINNGGIDTEEDYPYKGTDGRCDVNRKNAKVVTIDSYEDVPANSEKSLQKAVANQPISVAIEAGGRAFQLYNSGIFTGTCGTALDHGVTAVGYGTENGKDYWIVKNSWGSSWGESGYVRMERNIKASSGKCGIAVEPSYPLKKGANPPNPGPTPPSPTPPPTVCDNYYSCPDSTTCCCIYEYGKYCFAWGCCPLEGATCCDDHYSCCPHDYPVCNVKQGTCLMGKDSPLSLSVKATKRTLAKPHWAFSGNTAADGMKSSA

SEQ ID NO: 32847 - protein, 425 aa, Zea mays subsp. mays
MYAEWMAAHGRTYNAVGEEERRFEVFRDNLRYVDAHNAAADAGVHSFRLGLNRFADLTNDEYRATYLGVRSRPQRERRLGDRYLAGDNEDLPESVDWRAKGAVAEIKDQGSCGSCWAFSTIAAVEGINQIVTGDMISLSEQELVDCDTSYNQGCNGGLMDYAFEFIINNGGIDTEEDYPYKGTDGRCDVNRKNAKVVTIDSYEDVPANSEKSLQKAVANQPISVAIEAGGRAFQLYNSGIFTGTCGTALDHGVTAVGYGTENGKDYWIVKNSWGSSWGESGYVRMERNIKASSGKCGIAVEPSYPLKKGANPPNPGPTPPSPTPPPTVCDNYYSCPDSTTCCCIYEYGKYCFAWGCCPLEGATCCDDHYSCCPHDYPVCNVKQGTCLMGKDSPLSLSVKATKRTLAKPHWAFSGNTAADGMKSSA

SEQ ID NO: 32848 - DNA, 1193 bp, Zea mays subsp. mays
aactaatcgaaaaaaagttggctcacagaacacagcgcccgcccggacgcaaggggcacgagggagaagcgaggaacggcggcggcggcatcatggcggcgcggaacatccttcgcggtgcggcatgcggccaccgcttcctcgtgcccgtcccctcaggcgctcttgctggttctggaagccggagcatcggcgccgtcgctcagggccttcgtcattacgcagcagacgaagcagtgggaaacttggaactgcatgcacccaaggcaaaacgtcggtcatatatcccaacgaaaaatggaacagccatgatgcttccgctccatattcattacgaagatgtactacgtcaggatctgttgctcaaacagaatcatgccaatatcatgcaagttccagggttgtttgaggtcaaattagcaccaaaagccggctctgatctcaagatcccaattgggaaaatggccatggaggttttgagtggtcagagattcaaagaggcaaaaattgaccctttcgccaaagcaagaaagtcttctcgaaccaatccatttattggggccgacaaggacggtagcactgtcttcgcgcaaccaaccgttcttcgagggcatgcaatgtacaactttttggtgaggatgctgacagtgatgtccatgttaaattctcgggccgacattcgggagaacactgtgaagttcttcatggaaacggagttctgtgagttctctccagaattggaagaccatttcgagatatttgagcacatccgaggtttcaatgtgactatcgttacttcagccaatacaaaagatgagacctcactgctgtggagtggcttcatgctgaatgacgagggagagaccaagtaaggtagaactgttgatctttgtttctgcttaatctccctgatattgtagttgctgcccaactggaccttcagttggctgttgatgtcaaaaatgattttggaaatttggtgcttcgtgctctaggagtgcgcaatgtcgcagccttctgttttgtagactgaatgagatgacgtgattgtttttcatcttgacgcgtggagctcatgtttgataactacgtctagtaccatgtatgaacataataatcttggtctaataagcattgttttgcttattcctgtggttcctgctatagtaacatggaatgctcgtttctgtttg

SEQ ID NO: 32849 - protein, 289 aa, Zea mays subsp. mays
LIEKKLAHRTQRPPGRKGHEGEARNGGGGIMAARNILRGAACGHRFLVPVPSGALAGSGSRSIGAVAQGLRHYAADEAVGNLELHAPKAKRRSYIPTKNGTAMMLPLHIHYEDVLRQDLLLKQNHANIMQVPGLFEVKLAPKAGSDLKIPIGKMAMEVLSGQRFKEAKIDPFAKARKSSRTNPFIGADKDGSTVFAQPTVLRGHAMYNFLVRMLTVMSMLNSRADIRENTVKFFMETEFCEFSPELEDHFEIFEHIRGFNVTIVTSANTKDETSLLWSGFMLNDEGETK

SEQ ID NO: 32850 - protein, 259 aa, Zea mays subsp. mays
MAARNILRGAACGHRFLVPVPSGALAGSGSRSIGAVAQGLRHYAADEAVGNLELHAPKAKRRSYIPTKNGTAMMLPLHIHYEDVLRQDLLLKQNHANIMQVPGLFEVKLAPKAGSDLKIPIGKMAMEVLSGQRFKEAKIDPFAKARKSSRTNPFIGADKDGSTVFAQPTVLRGHAMYNFLVRMLTVMSMLNSRADIRENTVKFFMETEFCEFSPELEDHFEIFEHIRGFNVTIVTSANTKDETSLLWSGFMLNDEGETK

SEQ ID NO: 32851 - protein, 187 aa, Zea mays subsp. mays
MMLPLHIHYEDVLRQDLLLKQNHANIMQVPGLFEVKLAPKAGSDLKIPIGKMAMEVLSGQRFKEAKIDPFAKARKSSRTNPFIGADKDGSTVFAQPTVLRGHAMYNFLVRMLTVMSMLNSRADIRENTVKFFMETEFCEFSPELEDHFEIFEHIRGFNVTIVTSANTKDETSLLWSGFMLNDEGETK

SEQ ID NO: 32852 - DNA, 1151 bp, Zea mays subsp. mays
gatatcgcccgctctcgccgggcgtgagtgccgtcgccctctctctccctctcgcctgcctatcgcctcacgcgggacggtagagggcccttctggcctcccttctagccccaattggcaccagccttaccagttactgtactgtaccagttaccatccaccgccgcctctctccctcctccaacagaagaccccaacccctcggcatggcgtcgtggatcctggcccgatccaaagcccttcccctcgcggccgccctcacccgcggcgccgcctacgcagcgccgccgatcgccggagcccgggcgctctcgtccctgccccgctacccgtccgccccgtcctcccatgggctcggcaaggttctgggatatgaaccaacatctcacgtcagtggagcacaagttttacctcgttggttttcctctctagcatccaatggatctcagatctctgagacatacaagtctggtggtgaaatgaagcagtctgatgcacggaaatcaagtgaggaagccacacccacaccaaaggttgtggccttcagcccgcaagaagcagctatagctgaatccagaagtagtccactgacaattgagagttggaaagtaaggcgatcagagatagcaaccaaagtcaccttctacatgatcccagctctgcttctcgtctccaagaacagcatgagtacctctcttctggtcggcgccgtgttccatcaagtgtacatgttccagaaggagattctcctggactacgtgcaccatgatatcaccagaaagtgggctttgatatacctgaagctgcttctgctggtgatggcgaaggacaccatcatgtactttcatccgttctaagctcacccaccgtgtcagttcctcaaataatcccagcaacccatccgtctgcgcactcagagaataatggtggtggacgaatcctggagccctcgttcgtgtattccccctcatgagcttgcttcttgccatcttcttttttttttcctgctgcaagttggttcctctcttgttaagtataattcatcagcctgaggggttgattagtgaccagtcagatgacatccctgattctgcacctcagtttgcaattgcaataacggttgatccatagttgatatggatcgtgcagcc

SEQ ID NO: 32853 - protein, 216 aa, Zea mays subsp. mays
MASWILARSKALPLAAALTRGAAYAAPPIAGARALSSLPRYPSAPSSHGLGKVLGYEPTSHVSGAQVLPRWFSSLASNGSQISETYKSGGEMKQSDARKSSEEATPTPKVVAFSPQEAAIAESRSSPLTIESWKVRRSEIATKVTFYMIPALLLVSKNSMSTSLLVGAVFHQVYMFQKEILLDYVHHDITRKWALIYLKLLLLVMAKDTIMYFHPF

SEQ ID NO: 32854 - protein, 125 aa, Zea mays subsp. mays
MKQSDARKSSEEATPTPKVVAFSPQEAAIAESRSSPLTIESWKVRRSEIATKVTFYMIPALLLVSKNSMSTSLLVGAVFHQVYMFQKEILLDYVHHDITRKWALIYLKLLLLVMAKDTIMYFHPF

SEQ ID NO: 32855 - protein, 124 aa, Zea mays subsp. mays
ISPALAGRECRRPLSPSRLPIASRGTVEGPSGLPSSPNWHQPYQLLYCTSYHPPPPLSLLQQKTPTPRHGVVDPGPIQSPSPRGRPHPRRRLRSAADRRSPGALVPAPLPVRPVLPWARQGSGI

SEQ ID NO: 32856 - DNA, 1382 bp, Zea mays subsp. mays
cagaggaggatgatgcattgtcacagttgtctaactgtgccctaacacagaccggagcgtcgcggcgctatctcctccgcggctctgcgcgcagtcgtgttggcaactgcagcggggcggcggcgtgcgtccctgctgtgagcttcatcgccccgtatcaagctagtttaggctgtcagcgggccacaacttcagccacacaacccggaactccgacaaccctcgcggctcgtgccgccctctcccgctcggtcgttcccatggatccaccgcaagagttggccgccgccggccgcaagcggcgccggcgaggaggcgtccggaaccgcaaaaggctttcctcgcagaaggggctccctccagcgactgcgcccccaacgccggcgtccccacctgtcaagcggcggcgcaaggacatcgctggacaggccgctgctatgccgaagagaggcaacacctcgagtctactggacaagatgcgtgcaaggttatctggtggccattttagaatgttaaacgagaagctatacacttgcagtggagaggatgcatttgactacttcaaaaacgaccctaatctttttgatgtgtatcatacaggatatcaagagcagatgtcacactggcctgaacagccagtgaatgtaataatcaattggttgaagagtcagaatgcgtcatggactgttgctgattttggctgtggcaatgcagcagttgcaaaaaatctgaagaacaaggttttctccattgatctcgtttcagatgaaccttcagtgattgcttgtgatatggctcatactccattggagccatcctctatagatgttgcaatattttgtctttctttgatgggaatcaactatccaagttatttagaggaagcaaatagggttctcaaaccaagtggttggcttgttattgctgaagtgcgaagtaggctagacccgagcaacggaggtgctgatcctgaaaagttttctaaagccattatccagcttggcttttcgcttgtttcaaaggatgtgaaaaacagaatgttcattctgttctacttcaggaaaaaggaaaaaagtaaggtggcgaagagcatcgattggccacagctgaaaccgtgcttgtacaaacggcgatgagccgcttgtctcgtatccaccagtaatactgtagttgttgtagtagagctcttcaaaagtttcgtcaaaactgaaagtctagatttaggtccctccgtacctgtatggctgcatctgtgtgccacgctattccattattttccacattagctgcgtctttcatttgttggacctcacaagaaaagatcacatagggaacgatgcattgtttggaagcagatcatatataattcaagtctacttttc

SEQ ID NO: 32857 - protein, 377 aa, Zea mays subsp. mays
EEDDALSQLSNCALTQTGASRRYLLRGSARSRVGNCSGAAACVPAVSFIAPYQASLGCQRATTSATQPGTPTTLAARAALSRSVVPMDPPQELAAAGRKRRRRGGVRNRKRLSSQKGLPPATAPPTPASPPVKRRRKDIAGQAAAMPKRGNTSSLLDKMRARLSGGHFRMLNEKLYTCSGEDAFDYFKNDPNLFDVYHTGYQEQMSHWPEQPVNVIINWLKSQNASWTVADFGCGNAAVAKNLKNKVFSIDLVSDEPSVIACDMAHTPLEPSSIDVAIFCLSLMGINYPSYLEEANRVLKPSGWLVIAEVRSRLDPSNGGADPEKFSKAIIQLGFSLVSKDVKNRMFILFYFRKKEKSKVAKSIDWPQLKPCLYKRR

SEQ ID NO: 32858 - protein, 291 aa, Zea mays subsp. mays
MDPPQELAAAGRKRRRRGGVRNRKRLSSQKGLPPATAPPTPASPPVKRRRKDIAGQAAAMPKRGNTSSLLDKMRARLSGGHFRMLNEKLYTCSGEDAFDYFKNDPNLFDVYHTGYQEQMSHWPEQPVNVIINWLKSQNASWTVADFGCGNAAVAKNLKNKVFSIDLVSDEPSVIACDMAHTPLEPSSIDVAIFCLSLMGINYPSYLEEANRVLKPSGWLVIAEVRSRLDPSNGGADPEKFSKAIIQLGFSLVSKDVKNRMFILFYFRKKEKSKVAKSIDWPQLKPCLYKRR

SEQ ID NO: 32859 - protein, 232 aa, Zea mays subsp. mays
MPKRGNTSSLLDKMRARLSGGHFRMLNEKLYTCSGEDAFDYFKNDPNLFDVYHTGYQEQMSHWPEQPVNVIINWLKSQNASWTVADFGCGNAAVAKNLKNKVFSIDLVSDEPSVIACDMAHTPLEPSSIDVAIFCLSLMGINYPSYLEEANRVLKPSGWLVIAEVRSRLDPSNGGADPEKFSKAIIQLGFSLVSKDVKNRMFILFYFRKKEKSKVAKSIDWPQLKPCLYKRR

SEQ ID NO: 32860 - DNA, 1461 bp, Zea mays subsp. mays
aaagggaagggagcacctgcctgctcctgcgcggcggcggttggtaagccccacctccggtcccagcctggccagacttctgcccttctcctccgcctctctaatggtgattcgcagttactcttctttccactgtgggttgctgatttccagagcggcgtggaggaggcactacccgttcttctgggctgtcaggccttccgtaccgccgccgccgtcgccactcccactcccacagccgcgcacgcgcttctcctcctcctcctcactgcgctccaccaagagatccgccgcaaagacgtcaatggactcgtcttcagtcggtgaacccttctacgtcgtccgcaagggggacgtcatcggcatctacaaaaccctcagcgaatgccaagctcaagtcagcaattcggttcgcgacccttctgtcaccgtcttcaaaggctactcgctgcgtaaagacaccgaggaatacctcgccgcgcgcgggttaaggaacgctctctacgccattgatgcaacagatgcacgagatgaattgttcgacgatctagttccctgccctttccagcaacctgatggagctgcatcgtctactctgaaaagatcacaggagattgaaatcggaccatcaaagaagcatcccaaagttgatgagcaggtaccattacctgatagtcatctctcttgtattcttgaatttgatggtgcctctaaaggaaatccagggaaagccggtgctggagcaataataaggcaggtagatggttccgtgattgctcaactacgtgagggtctgggcattgcaaccaacaatgctgctgaatatcgtgcattgatcctagggctaacatatgcagccaagaaagggttcaagtatattcgtgctcaaggcgactctaagcttgtttgtaaccaggtccaagatatctggcgtgttaagaatgataatatggctagcttctgcaagaaagtgaaggagctaaagggaacatttcatttatttcaaatcagacatgttttgagggaatataattcggctgctgatgctcaagctaactttgcagtagaacttcctgttggtgaagttcaagagcagtcgaacttcccatgctagcagttgtgttgtggtcaagtgtggtttgtgcatcgctaaggttctgggactgaagctatgtcacatttgttcagttctcattgacacaaaaggaagagacgaaacaacagttgtattggaagtggtagtgggtctgatatatctgcggagtattgaacagacagatgcaatattgagtagattcttaggaaatttaatcgtctcaaacttctagatagtgcgagttgatttgtccaggaccagtgtttgctgatatacgatgtttgtattcagaacagtattagtaccggaaactttaattgctcctttctctatgttggttacttggttaaggttgagtgttgctt

SEQ ID NO: 32861 - protein, 370 aa, Zea mays subsp. mays
KGREHLPAPARRRLVSPTSGPSLARLLPFSSASLMVIRSYSSFHCGLLISRAAWRRHYPFFWAVRPSVPPPPSPLPLPQPRTRFSSSSSLRSTKRSAAKTSMDSSSVGEPFYVVRKGDVIGIYKTLSECQAQVSNSVRDPSVTVFKGYSLRKDTEEYLAARGLRNALYAIDATDARDELFDDLVPCPFQQPDGAASSTLKRSQEIEIGPSKKHPKVDEQVPLPDSHLSCILEFDGASKGNPGKAGAGAIIRQVDGSVIAQLREGLGIATNNAAEYRALILGLTYAAKKGFKYIRAQGDSKLVCNQVQDIWRVKNDNMASFCKKVKELKGTFHLFQIRHVLREYNSAADAQANFAVELPVGEVQEQSNFPC

SEQ ID NO: 32862 - protein, 336 aa, Zea mays subsp. mays
MVIRSYSSFHCGLLISRAAWRRHYPFFWAVRPSVPPPPSPLPLPQPRTRFSSSSSLRSTKRSAAKTSMDSSSVGEPFYVVRKGDVIGIYKTLSECQAQVSNSVRDPSVTVFKGYSLRKDTEEYLAARGLRNALYAIDATDARDELFDDLVPCPFQQPDGAASSTLKRSQEIEIGPSKKHPKVDEQVPLPDSHLSCILEFDGASKGNPGKAGAGAIIRQVDGSVIAQLREGLGIATNNAAEYRALILGLTYAAKKGFKYIRAQGDSKLVCNQVQDIWRVKNDNMASFCKKVKELKGTFHLFQIRHVLREYNSAADAQANFAVELPVGEVQEQSNFPC

SEQ ID NO: 32863 - protein, 269 aa, Zea mays subsp. mays
MDSSSVGEPFYVVRKGDVIGIYKTLSECQAQVSNSVRDPSVTVFKGYSLRKDTEEYLAARGLRNALYAIDATDARDELFDDLVPCPFQQPDGAASSTLKRSQEIEIGPSKKHPKVDEQVPLPDSHLSCILEFDGASKGNPGKAGAGAIIRQVDGSVIAQLREGLGIATNNAAEYRALILGLTYAAKKGFKYIRAQGDSKLVCNQVQDIWRVKNDNMASFCKKVKELKGTFHLFQIRHVLREYNSAADAQANFAVELPVGEVQEQSNFPC

SEQ ID NO: 32864 - DNA, 1258 bp, Zea mays subsp. mays
cccacccgttcccagaccagcctcacgcgctcaccgtgctgcctccaccaccgatggctctccctcccggcgcaggggcggtggcgccggcgacgcccttcgccgcgaatccgtgccgtctccggcgggcgtctggtcctcctgccgccgcccttcggctcgggccgctcttctggccatgggaaaaggtgaaaatcggtcccctttctgtttcccccatgggttttggaacatgggcatggggaaaccagctactttggggctatcaagaaagcatggacaacgaacttcaggattgcttcaatctggctctaaggaatggcataaacctttttgacactgctgactcttacggaactggaaggctgaacggacagagcgaacggctactcggtaaattcatccttgagtttgaagggaggattaaatctccagatgatgtggtcatagcaactaagtttgctgcatatccttggcgacttacatcggggcagtttgtcagcgcctgcaagtcttctttggaaagattacaacttgataggctcgggatagggcagctccattggtccactgctaactatgcacccttgcaggagcgtgccctctgggatggactagttgaaatgtatgaaaagggccttgtaagtgctgtcggtgtcagcaattacgggccgaagcagcttctgaagatccacagctatctagcttctagaggagttcccttgagctcagctcaggttcagttctcgttactgagcatgggtgacgatcagatggagctgaaaagtgtgtgtgattcattgggcattcgcatcatcgcatatagcccgcttggattaggaatgctcactgggaagtatggtgcttctaacctcccaaaaggaccaaggtcagtgctgttccgacaaatccttcctgggctggagcctctgctgtcttgcctgagaaggattgccgaaaagaaggggaagaccatgcctcaggtggccatcaactggtgcatgtgcaagggcacagttcctatcccaggcgtcaaaacggtgaggcatgtccaggagaacctgggcgcgctcggctggaggctgagttctgccgagatctcggagctcgagtccgcagcgatggcggctccgaggaagatgatccagaatgtcttccagactgcctgaccgtgctgaatacatgtgtgtgtatgcatgtttctgcaatcgtctttactgaaaaatctgaaaccgggcagccgtgaaccttttcttcc

SEQ ID NO: 32865 - protein, 388 aa, Zea mays subsp. mays
HPFPDQPHALTVLPPPPMALPPGAGAVAPATPFAANPCRLRRASGPPAAALRLGPLFWPWEKVKIGPLSVSPMGFGTWAWGNQLLWGYQESMDNELQDCFNLALRNGINLFDTADSYGTGRLNGQSERLLGKFILEFEGRIKSPDDVVIATKFAAYPWRLTSGQFVSACKSSLERLQLDRLGIGQLHWSTANYAPLQERALWDGLVEMYEKGLVSAVGVSNYGPKQLLKIHSYLASRGVPLSSAQVQFSLLSMGDDQMELKSVCDSLGIRIIAYSPLGLGMLTGKYGASNLPKGPRSVLFRQILPGLEPLLSCLRRIAEKKGKTMPQVAINWCMCKGTVPIPGVKTVRHVQENLGALGWRLSSAEISELESAAMAAPRKMIQNVFQTA

SEQ ID NO: 32866 - protein, 371 aa, Zea mays subsp. mays
MALPPGAGAVAPATPFAANPCRLRRASGPPAAALRLGPLFWPWEKVKIGPLSVSPMGFGTWAWGNQLLWGYQESMDNELQDCFNLALRNGINLFDTADSYGTGRLNGQSERLLGKFILEFEGRIKSPDDVVIATKFAAYPWRLTSGQFVSACKSSLERLQLDRLGIGQLHWSTANYAPLQERALWDGLVEMYEKGLVSAVGVSNYGPKQLLKIHSYLASRGVPLSSAQVQFSLLSMGDDQMELKSVCDSLGIRIIAYSPLGLGMLTGKYGASNLPKGPRSVLFRQILPGLEPLLSCLRRIAEKKGKTMPQVAINWCMCKGTVPIPGVKTVRHVQENLGALGWRLSSAEISELESAAMAAPRKMIQNVFQTA

SEQ ID NO: 32867 - protein, 316 aa, Zea mays subsp. mays
MGFGTWAWGNQLLWGYQESMDNELQDCFNLALRNGINLFDTADSYGTGRLNGQSERLLGKFILEFEGRIKSPDDVVIATKFAAYPWRLTSGQFVSACKSSLERLQLDRLGIGQLHWSTANYAPLQERALWDGLVEMYEKGLVSAVGVSNYGPKQLLKIHSYLASRGVPLSSAQVQFSLLSMGDDQMELKSVCDSLGIRIIAYSPLGLGMLTGKYGASNLPKGPRSVLFRQILPGLEPLLSCLRRIAEKKGKTMPQVAINWCMCKGTVPIPGVKTVRHVQENLGALGWRLSSAEISELESAAMAAPRKMIQNVFQTA

SEQ ID NO: 32868 - DNA, 1571 bp, Zea mays subsp. mays
gaaaacatctccgttccccaccaccaccttcgctccttctgcttcgcccgtccccctccgtcgcgtcgactcccaagatggataagctcagtggttctgcacgtcttatgattgtttcagatcttgaccatacaatggttgatcatcatgacgaggagaacctgtccttgcttaggtttggtgccctgtgggaatctgtttactgtgaggattctctactagtcttctcgactggaagatcaccaactctttacaaggaattaaggaaagagaagcctatgctaactccagacatcactatcatgtctgttggcactgagataacatatggggaggcaatggttcctgatgatggctgggaagaatatctgaacaataagtgggacaggaatattgttgtagcagaaactgtgagcttttctgagctgaagcttcagccagagacagaacagcgcccgcacaaggtcagcttttttgttgataagaagaatgcccaggaagtgataaaatctgttgccgagagattggacaaatgtgggctagatgccaaaataatatatagtggtggccaggaccttgatatattacctcaaggagctggaaagggccaagcacttgcatatttgcttgaaaagctaagctcatgtggaaaaccgcccaacaatactcttgtttgtggtgactctggtaatgatgcagaattattcagcatccctggtgtacatggtgtcatggtcagcaatgcccaagaggaactacttcagtggtacacagaaaatgcgaaggataacccaaagataattcattcaaatgagagatgtgcagctggtattatacaagctattggacacttcaagctaggacctaacatttctcctagagacctgcagtttccttatgcaaaggaagcctctttcaaacctacagatgctgtagtgaagttctacgttctctatgagaagtggcgcagggctgaggttccaaagtctgattcagttataaagtacttcaaaaacatcactcatgcaaatggagttaccatccatcctgctgggcttgaactctcactccatgcatccattgatgcgttgggatcatgttatggtgacaaacaagggagaaagtaccgagcatgggtggacagactttttatcacacagactggttcagatagttgggtggggaggtttgacttgtgggaatcagaaggtgatgtgcgtgtgtgttctctgtcaagtcttgctttgattctgaaggctgaatccccagagggctttgtgctaacccacatccaaaagacatggctgaacggatactcgtcaggggttgagcaggcgtttaagctgtagagcagtataccgtctcggctcgtggttggagttttcttgagaatagaatagaataatgtacctgtttataatattaacttcccaaaaccgcactggaggatcaccagggagaggattcggtgccttctcttatttggctttcatgagaagatgaaattgactcatcttggtatatatttacaaatcttgaataatgcagcgttatctatatccagggatgtc

SEQ ID NO: 32869 - protein, 448 aa, Zea mays subsp. mays
KHLRSPPPPSLLLLRPSPSVASTPKMDKLSGSARLMIVSDLDHTMVDHHDEENLSLLRFGALWESVYCEDSLLVFSTGRSPTLYKELRKEKPMLTPDITIMSVGTEITYGEAMVPDDGWEEYLNNKWDRNIVVAETVSFSELKLQPETEQRPHKVSFFVDKKNAQEVIKSVAERLDKCGLDAKIIYSGGQDLDILPQGAGKGQALAYLLEKLSSCGKPPNNTLVCGDSGNDAELFSIPGVHGVMVSNAQEELLQWYTENAKDNPKIIHSNERCAAGIIQAIGHFKLGPNISPRDLQFPYAKEASFKPTDAVVKFYVLYEKWRRAEVPKSDSVIKYFKNITHANGVTIHPAGLELSLHASIDALGSCYGDKQGRKYRAWVDRLFITQTGSDSWVGRFDLWESEGDVRVCSLSSLALILKAESPEGFVLTHIQKTWLNGYSSGVEQAFKL

SEQ ID NO: 32870 - protein, 423 aa, Zea mays subsp. mays
MDKLSGSARLMIVSDLDHTMVDHHDEENLSLLRFGALWESVYCEDSLLVFSTGRSPTLYKELRKEKPMLTPDITIMSVGTEITYGEAMVPDDGWEEYLNNKWDRNIVVAETVSFSELKLQPETEQRPHKVSFFVDKKNAQEVIKSVAERLDKCGLDAKIIYSGGQDLDILPQGAGKGQALAYLLEKLSSCGKPPNNTLVCGDSGNDAELFSIPGVHGVMVSNAQEELLQWYTENAKDNPKIIHSNERCAAGIIQAIGHFKLGPNISPRDLQFPYAKEASFKPTDAVVKFYVLYEKWRRAEVPKSDSVIKYFKNITHANGVTIHPAGLELSLHASIDALGSCYGDKQGRKYRAWVDRLFITQTGSDSWVGRFDLWESEGDVRVCSLSSLALILKAESPEGFVLTHIQKTWLNGYSSGVEQAFKL

SEQ ID NO: 32871 - protein, 413 aa, Zea mays subsp. mays
MIVSDLDHTMVDHHDEENLSLLRFGALWESVYCEDSLLVFSTGRSPTLYKELRKEKPMLTPDITIMSVGTEITYGEAMVPDDGWEEYLNNKWDRNIVVAETVSFSELKLQPETEQRPHKVSFFVDKKNAQEVIKSVAERLDKCGLDAKIIYSGGQDLDILPQGAGKGQALAYLLEKLSSCGKPPNNTLVCGDSGNDAELFSIPGVHGVMVSNAQEELLQWYTENAKDNPKIIHSNERCAAGIIQAIGHFKLGPNISPRDLQFPYAKEASFKPTDAVVKFYVLYEKWRRAEVPKSDSVIKYFKNITHANGVTIHPAGLELSLHASIDALGSCYGDKQGRKYRAWVDRLFITQTGSDSWVGRFDLWESEGDVRVCSLSSLALILKAESPEGFVLTHIQKTWLNGYSSGVEQAFKL

SEQ ID NO: 32872 - DNA, 1360 bp, Zea mays subsp. mays
gagggagtcaagcagaagcagaagcgctaaagcagcgcgtttgcagactgcaaagacccctgtgaatttgtgatgtactgaggtgttgtccagccaacagtccttgctcccaagattcttccgtactcccccctccatcggaccatcctctaccatagatctcccgaactccgccgtaatcgggacgaatcgcgcgcgtgctcttgctccctgtcgttctccgcggccggcgcgagctgccggtggttcgttgccgtcgacctcgtctgcccgctcctctgccctgccagctgccggattcctgctgctggactggattgctgcgcgtggagtcgtgagtggagctccatctatcctgactgatacggatcgacctctcctctcgtgggtttttgggttttgatcagttctatcagaggagtgcttatggatgattgcatggctgtagctagctaggccctgctttcctgtttgtaaagatacataatggcaccacgcagtagggctccatctagaaggcctctctggttcattgtcttggttgcctttgtctgtgtagtagccattggagcctatctttatactccacagcattacacagcctgttatctggtaccatcagaagcctgcaattctcggcctcctccagaacctgctagggtatacactgatgatgagattgctgctcgtgttatcatgagagacatcattcgggctcggccagtgcagtcaaagaacacaaaaattgctttcatgttcttaacacccagtttattgccatttgagaagctatgggaaaaattcttcatgggtcatgaagacagatacaccatatacgtgcatgcatcaagagatataccgagtcattcaagtccaatattcgctggtagggatattcgaagcgaaaaggtgatatggggcacgatttctatgcttgatgctgaaaagaggctcttggcccatgccctacaagatcctgaaaaccagcattttgtcttgctttctgagagttgtgtgccacttcataacttcgattatatatatagttatctcatggagacaaacgtcagttttgttgactgctttgatgatcctggtccacatggagcaggtagatattctgagcatatgctacctgaaattgtgaagaaagattggagaaagggtgcgcagtggtttacagtgaaacggcagcatgcgattgttattctcgcggacaccctttactatgggaagttcaagcgttactgtaagccaggaagcgaatggcataactgctattcagacgagcactacttgccaaccctctttaacatggttgatccgactggaatctcgaactggtcggtgacgcatgtcg

SEQ ID NO: 32873 - protein, 291 aa, Zea mays subsp. mays
MAPRSRAPSRRPLWFIVLVAFVCVVAIGAYLYTPQHYTACYLVPSEACNSRPPPEPARVYTDDEIAARVIMRDIIRARPVQSKNTKIAFMFLTPSLLPFEKLWEKFFMGHEDRYTIYVHASRDIPSHSSPIFAGRDIRSEKVIWGTISMLDAEKRLLAHALQDPENQHFVLLSESCVPLHNFDYIYSYLMETNVSFVDCFDDPGPHGAGRYSEHMLPEIVKKDWRKGAQWFTVKRQHAIVILADTLYYGKFKRYCKPGSEWHNCYSDEHYLPTLFNMVDPTGISNWSVTHV

SEQ ID NO: 32874 - protein, 221 aa, Zea mays subsp. mays
MRDIIRARPVQSKNTKIAFMFLTPSLLPFEKLWEKFFMGHEDRYTIYVHASRDIPSHSSPIFAGRDIRSEKVIWGTISMLDAEKRLLAHALQDPENQHFVLLSESCVPLHNFDYIYSYLMETNVSFVDCFDDPGPHGAGRYSEHMLPEIVKKDWRKGAQWFTVKRQHAIVILADTLYYGKFKRYCKPGSEWHNCYSDEHYLPTLFNMVDPTGISNWSVTHV

SEQ ID NO: 32875 - protein, 202 aa, Zea mays subsp. mays
MFLTPSLLPFEKLWEKFFMGHEDRYTIYVHASRDIPSHSSPIFAGRDIRSEKVIWGTISMLDAEKRLLAHALQDPENQHFVLLSESCVPLHNFDYIYSYLMETNVSFVDCFDDPGPHGAGRYSEHMLPEIVKKDWRKGAQWFTVKRQHAIVILADTLYYGKFKRYCKPGSEWHNCYSDEHYLPTLFNMVDPTGISNWSVTHV

SEQ ID NO: 32876 - DNA, 1723 bp, Zea mays subsp. mays
accttgtgcccaaagtgccaaacggccccttaagtcttaaccacctgctttatcatctcccgtgcgcgctctccctcggtctctccctccctccctctctcgctcgtggccacgactgggcgactgcctccgccgcatttcgctaggcgccacacggcccttggccggcgacgagcacccacagaaaaagtgttgctcctacgactagttctttttatgtgtaaccttcaatgaaggattctcaggatattcagagcacgacagagttgcagtcaccagtgcaaggtactaatgaagtgcaaagtcagcaaccaaactcaatggccgctgatgctcctgctggaaattcgggttccttgtctgtagctagtaatgacaataagaaggtgtctcgcgaagatattgaacttgttcaaatttgatagagcgttgtctacagctctacatgaacaaaggagaagttgttagaactctttctactcgtgctagaatagaacctggcttcactactttagtatggcagaaacttgaagaagaaaactctgagttctttagggcttactatatacggttgaagttgaaaaggcagatcatcttgttcaatcatttattgcaacaccagtacaatttgatgaaatatccagcacctccgaatattccattggctccaatacaaaatggaattcatcatatgccagttagcaatttaccaatggggtatccagtgcttcagcagcctatcatgcctgctcccggccagcctcacatggatccaatggcctgcggtctgtccagtggtcatgtggttaatggaatacctgcaccaggtggttatcatcccatgcgcatgaactccggaaatgacatggttttggacaatggagtgcctgaagcaccacatgctggtgctaccggtagtgctatgtcatctgagatggctgtgagtccctcgtcggcggcttcaagcaaccatgctccttttacgccgtcagatataccaggcatgaccatggatgtatcggccctagactcggcatttgggtgtgatgtggggaatcctgaatctctgcaattgggaccagatgggtcaagagactctattagatccttagggcagctctggaatttcagcctctctgatctaacagcggatttgacgagtttgggagcagatctggacgtgctggagaactacactggcacccctttcctgccatcggattcggacattttgctggattccccagaccaagatgatatagtcgagtattttgctgacgccatcaacgggtctccgtcagacgaagagaaaccgtagtttttccggggtggcatggcaatggcatgcattcaggttcatcatcaggcagggctgccatctcatctcatgtagtgtaaagcagccaatctaactgtgtattcggctcgcgcgcggtgatccggtaatcgggcctctgccactaaaagaattttgtagcggttaattgaaatcctaattctttggaataagtagctgggactggaatgtccagagagtagcggtcgttgttggcttagggattgctgctggtggatgcaaacctcacagctagctggtgactctgaaaccacaggaactccttttcttttctttttctttttacttgtatttgtatttgctgctacataagtaaacagaagtggggtgtacctagttttctggtttttagtgtcttgaaagatc

SEQ ID NO: 32877 - protein, 290 aa, Zea mays subsp. mays
MNKGEVVRTLSTRARIEPGFTTLVWQKLEEENSEFFRAYYIRLKLKRQIILFNHLLQHQYNLMKYPAPPNIPLAPIQNGIHHMPVSNLPMGYPVLQQPIMPAPGQPHMDPMACGLSSGHVVNGIPAPGGYHPMRMNSGNDMVLDNGVPEAPHAGATGSAMSSEMAVSPSSAASSNHAPFTPSDIPGMTMDVSALDSAFGCDVGNPESLQLGPDGSRDSIRSLGQLWNFSLSDLTADLTSLGADLDVLENYTGTPFLPSDSDILLDSPDQDDIVEYFADAINGSPSDEEKP

SEQ ID NO: 32878 - protein, 228 aa, Zea mays subsp. mays
MKYPAPPNIPLAPIQNGIHHMPVSNLPMGYPVLQQPIMPAPGQPHMDPMACGLSSGHVVNGIPAPGGYHPMRMNSGNDMVLDNGVPEAPHAGATGSAMSSEMAVSPSSAASSNHAPFTPSDIPGMTMDVSALDSAFGCDVGNPESLQLGPDGSRDSIRSLGQLWNFSLSDLTADLTSLGADLDVLENYTGTPFLPSDSDILLDSPDQDDIVEYFADAINGSPSDEEKP

SEQ ID NO: 32879 - protein, 208 aa, Zea mays subsp. mays
MPVSNLPMGYPVLQQPIMPAPGQPHMDPMACGLSSGHVVNGIPAPGGYHPMRMNSGNDMVLDNGVPEAPHAGATGSAMSSEMAVSPSSAASSNHAPFTPSDIPGMTMDVSALDSAFGCDVGNPESLQLGPDGSRDSIRSLGQLWNFSLSDLTADLTSLGADLDVLENYTGTPFLPSDSDILLDSPDQDDIVEYFADAINGSPSDEEKP

SEQ ID NO: 32880 - DNA, 1090 bp, Zea mays subsp. mays
aaccagagccaacagagcaacgcccaggccccaggcacacactacacgaaccaggcaaccagctgggaggaaccctagcggaacactgtgcaggtgacagcggcgcgctaccggtgacgggggatacggcggcatcgtccccctcggtccctcctccatcccccgcgcggcggcgccagcagccggcctgcagaaccatagcaacactttggtgcgcttaagatgtccatcctccgaccctttctcccaatagtagcaagatcaaatggttggagatgcttttctactgggattccttctgatatgatagcggatcttaataaggaaatggagtcagtatttggcgaacctccatcatccagtcctttgggctcaagtccgtccccccagcagccagtggaggattcaccactagtgcttacccatactgatagcagcggacaggccaatatggttgacgtctctcccaaagaagacagtaagagagtcgctatagctagctgcagggttttgctaggccaaaaggtgttcaatttggtggcatctaacgagattgcgaaaggtgatgtccttactgtcgcaaagattgctggaataactggtgcaaagcaaaccagcaatcttatacccttgtgccacaacattaatctttcacatgttcgtgttgatctcactctaaatgaagaggactctagtgtcgtgatagaaggggaagccacaaccagtggaaagacgggggttgagatggaagcattgactgctgtagccattgctggccttacagtttatgacatgtgcaaagctgcttcaaaggacatttgtataacagatgtctgtctccaacataagtctggagggaagagcggaagctgggccaggaattaaaaggttaaattgttgctctgaggatatgaactgcaagcatgattccggcatctaaagggtatgtagtccttacaccaaaaggtttctgctttgaatgtaggctccttgactctttttgaaacatcatttgagcctctgcactcctgagttgtagatacgctgttcaaggactttataataaatggccctatcaatttattttcag

SEQ ID NO: 32881 - protein, 220 aa, Zea mays subsp. mays
MSILRPFLPIVARSNGWRCFSTGIPSDMIADLNKEMESVFGEPPSSSPLGSSPSPQQPVEDSPLVLTHTDSSGQANMVDVSPKEDSKRVAIASCRVLLGQKVFNLVASNEIAKGDVLTVAKIAGITGAKQTSNLIPLCHNINLSHVRVDLTLNEEDSSVVIEGEATTSGKTGVEMEALTAVAIAGLTVYDMCKAASKDICITDVCLQHKSGGKSGSWARN

SEQ ID NO: 32882 - protein, 193 aa, Zea mays subsp. mays
MIADLNKEMESVFGEPPSSSPLGSSPSPQQPVEDSPLVLTHTDSSGQANMVDVSPKEDSKRVAIASCRVLLGQKVFNLVASNEIAKGDVLTVAKIAGITGAKQTSNLIPLCHNINLSHVRVDLTLNEEDSSVVIEGEATTSGKTGVEMEALTAVAIAGLTVYDMCKAASKDICITDVCLQHKSGGKSGSWARN

SEQ ID NO: 32883 - protein, 185 aa, Zea mays subsp. mays
MESVFGEPPSSSPLGSSPSPQQPVEDSPLVLTHTDSSGQANMVDVSPKEDSKRVAIASCRVLLGQKVFNLVASNEIAKGDVLTVAKIAGITGAKQTSNLIPLCHNINLSHVRVDLTLNEEDSSVVIEGEATTSGKTGVEMEALTAVAIAGLTVYDMCKAASKDICITDVCLQHKSGGKSGSWARN

SEQ ID NO: 32884 - DNA, 941 bp, Zea mays subsp. mays
  misc_feature (351)..(351): n is a, c, g, or t
attaaaaacgcaaggatttctcggttcctcctcgtcctcgcgctctcccggtctcctctcccccgagcatcccaaaaaatactcggccactgcgctatctcgcccaccaagccagcaccagcagcggcgcgcgatggccaccgcgccctacgcctcctccctcttcctggcttcctcccccatctccaccgcgccacgaatccgcgccgggccctgccctccgtccgcccagccatccctgcggctccggccgaggccgtccccggcagccgcggccgccgtccaggcggagcaccagcccgcgttgaccgcggcgccgaagccacccgcgctaccgttccgcgtgggccncggcttcgacctccaccgcctggagcccgacctcccgctcatcatcggcggcatcaacatcccccacgaccgcggctgcgaggctcactctgacggcgacgtgctgctgcactgcgtggtggacgcgattctcggcgcgctggggctgccagacatcggccagattttcccggactccgacccccgttggaagggcgccgattcttcggtgttcatgagggaagctgtgaaattgatgcatgaagcaggctacgagctgggcaaccttgatgctacgctgatcttgcaaaaaccaaaaattagcccattcaaggagacaatccgatcgaatttgtgcgacctacttggggcagatccatctgtggtcaatctcaaggccaagacgcacgagaaagttgacagtctaggggagaacaggagcatagctgctcatactgtagttctcctgatgcgaaagtagaaagaacaaatggcagctaattgtatcatgctacacggaaaaggttgttatcttatacttgtgattgttgagtgatctagccagtatggaaaatcttcatgtggtagaaacaataaagctgattgcaatg

SEQ ID NO: 32885 - protein, 269 aa, Zea mays subsp. mays
  misc_feature (117)..(117): Xaa can be any naturally occurring amino acid
LKTQGFLGSSSSSRSPGLLSPEHPKKYSATALSRPPSQHQQRRAMATAPYASSLFLASSPISTAPRIRAGPCPPSAQPSLRLRPRPSPAAAAAVQAEHQPALTAAPKPPALPFRVGXGFDLHRLEPDLPLIIGGINIPHDRGCEAHSDGDVLLHCVVDAILGALGLPDIGQIFPDSDPRWKGADSSVFMREAVKLMHEAGYELGNLDATLILQKPKISPFKETIRSNLCDLLGADPSVVNLKAKTHEKVDSLGENRSIAAHTVVLLMRK

SEQ ID NO: 32886 - protein, 225 aa, Zea mays subsp. mays
  misc_feature (73)..(73): Xaa can be any naturally occurring amino acid
MATAPYASSLFLASSPISTAPRIRAGPCPPSAQPSLRLRPRPSPAAAAAVQAEHQPALTAAPKPPALPFRVGXGFDLHRLEPDLPLIIGGINIPHDRGCEAHSDGDVLLHCVVDAILGALGLPDIGQIFPDSDPRWKGADSSVFMREAVKLMHEAGYELGNLDATLILQKPKISPFKETIRSNLCDLLGADPSVVNLKAKTHEKVDSLGENRSIAAHTVVLLMRK

SEQ ID NO: 32887 - protein, 147 aa, Zea mays subsp. mays
  misc_feature (117)..(117): Xaa can be any naturally occurring amino acid
IKNARISRFLLVLALSRSPLPRASQKILGHCAISPTKPAPAAARDGHRALRLLPLPGFLPHLHRATNPRRALPSVRPAIPAAPAEAVPGSRGRRPGGAPARVDRGAEATRATVPRGXRLRPPPPGARPPAHHRRHQHPPRPRLRGSL

SEQ ID NO: 32888 - DNA, 841 bp, Zea mays subsp. mays
acatgcgctgacgcgcatcccccccggcgtggcgtgcgctttgatctagctcttcttctcgaatccagcccgaggcctttttcttctgcggtttcatccgtacccatcctgcacacgaagcctagaatagccctcccctgctccgccacctcctcggatcccgaccaccccacccccaccccagacaacaggttgatggaggctaagatgggacgcttcttcgagtccgtgagcaatttcttcaccggaggcgaccacatcccctggtgcgaccgcgacctcatcgccggctgtgaaggagagcttgtcaatgctgcaaatgaggaacagaggaatgaaagccttatgaggttgtcatgggcccttgtgcactccaggcagacagacgatgtaaaccgtggaatcagcatgcttcaagcttctttggataattctgccagtcctctgcagactagggaaaagctgtacttgttggctgttggattctacaggattggcgactactcaaaaagcaggcaacttgcagatcgttgtttggagattcaagcggattggcggcaggccatatcgctgaagaaggcaatagaagataaaattgccaaagatggtctgattggaataggaattgcgacaactgcggtcggacttctggttggtggaattgcagctgctgttgccaggaagaagtgaggtcaatatattggatcggcagctcattgaactaggggagctcccgtctctgtaattccaacttttctgttgttaccttggtgatattacagttgaattgccactctttatatgtacgaagtaatcgtatgataatgataacaccattgtg

SEQ ID NO: 32889 - protein, 229 aa, Zea mays subsp. mays
TCADAHPPRRGVRFDLALLLESSPRPFSSAVSSVPILHTKPRIALPCSATSSDPDHPTPTPDNRLMEAKMGRFFESVSNFFTGGDHIPWCDRDLIAGCEGELVNAANEEQRNESLMRLSWALVHSRQTDDVNRGISMLQASLDNSASPLQTREKLYLLAVGFYRIGDYSKSRQLADRCLEIQADWRQAISLKKAIEDKIAKDGLIGIGIATTAVGLLVGGIAAAVARKK

SEQ ID NO: 32890 - protein, 164 aa, Zea mays subsp. mays
MEAKMGRFFESVSNFFTGGDHIPWCDRDLIAGCEGELVNAANEEQRNESLMRLSWALVHSRQTDDVNRGISMLQASLDNSASPLQTREKLYLLAVGFYRIGDYSKSRQLADRCLEIQADWRQAISLKKAIEDKIAKDGLIGIGIATTAVGLLVGGIAAAVARKK

SEQ ID NO: 32891 - protein, 160 aa, Zea mays subsp. mays
MGRFFESVSNFFTGGDHIPWCDRDLIAGCEGELVNAANEEQRNESLMRLSWALVHSRQTDDVNRGISMLQASLDNSASPLQTREKLYLLAVGFYRIGDYSKSRQLADRCLEIQADWRQAISLKKAIEDKIAKDGLIGIGIATTAVGLLVGGIAAAVARKK

SEQ ID NO: 32892 - DNA, 717 bp, Zea mays subsp. mays
atcgaaaattccataaaaccacctgacctgacagacccgtccaccgtccatccgtattcccgtcacgcccccaacacccccacaacccgaagcagcgaaagctcccctaaccctctccgcgcatccgatcgcaaggaagaagagggagatgagctactacgggcagcagccccccgtcggcgtcccgccgcagcaaggctacccgggcaaggacggctacccgccagcggggtacccgccggccggctaccccccgccggcgcagggctaccctccgcagggctacccgccgcagtacgcgcagccgccgcctccacagcagcagcagagcagcgggccttccttcatggagggatgcttggctgccctctgctgctgctgcctcctggacgcctgcttctgagagtgagaggggccgaccgacggattcgacacggcgacaagtgaaactactagctttctatgcgagggagagagagagagagctggaactggattgagcctggaatgctatcgtgctattctagctttgtcagagcataatatgtcgccctagttttttatttctctctgtcaatgttgacgggatcagacggtgtgtgtgtattctgcctgtggatgttccgtgtttctggtggaattcaatcctgggatttattgtgcccacttgggatcggtttctttgctattactctgttgccgaggagcacgttttgc

SEQ ID NO: 32893 - protein, 148 aa, Zea mays subsp. mays
IENSIKPPDLTDPSTVHPYSRHAPNTPTTRSSESSPNPLRASDRKEEEGDELLRAAAPRRRPAAARLPGQGRLPASGVPAGRLPPAGAGLPSAGLPAAVRAAAASTAAAEQRAFLHGGMLGCPLLLLPPGRLLLRVRGADRRIRHGDK

SEQ ID NO: 32894 - protein, 84 aa, Zea mays subsp. mays
MSYYGQQPPVGVPPQQGYPGKDGYPPAGYPPAGYPPPAQGYPPQGYPPQYAQPPPPQQQQSSGPSFMEGCLAALCCCCLLDACF

SEQ ID NO: 32895 - DNA, 771 bp, Zea mays subsp. mays
gcgaaaacgcgagcgctgcggaacaacgatggcgacgatgtctcttgccgcggcgtcacccctcgcctccattccccgcggcatcgccgctcaggctccttgcgcggcattcctgtccatccgcttaggtggcgcgacggcgacgcggttcgctggactggcggtggcctcgcagccagcggagcgtcgcgccgcggcgatggtcgcgatggcgaagagggagcaggagctggaggagatccgggccatgacgacggaacagatggaagaggaggtggtagacctcaagggggagcttttcctgctccgccttaagcgctcggcgcgccaggagttcaagaacagcgagttcagccgcatgcgcaagaggattgctcgtatgctaaccgtgaaaagagagcgggaaattgaacaaggaatcaataaaagattgtctaggaagcttgataggaaatggaagcagagcattgtggtcagaccaccaccatctctaagggggaacaaagaggagtagaaagccgcaaaaagagggcaatgtgcaaaagtcgtttcatgcgagtgttgcaggaaggtcccttcatgatttcaacccttattgcgttgttatgtattccatgtttacattttgctaagcattgctatctgaatctgaatttcagttgttagtctcttctgtaaattttgacttatttaaatttacacttctatctgtgttatcagtaattgaggatggccagtcatttgcacctggaaggtgcatgcttccttgcc

SEQ ID NO: 32896 - protein, 170 aa, Zea mays subsp. mays
RKRERCGTTMATMSLAAASPLASIPRGIAAQAPCAAFLSIRLGGATATRFAGLAVASQPAERRAAAMVAMAKREQELEEIRAMTTEQMEEEVVDLKGELFLLRLKRSARQEFKNSEFSRMRKRIARMLTVKREREIEQGINKRLSRKLDRKWKQSIVVRPPPSLRGNKEE

SEQ ID NO: 32897 - protein, 161 aa, Zea mays subsp. mays
MATMSLAAASPLASIPRGIAAQAPCAAFLSIRLGGATATRFAGLAVASQPAERRAAAMVAMAKREQELEEIRAMTTEQMEEEVVDLKGELFLLRLKRSARQEFKNSEFSRMRKRIARMLTVKREREIEQGINKRLSRKLDRKWKQSIVVRPPPSLRGNKEE

SEQ ID NO: 32898 - protein, 158 aa, Zea mays subsp. mays
MSLAAASPLASIPRGIAAQAPCAAFLSIRLGGATATRFAGLAVASQPAERRAAAMVAMAKREQELEEIRAMTTEQMEEEVVDLKGELFLLRLKRSARQEFKNSEFSRMRKRIARMLTVKREREIEQGINKRLSRKLDRKWKQSIVVRPPPSLRGNKEE

SEQ ID NO: 32899 - DNA, 1499 bp, Zea mays subsp. mays
gctgtctcacggctgcggctgcggctgcggcggttcgggctcctcctccagactccagggatggccgccggtgcgggaggcggcgaactggaggcgctggagggcgtgcgctccatcgtgctcaagccgtcggagtcgctcgacgagtcgcggttcacgaggatcgccggcgccgacttcaacgacccggccgtcggactcgaggggctgctcgcctcgctcgcgtccaccgggttccaggcatccaacctcggcgacgccatcgacgtcgtcaaccagatgttagactggaggttgtcgcatgagaagcccagcgaggattgtgatgaagctgaacttgaccctaaatatagagcatctgtgaagtgcaagatatttctgggcttcacctcgaacctcgtgtcttctggcatccgggatataatccgttttctagctcagcatcacatggtggatgttattgttacaagtgctgggggtatagaggaggatctcattaaatgccttgcaccaacttacagaggcgatttttctttacctggagcactgctgcggtcaaaaggactgaaccggataggaaatctgttggtgcccaatgacaactattgcaagtttgagaactggatcatgccactcttcgaccagatgctacaggagcaatctactgagaatgtttggacaccgtcgaaggtgatagcgcgccttggcaaagaaataaatgatgaaagctcctatctttattgggcatacaagaataacatccctgtatactgcccagcattgactgatggatcacttggagacatgctgttctgtcatgcagttcgtaatcctggccttattattgacattgtacaagatatacggctgatgaatggggaagccatccatgcaacaccaaggaagacagggattatagttcttggtggaggccttccaaagcatcatatatgcaatgccaatatgttccgcaatggtgcagattatgctgtgtatattaacacggctcaagagtttgatggtagcgattctggagcacaccccgatgaagcagtctcatggggcaagattaagggttcagcaaaacctgtaaaggtgcattgcgatgcaagtatcgctttcccgcttcttgttgcagcaacatttgcacgtaaggttcataactccaaatgaacagactgaatgggattcggtggagtgaatgggcaacagaattttgttgaactctccaaatgaccttttggagcacgaggtctacttcacttgcacagggatcatgtgcaaattttttcggtgactcgcggcaaccacatgccatcattcttcgatgttcacttgatgctgtactagctggttgatagcatttttgttacaacagataatttattgaaatacagacatacgattgtccatccgagtcgtctgcttacgatttttttgtagacgaaacatctgcttacgaaattaacaaatggcctgttttatgaacacgttttttg

SEQ ID NO: 32900 - protein, 390 aa, Zea mays subsp. mays
AVSRLRLRLRRFGLLLQTPGMAAGAGGGELEALEGVRSIVLKPSESLDESRFTRIAGADFNDPAVGLEGLLASLASTGFQASNLGDAIDVVNQMLDWRLSHEKPSEDCDEAELDPKYRASVKCKIFLGFTSNLVSSGIRDIIRFLAQHHMVDVIVTSAGGIEEDLIKCLAPTYRGDFSLPGALLRSKGLNRIGNLLVPNDNYCKFENWIMPLFDQMLQEQSTENVWTPSKVIARLGKEINDESSYLYWAYKNNIPVYCPALTDGSLGDMLFCHAVRNPGLIIDIVQDIRLMNGEAIHATPRKTGIIVLGGGLPKHHICNANMFRNGADYAVYINTAQEFDGSDSGAHPDEAVSWGKIKGSAKPVKVHCDASIAFPLLVAATFARKVHNSK

SEQ ID NO: 32901 - protein, 370 aa, Zea mays subsp. mays
MAAGAGGGELEALEGVRSIVLKPSESLDESRFTRIAGADFNDPAVGLEGLLASLASTGFQASNLGDAIDVVNQMLDWRLSHEKPSEDCDEAELDPKYRASVKCKIFLGFTSNLVSSGIRDIIRFLAQHHMVDVIVTSAGGIEEDLIKCLAPTYRGDFSLPGALLRSKGLNRIGNLLVPNDNYCKFENWIMPLFDQMLQEQSTENVWTPSKVIARLGKEINDESSYLYWAYKNNIPVYCPALTDGSLGDMLFCHAVRNPGLIIDIVQDIRLMNGEAIHATPRKTGIIVLGGGLPKHHICNANMFRNGADYAVYINTAQEFDGSDSGAHPDEAVSWGKIKGSAKPVKVHCDASIAFPLLVAATFARKVHNSK

SEQ ID NO: 32902 - protein, 297 aa, Zea mays subsp. mays
MLDWRLSHEKPSEDCDEAELDPKYRASVKCKIFLGFTSNLVSSGIRDIIRFLAQHHMVDVIVTSAGGIEEDLIKCLAPTYRGDFSLPGALLRSKGLNRIGNLLVPNDNYCKFENWIMPLFDQMLQEQSTENVWTPSKVIARLGKEINDESSYLYWAYKNNIPVYCPALTDGSLGDMLFCHAVRNPGLIIDIVQDIRLMNGEAIHATPRKTGIIVLGGGLPKHHICNANMFRNGADYAVYINTAQEFDGSDSGAHPDEAVSWGKIKGSAKPVKVHCDASIAFPLLVAATFARKVHNSK

SEQ ID NO: 32903 - DNA, 620 bp, Zea mays subsp. mays
aagagacaaaacaagttattggggctctaaaggagaagggagtgtctgctgttggagctgcagggtattgctggggtgcaaaggttgttgtggagttggcaaaagctcatgagatccaggctgctgtgctgttgcacccttcttttgttaccgttgacgatatcaaagaggtcaagtgcgcaatttctatcctcggagctgagattgacaaaatgtccccaccggagctaatcaagcagttcgagcaggtcctttctttgaactcaggggttggccacttcgtcaagatcttccctggtgtggcgcatggatggagcgtgagatacaaccacgacgacgcagctgccgtgaagagtgctgaggaagcctttgcggacatgctcgactggttcaacaagaatctgaaataaactctgcaattgcatcctgccttgtaataatgcgtgttccagtgccctgggatcgaatctgctgtgtttgggcttttgcatggtcaggctattcagagttgtcatggacttagggttgtgttagtagattggttgcgctgaatctataataaaaacgaggtaaactaggacaatgatgatgtggccgtgtgtatttaatgtattctgttc

SEQ ID NO: 32904 - protein, 135 aa, Zea mays subsp. mays
ETKQVIGALKEKGVSAVGAAGYCWGAKVVVELAKAHEIQAAVLLHPSFVTVDDIKEVKCAISILGAEIDKMSPPELIKQFEQVLSLNSGVGHFVKIFPGVAHGWSVRYNHDDAAAVKSAEEAFADMLDWFNKNLK

SEQ ID NO: 32905 - DNA, 522 bp, Zea mays subsp. mays
acgcacctgctccattacccgtctgccgtcggcataacataatcgtcgtcgcgtgcagtccccattcccttttccagtggtctgttgctcgcgcttcgtccagcttccccggaagaggtagcacggcaagggcagaggatgagtgaccccaagtacgcctacccctaccccgcgcaaggttactaccaggggccgtaccagggcccgccggtgatggcgccgccgcagtacgccgcgccgccgcccagaagggagccgagcttcctggaaggctgcctggccgcgctgtgctgctgctgcttgatcgacgagtgctgctgcgacccgtccatcatcttcgtcagctagactagacgaggaagaacctattggtatatataatatgtatgtatccagttgtactcttagctttattcctgcaaccttcaagctcgagatgatctgtatctcggtcgagttggtgtgtatctgtcatggtattgcttctaatttgctgctgaatcgagaacatattcgccgctg

SEQ ID NO: 32906 - protein, 69 aa, Zea mays subsp. mays
MSDPKYAYPYPAQGYYQGPYQGPPVMAPPQYAAPPPRREPSFLEGCLAALCCCCLIDECCCDPSIIFVS

SEQ ID NO: 32907 - protein, 47 aa, Zea mays subsp. mays
APAPLPVCRRHNIIVVACSPHSLFQWSVARASSSFPGRGSTARAEDE

SEQ ID NO: 32908 - protein, 46 aa, Zea mays subsp. mays
MYVSSCTLSFIPATFKLEMICISVELVCICHGIASNLLLNREHIRR

SEQ ID NO: 32909 - DNA, 1714 bp, Zea mays subsp. mays
ggctactgtttctgtttcttccttcgaccccggtcgtcccgtcctccgctgggcatcgaaagtcgaacgcctcccccctccctccctcccagttccgtcgtcggctcctgcagcagcagcaagcaatggcggcttcctggagagccgtggcgctggcggtggccgcagtgggctggcttcttgccggtgccgcgcgggcgttcccggccgaggacttggtcgcgcggctgccggggcagcctccggtcacgttcaggcagttcgccgggtacgtggacgtcgacgccaaggccggcaggagcctcttctactacttcgccgaggcgcgggaggacgccgccgccaagccgctcacgctgtggctgaatggaggtcctggctgttcttcggttggaggtggtgctttcaccgagctagggccattttatccgcgaggagacggccgcggcctcagatcgaacaagaagtcatggaacagagcgtccaatcttctgttcgtggagtcaccggctggagttggatggtcttattcgaacacttcatcggactacagcactggagacgtgcggactgctcatgacatgtaccaatttttgttgggatggtatgcgaagtttcctgagtacagatcaagagctttgttccttaccggagagagttacgcagggcattacataccacagctcgctgatgtacttatcacccataacgagaaatcgaagggtttcaagttcaatattaagggagtcgctatcgggaatccgctcctcaagcttgacagggacgtccctgcgacctacgagtacttctggtctcatggcatgatctctgacgagatattccaggcgatcagccacagctgcgactttgaggactacaccttcaacgaccctcacaacgagagcaagtcatgcaacgacgccatcgcggaagcgaacagcgtagtaggagactacgtcaacaactacgatgtcattctcgacgtctgctacccatcgatcgtgatgcaggagctacggctgcgagaatacgcgacgaagatcagtattggggtggatgtctgcatgtcctacgagaggtttttctacttcaatctaccggaggtgcagcaggctctgcatgctaacaggacgcatctgaagcatcactggagcatgtgcagcgatatcctgaactacagcaacaccgacggcaacatcaacatactgcctacacttcaaagaatcgtcgagcacaagataccactttgggtgttcagcggcgaccaagactccgtcgtgcccttgctgggcacccgaacccttgtgcgagagctcgctcacgccatggggctgcatgtcaccgtcccctacagcacctggttccacaaaggccaggttggagggtgggtgacggagtatggcaacttcctgaccttcgccacagtgcgaggtgcgtctcacatggtgccctttgcacagccagaccggggctctcgggctgtttcgatccattgtactcggacaaagactaccgaacacgacgaatccacacattgactagaagtgtatctacagaagaaggtggagacagaaagaaaatagcttagattttgtttttttcttcagttttgctgcaatggatctacaaaagaaggtagctcataaagacgtgtgatgtgttggatgctcaactagtactttaactatttataaagagcagaaataatattttg

SEQ ID NO: 32910 - protein, 511 aa, Zea mays subsp. mays
LLFLFLPSTPVVPSSAGHRKSNASPLPPSQFRRRLLQQQQAMAASWRAVALAVAAVGWLLAGAARAFPAEDLVARLPGQPPVTFRQFAGYVDVDAKAGRSLFYYFAEAREDAAAKPLTLWLNGGPGCSSVGGGAFTELGPFYPRGDGRGLRSNKKSWNRASNLLFVESPAGVGWSYSNTSSDYSTGDVRTAHDMYQFLLGWYAKFPEYRSRALFLTGESYAGHYIPQLADVLITHNEKSKGFKFNIKGVAIGNPLLKLDRDVPATYEYFWSHGMISDEIFQAISHSCDFEDYTFNDPHNESKSCNDAIAEANSVVGDYVNNYDVILDVCYPSIVMQELRLREYATKISIGVDVCMSYERFFYFNLPEVQQALHANRTHLKHHWSMCSDILNYSNTDGNINILPTLQRIVEHKIPLWVFSGDQDSVVPLLGTRTLVRELAHAMGLHVTVPYSTWFHKGQVGGWVTEYGNFLTFATVRGASHMVPFAQPDRGSRAVSIHCTRTKTTEHDESTH

SEQ ID NO: 32911 - protein, 470 aa, Zea mays subsp. mays
MAASWRAVALAVAAVGWLLAGAARAFPAEDLVARLPGQPPVTFRQFAGYVDVDAKAGRSLFYYFAEAREDAAAKPLTLWLNGGPGCSSVGGGAFTELGPFYPRGDGRGLRSNKKSWNRASNLLFVESPAGVGWSYSNTSSDYSTGDVRTAHDMYQFLLGWYAKFPEYRSRALFLTGESYAGHYIPQLADVLITHNEKSKGFKFNIKGVAIGNPLLKLDRDVPATYEYFWSHGMISDEIFQAISHSCDFEDYTFNDPHNESKSCNDAIAEANSVVGDYVNNYDVILDVCYPSIVMQELRLREYATKISIGVDVCMSYERFFYFNLPEVQQALHANRTHLKHHWSMCSDILNYSNTDGNINILPTLQRIVEHKIPLWVFSGDQDSVVPLLGTRTLVRELAHAMGLHVTVPYSTWFHKGQVGGWVTEYGNFLTFATVRGASHMVPFAQPDRGSRAVSIHCTRTKTTEHDESTH

SEQ ID NO: 32912 - protein, 318 aa, Zea mays subsp. mays
MYQFLLGWYAKFPEYRSRALFLTGESYAGHYIPQLADVLITHNEKSKGFKFNIKGVAIGNPLLKLDRDVPATYEYFWSHGMISDEIFQAISHSCDFEDYTFNDPHNESKSCNDAIAEANSVVGDYVNNYDVILDVCYPSIVMQELRLREYATKISIGVDVCMSYERFFYFNLPEVQQALHANRTHLKHHWSMCSDILNYSNTDGNINILPTLQRIVEHKIPLWVFSGDQDSVVPLLGTRTLVRELAHAMGLHVTVPYSTWFHKGQVGGWVTEYGNFLTFATVRGASHMVPFAQPDRGSRAVSIHCTRTKTTEHDESTH

SEQ ID NO: 32913 - DNA, 1179 bp, Zea mays subsp. mays
cgaaaatttttggcctctgtgttcatacttcgctcggcagaaaccttttgctcctgggggcgaacgcgccgccgcctccgacagccccctccagccgcgtcaaatcagcgccctcctctgctgcgccggcggtctcccgccgcaaagacgaagccccgcactcccttatcgcagatccgtgcccgccgccatgacggagtattgggtgagccaaggaaacaaatggtgcgacttctgtaagatttatatagcaaacaattccttcagcatcaggacacatgaacttggtaagcgccacaaggacaatgtcaccaaacgactgtcaacaatgcaaaaagagagtgagacaaaggaaaaggaacagcagcaagctgcacgagccctacagcagatagaagcaaaagctaaaaagagttatcaaaaagatttagagaataaccagaggaatgttgatggagacacttctgcagcacctggagatggttgtgatgggtgcttgactcggcgtcaggatattaccatgacaaatctactggactttactacgattcaaactctggcttctattattctgacagtttaggcaagtgggttacccaagaagaggcgtacaagtccgtgcaagcttcgaaatcagacgctggccaatcctcagcttcacaaacaaaagctcctgctgccgcagaaacagctgtccccgcgattaaaggaggtgcagctccaggccgggtggtaacgaaaccgttgaacccaatgagaccgattaagggcactcctgctccgtctgctgttgctgttaacaagaggaagagggatgacggcaagcccaaggcggtctccaaggaggaggaagcggccctcaaagcgcgggaagcagcaaggaagagagtggaggacagagagaagccgctgatgggattatacaagacgtactgatatcttgtccttgccagactgctactactcttcctccatgcatacgggtttgccaattacagtgtgatgttgtaaaatatatttttttaaaaaaatctaaccgaacgcattacgatttacgcatcattctcagaaagaatgccgataatggtgtggcactggatttcagagctcttctgcatcagcaatgtgtgtctacacggtttaatacctcatcagtggttcttgagtggaccaagttcc

SEQ ID NO: 32914 - protein, 193 aa, Zea mays subsp. mays
ENFWPLCSYFARQKPFAPGGERAAASDSPLQPRQISALLCCAGGLPPQRRSPALPYRRSVPAAMTEYWVSQGNKWCDFCKIYIANNSFSIRTHELGKRHKDNVTKRLSTMQKESETKEKEQQQAARALQQIEAKAKKSYQKDLENNQRNVDGDTSAAPGDGCDGCLTRRQDITMTNLLDFTTIQTLASIILTV

SEQ ID NO: 32915 - protein, 130 aa, Zea mays subsp. mays
MTEYWVSQGNKWCDFCKIYIANNSFSIRTHELGKRHKDNVTKRLSTMQKESETKEKEQQQAARALQQIEAKAKKSYQKDLENNQRNVDGDTSAAPGDGCDGCLTRRQDITMTNLLDFTTIQTLASIILTV

SEQ ID NO: 32916 - DNA, 1427 bp, Zea mays subsp. mays
ggatggaatgattccagatttcaggtccatatcctcgaaaagctggatatcggccgcagcaaacaccaccacaaacccccggcgcgcacaggagcgctcgacacggggtcgccagcgccgggcgacccctctcgtcgccatcacgccccaataattcactgcccacgcccgccatcgccaccactggcgtccgcaccgcagcccgccaataataacgctcccaaagcagaggccgaaacccgcgacgcgcagcgcagggccagtggcgacctccagctccagctccagctccacacgcgggcgccaccaaggagctgagccgagcccggcactgtcggcggccatgtccgcgccgcgtcgccgcatggccactgcctccccgtcgctccgcttcctcggcctgctcaagcaacccgacgacgccagctcccagtcccacggcgtccaggagctggagctcgacgagcgcgacgtcgtctggtcctccggcagcgcgacctcctcgtcctcgacctccgcggcctcctcgccgtccccgaccgcgtccccgaccgccagcctcgggaggccgatttccgcctcgtcccgccacttccccgccggcagcatggggctgtccgcgctcctcgccgacgccgacgaccaccacgcgcccaccgcgcccgtcccggccgccgcgcgcccggagaagcagcacgccccgcgcccgtgccaccagtcggcccccgtcgccgtgccggcctggcccaaggcgatgacggccgcggacaggcgccgccgcgaagcggagctgcaggccgcggacgacgaggacgacgacggcgagcccgtggtgccgccgcacgagatggccgcgcggcgcgctgcggcggcggcgtcggtcatggaaggcgccggacgcacactcaagggactgcgacctccggcgcgtgcgcaacgccgtgtggcgcaccaccggcttcctcgacctgtgaaaaaggacgttccttgcctttggaggtttcgtttcgttcgttcgctggccacgtcactccactccactccacttgagctgcctgcctcggatcggacggaccttggccgctgggcagcttcttcttgcgtagcgtagtgctgtgccagctgctaggcactgaaaaaaggtgggagtttccttactaggtttggagtactactaggggcgttatatattgagctaaatttgctggggaagtagccgcaggtgcttcggtattttcatgtaagagaactgctgtgatcagtctgcaactagtatgttttaagatgtctgcaactctttggcaaagaattttctctggagatgatgcagcatgccactgctaaacctgtggtctagtgtgcagcagaacagatgtgatgtgttcatagcttttgtattccactgtggctaatagagtgcctttttc

SEQ ID NO: 32917 - protein, 255 aa, Zea mays subsp. mays
MSAPRRRMATASPSLRFLGLLKQPDDASSQSHGVQELELDERDVVWSSGSATSSSSTSAASSPSPTASPTASLGRPISASSRHFPAGSMGLSALLADADDHHAPTAPVPAAARPEKQHAPRPCHQSAPVAVPAWPKAMTAADRRRREAELQAADDEDDDGEPVVPPHEMAARRAAAAASVMEGAGRTLKGLRPPARAQRRVAHHRLPRPVKKDVPCLWRFRFVRSLATSLHSTPLELPASDRTDLGRWAASSCVA

SEQ ID NO: 32918 - protein, 248 aa, Zea mays subsp. mays
MATASPSLRFLGLLKQPDDASSQSHGVQELELDERDVVWSSGSATSSSSTSAASSPSPTASPTASLGRPISASSRHFPAGSMGLSALLADADDHHAPTAPVPAAARPEKQHAPRPCHQSAPVAVPAWPKAMTAADRRRREAELQAADDEDDDGEPVVPPHEMAARRAAAAASVMEGAGRTLKGLRPPARAQRRVAHHRLPRPVKKDVPCLWRFRFVRSLATSLHSTPLELPASDRTDLGRWAASSCVA

SEQ ID NO: 32919 - protein, 167 aa, Zea mays subsp. mays
MGLSALLADADDHHAPTAPVPAAARPEKQHAPRPCHQSAPVAVPAWPKAMTAADRRRREAELQAADDEDDDGEPVVPPHEMAARRAAAAASVMEGAGRTLKGLRPPARAQRRVAHHRLPRPVKKDVPCLWRFRFVRSLATSLHSTPLELPASDRTDLGRWAASSCVA

SEQ ID NO: 32920 - DNA, 773 bp, Zea mays subsp. mays
aagtcagtctcactcaagtaaagtggacgccaagtcagtcacactcacaccaccgtagcacacaccagtacaccacacactcgcctttccgatcccatccctctccagccaccttcctccgctcgccgtgcttctgcttcctccgccaccaccgccggcatggctgcgcgctgcccctacttcgccgtcgaggagtcctcccgcggcatccgctcgggggagtccccggccgcggcgctccgccggatcctcgcgacgcctggtgcgcaccaggcgccctgctgctacgacgcgctcggcgcgcgcctcgtcgagcgcgcggggtttccgatcgggttcatgggcggtttctgtgtttctgccgcgcgacttggcttgcctgatgttggcctcatttcctatggagaaatggtagatcaagggcgtctcatcaatgaagctgtttcaatcccagtgattggtgatggagacaatggttacggaaactctatgaatatcaagagaaccataaaaggatatatcaatgctggttttgctggaattatgcttgaggatcaggtggcacctaaagcatgtggacatactgaaggaaggaaagtcatatcaagggaggaagctgtcatgcacataaaagctgctgtagatgctaggaaagagagtggtagtagggggcacgagtaaggaggggtttatacaatgatctaatctagtgtgttaagtctgggtgcaatttatttggtggatttagtggagcttgagtgagatgatttggt

SEQ ID NO: 32921 - protein, 173 aa, Zea mays subsp. mays
MAARCPYFAVEESSRGIRSGESPAAALRRILATPGAHQAPCCYDALGARLVERAGFPIGFMGGFCVSAARLGLPDVGLISYGEMVDQGRLINEAVSIPVIGDGDNGYGNSMNIKRTIKGYINAGFAGIMLEDQVAPKACGHTEGRKVISREEAVMHIKAAVDARKESGSRGHE

SEQ ID NO: 32922 - protein, 126 aa, Zea mays subsp. mays
VSLTQVKWTPSQSHSHHRSTHQYTTHSPFRSHPSPATFLRSPCFCFLRHHRRHGCALPLLRRRGVLPRHPLGGVPGRGAPPDPRDAWCAPGALLLRRARRAPRRARGVSDRVHGRFLCFCRATWLA

SEQ ID NO: 32923 - protein, 113 aa, Zea mays subsp. mays
MGGFCVSAARLGLPDVGLISYGEMVDQGRLINEAVSIPVIGDGDNGYGNSMNIKRTIKGYINAGFAGIMLEDQVAPKACGHTEGRKVISREEAVMHIKAAVDARKESGSRGHE

SEQ ID NO: 32924 - DNA, 1206 bp, Zea mays subsp. mays
aaaagagagagggggaggtcgacgagacagagagagaaggccaagaggcttcctctccccattcctcccttccgtgccctagccgagccagccgcgaggaaggaggcatcccgccgtctcgcctggcgcccgcccgtcggccgaccttctgccgcagcttccaattgtaaaaagatcatagatttttgtgcaagagcgagtggatatggaaccatcccctcagcctatgggtgtcgctgccggtgggtcacaagtgtatcctgcctctgcctatccgcctgcagcaacagtagctcctgcttctgttgtatctgctggtttacagtcagggcagccattcccagccaatcctggtcatatgagtgctcagcaccagattgtctaccaacaagctcaacaattccaccaacagctccagcagcaacaacaacagcagcttcagcagttctgggttgaacgcatgactgaaattgaggcgacgactgatttcaagaaccacaacttgccacttgcgaggataaagaagatcatgaaggccgatgaagatgttcgcatgatctcagctgaagctcctgtagtctttgcaaaagcttgtgagatattcatactggagctgacacttaggtcgtggatgcacactgaggagaacaagcgccgcaccttgcaaaagaatgacattgcagcagcgatcactaggactgacatttatgacttcttggtcgacattgttcccagggatgagatgaaggaggacggaattgggcttcctagggctggtctgccacccatgggagccccagctgatgcatatccatactactacatgccacagcagcaggtgcctggttctggaatggtttatggtgcccagcaagggcacccagtgacttatttgtggcaggagcctcagcaacagcaggagcaagctcctgaagagcagcaatctgcatgaaagtggctgagaatattgctcagaagctatcacctgattcagagttctcattttaggttgtccaaactgcaggttttcttagtaatatcgttggttatcaaactgaaacaggcgattctaagtagggtgtagcatcatggtagtttcatttctgcttgtgatgttagttgaaaggataatgattagtggctagtggattaaagttaccataccatttccttctattccgaaagtttgcctccatgaggcctctg

SEQ ID NO: 32925 - protein, 248 aa, Zea mays subsp. mays
MEPSPQPMGVAAGGSQVYPASAYPPAATVAPASVVSAGLQSGQPFPANPGHMSAQHQIVYQQAQQFHQQLQQQQQQQLQQFWVERMTEIEATTDFKNHNLPLARIKKIMKADEDVRMISAEAPVVFAKACEIFILELTLRSWMHTEENKRRTLQKNDIAAAITRTDIYDFLVDIVPRDEMKEDGIGLPRAGLPPMGAPADAYPYYYMPQQQVPGSGMVYGAQQGHPVTYLWQEPQQQQEQAPEEQQSA

SEQ ID NO: 32926 - protein, 241 aa, Zea mays subsp. mays
MGVAAGGSQVYPASAYPPAATVAPASVVSAGLQSGQPFPANPGHMSAQHQIVYQQAQQFHQQLQQQQQQQLQQFWVERMTEIEATTDFKNHNLPLARIKKIMKADEDVRMISAEAPVVFAKACEIFILELTLRSWMHTEENKRRTLQKNDIAAAITRTDIYDFLVDIVPRDEMKEDGIGLPRAGLPPMGAPADAYPYYYMPQQQVPGSGMVYGAQQGHPVTYLWQEPQQQQEQAPEEQQSA

SEQ ID NO: 32927 - protein, 197 aa, Zea mays subsp. mays
MSAQHQIVYQQAQQFHQQLQQQQQQQLQQFWVERMTEIEATTDFKNHNLPLARIKKIMKADEDVRMISAEAPVVFAKACEIFILELTLRSWMHTEENKRRTLQKNDIAAAITRTDIYDFLVDIVPRDEMKEDGIGLPRAGLPPMGAPADAYPYYYMPQQQVPGSGMVYGAQQGHPVTYLWQEPQQQQEQAPEEQQSA

SEQ ID NO: 32928 - DNA, 857 bp, Zea mays subsp. mays
aggcaagcaaaggcgccgtgatacgtttctacgagacgctgagggctgagctggggtcccacgtgcacgtcaccatcctcacgcccggctacgtcgtctccaacctcaccaagggcaagggcctccagaaggacggccatgtcggcatcgacgaggaggcccgcgacgtacgtgagctcgatccgccgccctccctttatttatacaatttcctcctacgtgcacgcgaacagtacagctacagcgaagaaatggcatgcgcgcgcgcgcttgcagatcaacgtggggccgatgccggtgggcaagacggagtcgctggccgaggtggtggtggcgagcgtgcgccgtcgggactactacgtcacgtggcccggctggtactggcccttccacatggtcatgtgcgccgcgcccgagctggtggactggttctcccgcaccttctacgtctccaagtccggcgaccaggacggcggcggcggcgcgctcagcaagaagatcctggaggccgtcggcgggaagaagttcctctacccccagaccatacgctcacagaccgccatggcacccaataactgacaacacatatatatatatatatatatatatatatatatatatatatatatatatatatatatatatatatatatgtcatttatgagaatgcacggtcgatctgttgttggattagaacagtacgtgatgatcgaacgtacgggccggcacgggtgaaattgtttattcgtttcgtttcggggttttttcttcttcatttcctctgccttttctccacttccgattttacaaatggtcaatgtgtatgaagtaattaatacgaatgttcattcgtggct

SEQ ID NO: 32929 - protein, 190 aa, Zea mays subsp. mays
ASKGAVIRFYETLRAELGSHVHVTILTPGYVVSNLTKGKGLQKDGHVGIDEEARDVRELDPPPSLYLYNFLLRAREQYSYSEEMACARALADQRGADAGGQDGVAGRGGGGERAPSGLLRHVARLVLALPHGHVRRARAGGLVLPHLLRLQVRRPGRRRRRAQQEDPGGRRREEVPLPPDHTLTDRHGTQ

SEQ ID NO: 32930 - protein, 146 aa, Zea mays subsp. mays
MSASTRRPATYVSSIRRPPFIYTISSYVHANSTATAKKWHARARLQINVGPMPVGKTESLAEVVVASVRRRDYYVTWPGWYWPFHMVMCAAPELVDWFSRTFYVSKSGDQDGGGGALSKKILEAVGGKKFLYPQTIRSQTAMAPNN

SEQ ID NO: 32931 - protein, 135 aa, Zea mays subsp. mays
MRARACRSTWGRCRWARRSRWPRWWWRACAVGTTTSRGPAGTGPSTWSCAPRPSWWTGSPAPSTSPSPATRTAAAARSARRSWRPSAGRSSSTPRPYAHRPPWHPITDNTYIYIYIYIYIYIYIYIYIYIYICHL

SEQ ID NO: 32932 - DNA, 169 bp, Zea mays subsp. mays
cggattttatcacagcggcacatttatctgatgatgacatttcaatatatgggtttgtagcatctaagccctcatggccgtcatggctgctcattgcaactgtggtacttacactagcagcagttacatccatcatcccagtgaagtatgtcgttgagttaaggacttc

SEQ ID NO: 32933 - protein, 55 aa, Zea mays subsp. mays
DFITAAHLSDDDISIYGFVASKPSWPSWLLIATVVLTLAAVTSIIPVKYVVELRT

SEQ ID NO: 32934 - DNA, 1958 bp, Zea mays subsp. mays
aaaccaaaatcatttcatccccggaaccggacgccgaacggcagtgctgcaaaagtccggacaaagctcgcgccgcccaccgcacccgatccgcctcgcccaggcgtgctgccgtccgctcccttctcccgcgccgtcgcctccgcctacgcccgggccgacccgctggacccagcgtgcgccgctccactcggacgcgccgccgccctctcgggttgaggcggaggtgcttggggacccgcccccatggcgagcgccggcaacagcggcagcggggacgacgatgcaggagggaagctcctggcggatcgctaccagaagggcgaggtcctcggcgagggcacgtatggagtcgtcttcaaggccatcgacaccaagactggaaatacagtcgcggtaaagcgaatccggataggaaaggacaagaaggaaggtgtcaacttcactgcgttgagggaaattaaactacttaaggagctgaaagatcctaatattatagagctgattgattgtttcccttacaaggaaaatttgcaccttgtgtttgagtttatggagaccgatctggaagctctcataaaagataagaacataatactctctccagctgacacaaaatcatatgtccagatgatgttaaaaggtctagcgttctgccataagaaatgggtgctacacagggatatgaaaccaaataatttactcattggtgccgatgggcagctcaagcttgctgacttcggtctggcccgtgtgttcgggagtccaggaaggaacttcactcaccaggtctttgcacgttggtaccgggcaccagaattattatttggctcgaagcagtacggatctggggtggatatttgggccgctggatgtatttttgctgaactgcttactcgcagagcctttctccagggttctagtgacattgatcaacttgggaagattttcgcagcacttgggaccccaaaatcttctcaatggcctgacatggtttatcttcctgattatgttgaataccaatatgttgctgcacctccactacgtacgttgtttccaatggccagcgatgatgctttggatcttctgtcaaaaatgcttacctatgatccaaaagcaagaatcagtgctcagcaggctctagaacacaggtacttttcatcgttacctgcaccaacaagaccatcgcagcttccaaggccacgtcggaaaggagatcaagggaataacaagattcctgatctcaacctgcaggatggccctatggtgctctccccgccaagaaagttacgtagggtgacagcgcatgaagggatggaaggtatgcacaggacagataaagtggacgaacatccttctgggatgaggcacaccgatgacatgcccagtcagagttctagaattccaatgtcagttgatgttggggctgtgtttggcacacgacctgcacctaggccaacattgaacagtgcggacaagtctcgtttaaaacggaaacttgatatggatccagagtttggatacgcggagtagaaggaacacatgtttacatgcaccattcttttcttattggggatgttgatttttaaaataagattctgacacaatcaactgagatgttaccgtcatcgcctcacgaagaggaaaactgaagagagattattctaatttatcccgagtcacatagggtattacagctaaccaattccgtaaggcaggctcttgaaaacagtagactcaatgggatattcattagtggagagtgttatggggaattggaggatggaaaagcttgctccatgcgtgtttgtacgtgttttgccaagattgtgctgaagcatctgatctatctactgattctctattttccgtactgtcaattcccgttcttgtatggacagagctttgagcatgttttcagtcagacaccttaggcagtgattcttattgtacaactc

SEQ ID NO: 32935 - protein, 428 aa, Zea mays subsp. mays
MASAGNSGSGDDDAGGKLLADRYQKGEVLGEGTYGVVFKAIDTKTGNTVAVKRIRIGKDKKEGVNFTALREIKLLKELKDPNIIELIDCFPYKENLHLVFEFMETDLEALIKDKNIILSPADTKSYVQMMLKGLAFCHKKWVLHRDMKPNNLLIGADGQLKLADFGLARVFGSPGRNFTHQVFARWYRAPELLFGSKQYGSGVDIWAAGCIFAELLTRRAFLQGSSDIDQLGKIFAALGTPKSSQWPDMVYLPDYVEYQYVAAPPLRTLFPMASDDALDLLSKMLTYDPKARISAQQALEHRYFSSLPAPTRPSQLPRPRRKGDQGNNKIPDLNLQDGPMVLSPPRKLRRVTAHEGMEGMHRTDKVDEHPSGMRHTDDMPSQSSRIPMSVDVGAVFGTRPAPRPTLNSADKSRLKRKLDMDPEFGYAE

SEQ ID NO: 32936 - protein, 326 aa, Zea mays subsp. mays
METDLEALIKDKNIILSPADTKSYVQMMLKGLAFCHKKWVLHRDMKPNNLLIGADGQLKLADFGLARVFGSPGRNFTHQVFARWYRAPELLFGSKQYGSGVDIWAAGCIFAELLTRRAFLQGSSDIDQLGKIFAALGTPKSSQWPDMVYLPDYVEYQYVAAPPLRTLFPMASDDALDLLSKMLTYDPKARISAQQALEHRYFSSLPAPTRPSQLPRPRRKGDQGNNKIPDLNLQDGPMVLSPPRKLRRVTAHEGMEGMHRTDKVDEHPSGMRHTDDMPSQSSRIPMSVDVGAVFGTRPAPRPTLNSADKSRLKRKLDMDPEFGYAE

SEQ ID NO: 32937 - protein, 300 aa, Zea mays subsp. mays
MMLKGLAFCHKKWVLHRDMKPNNLLIGADGQLKLADFGLARVFGSPGRNFTHQVFARWYRAPELLFGSKQYGSGVDIWAAGCIFAELLTRRAFLQGSSDIDQLGKIFAALGTPKSSQWPDMVYLPDYVEYQYVAAPPLRTLFPMASDDALDLLSKMLTYDPKARISAQQALEHRYFSSLPAPTRPSQLPRPRRKGDQGNNKIPDLNLQDGPMVLSPPRKLRRVTAHEGMEGMHRTDKVDEHPSGMRHTDDMPSQSSRIPMSVDVGAVFGTRPAPRPTLNSADKSRLKRKLDMDPEFGYAE

SEQ ID NO: 32938 - DNA, 151 bp, Zea mays subsp. mays
caaaaaaaattagccaggcgtggtggcaggtgcctgtagtcccagctactccaaggcaggagaatggcgtgaacccagaagatggagcttgcagtgagccgagatcgcgccaatgcagtccagcctgggcaacagagcaagattctgtctc

SEQ ID NO: 32939 - protein, 49 aa, Zea mays subsp. mays
KKISQAWWQVPVVPATPRQENGVNPEDGACSEPRSRQCSPAWATEQDSV

SEQ ID NO: 32940 - DNA, 698 bp, Zea mays subsp. mays
  misc_feature (79)..(79): n is a, c, g, or t
gcagtgcgatggtgctgatgatcttgattggctacggatggtgcagccagttattcaagaaaggattgagcgctactcncaaagcgagatcaggttcaatctcatggccatcataaagaacaggaaagaggtgtacagtgctgagcttgaggaactggagaagagaagggagcagattttgcaggagatgaataatgcttcctccacagaatccttgagcagttcgcttacggaggtgatatcggcaatcgaaactgtcacggagaaggtcatcatggaagaagagaagttcaagaagtggaagaaggagaacattcggaggaaacataactacatccctttcttgttcaacttgctgaagatgcttgcagagaagcagcagctaaaacctctggtcgagaaggccaaacagcaaaagtcagcaagcccgagcacgagttgatggtgaaatgtcaatagactggtagcttttgccgatgtcttctgagcgtcgtgttatcttatcagatacattgccaagtcggcagctcagataaattatgaccgatgttatttataccatgttgcacgccgtgatgtatcagcagctatgccatttttttttgcagagcacgtgcgttgttgaagtggttaattttagtcgtttagagagattgtttgagagtaagggtaatggaatggactgaggaggttgaatc

SEQ ID NO: 32941 - protein, 146 aa, Zea mays subsp. mays
  misc_feature (26)..(26): Xaa can be any naturally occurring amino acid
QCDGADDLDWLRMVQPVIQERIERYXQSEIRFNLMAIIKNRKEVYSAELEELEKRREQILQEMNNASSTESLSSSLTEVISAIETVTEKVIMEEEKFKKWKKENIRRKHNYIPFLFNLLKMLAEKQQLKPLVEKAKQQKSASPSTS

SEQ ID NO: 32942 - protein, 134 aa, Zea mays subsp. mays
  misc_feature (14)..(14): Xaa can be any naturally occurring amino acid
MVQPVIQERIERYXQSEIRFNLMAIIKNRKEVYSAELEELEKRREQILQEMNNASSTESLSSSLTEVISAIETVTEKVIMEEEKFKKWKKENIRRKHNYIPFLFNLLKMLAEKQQLKPLVEKAKQQKSASPSTS

SEQ ID NO: 32943 - protein, 112 aa, Zea mays subsp. mays
MAIIKNRKEVYSAELEELEKRREQILQEMNNASSTESLSSSLTEVISAIETVTEKVIMEEEKFKKWKKENIRRKHNYIPFLFNLLKMLAEKQQLKPLVEKAKQQKSASPSTS

SEQ ID NO: 32944 - DNA, 1986 bp, Zea mays subsp. mays
  misc_feature (1446)..(1446): n is a, c, g, or t
  misc_feature (1468)..(1468): n is a, c, g, or t
  misc_feature (1792)..(1792): n is a, c, g, or t
ggcacgagcttccagctcgttgcgagctcccatttttgaccttcaccagcgccaccttccacgccaaggctacgacgacaatggtggcgaggagcccgaacgccaagccggacaggcagaaggctgcagccctcgccgcggctgccgcgctcaacccggctctcctcagggagacgctcaagaaggttgaccgatgcatggcacggctgcaggagctgcagtacacggtagccggcggcgccaaggtcgtctccggcgtcagtctcagcccccgcagcacgcgcgggtacctccggaccagcctccggtgcaagcaggagaccgtcaggatgaggggcggcgcgtcggcgcagaagaggtccccaagcggcaagttcgggggcggcgtcggcggagagggcgcgcagtggcgacgaatgtcgctgccggcgatgctgctcggcgagaccgtgctagagatcgtgcaggccagccagttcgcgcgggacatcgtgacggccgccggcgctacgaatcgggagcccccaaggaccccgaaaccggctcccaggaccaggaagccggcggcgggcgagccgacgcctctccgcgcgcggcgtgcccgggagaagcagagccatcggggtggcgccgcgacacggggcgccgacgccgccacgccgccgtcgcgcagccgcgtgcggtcccggatccagttcaagcccgtgtcgccggtcgccgtcggccggccgtccgtgtccgccaaccgcgtctcccccaagaaccggccgtgggcaaagaaggcggtgatgttcccgaaccccacgttccacgcctccacctctgccgccaccgacccgtgcgcgacgccgtcgccttccaagaagcagaagcggctctacaagacgcggtccccggtcgcggcccggcagacgccgcacaagttcctggtcaagtcgccaccgagcgcgctgggatcgaagctcaggatgcacgggaaggccctgcccgcgagacccgccgccgtgtcaccgccgccgcccgtgaaggcgcaggcatcacctgcaaaaacgcggcgctgctcgttctcgccgtcgaggttggcgacaaggctcatgtcgcctatcaaagcgaggctgtcgctgggcaggagcagggacagcggcgtcggtgtcggcggtggcccgatgagcgggctgaagcagcggccaggtgttagcttgacggtgcggacggtgtcgagcaagatatcatcgaggtgatgatcttcgtttgtcttcggcgtcatgtgaagacgagagggggtacagattgcagagaagagaattgcgttgatcttcttcagaaataagatattctctgctgggaaagcctcctgtcttggggtgcttgtacacacactcgttacggttatatgtaattttcgttgatccttggtgataatacaggggtggtctcctcgacccnataatcgaaaggcaatacactngatctgcgattgttgttccagtcaggacttgaggctttcagaagatactgcgcttgcactagaatctcggaaattttgcaaacagcaatttcggaagctgcaatttcagcaggatcaagcagccggcgggaccaaacaagttacttttaagggcagtgccgatgagacttggacttggaaggaagcacgtgctcgcccgtcaaaggtctagctgtcaggctctactacaagcactacctgctaaatactttgttggtagggtgtttcagtgtttgaatgcactcaactaatagttagcttcttaaattagttgaagacatccanacagtctatttgatagttcaactattagttatttttatcaaattgcctaatagttggctgctaactaattctcctagcaatttgtagccaactaactattagctctagtggattcaaacactttcttaagacaatatttgaatgcactagaactaataggtgactgctaaaattgaataaaagagtacattctt

SEQ ID NO: 32945 - protein, 412 aa, Zea mays subsp. mays
HELPARCELPFLTFTSATFHAKATTTMVARSPNAKPDRQKAAALAAAAALNPALLRETLKKVDRCMARLQELQYTVAGGAKVVSGVSLSPRSTRGYLRTSLRCKQETVRMRGGASAQKRSPSGKFGGGVGGEGAQWRRMSLPAMLLGETVLEIVQASQFARDIVTAAGATNREPPRTPKPAPRTRKPAAGEPTPLRARRAREKQSHRGGAATRGADAATPPSRSRVRSRIQFKPVSPVAVGRPSVSANRVSPKNRPWAKKAVMFPNPTFHASTSAATDPCATPSPSKKQKRLYKTRSPVAARQTPHKFLVKSPPSALGSKLRMHGKALPARPAAVSPPPPVKAQASPAKTRRCSFSPSRLATRLMSPIKARLSLGRSRDSGVGVGGGPMSGLKQRPGVSLTVRTVSSKISSR

SEQ ID NO: 32946 - protein, 386 aa, Zea mays subsp. mays
MVARSPNAKPDRQKAAALAAAAALNPALLRETLKKVDRCMARLQELQYTVAGGAKVVSGVSLSPRSTRGYLRTSLRCKQETVRMRGGASAQKRSPSGKFGGGVGGEGAQWRRMSLPAMLLGETVLEIVQASQFARDIVTAAGATNREPPRTPKPAPRTRKPAAGEPTPLRARRAREKQSHRGGAATRGADAATPPSRSRVRSRIQFKPVSPVAVGRPSVSANRVSPKNRPWAKKAVMFPNPTFHASTSAATDPCATPSPSKKQKRLYKTRSPVAARQTPHKFLVKSPPSALGSKLRMHGKALPARPAAVSPPPPVKAQASPAKTRRCSFSPSRLATRLMSPIKARLSLGRSRDSGVGVGGGPMSGLKQRPGVSLTVRTVSSKISSR

SEQ ID NO: 32947 - protein, 347 aa, Zea mays subsp. mays
MARLQELQYTVAGGAKVVSGVSLSPRSTRGYLRTSLRCKQETVRMRGGASAQKRSPSGKFGGGVGGEGAQWRRMSLPAMLLGETVLEIVQASQFARDIVTAAGATNREPPRTPKPAPRTRKPAAGEPTPLRARRAREKQSHRGGAATRGADAATPPSRSRVRSRIQFKPVSPVAVGRPSVSANRVSPKNRPWAKKAVMFPNPTFHASTSAATDPCATPSPSKKQKRLYKTRSPVAARQTPHKFLVKSPPSALGSKLRMHGKALPARPAAVSPPPPVKAQASPAKTRRCSFSPSRLATRLMSPIKARLSLGRSRDSGVGVGGGPMSGLKQRPGVSLTVRTVSSKISSR

SEQ ID NO: 32948 - DNA, 460 bp, Zea mays subsp. mays
acagatatatatgccgtgaccaaaccgtcgcttccatttttcgcccgccgcccccagtcccgatccgaagctgtgcctcgtaccatttcgatccaatggcgccgacgtcgaagctgtcgacgggcatcaagcgcgcttcgcggtcgcacgcgtaccatcgccgtgggctgtgggccatcaaggccaagaacggcggcgccttccccaaggccgacaaggccgccgccgccgtggaacccaagttctaccctgccgacgacggcggtgagcgacaggagagcgtgagtcctcccagcgacggctcatagcgtctttggagttcggaggcatgtcagcgtgtgcgtgcactggtctgctatggcgtctctctctttctctctctctctctcctgtgttaattagtctgtgcttctcgacttatcgtttgcggtttttgttaattggttgcactgttgtggcc

SEQ ID NO: 32949 - protein, 101 aa, Zea mays subsp. mays
RYICRDQTVASIFRPPPPVPIRSCASYHFDPMAPTSKLSTGIKRASRSHAYHRRGLWAIKAKNGGAFPKADKAAAAVEPKFYPADDGGERQESVSPPSDGS

SEQ ID NO: 32950 - protein, 94 aa, Zea mays subsp. mays
TDIYAVTKPSLPFFARRPQSRSEAVPRTISIQWRRRRSCRRASSALRGRTRTIAVGCGPSRPRTAAPSPRPTRPPPPWNPSSTLPTTAVSDRRA

SEQ ID NO: 32951 - protein, 70 aa, Zea mays subsp. mays
MAPTSKLSTGIKRASRSHAYHRRGLWAIKAKNGGAFPKADKAAAAVEPKFYPADDGGERQESVSPPSDGS

SEQ ID NO: 32952 - DNA, 1101 bp, Zea mays subsp. mays
tttacttctcagatctcagtgctcacgccgtccacggtccactagttgcatcggctcccgcataaagatccacaccacttgagcagcagctagctcaagggaaggagaaggctggaagtggaaagaagtgggttcttgcttgagctgagctcttgctgcccttgaatctgttagggagtggagaacggagtatggggcgcggcaagatcgagatcaagaggatcgagaactctaccaaccggcaggtgaccttctccaagcgccgggccggactggtcaagaaggcacgggagatcggcgtgctctgcgacgccgaggtcggcgtcgtcatcttctccagcggcggcaagctctacgactactgctcgcccaggacctcgctgtccaggatcttggagaagtaccagaccaactccgggaagattctgtggggtgagaagcacaagaacctgagtgcagagatcgacagagtcaagaaggagaacgacaacatgcagattcagctcaggcatctgaaaggcgaggacctgaactccctgcagcccagggagctgatcgctattgaagagggcctccagaatgggcagaccaacatgcgcgagaagcagatggactaccggaggatgcacaagacgaatgggaagatgctggaggacgaacacaagatactgacttttaggatgcaccaacaggctgttgatctgagcggcggcatgagggagctggagaccggataccatcaggtccagcacgacagggatttcatttcccagatgccgttcaccttccgggtgcagcccaaccaccccaacctgcaggaagacgagtagctacagcctgctggatagtgttctgcatgccgctctgaactgaagctgcaggaagacgagtagctacagcctgctggatagtgttctgcatgccgctctgaactggagctcctcacctgcagcttctatctcgcgtttcatcattcagcgttagctgggtatctttcttttcatggcaccctggatgaagtctgtcagttgttactacgatgtggtcttgtcttgtgcgtctcttttgactttgctgggctgaggtcttgtcttgtgcgtc

SEQ ID NO: 32953 - protein, 212 aa, Zea mays subsp. mays
MGRGKIEIKRIENSTNRQVTFSKRRAGLVKKAREIGVLCDAEVGVVIFSSGGKLYDYCSPRTSLSRILEKYQTNSGKILWGEKHKNLSAEIDRVKKENDNMQIQLRHLKGEDLNSLQPRELIAIEEGLQNGQTNMREKQMDYRRMHKTNGKMLEDEHKILTFRMHQQAVDLSGGMRELETGYHQVQHDRDFISQMPFTFRVQPNHPNLQEDE

SEQ ID NO: 32954 - protein, 112 aa, Zea mays subsp. mays
MQIQLRHLKGEDLNSLQPRELIAIEEGLQNGQTNMREKQMDYRRMHKTNGKMLEDEHKILTFRMHQQAVDLSGGMRELETGYHQVQHDRDFISQMPFTFRVQPNHPNLQEDE

SEQ ID NO: 32955 - DNA, 1860 bp, Zea mays subsp. mays
aggtctagagtagagaggtccaggccttcgcccgagccccgccagccactaccaacttgggacgggcaggccggccagtgtcacatacaggcccagaagccgtcagaagacatccggccctaggctaggcgcacgggaggcagacgaggcgagaagtggcaactggtacctttggggaggcgaggaaggacacgaggtcggcgcgttcgtgcgtgcctttctcactgcacgccgatccctctctccgaaccccgccgcccgccgcagatccgagggtcatcggcagccatgatctcgtccagcaagctcaagtctgtcgacttctacaggaaaatacctagggatttgaccgaggcatcactatctggcgctggattatccatcgtagcagcattagcaatggtttttttgtttggaatggagttgagcagttacttagcagtcaatactaccacatctgtgatcgttgataggagttcagatggggagtttttacggatagatttcaatatgagctttcctgcgctttcatgtgaatttgcatcagttgatgttagtgacgtgctgggaacaaacagattgaacataacgaaaactgttcgaaagtattcaattgatcggaatttagtaccaactggatcagaattccaccctgggcctatccccattctcaataagcatggagatgatgtcgaagaggatcacgtggatggtgcattttcattgtcatctcgcaattttgatagcttttcacaccaatatcctgttttggttgtcaacttctatgctccctggtgttactggagcaatcgactgaaaccttcatgggagaagacagcaaaaataatgagggagagatatgaccctgaaatggatggtagaatccttctaggcaaggttgactgcactgaggaagttgaattgtgtaggagaaaccacatacaaggatacccatccattcgtgttttccgtaaagggtctgatataaaggagaatcagggtcaccatgatcatgaatcatactatggggaacgtgatactgagagtttagtcgcggcaatggaaacatatgttgcaaacatcccaaaagaggctcatgcgcttgctttggaagacaaatccaataagactgttgatcctgcaaagcgccctgctccaatggccagtgggtgcagaatagaaggctttgtgcgtgtcaaaagggttccagggagtgttgttatctcagctcgatctggatctcactcgtttgatccatcccagataaatgtttcgcactatgtgacacagttctcatttggcaaaagactttccccaaggatgctgcatgaattcataagacttactccctatcttcgtggataccatgatagactagctggccagtcttatactgttaagcatggtgaggttaacgccaatgttactattgagcactacctacaagttgtaaagactgagcttgtaacacagaggtcctcaaaggaactgaaagtgcttgaggaatacgaatacacagcacacagcagcttggtgcacagcttctatgttcctgttgtgaaattccattttgagccttctcccatgcaggtcttggtaactgaagtcccgaaatccttctcccatttcatcacaaatgtctgcgctatcatcggtggggtcttcacggttgctggaatactggattccatctttcacaacacactcaggatggtgaagaagattgagctaggaaagaacatttaaatttcgacgccgctgcaagtttaggcggatgcactaggtagccattgttttgttataactaggtaatgactcatgaaaatcggtatatgaaagatggcttgctgaattgacggc

SEQ ID NO: 32956 - protein, 485 aa, Zea mays subsp. mays
MISSSKLKSVDFYRKIPRDLTEASLSGAGLSIVAALAMVFLFGMELSSYLAVNTTTSVIVDRSSDGEFLRIDFNMSFPALSCEFASVDVSDVLGTNRLNITKTVRKYSIDRNLVPTGSEFHPGPIPILNKHGDDVEEDHVDGAFSLSSRNFDSFSHQYPVLVVNFYAPWCYWSNRLKPSWEKTAKIMRERYDPEMDGRILLGKVDCTEEVELCRRNHIQGYPSIRVFRKGSDIKENQGHHDHESYYGERDTESLVAAMETYVANIPKEAHALALEDKSNKTVDPAKRPAPMASGCRIEGFVRVKRVPGSVVISARSGSHSFDPSQINVSHYVTQFSFGKRLSPRMLHEFIRLTPYLRGYHDRLAGQSYTVKHGEVNANVTIEHYLQVVKTELVTQRSSKELKVLEEYEYTAHSSLVHSFYVPVVKFHFEPSPMQVLVTEVPKSFSHFITNVCAIIGGVFTVAGILDSIFHNTLRMVKKIELGKNI

SEQ ID NO: 32957 - protein, 448 aa, Zea mays subsp. mays
MVFLFGMELSSYLAVNTTTSVIVDRSSDGEFLRIDFNMSFPALSCEFASVDVSDVLGTNRLNITKTVRKYSIDRNLVPTGSEFHPGPIPILNKHGDDVEEDHVDGAFSLSSRNFDSFSHQYPVLVVNFYAPWCYWSNRLKPSWEKTAKIMRERYDPEMDGRILLGKVDCTEEVELCRRNHIQGYPSIRVFRKGSDIKENQGHHDHESYYGERDTESLVAAMETYVANIPKEAHALALEDKSNKTVDPAKRPAPMASGCRIEGFVRVKRVPGSVVISARSGSHSFDPSQINVSHYVTQFSFGKRLSPRMLHEFIRLTPYLRGYHDRLAGQSYTVKHGEVNANVTIEHYLQVVKTELVTQRSSKELKVLEEYEYTAHSSLVHSFYVPVVKFHFEPSPMQVLVTEVPKSFSHFITNVCAIIGGVFTVAGILDSIFHNTLRMVKKIELGKNI

SEQ ID NO: 32958 - protein, 442 aa, Zea mays subsp. mays
MELSSYLAVNTTTSVIVDRSSDGEFLRIDFNMSFPALSCEFASVDVSDVLGTNRLNITKTVRKYSIDRNLVPTGSEFHPGPIPILNKHGDDVEEDHVDGAFSLSSRNFDSFSHQYPVLVVNFYAPWCYWSNRLKPSWEKTAKIMRERYDPEMDGRILLGKVDCTEEVELCRRNHIQGYPSIRVFRKGSDIKENQGHHDHESYYGERDTESLVAAMETYVANIPKEAHALALEDKSNKTVDPAKRPAPMASGCRIEGFVRVKRVPGSVVISARSGSHSFDPSQINVSHYVTQFSFGKRLSPRMLHEFIRLTPYLRGYHDRLAGQSYTVKHGEVNANVTIEHYLQVVKTELVTQRSSKELKVLEEYEYTAHSSLVHSFYVPVVKFHFEPSPMQVLVTEVPKSFSHFITNVCAIIGGVFTVAGILDSIFHNTLRMVKKIELGKNI

SEQ ID NO: 32959 - DNA, 956 bp, Zea mays subsp. mays
accctccggccgcagccccttccctgccgctccggcctcctccgtcgggaccgccgacgacgcgccgcgcggaagcctgcggggatattgggtaagcagttgtgatcctgttctcttgctcggatgccgggttactatgacatcgatgacatcctcatggaggatgagcctatttcagttgttttccaagtaactgcaaatggtgttggcctgctagatcctggtgctgaaagtaactgtgtagacaagggcgccaaggtggacctcccattttggcttgcgcatgggctgctgtctctggaacaagctgtgtcaataaacccacctccatgcttcacacagaaaacttggaaggagatccaagctgatgcggcctgtgtggatttgagggttcgttgcccgtacttttatgagctaggatgcaagattgttcctttggtgagtgacaatagcattggcctgttcttgcgatatgcattcaccagtaggtacaaagaggttctaagtaagtcccacagttcttccatgatgacagtgcccaagttcgttccacgccttacaaaagaagaaactcgggtgtttgaatctgccagagaatcgatgactggtttcaagaaatggcgagcaggtgggatgagactgcaaaaggcttccattcttggccggaagaggaagacaaagctgcctgaatgagttttaaggtgatgtgcgctgctttgatttgctagcaccgtgagcaaagagaaaagtgaatggcagattaaatctggatgtactatgatctgctgtacattgtgcacttgtgtacagcagctctgatcagtccgtcctttgtaaggaaaatgaacaccgtcttaaatcatgatatcatgtttggagcaggtgtcatgattttcagcagggtatcttgaatgagtttgaatcatgatatcctgtcttaaatttcacatgttctc

SEQ ID NO: 32960 - protein, 189 aa, Zea mays subsp. mays
MPGYYDIDDILMEDEPISVVFQVTANGVGLLDPGAESNCVDKGAKVDLPFWLAHGLLSLEQAVSINPPPCFTQKTWKEIQADAACVDLRVRCPYFYELGCKIVPLVSDNSIGLFLRYAFTSRYKEVLSKSHSSSMMTVPKFVPRLTKEETRVFESARESMTGFKKWRAGGMRLQKASILGRKRKTKLPE

SEQ ID NO: 32961 - protein, 178 aa, Zea mays subsp. mays
MEDEPISVVFQVTANGVGLLDPGAESNCVDKGAKVDLPFWLAHGLLSLEQAVSINPPPCFTQKTWKEIQADAACVDLRVRCPYFYELGCKIVPLVSDNSIGLFLRYAFTSRYKEVLSKSHSSSMMTVPKFVPRLTKEETRVFESARESMTGFKKWRAGGMRLQKASILGRKRKTKLPE

SEQ ID NO: 32962 - DNA, 1269 bp, Zea mays subsp. mays
atattatcattcgttcttacgatcaactccttggtgagggcaaagttccctatcctgttcctgtatatatagatgaaggacctcttgatgaagcacctcagtggtccccgggtgaccattttgatatctccttctacctaatgcttcttcatgccaataaagatgagaagtttgggctgctaaagactatgttcagtgcattctcatcttcattcgaccccttggattatcatttcatatggcatcagcgttcgattttggaggctgttggagctttcagttcaaaagatcttcacttgctagatttaagttttgtttatcaattgctttgtcttgggaggtgccattgggctatctatgtcattctgcacatgccgtatcttgacgatgccccatacattcatgagaaattaatcagggaagttttatcacagtattgtgagtcatggagtagagatgatgctcaaaggcaatacattgtagaacttggtataccagaagaatggatgcatgaagctctggctctttatcacgaatactatggagataaacagggtgcactggagaatttgattcagtgtggcaactggaagaaagctcatactattttcgtgacttctgttgctcattctatgtttctgtcatctaaccatcaggaggtctggaggatcacaagtgccttggagaaccacaagtatgaaattgctgactgggaccttggtgccggaatatacatagacttctacgttctgaagaactcaatgcaagaaagaaatgccatggatgattcggattcactcgaggagatgagtgaatcatgcagaagtttctttggccgattaaacgattcgttgttagtctggggaagcaaattacctgttgagtcaagggcatgctactcgaagatggcagaggagctatgcgcgcttctggtggacaccccaagcgagacgctgaacctacccatggggtgtcttctgacgatgctcaacgctccagttccggacgagagcaggtcgtcgtacctgcaggacgcactctctgtcttcaccgaaatcctttgcagcgatccgtagcacaagggtccaccgtgttgccgtaatctgggtgatgggaagtgaagcctagaggcaacacgccgaagagtttgtacgtctcatgtttggtacttgtagaaaattaggaatgtataactatgacctgatgttgctccggtgaatttgtaacgccgtctgaactcctgaagacatgtgtcgggatcttcgttgc

SEQ ID NO: 32963 - protein, 357 aa, Zea mays subsp. mays
IIIRSYDQLLGEGKVPYPVPVYIDEGPLDEAPQWSPGDHFDISFYLMLLHANKDEKFGLLKTMFSAFSSSFDPLDYHFIWHQRSILEAVGAFSSKDLHLLDLSFVYQLLCLGRCHWAIYVILHMPYLDDAPYIHEKLIREVLSQYCESWSRDDAQRQYIVELGIPEEWMHEALALYHEYYGDKQGALENLIQCGNWKKAHTIFVTSVAHSMFLSSNHQEVWRITSALENHKYEIADWDLGAGIYIDFYVLKNSMQERNAMDDSDSLEEMSESCRSFFGRLNDSLLVWGSKLPVESRACYSKMAEELCALLVDTPSETLNLPMGCLLTMLNAPVPDESRSSYLQDALSVFTEILCSDP

SEQ ID NO: 32964 - protein, 311 aa, Zea mays subsp. mays
MLLHANKDEKFGLLKTMFSAFSSSFDPLDYHFIWHQRSILEAVGAFSSKDLHLLDLSFVYQLLCLGRCHWAIYVILHMPYLDDAPYIHEKLIREVLSQYCESWSRDDAQRQYIVELGIPEEWMHEALALYHEYYGDKQGALENLIQCGNWKKAHTIFVTSVAHSMFLSSNHQEVWRITSALENHKYEIADWDLGAGIYIDFYVLKNSMQERNAMDDSDSLEEMSESCRSFFGRLNDSLLVWGSKLPVESRACYSKMAEELCALLVDTPSETLNLPMGCLLTMLNAPVPDESRSSYLQDALSVFTEILCSDP

SEQ ID NO: 32965 - protein, 295 aa, Zea mays subsp. mays
MFSAFSSSFDPLDYHFIWHQRSILEAVGAFSSKDLHLLDLSFVYQLLCLGRCHWAIYVILHMPYLDDAPYIHEKLIREVLSQYCESWSRDDAQRQYIVELGIPEEWMHEALALYHEYYGDKQGALENLIQCGNWKKAHTIFVTSVAHSMFLSSNHQEVWRITSALENHKYEIADWDLGAGIYIDFYVLKNSMQERNAMDDSDSLEEMSESCRSFFGRLNDSLLVWGSKLPVESRACYSKMAEELCALLVDTPSETLNLPMGCLLTMLNAPVPDESRSSYLQDALSVFTEILCSDP

SEQ ID NO: 32966 - DNA, 1097 bp, Zea mays subsp. mays
aaattccagttgctcgctcgctccactcccctcccccggtcccgttgcgtcggcggccggacaaaaccgccagactctctcgtcccccggcccggccctcccagacccagttccatccttttgcttgcttgcggttgcgggcaaccgctgtgatagagcgagcgagcgacctgtagtacgggagagggttggaaggagcgaaaggagagagaggttggtggttgtttggtggaggagaatagttggttgtcttcagggagggagagagggaaagatggagcgcaaggcggtggtggtgtgcgcggtggtcggcttcctcggcgtcctcgcggcggcgctcggcttcgcggcggaggccacccgcgtcaaggtttcggacgttcaaacaagcggcagtcctggtgaatgcatatacccaagaaccccagccttggcactgggtttaatatctgccgcctctcttatgctcgcccagtccatcataaacgcagtggctggttgcatctgttgtaagaagcatcctgttccctcagacactaactggagcatagccctgatttcgttcatcgtatcttggtgcactttcataatctcgttccttctcctactgactggggccgccctgaacgaccagagaggcgaggagaacatgtacttcggtagcttctgctacgtggtgaagccgggtgtcttctccgggggagcggtgctggccctcgccagcgtggcgctagccatagtctactacgtcgcgctgtcatcatccaagggccctccgccggcgttcgcagccccgcagaaccagggcatcgcgatgggccagcccgtgatcatcccgcagcagagcagcgagccggtgttcgtccacgaggacacgtacaatcggcggcaacaggtcccgtgacctgacctgaccacacagaggtctgtggttggttgtgcttggtctgtataggttgcaggttagaacagtagccgtcgccattgctgttatagctagatcctgttcttcttttttgttttcgttctacttgtacccccctcgtgtttgtcgagcatggaatgtttggttctgaatgaactgggtaatgttgaag

SEQ ID NO: 32967 - protein, 300 aa, Zea mays subsp. mays
NSSCSLAPLPSPGPVASAAGQNRQTLSSPGPALPDPVPSFCLLAVAGNRCDRASERPVVRERVGRSERRERLVVVWWRRIVGCLQGGREGKMERKAVVVCAVVGFLGVLAAALGFAAEATRVKVSDVQTSGSPGECIYPRTPALALGLISAASLMLAQSIINAVAGCICCKKHPVPSDTNWSIALISFIVSWCTFIISFLLLLTGAALNDQRGEENMYFGSFCYVVKPGVFSGGAVLALASVALAIVYYVALSSSKGPPPAFAAPQNQGIAMGQPVIIPQQSSEPVFVHEDTYNRRQQVP

SEQ ID NO: 32968 - protein, 209 aa, Zea mays subsp. mays
MERKAVVVCAVVGFLGVLAAALGFAAEATRVKVSDVQTSGSPGECIYPRTPALALGLISAASLMLAQSIINAVAGCICCKKHPVPSDTNWSIALISFIVSWCTFIISFLLLLTGAALNDQRGEENMYFGSFCYVVKPGVFSGGAVLALASVALAIVYYVALSSSKGPPPAFAAPQNQGIAMGQPVIIPQQSSEPVFVHEDTYNRRQQVP

SEQ ID NO: 32969 - DNA, 1109 bp, Zea mays subsp. mays
caatgaagagaaagagaggcttgaggggaaattggcacgcacagaatcagcagttgctgaagccaacgatgctgtgcaggaggcaaaagctgaaaatgagaggcttcaagagaaacttgcacacgtggaatcagaggctgctgaggccaacatggctgcagaggaatctaagaatgagatcgagagacttcaagagaaactgacatacacagagtcggcggttgctgaagccaacaagactgtgcaggaggcaaaggctgagagttcacagctgaaggagcgattacttgacaaagagaatgcattgcagagcataacccaggagaatgatgagttcaggatgcgagaagctgacgccacgaagaaaatagaggagctatctgcgctgcttgccgaagccatgacaaagaagcatcccgaggaggaagagaagctggtggttgttgatgaggcacacaattctggacgtgaagctatccgttctgtggcagaaaatgaagatacagaagaaactgaccataagaaaccaaagcttgaagctgatgcagtcgatacgaactccaacggagaaccgaagcacgacgagaaagacgacagcaaggtggaagaagaggagctgaagactgagctcagcctacaggagagcgacagagctagctctgagaaggaagcacagtccgaaaacaggagacaagaaacagaaccatccaacgacgagttagacccgaagaaggacagcagcaccgagagcgccaacggaacggccgtgccagaggatacggcagcgacgacgactaaagcggcaacgtctcctacgaaaccgcagcagccgcagcagaaaaagaacaagcctctgctgaagaagtttgggagcttactgaaaaagaaaaacagcaagtagccgaacggtgggctgtactactactagtgttgttttgattttcttctttcctctccctttttcttttttttttctttttggggtctgtttgacgaggtgttgtgcttgctattcgtcgtctaccgccaatgcctgtatttgtgggtgattggagaagtttgtgggtgtcgtgaatttttaacttggggacctatatggtgttggctgc

SEQ ID NO: 32970 - protein, 299 aa, Zea mays subsp. mays
NEEKERLEGKLARTESAVAEANDAVQEAKAENERLQEKLAHVESEAAEANMAAEESKNEIERLQEKLTYTESAVAEANKTVQEAKAESSQLKERLLDKENALQSITQENDEFRMREADATKKIEELSALLAEAMTKKHPEEEEKLVVVDEAHNSGREAIRSVAENEDTEETDHKKPKLEADAVDTNSNGEPKHDEKDDSKVEEEELKTELSLQESDRASSEKEAQSENRRQETEPSNDELDPKKDSSTESANGTAVPEDTAATTTKAATSPTKPQQPQQKKNKPLLKKFGSLLKKKNSK

SEQ ID NO: 32971 - protein, 249 aa, Zea mays subsp. mays
MAAEESKNEIERLQEKLTYTESAVAEANKTVQEAKAESSQLKERLLDKENALQSITQENDEFRMREADATKKIEELSALLAEAMTKKHPEEEEKLVVVDEAHNSGREAIRSVAENEDTEETDHKKPKLEADAVDTNSNGEPKHDEKDDSKVEEEELKTELSLQESDRASSEKEAQSENRRQETEPSNDELDPKKDSSTESANGTAVPEDTAATTTKAATSPTKPQQPQQKKNKPLLKKFGSLLKKKNSK

SEQ ID NO: 32972 - protein, 186 aa, Zea mays subsp. mays
MREADATKKIEELSALLAEAMTKKHPEEEEKLVVVDEAHNSGREAIRSVAENEDTEETDHKKPKLEADAVDTNSNGEPKHDEKDDSKVEEEELKTELSLQESDRASSEKEAQSENRRQETEPSNDELDPKKDSSTESANGTAVPEDTAATTTKAATSPTKPQQPQQKKNKPLLKKFGSLLKKKNSK

SEQ ID NO: 32973 - DNA, 1692 bp, Zea mays subsp. mays
ggcacgagccgccgccgaatccgagactctgatctcgggttcaccgcagcgcacagagcacccctgactcccggcccgatccgcgctctcctctccgacgcttcagtcatggcaggaatggcacccgagggttctcagtttgatgctaagcactatgattctaaaatgcaggagctgctgagcactggtgagactgaggagttcttcacttcatatgatgaagtttttgaaagttttgatgacatgggccttcaagagaatcttctgagaggcatttatgcatatggttttgagaaaccatctgcaattcagcagagaggaattgttcccttctgcaaggggcttgatgtcattcagcaagcacaatctggtacaggaaagacagcaaccttctgttctgggatcttgcagcagcttgactatggtctggttgaatgccaggccctggttcttgctcccacccgtgagcttgcacagcaaattgagaaagttatgcgcgcacttggtgactaccttggtgttaaagtccatgcatgcgttggaggaacatctgttcgtgaggaccaaaggattctcgccagtggtgtgcatgttgttgttggtacacctggtcgtgtgtttgacatgctgcgtagacagtccctccgccctgataacatcaagatgtttgttcttgacgaagctgatgaaatgctttctcgtggtttcaaggatcagatttatgacatcttccagcttctgccatccaagattcaggttggagtcttctctgctaccatgccacctgaggcccttgagattacccgcaagttcatgaacaaaccagtgagaattcttgtgaagagagatgagctgacccttgagggtatcaagcagttctatgtgaatgtggacaaggaagactggaagctggacacactgtgtgacctgtatgagaccctggccattacccagagtgtcatctttgtcaacacccgccgcaaggtggactggctcactgacaagatgaggagcagggaccacaccgtttctgccactcatggtgacatggaccagaacactagagacatcatcatgagggagttccggtctggctcctcccgtgtgctcatcaccactgacctgcttgctcgtggtattgatgttcagcaggtgtccctggtcatcaactatgatcttcccacccagccagagaactacctgcatcgtattggtcgtagtggtcgttttggtaggaagggtgttgccatcaactttgtgacccgcgacaacgaacgtatgctgtttgacattcagaagttctacaacgtgttgattgaggagctgcctgccaatgttgctgaccttctgtgatcaatttcaagaaaaaacaaaacaaaaaagggtggtgaggaacctggtaaggcttggttttgtcgaaataccgtgggagagggggtgataaggacggtggggtttctatgttgaagtcgtggtcatggacaatttgtgattttttctcctttatgccatgttttggaatttttgtagctgcctaggccttgtggtaatgtgctgctgtgggggttcattagtatgaagaggaagacgctgctggcgctgagtctttctctttattagtattttgtttaaaactatgtatgaccgaatggtggtatttatttgtgtcatccttgactcttattctgctgc

SEQ ID NO: 32974 - protein, 450 aa, Zea mays subsp. mays
GTSRRRIRDSDLGFTAAHRAPLTPGPIRALLSDASVMAGMAPEGSQFDAKHYDSKMQELLSTGETEEFFTSYDEVFESFDDMGLQENLLRGIYAYGFEKPSAIQQRGIVPFCKGLDVIQQAQSGTGKTATFCSGILQQLDYGLVECQALVLAPTRELAQQIEKVMRALGDYLGVKVHACVGGTSVREDQRILASGVHVVVGTPGRVFDMLRRQSLRPDNIKMFVLDEADEMLSRGFKDQIYDIFQLLPSKIQVGVFSATMPPEALEITRKFMNKPVRILVKRDELTLEGIKQFYVNVDKEDWKLDTLCDLYETLAITQSVIFVNTRRKVDWLTDKMRSRDHTVSATHGDMDQNTRDIIMREFRSGSSRVLITTDLLARGIDVQQVSLVINYDLPTQPENYLHRIGRSGRFGRKGVAINFVTRDNERMLFDIQKFYNVLIEELPANVADLL

SEQ ID NO: 32975 - protein, 414 aa, Zea mays subsp. mays
MAGMAPEGSQFDAKHYDSKMQELLSTGETEEFFTSYDEVFESFDDMGLQENLLRGIYAYGFEKPSAIQQRGIVPFCKGLDVIQQAQSGTGKTATFCSGILQQLDYGLVECQALVLAPTRELAQQIEKVMRALGDYLGVKVHACVGGTSVREDQRILASGVHVVVGTPGRVFDMLRRQSLRPDNIKMFVLDEADEMLSRGFKDQIYDIFQLLPSKIQVGVFSATMPPEALEITRKFMNKPVRILVKRDELTLEGIKQFYVNVDKEDWKLDTLCDLYETLAITQSVIFVNTRRKVDWLTDKMRSRDHTVSATHGDMDQNTRDIIMREFRSGSSRVLITTDLLARGIDVQQVSLVINYDLPTQPENYLHRIGRSGRFGRKGVAINFVTRDNERMLFDIQKFYNVLIEELPANVADLL

SEQ ID NO: 32976 - protein, 411 aa, Zea mays subsp. mays
MAPEGSQFDAKHYDSKMQELLSTGETEEFFTSYDEVFESFDDMGLQENLLRGIYAYGFEKPSAIQQRGIVPFCKGLDVIQQAQSGTGKTATFCSGILQQLDYGLVECQALVLAPTRELAQQIEKVMRALGDYLGVKVHACVGGTSVREDQRILASGVHVVVGTPGRVFDMLRRQSLRPDNIKMFVLDEADEMLSRGFKDQIYDIFQLLPSKIQVGVFSATMPPEALEITRKFMNKPVRILVKRDELTLEGIKQFYVNVDKEDWKLDTLCDLYETLAITQSVIFVNTRRKVDWLTDKMRSRDHTVSATHGDMDQNTRDIIMREFRSGSSRVLITTDLLARGIDVQQVSLVINYDLPTQPENYLHRIGRSGRFGRKGVAINFVTRDNERMLFDIQKFYNVLIEELPANVADLL

SEQ ID NO: 32977 - DNA, 583 bp, Zea mays subsp. mays
cgaaaaacactcgtccactcaccccctctttgctctgcctcgccgcgccgcagagcagagcatggcgcccccacgccctctcctcgccgccgtcttcctcgccgcggcggttctgctcctcctttctccggcagaggcggggacggtgggcgtgaactacggccgcgtggcgaacaacctgcccaacccagcggcggttgtgcagctgctcaagcagcagggcgtcgcgcaggtgaagctgtacgacgccgaccccaccgtgctgcgcgccctcgcgaacaccggcatcaaggtggtggtggcgctgcccaacgagcaggtcgcggcggcggcgtcgcgcgcgtcctacgcgctgctgtgggtgcgccggaacgtggcggcgtaccacccggccacgcagatccagggcatcgccgtgggcaacgaggtgttcgcgtcggccaagaacgtgacggcgcagctggtcccggccatggccaacgtgcacgccgcgctggccaggctcggcctcgacggggccgtcaaggtgtcgtcgcccatcgcgctcacggcgctcgcgtcgtcctacccgtcctcggcgggc

SEQ ID NO: 32978 - protein, 194 aa, Zea mays subsp. mays
RKTLVHSPPLCSASPRRRAEHGAPTPSPRRRLPRRGGSAPPFSGRGGDGGRELRPRGEQPAQPSGGCAAAQAAGRRAGEAVRRRPHRAARPREHRHQGGGGAAQRAGRGGGVARVLRAAVGAPERGGVPPGHADPGHRRGQRGVRVGQERDGAAGPGHGQRARRAGQARPRRGRQGVVAHRAHGARVVLPVLGG

SEQ ID NO: 32979 - protein, 194 aa, Zea mays subsp. mays
EKHSSTHPLFALPRRAAEQSMAPPRPLLAAVFLAAAVLLLLSPAEAGTVGVNYGRVANNLPNPAAVVQLLKQQGVAQVKLYDADPTVLRALANTGIKVVVALPNEQVAAAASRASYALLWVRRNVAAYHPATQIQGIAVGNEVFASAKNVTAQLVPAMANVHAALARLGLDGAVKVSSPIALTALASSYPSSAG

SEQ ID NO: 32980 - protein, 174 aa, Zea mays subsp. mays
MAPPRPLLAAVFLAAAVLLLLSPAEAGTVGVNYGRVANNLPNPAAVVQLLKQQGVAQVKLYDADPTVLRALANTGIKVVVALPNEQVAAAASRASYALLWVRRNVAAYHPATQIQGIAVGNEVFASAKNVTAQLVPAMANVHAALARLGLDGAVKVSSPIALTALASSYPSSAG

SEQ ID NO: 32981 - DNA, 1911 bp, Zea mays subsp. mays
acactttctggtgctcttactcttcagaccatagacaatggccaccgaactagatgtgagcaagtctcgccgcttcgacattgccatgtcgaggcgaactcggcgatcaacaagcctggtagcctgcttccaagatcagtatacaccgtccctggcacatcatcgccaccaagagctgaaggcatttctgcaacgccaagatgaagagctgaagtcactccagcaatgccaagaggaagagctgaaggcactccagcaatgtgaggatgcagagcagaagacactgtgtttgaatgaggatgaggatctgaagattccacaagcaccactgcagtatgaagatggtgaacaaaagacaccggagcaatatgaagatgagcacaaggaatcacagcagtgttcagacgaagagcaggagataccagatacatatcaagatgatgagaagaaaccagaccaggaccagtatctaaatgaagacaagatgccagagcagtatcgagctaaagatgagttaccatcacaataccaaaaccaggagcttatgacaccaaacctacctgagaaggagactgcatcagagcgattccaagaagcggagcagctggtgacaccaaacctacctgaagaagatgaggagactgcaccaaagcaattccaagacgaggagcagaagggacttcaacaacaccaagagccggatgagcaggcatcgcaacctgaagagcagaagtctcagaaggaatgccatcagaaggcaccggagcaattccaaaccttgaagaagctaggcgcgccaccacgtcttgctgacaatgtgccccggttctcccttcaggagcttatacaacagaagaagcttccgaccggcgatgcgatgcttgccagcaagcaaggcagctgtggagagagtgtcctcgctgatcacagtgtttcaggaccaggagcagcagcaggcggcacgacactggccatggtgataaagcgacccgagggagggaagaagtcgatgggggtgatacgccggtgcgtgaaggccctgaacgggatgatcaaggccaagcacggttccaagaagaacttgcatttctagctttcaacagaatccaggagaccaggagtacatacataagcactgatgagtaagtgtggtccagagtttcttagtagaccgcacatctctgaataatgcattcgcagttgcgcagaaccaaaattttgagcatgatgcagggtgtgcaagatctggcgagaaactccagggctttttacgccctggtctacactgtctacctatagcaataaactgtggtagttttattagctgaatatcacaaatctgttcctcctatgcgagaagatggtctgctaagtccaagagtagagatcaggctctgatcatgtgctgttgacttcctctgcaaaagcctgtttgcttttagaagtgtatgggtgtgattagaaaaggtgaaaatgatcggttctactcctaccgacacctgccccccaggtcggcagcggttttggtgcagactccttttctgcctttctgtgccgcgtcccgtttcggtttggtgcgtcacttgaatgctgagaaaacaagttagtgcaaaagaaaaggcgatggagctgaagcctgtgaagcttcttgtgaattattggttgaggacgcagcgcatggtacgccatcgcatatctcttcttcgtttatgatcactctctgtttactcgatttgaacgcttgtgttgttggggttgggacctgggacctgggacctgggcatgtttatgatctgaagttctaaacatttactactgtatttttctggaaattgaacagatagtgtttcttcatcttctatgagactattttttttttcttattttacccaatgaagaaccaagatgtct

SEQ ID NO: 32982 - protein, 351 aa, Zea mays subsp. mays
MATELDVSKSRRFDIAMSRRTRRSTSLVACFQDQYTPSLAHHRHQELKAFLQRQDEELKSLQQCQEEELKALQQCEDAEQKTLCLNEDEDLKIPQAPLQYEDGEQKTPEQYEDEHKESQQCSDEEQEIPDTYQDDEKKPDQDQYLNEDKMPEQYRAKDELPSQYQNQELMTPNLPEKETASERFQEAEQLVTPNLPEEDEETAPKQFQDEEQKGLQQHQEPDEQASQPEEQKSQKECHQKAPEQFQTLKKLGAPPRLADNVPRFSLQELIQQKKLPTGDAMLASKQGSCGESVLADHSVSGPGAAAGGTTLAMVIKRPEGGKKSMGVIRRCVKALNGMIKAKHGSKKNLHF

SEQ ID NO: 32983 - protein, 335 aa, Zea mays subsp. mays
MSRRTRRSTSLVACFQDQYTPSLAHHRHQELKAFLQRQDEELKSLQQCQEEELKALQQCEDAEQKTLCLNEDEDLKIPQAPLQYEDGEQKTPEQYEDEHKESQQCSDEEQEIPDTYQDDEKKPDQDQYLNEDKMPEQYRAKDELPSQYQNQELMTPNLPEKETASERFQEAEQLVTPNLPEEDEETAPKQFQDEEQKGLQQHQEPDEQASQPEEQKSQKECHQKAPEQFQTLKKLGAPPRLADNVPRFSLQELIQQKKLPTGDAMLASKQGSCGESVLADHSVSGPGAAAGGTTLAMVIKRPEGGKKSMGVIRRCVKALNGMIKAKHGSKKNLHF

SEQ ID NO: 32984 - protein, 202 aa, Zea mays subsp. mays
MPEQYRAKDELPSQYQNQELMTPNLPEKETASERFQEAEQLVTPNLPEEDEETAPKQFQDEEQKGLQQHQEPDEQASQPEEQKSQKECHQKAPEQFQTLKKLGAPPRLADNVPRFSLQELIQQKKLPTGDAMLASKQGSCGESVLADHSVSGPGAAAGGTTLAMVIKRPEGGKKSMGVIRRCVKALNGMIKAKHGSKKNLHF

SEQ ID NO: 32985 - DNA, 1096 bp, Zea mays subsp. mays
gttttcttgcccctgatggtggatccactggccgccggttttctccagctggagagccattcgtgggcgtaggacgagagagaggatcggcggcggcgtgtgggagatggcgcgcgagaggcgggagatacggcggatagagagcgcggcggcgcggcaggtgaccttctccaagcgccggcgcgggctgttcaagaaggcggaggagctcgccgtgctgtgcgacgccgacgtcgcgctcgtcgtgttctccgccaccggcaggctctcgcagttcgcgagctccagtgtgaatgacatcgttgacaagtacagtacacattctaagaatctggggaaatcacatcagcagccttctattgatttgaatgtagagcagagcaaatacagcggcttgaacgagcaacttgctgaagaaactaatggacttagacagatgagaggtgaagaccttgagggattgagtgtagaggaattgcaccgaatggaaaggaaacttgaagcaggactgcatagagtgattagtacaaaggaccagctattcatgcaacaaatcggcgaattactgcaaaagggcacacagctagaagatgagaacaggcgtctaaaagaacaaatgcctcaggtgctaacggctggcacaatggtggttgctgctgctgcagaaaatatcctcactgaagacgggcagtcgtctgaatctgtaatgactgcattgcattcaggaagctcgctcgactgtgatgatggttccgatatatccttgaagttgtcgttgccttgaaaggaaggaccatcgcatcgcatgttatctgcatgagtggggctgacaccagtgcttctaagaagacaaagactgggatagtcccattcgcggcattatattggtttaaccagatgtgctgtccttgtgcatgtctgtacttcaaagtggctaacgcgaaatttgtatatataatagtgtatgcgctgcgttatcttcgttctaaaaatctgtattgtttcgttgctggtgctatatttgttggtgtattatatatatgcacttaactgttatctctattctattaagaacataatatagacacatgatgct

SEQ ID NO: 32986 - protein, 225 aa, Zea mays subsp. mays
MARERREIRRIESAAARQVTFSKRRRGLFKKAEELAVLCDADVALVVFSATGRLSQFASSSVNDIVDKYSTHSKNLGKSHQQPSIDLNVEQSKYSGLNEQLAEETNGLRQMRGEDLEGLSVEELHRMERKLEAGLHRVISTKDQLFMQQIGELLQKGTQLEDENRRLKEQMPQVLTAGTMVVAAAAENILTEDGQSSESVMTALHSGSSLDCDDGSDISLKLSLP

SEQ ID NO: 32987 - protein, 115 aa, Zea mays subsp. mays
MRGEDLEGLSVEELHRMERKLEAGLHRVISTKDQLFMQQIGELLQKGTQLEDENRRLKEQMPQVLTAGTMVVAAAAENILTEDGQSSESVMTALHSGSSLDCDDGSDISLKLSLP

SEQ ID NO: 32988 - DNA, 745 bp, Zea mays subsp. mays
tcgggaagaggagcaaaacaaaccctatctaaaccgcggcggactcttcgtccagcaaggtttcccatccaaatccggccacgccacttgttctttttttccgcaacaccgatggtgtacgtggattcttgggaggagttcgtggagcgttccgtgcagctcttccgcggcgaccccaacgccacccgctacgtgatgaagtaccggcactgcgaggggaagctcgtgctcaaggtcaccgacgaccgcgagtgcttgaagttcaagacagatcaagctcaagacgcaaagaagatggagaagctcaacaacatcttttttgctctcatgacacgtgggcctgatgttgatatcagtgaagtttcagggaaggaacaggcagagcaacagcaagcgaagaaaggtcggggaaggaggcaataatgcggtctgatccttatttgttacagaaaattcacaactggaatgatggattaacatttcatggactttattgtaattctgaagaaagtttttccagtacagaaccgagaacaaactaaatgcactctatcatgaatgaatgcatgattgagaaacgcccaaggcttcaaccctgcttcgtttttctgcacgggaagcgttttcatccatgttttctggtagaggaatgtagcttgatactctgcctgatcttatattgcgcactgcctgttggggttgggccatacgattttaggctattctcaatgggaatgaatttcct

SEQ ID NO: 32989 - protein, 140 aa, Zea mays subsp. mays
SGRGAKQTLSKPRRTLRPARFPIQIRPRHLFFFSATPMVYVDSWEEFVERSVQLFRGDPNATRYVMKYRHCEGKLVLKVTDDRECLKFKTDQAQDAKKMEKLNNIFFALMTRGPDVDISEVSGKEQAEQQQAKKGRGRRQ

SEQ ID NO: 32990 - protein, 103 aa, Zea mays subsp. mays
MVYVDSWEEFVERSVQLFRGDPNATRYVMKYRHCEGKLVLKVTDDRECLKFKTDQAQDAKKMEKLNNIFFALMTRGPDVDISEVSGKEQAEQQQAKKGRGRRQ

SEQ ID NO: 32991 - protein, 75 aa, Zea mays subsp. mays
MKYRHCEGKLVLKVTDDRECLKFKTDQAQDAKKMEKLNNIFFALMTRGPDVDISEVSGKEQAEQQQAKKGRGRRQ

SEQ ID NO: 32992 - DNA, 939 bp, Zea mays subsp. mays
acgatggtggccttgaccgcggggatttccatagccaccggcgtcgtgttcagccccgccggccgccggcgaggccgcggacacgccgcctttcgctgctcgtcgtcctctgccggagagaggcaggctctcttcagccgcatcgcccccgtctacgatcatctgaacgacgtgctcagcctgggacagcaccggacgtggaagcgcatatgcgtctcttggtcgagagcgaagatgggggatcgagttcttgatctctgctgcgggagcggggatttggcgttcctgctgtctcagaaggtcggcttagatggagaggtgatggctgtcgatttttcaagtcagcaactacagactgctgctgggcgtcaggagcaacggtggaagctgtgttacaagaacatcaaatggatcgagggtgatgcacttgatttaccattcacagactgctacttcgatgctgtaacagttggctacggattgcgcaatgtggttgataaaccgaaagcgatgcaagaaatatatagggtcctgaaaccaggatcaagagcctctattcttgattttaacaagagctcgtcacttttcacagcatcattacagagttgggcgatagacaatgttgtggttcctttagctagtggctatggactaactgaagaatacaagtacttgaaaagctccatatcacagtatctaacaggagaagaattggagaaactggccagagaagctgggttctgtgcagcgaagcactacgagcttggtggagggcttatggggaatctagtagcgactcgatgagtagaatgtagaacggaaactcgagctgcatggttcctctgcatcattttagctgattgtacgctcttattctatgtatcggcctcagatgaggtcaatgacaggtgttgattccagaggggcctggacggcttg

SEQ ID NO: 32993 - protein, 267 aa, Zea mays subsp. mays
TMVALTAGISIATGVVFSPAGRRRGRGHAAFRCSSSSAGERQALFSRIAPVYDHLNDVLSLGQHRTWKRICVSWSRAKMGDRVLDLCCGSGDLAFLLSQKVGLDGEVMAVDFSSQQLQTAAGRQEQRWKLCYKNIKWIEGDALDLPFTDCYFDAVTVGYGLRNVVDKPKAMQEIYRVLKPGSRASILDFNKSSSLFTASLQSWAIDNVVVPLASGYGLTEEYKYLKSSISQYLTGEELEKLAREAGFCAAKHYELGGGLMGNLVATR

SEQ ID NO: 32994 - protein, 266 aa, Zea mays subsp. mays
MVALTAGISIATGVVFSPAGRRRGRGHAAFRCSSSSAGERQALFSRIAPVYDHLNDVLSLGQHRTWKRICVSWSRAKMGDRVLDLCCGSGDLAFLLSQKVGLDGEVMAVDFSSQQLQTAAGRQEQRWKLCYKNIKWIEGDALDLPFTDCYFDAVTVGYGLRNVVDKPKAMQEIYRVLKPGSRASILDFNKSSSLFTASLQSWAIDNVVVPLASGYGLTEEYKYLKSSISQYLTGEELEKLAREAGFCAAKHYELGGGLMGNLVATR

SEQ ID NO: 32995 - protein, 189 aa, Zea mays subsp. mays
MGDRVLDLCCGSGDLAFLLSQKVGLDGEVMAVDFSSQQLQTAAGRQEQRWKLCYKNIKWIEGDALDLPFTDCYFDAVTVGYGLRNVVDKPKAMQEIYRVLKPGSRASILDFNKSSSLFTASLQSWAIDNVVVPLASGYGLTEEYKYLKSSISQYLTGEELEKLAREAGFCAAKHYELGGGLMGNLVATR

SEQ ID NO: 32996 - DNA, 1483 bp, Zea mays subsp. mays
tgaagagttcagctaccctaccatccacactttattcatctcagggcagtagccagtagctagctgtagagggagttatcggccatgtcggaggaggcgacgctggaggacacgcctacgtggatcgtggcgtccgtgtgctccgtcatcgtcctcatctccttcgtcttcgagcgcgcgctccaccacctcggcaaggcactggagcgcctgaggaagaccctgtacgaggcgctgctaaagctcaaagaagagctcatgctgctgggcttcgtctcgctgctcctcgtcgtctcccaggacttgatacagaagatctgcatcgacgacagcctcatggagcactggatgccgtgccggggtgctagcgccaccgcctcggctcattacggtgtctcctcctcctcctcctcctccgcggtcggtggcgggaggaggatgctcaaaggcggcggggcagctttcgggcactgttcaagcaagggaaaagtcccgttgctatcacttcacgccttggagcaggtacacattttcatcttcgtcctagctatcacgcaagtcgttctcagcgtcgccaccgtcctcctgggacttctgcagatgcggatatggatgcactgggagaacaccattcagcaagagggcagctctgctcccaagatgatcgcccgtgtgcagaaaatcaggttcatccaggaccggtgtaaggggtacgagaaggccgcctgggttataatatggctgcgttctttcttcaaacagttctacggatcagtgtccaacgacgactacattgcgatgagactcggtttcgtcatggagcactttagggggcaccccaagttcaacttttacgactacatgatcaaagctctcgagaaagatttcaagcgagtagttagtataaaatggtattactggatttttgtgatgatctttctgctgctcaatgtcaccgggtggcactcctacttctggatctcattagttccactggctctgctgcttctgattgggacgaagctggagcacatcataaacaggctggcctacgaggtggcctcgaagcacgccgccgggcaaggcgaagggggcatcgtggtgagcccttcggacgagctgttctggttccgcagcccacggctggtgctcgtgctcatccacttcatcctgttccagaacgcgttcgagttcgcgtatttcttctggacactggtaaacatctggcatgcatgcatgcatgcatcatgcatgcgctctctgtctcaaatgcatgcagctacgccgtcgagtcgtcgtcgtcgttcgtcgacccaatctggccactggccagtgacgacctgtgtggcagtattcctgaatcctgatccctgtacgtgttaattgcaacgcaggcgatgttcggcgccaactcctgcatcatggacagtctaggatacagcgtctcgcgaatcatcatatggtactgagaacgtcgctgtcg

SEQ ID NO: 32997 - protein, 432 aa, Zea mays subsp. mays
MSEEATLEDTPTWIVASVCSVIVLISFVFERALHHLGKALERLRKTLYEALLKLKEELMLLGFVSLLLVVSQDLIQKICIDDSLMEHWMPCRGASATASAHYGVSSSSSSSAVGGGRRMLKGGGAAFGHCSSKGKVPLLSLHALEQVHIFIFVLAITQVVLSVATVLLGLLQMRIWMHWENTIQQEGSSAPKMIARVQKIRFIQDRCKGYEKAAWVIIWLRSFFKQFYGSVSNDDYIAMRLGFVMEHFRGHPKFNFYDYMIKALEKDFKRVVSIKWYYWIFVMIFLLLNVTGWHSYFWISLVPLALLLLIGTKLEHIINRLAYEVASKHAAGQGEGGIVVSPSDELFWFRSPRLVLVLIHFILFQNAFEFAYFFWTLVNIWHACMHASCMRSLSQMHAATPSSRRRRSSTQSGHWPVTTCVAVFLNPDPCTC

SEQ ID NO: 32998 - protein, 374 aa, Zea mays subsp. mays
MLLGFVSLLLVVSQDLIQKICIDDSLMEHWMPCRGASATASAHYGVSSSSSSSAVGGGRRMLKGGGAAFGHCSSKGKVPLLSLHALEQVHIFIFVLAITQVVLSVATVLLGLLQMRIWMHWENTIQQEGSSAPKMIARVQKIRFIQDRCKGYEKAAWVIIWLRSFFKQFYGSVSNDDYIAMRLGFVMEHFRGHPKFNFYDYMIKALEKDFKRVVSIKWYYWIFVMIFLLLNVTGWHSYFWISLVPLALLLLIGTKLEHIINRLAYEVASKHAAGQGEGGIVVSPSDELFWFRSPRLVLVLIHFILFQNAFEFAYFFWTLVNIWHACMHASCMRSLSQMHAATPSSRRRRSSTQSGHWPVTTCVAVFLNPDPCTC

SEQ ID NO: 32999 - protein, 348 aa, Zea mays subsp. mays
MEHWMPCRGASATASAHYGVSSSSSSSAVGGGRRMLKGGGAAFGHCSSKGKVPLLSLHALEQVHIFIFVLAITQVVLSVATVLLGLLQMRIWMHWENTIQQEGSSAPKMIARVQKIRFIQDRCKGYEKAAWVIIWLRSFFKQFYGSVSNDDYIAMRLGFVMEHFRGHPKFNFYDYMIKALEKDFKRVVSIKWYYWIFVMIFLLLNVTGWHSYFWISLVPLALLLLIGTKLEHIINRLAYEVASKHAAGQGEGGIVVSPSDELFWFRSPRLVLVLIHFILFQNAFEFAYFFWTLVNIWHACMHASCMRSLSQMHAATPSSRRRRSSTQSGHWPVTTCVAVFLNPDPCTC

SEQ ID NO: 33000 - DNA, 1124 bp, Zea mays subsp. mays
accagaatcaaacggtccaaaccccaagcccctcctcgcctcctcggccacgcatggggaacgcgcggcgccccgccgctgactcggcggcggcgtcggaccgggaggtcggatttgcgaagctacatggcgagtgcttcgagtactacatgcagacctactccatcgttctaggtcgccatagccgccgtcgcagcaagggccccgtcgccgccccgccggaggccgacgacggcgtcgacgtggacctcggcgccctcggagcaggcatgaacgtctcccgccgccacgcgcgcattttctacgacttcctgcgccgccgtttcgcgcttgaggtgcttggtaagaacggctgcctcgtcgagggcgtgcaccacgtccccgggtccgcccccgtcaagctcgactcccaggacctcctccagatgggggacaccaagttctacttcctcctcccctcccgctccgtcttcgacgccggcatcacgcgccgggcctccgccgttcagcgcgcgatcccgccgcctccgtctgatgatgacgaggatgaggatgaacatgaagaggccgtggcagcggcgaagcgtcggagggacggttataacggatcaaaatcttacagggaagcagatgatcaactattgcttcagttggaagagaaagatgtcatctcatctgctgctactatcttgtctgatctctgtggacctcaggaatggatttctatgaacaagcttcatgaagtgatgtttgataagtacggcggtatgtggcaccacagcagggtgcgaaaatacctgacatccgaagactttgcggaggctgaaactgaaggcaggctatggcatggacttgcgttgctgctgagaaagtaccctgagcatttcgtgatcaacattaggaaaggtgggggcttgatcactgagttcgtctctttggtctcgctacagtcttgagaatttctcaaaacacactgctgcaaggcggtggtgttgtatagctcggagtattcttttgctaccttttgtaaaaaaagaagttagggtaaaagggatttgtgcttaagtatttggctatttagccaagttataagagtgaggctatacaatagtggtatcttatct

SEQ ID NO: 33001 - protein, 317 aa, Zea mays subsp. mays
QNQTVQTPSPSSPPRPRMGNARRPAADSAAASDREVGFAKLHGECFEYYMQTYSIVLGRHSRRRSKGPVAAPPEADDGVDVDLGALGAGMNVSRRHARIFYDFLRRRFALEVLGKNGCLVEGVHHVPGSAPVKLDSQDLLQMGDTKFYFLLPSRSVFDAGITRRASAVQRAIPPPPSDDDEDEDEHEEAVAAAKRRRDGYNGSKSYREADDQLLLQLEEKDVISSAATILSDLCGPQEWISMNKLHEVMFDKYGGMWHHSRVRKYLTSEDFAEAETEGRLWHGLALLLRKYPEHFVINIRKGGGLITEFVSLVSLQS

SEQ ID NO: 33002 - protein, 300 aa, Zea mays subsp. mays
MGNARRPAADSAAASDREVGFAKLHGECFEYYMQTYSIVLGRHSRRRSKGPVAAPPEADDGVDVDLGALGAGMNVSRRHARIFYDFLRRRFALEVLGKNGCLVEGVHHVPGSAPVKLDSQDLLQMGDTKFYFLLPSRSVFDAGITRRASAVQRAIPPPPSDDDEDEDEHEEAVAAAKRRRDGYNGSKSYREADDQLLLQLEEKDVISSAATILSDLCGPQEWISMNKLHEVMFDKYGGMWHHSRVRKYLTSEDFAEAETEGRLWHGLALLLRKYPEHFVINIRKGGGLITEFVSLVSLQS

SEQ ID NO: 33003 - protein, 268 aa, Zea mays subsp. mays
MQTYSIVLGRHSRRRSKGPVAAPPEADDGVDVDLGALGAGMNVSRRHARIFYDFLRRRFALEVLGKNGCLVEGVHHVPGSAPVKLDSQDLLQMGDTKFYFLLPSRSVFDAGITRRASAVQRAIPPPPSDDDEDEDEHEEAVAAAKRRRDGYNGSKSYREADDQLLLQLEEKDVISSAATILSDLCGPQEWISMNKLHEVMFDKYGGMWHHSRVRKYLTSEDFAEAETEGRLWHGLALLLRKYPEHFVINIRKGGGLITEFVSLVSLQS

SEQ ID NO: 33004 - DNA, 528 bp, Zea mays subsp. mays
ctcgtctccactgctctgctgctcctcgcaccgccgccgccgccgccgcagcgacgtaatggcttccgccgcggtgctccggaacgccggctcccggcgcctcttctcctaccctactctccgcgccgctgcgatatatgtaccttctgcgctacccgatgcgcccgcggcggcggcagcgccggcccagccgccaccgacggccgggaccctctgggcgaggtctatggccaccttcacgcgcacgaagccccatgtgaatgtcggcaccattgggcacgtcgatcacggcaaaaccactctcactgctgccattaccaaggtcctggccgaggcagggaaggccaaagccgttgctttcgacgagatcgacaaggctccggaggagaaagccagaggaatcaccattgcgacagctcacgtcgagtatgagacggctaaaaggcattatgctcacgttgattgtccaggtcacgcagattatgtcaagaacatgatcactggagctgctcagcgtttcctgtgttc

SEQ ID NO: 33005 - protein, 175 aa, Zea mays subsp. mays
SSPLLCCSSHRRRRRRSDVMASAAVLRNAGSRRLFSYPTLRAAAIYVPSALPDAPAAAAAPAQPPPTAGTLWARSMATFTRTKPHVNVGTIGHVDHGKTTLTAAITKVLAEAGKAKAVAFDEIDKAPEEKARGITIATAHVEYETAKRHYAHVDCPGHADYVKNMITGAAQRFLC

SEQ ID NO: 33006 - protein, 156 aa, Zea mays subsp. mays
MASAAVLRNAGSRRLFSYPTLRAAAIYVPSALPDAPAAAAAPAQPPPTAGTLWARSMATFTRTKPHVNVGTIGHVDHGKTTLTAAITKVLAEAGKAKAVAFDEIDKAPEEKARGITIATAHVEYETAKRHYAHVDCPGHADYVKNMITGAAQRFLC

SEQ ID NO: 33007 - protein, 143 aa, Zea mays subsp. mays
LVSTALLLLAPPPPPPQRRNGFRRGAPERRLPAPLLLPYSPRRCDICTFCATRCARGGGSAGPAATDGRDPLGEVYGHLHAHEAPCECRHHWARRSRQNHSHCCHYQGPGRGREGQSRCFRRDRQGSGGESQRNHHCDSSRRV

SEQ ID NO: 33008 - DNA, 1402 bp, Zea mays subsp. mays
atgtgacagttcgggcaccgacgtccgtctccgtacttccggctgtgtgcgaaactgcgaacgcgtgatatctccgcgtacgcaaacgcgacgcgaaggtcagcacggacaactctacccctccgcctcgaccctgaccccccacctcgtcggcgatgagttcctcttccaacggcgggaagaagccggctcccggcggcggccgcaggggtcccgccatccgcacgctcgctgacataagccgtgggcccaccggcttcccaggtgccggaggcggcgacagcggcagcgacgacgacgagccacaggaatactacaccggtggcgagaagagtggaatgcttgttcaagatccaacaagaagaaatgatgtggatgcgatatttgaacaagccagacaagcgggtatcaaaggaatgcctcctcttcttgatggcgagtcttccagctctaggagctttacagggactgggccgacttcttacaggggagacaatatcatctgctgcacctcaggaaccagtaccaattcgagtacgccacaatatacatttgtggaacaatggctttagtgtggatgatggtccactgagatactacgacgatcctgaaaatgcagagttccttgagagccttaagatgtcaaagtgccccaaggagctggtgcctactgatggagaacatgttgatgcgtctgttattagaaggatggaagattacagggaacctgtaaggcctcgatcagctttccagggtgttggaagaacccttggtggtggaccttccccagatgagagcgcaacagctgctcctgcatcagcggcccctgctgcttcgaggtccgctggcgttgtcgtggatgactcccagccatttacgtccatacagctgaggctggctgacggcactcgcatggtcgcccggttcaacatgcaccacaccgtgggagacatcaggtcctttatagacgcagctcggcctggagctgcaaggccttatcagctgcagacgggtttccctcccaagcagctggctgacccaacgcagaccgtggagcaagctgggcttgcaaactctgttatcatgcagaagatgtaaatgcttcggctggcaacctggggagctcggatgcatcgtactgcatcttctgaaaaccgtaatattatggttgatcatgttatcagatactgctctggtgcatcattctcagtcatggttacttacagtagcatctggtgcctcgttgggagcacaggagtttataattcatctaggaactgaagtatgctttcttgcatcactattgcatcacttttttcatttttaatattggtgttatgatatttcgtgtttccatggccgcttccttgcaagttgaagcgcgactcgcaagtcgcagcat

SEQ ID NO: 33009 - protein, 243 aa, Zea mays subsp. mays
MMWMRYLNKPDKRVSKECLLFLMASLPALGALQGLGRLLTGETISSAAPQEPVPIRVRHNIHLWNNGFSVDDGPLRYYDDPENAEFLESLKMSKCPKELVPTDGEHVDASVIRRMEDYREPVRPRSAFQGVGRTLGGGPSPDESATAAPASAAPAASRSAGVVVDDSQPFTSIQLRLADGTRMVARFNMHHTVGDIRSFIDAARPGAARPYQLQTGFPPKQLADPTQTVEQAGLANSVIMQKM

SEQ ID NO: 33010 - protein, 242 aa, Zea mays subsp. mays
MWMRYLNKPDKRVSKECLLFLMASLPALGALQGLGRLLTGETISSAAPQEPVPIRVRHNIHLWNNGFSVDDGPLRYYDDPENAEFLESLKMSKCPKELVPTDGEHVDASVIRRMEDYREPVRPRSAFQGVGRTLGGGPSPDESATAAPASAAPAASRSAGVVVDDSQPFTSIQLRLADGTRMVARFNMHHTVGDIRSFIDAARPGAARPYQLQTGFPPKQLADPTQTVEQAGLANSVIMQKM

SEQ ID NO: 33011 - protein, 240 aa, Zea mays subsp. mays
MRYLNKPDKRVSKECLLFLMASLPALGALQGLGRLLTGETISSAAPQEPVPIRVRHNIHLWNNGFSVDDGPLRYYDDPENAEFLESLKMSKCPKELVPTDGEHVDASVIRRMEDYREPVRPRSAFQGVGRTLGGGPSPDESATAAPASAAPAASRSAGVVVDDSQPFTSIQLRLADGTRMVARFNMHHTVGDIRSFIDAARPGAARPYQLQTGFPPKQLADPTQTVEQAGLANSVIMQKM

SEQ ID NO: 33012 - DNA, 1654 bp, Zea mays subsp. mays
catttccgcgtcgtctccgcccgcagccggcagccccaccacccaccacatcggccgccatgccgggtggggcccacggcgccggcgccgcggacccgatgcaggtggaccagccgctcccccctgccgccgcaggcacagcacacgcccccgccgacgccaagcatgctggttctatgattgaagggagtgatccggtcacaggccatataatctcgacaaccattggagggaagaatggagagcctaaaaggactatcagctacatggcagagagagttgtgggaactggatcatttggaatcgtcttccaggcaaaatgtctggagactggtgagactgttgcgattaagaaggttttgcaggacaagcgctacaagaacagggagctacaaatcatgcgatccatggatcactgcaatgttgtttccttgaagcattgcttcttctctaccacaagcagagatgaacttttccttaacttagtgatggagtttgttcccgagtcattatatcgggtgttgaaacattacagcaatatgaaccagaggatgccactcatttatgtcaaattatatacctaccagatatttcgaggcttagcctatattcacacagtacctggagtttgccacagggatgtgaaaccacaaaatcttttggttgatccaccgactcaccaagtgaagatatgtgattttgggagtgccaaaatgttggtcaaaggtgaagcaaacatatcatatatatgttcacgttattaccgtgctccagagctcatatttggggcaactgagtacacaacatcaattgatatttggtcagctggatgtgttcttgctgagctgcttcttggccagcctctcttccctggtgaaagtgctgtggatcagcttgttgagataataaaggttcttggtaccccaacgcgcgaggaaatccgatgtatgaatccaaactacaccgagtttagatttcctcagatcaaagctcacccatggcacaagattttccacaagcggatgcctccagaagctatagatctcgcttcacgcttgctccagtattcaccaaatctaagatgcactgctcttgaagcgtgtgcacatccattctttgacgatttgcgagaaccacatgcgaggttgccaaatggacggccatttcctccactgttcaactttaaacaggaactagcaaatgcctccccagagctcatcaacaggttgatcccagaccatgctaggcggcatcttgggctcacattattgcccgctactggaccataggcgaaggctctatggtggtgcttcgttgtgcggaaggcaacctgcattcaaggtgtagaatctgacaattattggaaggtcaaacatgagctggcgcgtaaggagaggtggtatgttctcgtgcagccagccttaatttgtcgcatgtcttaatgcaaaaatctgatttttgcccaagtagtgagaggagggaagggggtggtcggtgtattgttaagctattgaaggaattcgatccctgctattgtgttactttctccaacgtttaaacgttgtagtgcgcctgtaagtgttccatatatcccctgttgtcagtcagtgtaattctgtaaatgttattaatgggaaattatttcgtgcttttc

SEQ ID NO: 33013 - protein, 428 aa, Zea mays subsp. mays
FPRRLRPQPAAPPPTTSAAMPGGAHGAGAADPMQVDQPLPPAAAGTAHAPADAKHAGSMIEGSDPVTGHIISTTIGGKNGEPKRTISYMAERVVGTGSFGIVFQAKCLETGETVAIKKVLQDKRYKNRELQIMRSMDHCNVVSLKHCFFSTTSRDELFLNLVMEFVPESLYRVLKHYSNMNQRMPLIYVKLYTYQIFRGLAYIHTVPGVCHRDVKPQNLLVDPPTHQVKICDFGSAKMLVKGEANISYICSRYYRAPELIFGATEYTTSIDIWSAGCVLAELLLGQPLFPGESAVDQLVEIIKVLGTPTREEIRCMNPNYTEFRFPQIKAHPWHKIFHKRMPPEAIDLASRLLQYSPNLRCTALEACAHPFFDDLREPHARLPNGRPFPPLFNFKQELANASPELINRLIPDHARRHLGLTLLPATGP

SEQ ID NO: 33014 - protein, 409 aa, Zea mays subsp. mays
MPGGAHGAGAADPMQVDQPLPPAAAGTAHAPADAKHAGSMIEGSDPVTGHIISTTIGGKNGEPKRTISYMAERVVGTGSFGIVFQAKCLETGETVAIKKVLQDKRYKNRELQIMRSMDHCNVVSLKHCFFSTTSRDELFLNLVMEFVPESLYRVLKHYSNMNQRMPLIYVKLYTYQIFRGLAYIHTVPGVCHRDVKPQNLLVDPPTHQVKICDFGSAKMLVKGEANISYICSRYYRAPELIFGATEYTTSIDIWSAGCVLAELLLGQPLFPGESAVDQLVEIIKVLGTPTREEIRCMNPNYTEFRFPQIKAHPWHKIFHKRMPPEAIDLASRLLQYSPNLRCTALEACAHPFFDDLREPHARLPNGRPFPPLFNFKQELANASPELINRLIPDHARRHLGLTLLPATGP

SEQ ID NO: 33015 - protein, 396 aa, Zea mays subsp. mays
MQVDQPLPPAAAGTAHAPADAKHAGSMIEGSDPVTGHIISTTIGGKNGEPKRTISYMAERVVGTGSFGIVFQAKCLETGETVAIKKVLQDKRYKNRELQIMRSMDHCNVVSLKHCFFSTTSRDELFLNLVMEFVPESLYRVLKHYSNMNQRMPLIYVKLYTYQIFRGLAYIHTVPGVCHRDVKPQNLLVDPPTHQVKICDFGSAKMLVKGEANISYICSRYYRAPELIFGATEYTTSIDIWSAGCVLAELLLGQPLFPGESAVDQLVEIIKVLGTPTREEIRCMNPNYTEFRFPQIKAHPWHKIFHKRMPPEAIDLASRLLQYSPNLRCTALEACAHPFFDDLREPHARLPNGRPFPPLFNFKQELANASPELINRLIPDHARRHLGLTLLPATGP

SEQ ID NO: 33016 - DNA, 1242 bp, Zea mays subsp. mays
gtcactcacgggtagctcatggtcgagcgtagcatgcaggaacttatttgccgtgcgctgcccaggtctccgctcgcgtgccttccagtctgtctcacactagctgctgtgggacgatcgaagtgggtgtgtcagctagctagctgcgccgtgaccacgcacatgaccgcagtgcgcgcggggctgatcaagggaaagtgatcggatggagctggagctcgggctcgcgccgccgaacccgcatcagccgctggctgccaccgccgagttcgtcggtctcctcagcagctcggctggctcgtgcgggaacaagagggttctcggcgacgcgttcggggccgccaaggcggccacgcttccgctcttcgtctgcgaggatggcgacggaggcggcggcgaccgcgcaccgcgacggcgtcgtcgaccatgaacagcaaagcaacaatgtacccaggaagaagaggctggtggggtggccgccggtgaagtgcgcgcgtaggcgtagctgcggcggcgggtacgtgaaggtgaagctggaaggggtgcccatcgggcggaaggtggacgtgtccatccacggctcgtaccaggagctgctccgcacgctcgagagcatgttcccttcgggtaaccaacaagaagacgaggtggtggtctcgcacgagcgccgccgtcgccatccttatgtagtcacctacgaggacggcgaaggggactggttgctcgtcggagatgatgtgccgtgggaggtctttgtcaagtcagtgaagcggctcaagatacttgcgtagccgacggtcggcgcctcagagacgtcgtgtggtccgtctcaccaggatcggagcagtgtagtactcctgggcgtcatctgcgtaataacgttgtttctgtcctgtgtgcccgtagcagtacgtactgtcctatagtaagctagctttatggggtgcttcagctttcagagcatgacgaaagcactgattagctgctgtcatcacatttggttcgtctttgtgtcgtacggtatcgctggcgtcagtgtcgcggcagcctaggtgatctaagcatacttactatctcaagttacttttggttcccttagcttgcatggtaattcatataccgtatacgtgtgtgactcaggggcgaagctgccttaaggcacaggggtcaccggacccgatggaatttatcaaatccagtgtaaaatactatttaacactgttcatcaatatatttgatttc

SEQ ID NO: 33017 - protein, 137 aa, Zea mays subsp. mays
MATEAAATAHRDGVVDHEQQSNNVPRKKRLVGWPPVKCARRRSCGGGYVKVKLEGVPIGRKVDVSIHGSYQELLRTLESMFPSGNQQEDEVVVSHERRRRHPYVVTYEDGEGDWLLVGDDVPWEVFVKSVKRLKILA

SEQ ID NO: 33018 - protein, 74 aa, Zea mays subsp. mays
MELELGLAPPNPHQPLAATAEFVGLLSSSAGSCGNKRVLGDAFGAAKAATLPLFVCEDGDGGGGDRAPRRRRRP

SEQ ID NO: 33019 - DNA, 1097 bp, Zea mays subsp. mays
ctcgcccccacgtctgatccgcgtatggatcccccgtccctcaacaacctccaccgcaggtgctcgacggaatgtcccaccgcccaccggcgccaatgctggacaccctctcggatgccttcgccgctgcggtgctcctctcctccaccgacaagtcggacactctgcccccagggaggctctcacctgtctccccgctcctgcactcctccaagcacgggcaccaccacccgaccccgagctcctcctcgggctcctctggctccgtctctcgggccccgatcgcgcccgcctccggtctcgcctcgcgccggagccactccggcgtgatcccgctcccttccgacgcgccaccgccgcacaggctccggcccactcatcttcacatccgggtcgtgctccagctccgccacctcgccgctcaccaacgcgctccccgcgggcaacatctgtcccttcggtcgcctcgccaaaccgctcccctccccctgccccaccgcgaccccgcgcctctcaccacgacgtgctcggcttcgggatcgccaactacggccacgggagcatcgtccgctcccatggcgagggcgtcgtgcccgccgccaccgacgacgacgcggtcctcaggcgcgccatgtcgaccgccgaccccgaggaggtcaagagggtcgggaacgacctatacatgaagggctgcttcgagggggccctcaggctctacgaccgcgccctcgccctttgccccaacaatgctgcgtgccggggcaaccgcatcgccgctctcattggcctcgaccgcctcggcgaggccgtcaaggagtgtgaggaggcgctatggattgattcgtcctacggccgcgcgcaccaccgccttgcgtcgctgcatataaggtgaatggattgcttgggccttggggtggtgccgtggtggccggcacagagattgcttctcggatctatgcaacttcttttctatagaatgggcttgctttgctccaccgatctcatcctcagctaaataaaaaatactagagtgatctgccaccattatgtatctcgagttcgaatctaaattttgctatttttagcagaacttgcgg

SEQ ID NO: 33020 - protein, 296 aa, Zea mays subsp. mays
SPPRLIRVWIPRPSTTSTAGARRNVPPPTGANAGHPLGCLRRCGAPLLHRQVGHSAPREALTCLPAPALLQARAPPPDPELLLGLLWLRLSGPDRARLRSRLAPEPLRRDPAPFRRATAAQAPAHSSSHPGRAPAPPPRRSPTRSPRATSVPSVASPNRSPPPAPPRPRASHHDVLGFGIANYGHGSIVRSHGEGVVPAATDDDAVLRRAMSTADPEEVKRVGNDLYMKGCFEGALRLYDRALALCPNNAACRGNRIAALIGLDRLGEAVKECEEALWIDSSYGRAHHRLASLHIR

SEQ ID NO: 33021 - protein, 204 aa, Zea mays subsp. mays
MSHRPPAPMLDTLSDAFAAAVLLSSTDKSDTLPPGRLSPVSPLLHSSKHGHHHPTPSSSSGSSGSVSRAPIAPASGLASRRSHSGVIPLPSDAPPPHRLRPTHLHIRVVLQLRHLAAHQRAPRGQHLSLRSPRQTAPLPLPHRDPAPLTTTCSASGSPTTATGASSAPMARASCPPPPTTTRSSGAPCRPPTPRRSRGSGTTYT

SEQ ID NO: 33022 - protein, 196 aa, Zea mays subsp. mays
MLDTLSDAFAAAVLLSSTDKSDTLPPGRLSPVSPLLHSSKHGHHHPTPSSSSGSSGSVSRAPIAPASGLASRRSHSGVIPLPSDAPPPHRLRPTHLHIRVVLQLRHLAAHQRAPRGQHLSLRSPRQTAPLPLPHRDPAPLTTTCSASGSPTTATGASSAPMARASCPPPPTTTRSSGAPCRPPTPRRSRGSGTTYT

SEQ ID NO: 33023 - DNA, 1100 bp, Zea mays subsp. mays
gcacgcaaggatcgcattcgccaagcaacgtcgggtcggcggcgcgggggcgatggagacgcggcggccgcggcgcggctggaacaaacgcttcgtcctcccgctcgcgctcctctgcctcgccgtgctgctccccggcgcgctgctcccgccgtccgcctcggcgtcgtcttcgtcgccggccgcgggaggtggcagcaggaaacgccggtgggttgggtttgactactatgtactggcgctgcagtggccgggcaccatctgccgcgagaccagcaactgctgcgacaccaatggctgctgccgatcacagcctctcaagtggttcacgattcatggtctttggccacagtacaactatgggggctggccatcatgctgcagaccaaccagattcaacataaataagatcttaatgttgatgccgatactcgagaagtactggccgtccttgtactgtggttcttcttcaacctgctttggtggaagggggccattttgggtgcatgagtgggaaactcatgggacttgtgcttaccctgaaatacaggatgaatatgactacttctccacagcactgtatctctacagcaaatacaatgttacgaaagctctgagaaaagcacgtatccggcctacaagcggcagaaaatacgccgttggccatattgttgctgtcattgaatatgcatttggggcaatgccgtcactcgtctgtaagaacggctcagttcaagaactcaggctctgcttccacaaggattatcagcctcgtgattgcacgcttgaggccggctctgcaccgaacggcagaagctactgccctcgctacgtcacgttcccgtcgtataaaccgtccgtggtggccaatactacggaggggatcaacaaccaatccaatggcgaggttccgagctacatgcgtacgtctgactctgagtagcgtccaggactccaggttgtgggcctctgccgagccgagtttgtatcaatagagcgagacgccacggcgtgcttgcaaaattaccggcccggtatggtcctgtataattcttttattcacagtatcaaatgactggccaccgcgcaccgggatttgg

SEQ ID NO: 33024 - protein, 313 aa, Zea mays subsp. mays
HARIAFAKQRRVGGAGAMETRRPRRGWNKRFVLPLALLCLAVLLPGALLPPSASASSSSPAAGGGSRKRRWVGFDYYVLALQWPGTICRETSNCCDTNGCCRSQPLKWFTIHGLWPQYNYGGWPSCCRPTRFNINKILMLMPILEKYWPSLYCGSSSTCFGGRGPFWVHEWETHGTCAYPEIQDEYDYFSTALYLYSKYNVTKALRKARIRPTSGRKYAVGHIVAVIEYAFGAMPSLVCKNGSVQELRLCFHKDYQPRDCTLEAGSAPNGRSYCPRYVTFPSYKPSVVANTTEGINNQSNGEVPSYMRTSDSE

SEQ ID NO: 33025 - protein, 296 aa, Zea mays subsp. mays
METRRPRRGWNKRFVLPLALLCLAVLLPGALLPPSASASSSSPAAGGGSRKRRWVGFDYYVLALQWPGTICRETSNCCDTNGCCRSQPLKWFTIHGLWPQYNYGGWPSCCRPTRFNINKILMLMPILEKYWPSLYCGSSSTCFGGRGPFWVHEWETHGTCAYPEIQDEYDYFSTALYLYSKYNVTKALRKARIRPTSGRKYAVGHIVAVIEYAFGAMPSLVCKNGSVQELRLCFHKDYQPRDCTLEAGSAPNGRSYCPRYVTFPSYKPSVVANTTEGINNQSNGEVPSYMRTSDSE

SEQ ID NO: 33026 - protein, 175 aa, Zea mays subsp. mays
MLMPILEKYWPSLYCGSSSTCFGGRGPFWVHEWETHGTCAYPEIQDEYDYFSTALYLYSKYNVTKALRKARIRPTSGRKYAVGHIVAVIEYAFGAMPSLVCKNGSVQELRLCFHKDYQPRDCTLEAGSAPNGRSYCPRYVTFPSYKPSVVANTTEGINNQSNGEVPSYMRTSDSE

SEQ ID NO: 33027 - DNA, 1297 bp, Zea mays subsp. mays
acgcatcgatcaccctcctcgctcccggtcaacagcagcggcgcagagcacgacgccgacacgcgccatggcggcggtgaggcaccggcagctggaggccaacggcatcacgatgcacgtcgcggaggccggccccgtgaacgcctccgcgccggcggtgctgttcgtgcacggcttcccggagctctggtactcgtggcgccaccagatgggctacctcgccgcgcgcggctaccgctgcgtggcacccgacctccgaggctacggcggcaccaccgcgccgccggaaccgacctcctacaccgtcttccatatcgtcggcgacatcgtcgcgctcctcgacgccctccacctcccgcaggtgttcgttgtcggccacgactggggcgccatcgtgtcgtggaacctctgcctgctgcggccggatcgggtgcgcgcgctcgtcaacctcagcgttgccttcatgccccggaggcccggcgtcaagcctcttgagtacttccgcgccgcatacggggatgagtactacgtctgccgattccaggaaccaggactcgaagcagaatttgctacgtttgacttgaagagtttcttcacattagcattgactcttcgggcaacaggttcttcagctatggaccttcgaaaaatgcaaacttatagtaagcaaatggtgctaccttcttggctatctgaggaagatgtcagttaccttgcaagtgtgtactcaaaaactggatttgctggtggagtaaattactatcgctgcttggacctgaactgggaactgatggcgccatggacaggagcaaaggtgcaagttccaaccaagttcatcgttggggacggtgacctggcgtaccatcaccctggagtgaagaggtacatccacaagggcgggttcaagagggacgtgcccatgcttgaggaggtggtggtcatcaagggcgctggggcacttcatccagcaggaaagagcgcaggaaatcagtgagcacatccatgactacatcaagaagttcgaagcttgtggtctgccgccactgagagtttcaaagctatgagagacctgatggcttctgtacataactcaaatggtctgggagctattgtagttgtttgtagtgctgcagatctatatattatgaatggtatggagtactgacgatctattcaatggacccacgttgcgttgtgctgtgtggggggcacgggtccccacttaattttcttgtttcagtggacatcttattttatttgatgtagctacaaaggttcattagggcatgtacaatcc

SEQ ID NO: 33028 - protein, 330 aa, Zea mays subsp. mays
RIDHPPRSRSTAAAQSTTPTRAMAAVRHRQLEANGITMHVAEAGPVNASAPAVLFVHGFPELWYSWRHQMGYLAARGYRCVAPDLRGYGGTTAPPEPTSYTVFHIVGDIVALLDALHLPQVFVVGHDWGAIVSWNLCLLRPDRVRALVNLSVAFMPRRPGVKPLEYFRAAYGDEYYVCRFQEPGLEAEFATFDLKSFFTLALTLRATGSSAMDLRKMQTYSKQMVLPSWLSEEDVSYLASVYSKTGFAGGVNYYRCLDLNWELMAPWTGAKVQVPTKFIVGDGDLAYHHPGVKRYIHKGGFKRDVPMLEEVVVIKGAGALHPAGKSAGNQ

SEQ ID NO: 33029 - protein, 308 aa, Zea mays subsp. mays
MAAVRHRQLEANGITMHVAEAGPVNASAPAVLFVHGFPELWYSWRHQMGYLAARGYRCVAPDLRGYGGTTAPPEPTSYTVFHIVGDIVALLDALHLPQVFVVGHDWGAIVSWNLCLLRPDRVRALVNLSVAFMPRRPGVKPLEYFRAAYGDEYYVCRFQEPGLEAEFATFDLKSFFTLALTLRATGSSAMDLRKMQTYSKQMVLPSWLSEEDVSYLASVYSKTGFAGGVNYYRCLDLNWELMAPWTGAKVQVPTKFIVGDGDLAYHHPGVKRYIHKGGFKRDVPMLEEVVVIKGAGALHPAGKSAGNQ

SEQ ID NO: 33030 - protein, 293 aa, Zea mays subsp. mays
MHVAEAGPVNASAPAVLFVHGFPELWYSWRHQMGYLAARGYRCVAPDLRGYGGTTAPPEPTSYTVFHIVGDIVALLDALHLPQVFVVGHDWGAIVSWNLCLLRPDRVRALVNLSVAFMPRRPGVKPLEYFRAAYGDEYYVCRFQEPGLEAEFATFDLKSFFTLALTLRATGSSAMDLRKMQTYSKQMVLPSWLSEEDVSYLASVYSKTGFAGGVNYYRCLDLNWELMAPWTGAKVQVPTKFIVGDGDLAYHHPGVKRYIHKGGFKRDVPMLEEVVVIKGAGALHPAGKSAGNQ

SEQ ID NO: 33031 - DNA, 1186 bp, Zea mays subsp. mays
aaaaaaccctagccgccgcgccgccccgctccctagtggtgctccctcccccaccactgcagctccgtcccggcggccccaagagttgcggcgaggatgaacgtgaagggcggcagccggattccggtacccccgccgggggccagcgcgctggtcaaggtggccgtgttcggcggcgccgccgtgtacgccgccatgaacagcctctacaacgtcgagggtgggcaccgcgccatcgtcttcaaccgcatccaggggatcaaggacaaggtataccctgaagggactcactttatgattccatggtttgaacgaccaatcatttatgatgtccgtgctcgaccaaatcttgttgagagtacttctgggagtcgggatcttcagatggtgaaaattggtctccgtgtccttacaaggcctatgccagagaggctaccacatatctacagaactctgggagagaacttcaatgagagagttttgccttcaatcatccatgaaacactgaaagctgttgttgctcaatataatgctagtcagctgatcacacagagagagactgtgagtagggagattaggaagatactgactgagagggctagattcttcaacattgctcttgatgacgtctccatcacaagcctgagctttgggaaggagtttactcatgccattgaagcgaagcaggttgctgcacaggaagctgagcgtgctaagttcattgtcgagaaagctgaacaagataagagaagtgcaattatcagggctcagggagaggctaagagtgcggagctgattggtcaagccatagcgaacaaccctgccttccttgccctgaggcagattgaagctgcaagggagatctcccacaccatttcggcctcagccaacaaggtgttcctggactccaacgacctgctgctcaacctccagcagctgaatgtatcgagcaagcagaagaaatgatgtcacaacgttatcccctttcttctgagtttgcagtcagtagtggatgcctttgtaccagacattgtgaggaacgctcggttttggatgtagtttcgccaatcttcctgtgatgtggaacttgcgagtatttgctcaaaggcaagcaagctgacaggttttgtttaaacgtgactacaggctgaggaagttttcaataaggaacaaattctgttatgcc

SEQ ID NO: 33032 - protein, 289 aa, Zea mays subsp. mays
MNVKGGSRIPVPPPGASALVKVAVFGGAAVYAAMNSLYNVEGGHRAIVFNRIQGIKDKVYPEGTHFMIPWFERPIIYDVRARPNLVESTSGSRDLQMVKIGLRVLTRPMPERLPHIYRTLGENFNERVLPSIIHETLKAVVAQYNASQLITQRETVSREIRKILTERARFFNIALDDVSITSLSFGKEFTHAIEAKQVAAQEAERAKFIVEKAEQDKRSAIIRAQGEAKSAELIGQAIANNPAFLALRQIEAAREISHTISASANKVFLDSNDLLLNLQQLNVSSKQKK

SEQ ID NO: 33033 - protein, 256 aa, Zea mays subsp. mays
MNSLYNVEGGHRAIVFNRIQGIKDKVYPEGTHFMIPWFERPIIYDVRARPNLVESTSGSRDLQMVKIGLRVLTRPMPERLPHIYRTLGENFNERVLPSIIHETLKAVVAQYNASQLITQRETVSREIRKILTERARFFNIALDDVSITSLSFGKEFTHAIEAKQVAAQEAERAKFIVEKAEQDKRSAIIRAQGEAKSAELIGQAIANNPAFLALRQIEAAREISHTISASANKVFLDSNDLLLNLQQLNVSSKQKK

SEQ ID NO: 33034 - protein, 223 aa, Zea mays subsp. mays
MIPWFERPIIYDVRARPNLVESTSGSRDLQMVKIGLRVLTRPMPERLPHIYRTLGENFNERVLPSIIHETLKAVVAQYNASQLITQRETVSREIRKILTERARFFNIALDDVSITSLSFGKEFTHAIEAKQVAAQEAERAKFIVEKAEQDKRSAIIRAQGEAKSAELIGQAIANNPAFLALRQIEAAREISHTISASANKVFLDSNDLLLNLQQLNVSSKQKK

SEQ ID NO: 33035 - DNA, 1201 bp, Zea mays subsp. mays
gcgcgcccgtggcccgtaaaagacaccaacccacttctcgaatcgaatccaggtccagggacgccgctacccgccgtccttcacccccgccatgccaacgctcggcatctcgccgctgctggacgcctacttccggcgccgcttcgccgcagcgggcctcgtggaggcctccgtcccgctggacggcggcgccaccacggtccactgctggcgcttcccgccggggtccgccgacggcgaggacgacgcccgtcccgtcctggtgctcctgcacggcttcgggcccccggcaacgtggcagtggaggcgccaggtgggccctctctcgcgccggttccgcctcgtcgtcccggacctgctcttcttcggcggctcgtccacgtcggcggcggcgcccggcgccgggcgggtgtccgaggcgcggcaggcggaggcggtggcgaagctcgtggcggccctggtggcgccgccggcgcgcgtgtcggtggccggcaccagctacggcgggttcgtggcgtaccacctggcgcggctgctgggccccggcgcggtggaccgggtggtgatcgccagctccgacctcctcaaggccgacgccgacgaccgcgccctgctccgccgcggcgccgccgagcgcgtcgaggacgtcatgctgccccgctcccccgagcggatgcggcgcctgatgcagctcgcctaccaccgcccgcgccgcttcacgccgggcttcgtgctccgggatctcgcccagtatctgtacagcgacaaagtagaagagaagaaggagctaatcaaggggataacgctgggcaacaaagacaagttccagcttacacctctcccccaggaagtccttgtgttgtggggagagcacgaccagatattcccagtcgagaaggcatttcaagtggcaaggaaacttggagcgaatgctaggctggaggtcctcaaggacaccggccacatgcctcaagaagaggatccaaagcggttcaacgaggcaatcctcaacttcttgcttccagctccaaagtcgtccttgtaacgcgatatatatcccatagttattcacttattattcaggcccaaggagagttcacgatttcgatatgcacattctgcccgatcagtgcagtctttgtcgctttggtatcacctcaccttcaagattgatcatggaaactattgctatttatctgcc

SEQ ID NO: 33036 - protein, 317 aa, Zea mays subsp. mays
MPTLGISPLLDAYFRRRFAAAGLVEASVPLDGGATTVHCWRFPPGSADGEDDARPVLVLLHGFGPPATWQWRRQVGPLSRRFRLVVPDLLFFGGSSTSAAAPGAGRVSEARQAEAVAKLVAALVAPPARVSVAGTSYGGFVAYHLARLLGPGAVDRVVIASSDLLKADADDRALLRRGAAERVEDVMLPRSPERMRRLMQLAYHRPRRFTPGFVLRDLAQYLYSDKVEEKKELIKGITLGNKDKFQLTPLPQEVLVLWGEHDQIFPVEKAFQVARKLGANARLEVLKDTGHMPQEEDPKRFNEAILNFLLPAPKSSL

SEQ ID NO: 33037 - protein, 311 aa, Zea mays subsp. mays
ARPWPVKDTNPLLESNPGPGTPLPAVLHPRHANARHLAAAGRLLPAPLRRSGPRGGLRPAGRRRHHGPLLALPAGVRRRRGRRPSRPGAPARLRAPGNVAVEAPGGPSLAPVPPRRPGPALLRRLVHVGGGARRRAGVRGAAGGGGGEARGGPGGAAGARVGGRHQLRRVRGVPPGAAAGPRRGGPGGDRQLRPPQGRRRRPRPAPPRRRRARRGRHAAPLPRADAAPDAARLPPPAPLHAGLRAPGSRPVSVQRQSRREEGANQGDNAGQQRQVPAYTSPPGSPCVVGRARPDIPSREGISSGKETWSEC

SEQ ID NO: 33038 - protein, 187 aa, Zea mays subsp. mays
APVARKRHQPTSRIESRSRDAATRRPSPPPCQRSASRRCWTPTSGAASPQRASWRPPSRWTAAPPRSTAGASRRGPPTARTTPVPSWCSCTASGPRQRGSGGARWALSRAGSASSSRTCSSSAARPRRRRRPAPGGCPRRGRRRRWRSSWRPWWRRRRACRWPAPATAGSWRTTWRGCWAPARWTGW

SEQ ID NO: 33039 - DNA, 1983 bp, Zea mays subsp. mays
acattccccattccccacaacgtccccaggtaaatcggagctacaggctacagctccctccccacgccggccactctcctgctcgcacatcggccaatccgctcgatccactcccccatcgatccctctcctgctcgcacatcggccagtctgctcgatccactcccctatcggctcatctgctcgatctggagaccaccatggcacctgggcgtaaaactacagcaaaaccaaccaaaccaacagaagtgccactaacagaatatgagaaattgagagctgagaatttgatgaggaataaccaaaagttgcaaagacttggtgtcactacactagcgtcaatacttaaccatacttctgcaaagagcaaggttgacactcatgaaaaatctggatctttgtatgaggtccaggaaggtgaaggttctgaagatgaggaagtcaatcagtgtgcaacaaaccggagaaacagattaaagagggtcttggcacctgcgcaacaagatgaacctacaagatttactaggcagaatacaagggatttggctttaactttcagtccagaactgcaacaagtcgaaaccttaggactctctactatcacatccacccctcaacaggaccagaacaactctagtgatcaaggtgcacttgaggcaaccatagatccaaatggaaaaaggaacaggagtatgggcagagaactggataggataagtagaggtttatgcactaacatccccatacacattgctgaaggaaagatgcggccagaagcacctatgcaagctgccaaacttgcatcagagggcgggattatacttaggcagcaaatgccgatcctccggcattggaaagagtacaagaaggataagtcaattgttacaaactatatcggcaaagttgctgcccaattcaccatggacaccaacaataatgcaatcaaagccgcatgtgccgatttgctcaagggtggacaacgacagatgaggtaccagctgaaaaaaaaatatttcaatgggataccagcaaatcaagtaaggaccacatcgccagttaaacatatgacagatgatcaatggaaagcattggtggagatgtggtcagacgcaaagcacaaggaaaagtgtaccaaaaaccaactaaatcgagagaatgtccggttacatcagcgcactggatctcgatgctacattgcacaggcccatgttgtgaagaaagatatattcaaagatgtagagcccacctcaattgatctattcaagaacttccattgtggcaaaaaaaatggatttaccgagtctgtacagaaagcaattgatgatatggaaggcattatgagtgaaccagtacaagatggacaggaaccaaagtcagcaaaagaagctgtttctcaggttgtcaaatcaactacttttcttcgtgttgcaggtgtttgttcagcctccaagagtacctctagaggtgcaatatcatcacaggtccacgatcttcaggttgagcttgagaatgagaagcaagaaaaaggagaacttcgacaagagttggataatttgaagatggaatcagaaacttcaagggtaaaacattctgaggaaatagagggtttaaagaagacatcacaagaaatgcatggtctccttcgccaactattgagcttcaaccagggtcaacacaatccacggtcataaagttactaagcccccaatagtgaactattgtaggatgtttctgttctgaaatttggtttttagttgaactatgtctagttttatcaatagttggttgctagttgtttacatgtacaactaagtaggtccaagtttgttgatttttgttactggtagctccaagttgtgttgaacattgttgcttcttataagacgtattgtgacctatgaattagaaattgtgtttgctataattttggtcttttgatatgtaaattttgtgaaataatacatgcgaacatctgtacatttg

SEQ ID NO: 33040 - protein, 562 aa, Zea mays subsp. mays
IPHSPQRPQVNRSYRLQLPPHAGHSPARTSANPLDPLPHRSLSCSHIGQSARSTPLSAHLLDLETTMAPGRKTTAKPTKPTEVPLTEYEKLRAENLMRNNQKLQRLGVTTLASILNHTSAKSKVDTHEKSGSLYEVQEGEGSEDEEVNQCATNRRNRLKRVLAPAQQDEPTRFTRQNTRDLALTFSPELQQVETLGLSTITSTPQQDQNNSSDQGALEATIDPNGKRNRSMGRELDRISRGLCTNIPIHIAEGKMRPEAPMQAAKLASEGGIILRQQMPILRHWKEYKKDKSIVTNYIGKVAAQFTMDTNNNAIKAACADLLKGGQRQMRYQLKKKYFNGIPANQVRTTSPVKHMTDDQWKALVEMWSDAKHKEKCTKNQLNRENVRLHQRTGSRCYIAQAHVVKKDIFKDVEPTSIDLFKNFHCGKKNGFTESVQKAIDDMEGIMSEPVQDGQEPKSAKEAVSQVVKSTTFLRVAGVCSASKSTSRGAISSQVHDLQVELENEKQEKGELRQELDNLKMESETSRVKHSEEIEGLKKTSQEMHGLLRQLLSFNQGQHNPRS

SEQ ID NO: 33041 - protein, 496 aa, Zea mays subsp. mays
MAPGRKTTAKPTKPTEVPLTEYEKLRAENLMRNNQKLQRLGVTTLASILNHTSAKSKVDTHEKSGSLYEVQEGEGSEDEEVNQCATNRRNRLKRVLAPAQQDEPTRFTRQNTRDLALTFSPELQQVETLGLSTITSTPQQDQNNSSDQGALEATIDPNGKRNRSMGRELDRISRGLCTNIPIHIAEGKMRPEAPMQAAKLASEGGIILRQQMPILRHWKEYKKDKSIVTNYIGKVAAQFTMDTNNNAIKAACADLLKGGQRQMRYQLKKKYFNGIPANQVRTTSPVKHMTDDQWKALVEMWSDAKHKEKCTKNQLNRENVRLHQRTGSRCYIAQAHVVKKDIFKDVEPTSIDLFKNFHCGKKNGFTESVQKAIDDMEGIMSEPVQDGQEPKSAKEAVSQVVKSTTFLRVAGVCSASKSTSRGAISSQVHDLQVELENEKQEKGELRQELDNLKMESETSRVKHSEEIEGLKKTSQEMHGLLRQLLSFNQGQHNPRS

SEQ ID NO: 33042 - protein, 466 aa, Zea mays subsp. mays
MRNNQKLQRLGVTTLASILNHTSAKSKVDTHEKSGSLYEVQEGEGSEDEEVNQCATNRRNRLKRVLAPAQQDEPTRFTRQNTRDLALTFSPELQQVETLGLSTITSTPQQDQNNSSDQGALEATIDPNGKRNRSMGRELDRISRGLCTNIPIHIAEGKMRPEAPMQAAKLASEGGIILRQQMPILRHWKEYKKDKSIVTNYIGKVAAQFTMDTNNNAIKAACADLLKGGQRQMRYQLKKKYFNGIPANQVRTTSPVKHMTDDQWKALVEMWSDAKHKEKCTKNQLNRENVRLHQRTGSRCYIAQAHVVKKDIFKDVEPTSIDLFKNFHCGKKNGFTESVQKAIDDMEGIMSEPVQDGQEPKSAKEAVSQVVKSTTFLRVAGVCSASKSTSRGAISSQVHDLQVELENEKQEKGELRQELDNLKMESETSRVKHSEEIEGLKKTSQEMHGLLRQLLSFNQGQHNPRS

SEQ ID NO: 33043 - DNA, 635 bp, Zea mays subsp. mays
tactccgttctatctgattatgctacaatgcaaggtgaagtgccccagcctcagatttgtggtccctctgatgactcttcagcaaaagttgaccaccatgagtctcccagcgatgaggatgaggacgacgacgatgaagatttcgacaactatgaatcatatgatggtcgatgaagagacaattcattcagaaaaacccgatacagctgaaggcagttccgagataaatgacataaacaacatcaccctggacctgaaaggctcgagggttaaatttaagggccttcagcaagtttttgggccaatcgagaggcgacacctcaatgcgctagaaaggcaactgagcagatacgtcaaggttgttgggaaggagctgtctgatcgaatggtgtattgtctttcttgatatgcagccggtcccgagatcccaattctactgtgaaaggtgcacatgagagttaaactagtttcattcagaaagaaaggtcatattgctgcgtgtttctgcatggttttcgttgtaaaggtacgagagctgaggctgacatagaacattctccggtcgattttgtatgtgtattttggcactaaagtcttcatggatggcttatactgaagagaagtggcgattcggc

SEQ ID NO: 33044 - protein, 134 aa, Zea mays subsp. mays
TPFYLIMLQCKVKCPSLRFVVPLMTLQQKLTTMSLPAMRMRTTTMKISTTMNHMMVDEETIHSEKPDTAEGSSEINDINNITLDLKGSRVKFKGLQQVFGPIERRHLNALERQLSRYVKVVGKELSDRMVYCLS

SEQ ID NO: 33045 - protein, 128 aa, Zea mays subsp. mays
MLQCKVKCPSLRFVVPLMTLQQKLTTMSLPAMRMRTTTMKISTTMNHMMVDEETIHSEKPDTAEGSSEINDINNITLDLKGSRVKFKGLQQVFGPIERRHLNALERQLSRYVKVVGKELSDRMVYCLS

SEQ ID NO: 33046 - protein, 111 aa, Zea mays subsp. mays
MTLQQKLTTMSLPAMRMRTTTMKISTTMNHMMVDEETIHSEKPDTAEGSSEINDINNITLDLKGSRVKFKGLQQVFGPIERRHLNALERQLSRYVKVVGKELSDRMVYCLS

SEQ ID NO: 33047 - DNA, 2177 bp, Zea mays subsp. mays
cttcccactccactccgcgttttcaaaaatcaaaaccccagccggaacagcgaaaccccttccaccatagcccgtaggaaacggagcagcggttgcggtttctctctccgtcgctctcaccgctcgccgccgtctccgtatccggtccgcaaggcgggcctggcgtcaaggtcctccgctccgtccccttcactcgcgaccggagtcccctcttcgttggttcgccaatctacttcgtcggcccaccccttttcccccgatcgatctctccttctcgctaagcgaactatcttgacctccctccctcgtgcgagattagccagtagaaagttccccgcttttcacccaggcacacttccaccacctcgctttgctgcttcactgcttgcttctgttgggcggagtgctaagaggacggcacgggagtcaagattcctcctccttaacctgccctttcgtgttgccgttgttggtggtttggtttgtgattgcggtggcgctggagttgcggtgtgtgtgaagcgagggatccgagattcttgtggattctgttctacttttcgattgctgctgatcctctctcccgtgcgacggcacaagcggcggtgtggggagagcatccgccgttgcccggccttggagggccccggtccgtctatggaacttgccgccccggtgccacgccccggcccggaactgaagtgctcagcaaggcgcttcttgcctgccactctcacgctgctggtgcctactgtggcagtcccctgtttggttcctgctcctcactgaccggctacggggctgcgataatggtgcctcagatggtgctgctcctttgctgctgccttctggcgttcccgccacatggtccgttagtcgttgaggcttttgtaggcggttatggagtaaactatgggagaatagcaaacaacatcccttcccctgacaaagtggtggagctcctgaggagagcaaagataaggaatgttaagatatacgactctgaccacagcgttctcgatgcgttcaaagggtctgggatcaatctggtcatcgcaatccccaatgagctcgtcaaggatatggctgcaaacacgagccgttcaatggactggctaaatcaaaatgtgcagccttatctccctcagacgcgcatcgttgggatcactgtgggaaatgaggtgctcggaggccaagatcaaagcttgtatcagccacttgttgatgctgtgaagaatgtgtatgatgggctcaagaggctccacttggagagaaaaattgagcttttcacacctcattcggaagctgtttttgctacttcttatccaccctccgcatgtgtgttcaaggaggaactcatgccatacatgaaacctcttctcgacttctttgcaatgattggctcacctttctatgtcaacgcatacccctttttggcttacataagtgatcctgaacatatcgatatcaattatgctctctttaaacccaacaaaggaataattgatccaaataatagcctgcactatgacaatatgtttgatgctcaggtagatgcagcttatgctgctctacatgctgctggttatgataacatggaggttcgtgtggcagagactggttgggcttctagtggggatcaaaatgaagcaggagcttcatctgagaatgcaaggacgtacaatttcaatcttcgtaaacggctatttctgaggaccggaactcctctgaagccaaagagaccagtcaaagcgtatatatttgcattgtttaatgagaatcagaagcctggagctggctctgagaggcattatgggctgttccttcctgatgggaggatttcatatgacatcggtgtctcaggtctactaccttcatctgcatcctcatccgtgctgtccattaagaatgttcaagctgggggttggattttacagcattgggctacagttcttttatgttgttttcattttttgggggccatagtgacttgaggacggcataacacatccgtagtaaagggtgcaattgagcaagttagaatgttgctattgggaaattcacaatgaaaatccaaataatagtaccgctgcaataatctcttctcctgaggctgtcctgctttgctgcttaaaaccgtactcagttattgttctaaaaaatgattcatacctgct

SEQ ID NO: 33048 - protein, 394 aa, Zea mays subsp. mays
MVPQMVLLLCCCLLAFPPHGPLVVEAFVGGYGVNYGRIANNIPSPDKVVELLRRAKIRNVKIYDSDHSVLDAFKGSGINLVIAIPNELVKDMAANTSRSMDWLNQNVQPYLPQTRIVGITVGNEVLGGQDQSLYQPLVDAVKNVYDGLKRLHLERKIELFTPHSEAVFATSYPPSACVFKEELMPYMKPLLDFFAMIGSPFYVNAYPFLAYISDPEHIDINYALFKPNKGIIDPNNSLHYDNMFDAQVDAAYAALHAAGYDNMEVRVAETGWASSGDQNEAGASSENARTYNFNLRKRLFLRTGTPLKPKRPVKAYIFALFNENQKPGAGSERHYGLFLPDGRISYDIGVSGLLPSSASSSVLSIKNVQAGGWILQHWATVLLCCFHFLGAIVT

SEQ ID NO: 33049 - protein, 390 aa, Zea mays subsp. mays
MVLLLCCCLLAFPPHGPLVVEAFVGGYGVNYGRIANNIPSPDKVVELLRRAKIRNVKIYDSDHSVLDAFKGSGINLVIAIPNELVKDMAANTSRSMDWLNQNVQPYLPQTRIVGITVGNEVLGGQDQSLYQPLVDAVKNVYDGLKRLHLERKIELFTPHSEAVFATSYPPSACVFKEELMPYMKPLLDFFAMIGSPFYVNAYPFLAYISDPEHIDINYALFKPNKGIIDPNNSLHYDNMFDAQVDAAYAALHAAGYDNMEVRVAETGWASSGDQNEAGASSENARTYNFNLRKRLFLRTGTPLKPKRPVKAYIFALFNENQKPGAGSERHYGLFLPDGRISYDIGVSGLLPSSASSSVLSIKNVQAGGWILQHWATVLLCCFHFLGAIVT

SEQ ID NO: 33050 - protein, 303 aa, Zea mays subsp. mays
MAANTSRSMDWLNQNVQPYLPQTRIVGITVGNEVLGGQDQSLYQPLVDAVKNVYDGLKRLHLERKIELFTPHSEAVFATSYPPSACVFKEELMPYMKPLLDFFAMIGSPFYVNAYPFLAYISDPEHIDINYALFKPNKGIIDPNNSLHYDNMFDAQVDAAYAALHAAGYDNMEVRVAETGWASSGDQNEAGASSENARTYNFNLRKRLFLRTGTPLKPKRPVKAYIFALFNENQKPGAGSERHYGLFLPDGRISYDIGVSGLLPSSASSSVLSIKNVQAGGWILQHWATVLLCCFHFLGAIVT

SEQ ID NO: 33051 - DNA, 1859 bp, Zea mays subsp. mays
aaaactttagtctactcgtcctcggtcctcctcttctcgcagcagccagcagaccaatcgggacaagcaaactcccccgattagtttaagcagcccgggcccggcgacgaccagctccgttccgcgcggggatttaaacgcgcgaagcgagaaggcacgcagcaggcggcagcggcaagcaacgaacgcgatcgcgcgccgacgacgacgcgcggtgccggcgcctggtggtgccgtgttgcggactccgctgcatcgtctcggtcggtcgtcgtcgttatcatgggtgtccggctgccggtggcgtggtccgccgtcctcgtcctcctcgtgcgggcggccgtggcgcgggagtacgcggccatcttcaacttcggggactccctggtggacgccggcaacctggtggtggacggcatcccggactacctggccacggcgcgcctgccctacggcatgacccacttcggctaccccaccggccgctgctccgacggccgcctcgtcgttgacttcatcgcgcaggagctgggcgtgccgctgctgccgccgtccaaggcgaagaacgcgacgttccaccgcggcgccaacttcgcgatcacgggcgccacgtcgctggacacgcccttcttcgtggagcgcgggctggggaagacggtctggaactcggggtccctgcacacgcagatccagtggttccaggacatgaagcccaagctgtgcgggcaggagcaggagtgccgggacctgttccggcggtcgctgttcatcgtgggcgagttcggcgggaacgactacaactcgccgctgttcgcgttccggccgctggcggaggcgcacgacatggtgccgcacgtggtggagtccatcgggcggggcgtggagcggctgatcgcggagggcgccgcggagctggtggtgcccggggtgctccccatcggctgcttccccgtctacctctccatcttccgcaggcagccggccggcggctacggcgcccgcagcggctgcgtcaaggagctgaacacgctgtcgtgggtgcacaacgccgcgctgcgccgcaaggtcgaggagctccgcgccaggcaccccggcgtgcgcatcgtgtacgccgactactacacgccggccatccagttcgtcctccacgccgagaaatacgggatgctgaagcagacgccgcgggcgtgctgcggcgcgccgggcgtgggcgagtacaacttcaacctgacgtccaagtgcggcgagccgggggcgtacgcgtgcccggacccctccaaccactggagttgggacggcatccacctcacggaggccgcctacggccacatcgccaggggctggctctacgggcccttcgccgacccgcccatcctcgacgccaagcacctcggctaacgtcgtccatccaccgtcttctccagcgccggccccgcccgcacggccagtacagactactcctccggctctgggcgccgtcgtatgtgcgtccttattaccgacctgcaaaattggattggttgcttgtagtagaagtgtagagagagcgagacagagatagatgacaaacacgaaacgaaccggaaggaggacgataaggcgcgcgtgccggccggtcttttactcctctctgttcatagctgtcccatatcgtagtcaagaaaactgagcagggaaacaaaccgggcgatatttctgttgcatcttgctttgtttgagagtgtgcgtgcgtgtgcggccagctcgatctgaactcgataggcaggtgcgtcgcgtcgtggatgaactggtccgtggacgtgatcttgtttatttttttaaggagcaggtgttgtcaaaagtccatcgctaagatgtgc

SEQ ID NO: 33052 - protein, 371 aa, Zea mays subsp. mays
MGVRLPVAWSAVLVLLVRAAVAREYAAIFNFGDSLVDAGNLVVDGIPDYLATARLPYGMTHFGYPTGRCSDGRLVVDFIAQELGVPLLPPSKAKNATFHRGANFAITGATSLDTPFFVERGLGKTVWNSGSLHTQIQWFQDMKPKLCGQEQECRDLFRRSLFIVGEFGGNDYNSPLFAFRPLAEAHDMVPHVVESIGRGVERLIAEGAAELVVPGVLPIGCFPVYLSIFRRQPAGGYGARSGCVKELNTLSWVHNAALRRKVEELRARHPGVRIVYADYYTPAIQFVLHAEKYGMLKQTPRACCGAPGVGEYNFNLTSKCGEPGAYACPDPSNHWSWDGIHLTEAAYGHIARGWLYGPFADPPILDAKHLG

SEQ ID NO: 33053 - protein, 313 aa, Zea mays subsp. mays
MTHFGYPTGRCSDGRLVVDFIAQELGVPLLPPSKAKNATFHRGANFAITGATSLDTPFFVERGLGKTVWNSGSLHTQIQWFQDMKPKLCGQEQECRDLFRRSLFIVGEFGGNDYNSPLFAFRPLAEAHDMVPHVVESIGRGVERLIAEGAAELVVPGVLPIGCFPVYLSIFRRQPAGGYGARSGCVKELNTLSWVHNAALRRKVEELRARHPGVRIVYADYYTPAIQFVLHAEKYGMLKQTPRACCGAPGVGEYNFNLTSKCGEPGAYACPDPSNHWSWDGIHLTEAAYGHIARGWLYGPFADPPILDAKHLG

SEQ ID NO: 33054 - protein, 230 aa, Zea mays subsp. mays
MKPKLCGQEQECRDLFRRSLFIVGEFGGNDYNSPLFAFRPLAEAHDMVPHVVESIGRGVERLIAEGAAELVVPGVLPIGCFPVYLSIFRRQPAGGYGARSGCVKELNTLSWVHNAALRRKVEELRARHPGVRIVYADYYTPAIQFVLHAEKYGMLKQTPRACCGAPGVGEYNFNLTSKCGEPGAYACPDPSNHWSWDGIHLTEAAYGHIARGWLYGPFADPPILDAKHLG

SEQ ID NO: 33055 - DNA, 1811 bp, Zea mays subsp. mays
tgggtgcttctctacggccgccgccagcaccggagttccggacctccgccgcctcgtctccgctccctcgcactcgcactcgcagctccggctgctattctgcagaagtcggtagattggttttcctcatgggtcgcaccatcaagaaggccaagaaggctcaatccaagaagtccaagaagaaaactgaatcgtcctcgtcgtccaaccctgcgattgcctctggtccggctaaggtctggcaaccggttgtagatacactggaagatggggaggagctgcagtttgatcctcaggcttacaattatctccgaggttttggcattggctggtcttgcttgagttttgatgttgtgcgtgatcaacttggactcgtccgttcagagttccctcatacattctatggtgttgctggaacgcaggctgagaaagcttcatggaactatattggcgttttcaagctttctaacataagtggcaagaagcgggaacctataccagcttcagcagttgaagctgacactgatgtggatagtgacagcagcagcgatgaagaagataaagagattaatgaggatacaaaacccatcctacatctaaaaaaggtggctcatgcggggtgtgtaaatcggatacgctcaatgactcaaaaaccacatataagtgctacgtggggagatactggtcatgttcaggtgtgggacttgagctcattccttaattctttagctgagtcagggacagctgcacccaaagaagacgacataatccacaaacacttacccctgaaagtatttagtggtcataaagatgagggatatgccattgattggagtccacttgttactggaagacttgtttctggcgactgcaataagtgcattcacctatgggagccgacttcaaacaactggaacgtagatgcaaacccatttgttggacactctgcaagtgttgaagatctacagtggagtcccacggaagccgacatatttgcctcatgttctgtggatggtacgatatcaatatgggatatacgtacagggaagaaaccttgtatttctgtcaaagctcatgaagccgatgtgaatgttatctcatggaacaagcttgctagctgcatgatagcttctgggtgcgatgatggcagtttctcagttcgtgatcttagatcaattgaggaggactcgttggtggcacattttgagtaccacaagaaagcaattacatctatcgagtggagtccacatgaagcatcatcattagctgtaacatctgaagatcatcaactaacaatctgggacctttcactggaaagagatgcggaggaggaggctgagttcagagcaaagatgaaggagcaggcaaacgcacctgaagatttgcccccacaacttctctttgctcatcagggccagagagacttgaaagaactgcactggcacccacagataccgtcgatgatcatatcaacggcaattgatggcttcaacgtgttgatgcctagcaacattgatacaaccattcctggcagcactgatgcagcaatgccatctgctgagccacagcactagccaacattgatacaagcattcctggcagccctgatgcaatgccatctgctgagccatagcactgatgtaggcgtttcttgtagcatggctcccagcttagaattccaggtctacgcagtggtgtatccgagtgcggttggcatttgtgttgagagtgctatgatgctatgtttgtgtttgagcatgatgggaaaggtttggttggctggcattccatgatatatgataagatttatt

SEQ ID NO: 33056 - protein, 523 aa, Zea mays subsp. mays
GASLRPPPAPEFRTSAASSPLPRTRTRSSGCYSAEVGRLVFLMGRTIKKAKKAQSKKSKKKTESSSSSNPAIASGPAKVWQPVVDTLEDGEELQFDPQAYNYLRGFGIGWSCLSFDVVRDQLGLVRSEFPHTFYGVAGTQAEKASWNYIGVFKLSNISGKKREPIPASAVEADTDVDSDSSSDEEDKEINEDTKPILHLKKVAHAGCVNRIRSMTQKPHISATWGDTGHVQVWDLSSFLNSLAESGTAAPKEDDIIHKHLPLKVFSGHKDEGYAIDWSPLVTGRLVSGDCNKCIHLWEPTSNNWNVDANPFVGHSASVEDLQWSPTEADIFASCSVDGTISIWDIRTGKKPCISVKAHEADVNVISWNKLASCMIASGCDDGSFSVRDLRSIEEDSLVAHFEYHKKAITSIEWSPHEASSLAVTSEDHQLTIWDLSLERDAEEEAEFRAKMKEQANAPEDLPPQLLFAHQGQRDLKELHWHPQIPSMIISTAIDGFNVLMPSNIDTTIPGSTDAAMPSAEPQH

SEQ ID NO: 33057 - protein, 481 aa, Zea mays subsp. mays
MGRTIKKAKKAQSKKSKKKTESSSSSNPAIASGPAKVWQPVVDTLEDGEELQFDPQAYNYLRGFGIGWSCLSFDVVRDQLGLVRSEFPHTFYGVAGTQAEKASWNYIGVFKLSNISGKKREPIPASAVEADTDVDSDSSSDEEDKEINEDTKPILHLKKVAHAGCVNRIRSMTQKPHISATWGDTGHVQVWDLSSFLNSLAESGTAAPKEDDIIHKHLPLKVFSGHKDEGYAIDWSPLVTGRLVSGDCNKCIHLWEPTSNNWNVDANPFVGHSASVEDLQWSPTEADIFASCSVDGTISIWDIRTGKKPCISVKAHEADVNVISWNKLASCMIASGCDDGSFSVRDLRSIEEDSLVAHFEYHKKAITSIEWSPHEASSLAVTSEDHQLTIWDLSLERDAEEEAEFRAKMKEQANAPEDLPPQLLFAHQGQRDLKELHWHPQIPSMIISTAIDGFNVLMPSNIDTTIPGSTDAAMPSAEPQH

SEQ ID NO: 33058 - protein, 310 aa, Zea mays subsp. mays
MTQKPHISATWGDTGHVQVWDLSSFLNSLAESGTAAPKEDDIIHKHLPLKVFSGHKDEGYAIDWSPLVTGRLVSGDCNKCIHLWEPTSNNWNVDANPFVGHSASVEDLQWSPTEADIFASCSVDGTISIWDIRTGKKPCISVKAHEADVNVISWNKLASCMIASGCDDGSFSVRDLRSIEEDSLVAHFEYHKKAITSIEWSPHEASSLAVTSEDHQLTIWDLSLERDAEEEAEFRAKMKEQANAPEDLPPQLLFAHQGQRDLKELHWHPQIPSMIISTAIDGFNVLMPSNIDTTIPGSTDAAMPSAEPQH

SEQ ID NO: 33059 - DNA, 1324 bp, Zea mays subsp. mays
aacaagaaagcgaccaccgctgtgaatcagcagagctgcagtgagagcaagtgagaggatcagaggaggcatccgtgaccaaagatcgagtagccaagaagaagagagatgaacgccgacttcggcgcgccccaaggagctcgcgggaggcctgcagcagcggcgggccctctaccagccccgcctcccgccatgcctccagggaccgacggtaagggcggagtacggtgacgcgaccacaaccatagatcccacctgtgcccaagccgtcgcgcaggccttcccgcacacctttggccagccgctcgtcagcttcgtcgcgccggccgccggcgccggcgccgttgaggagcgccacccgatcagggtgggcgtggtgttctctgggaggcagtcgccgggagggcacaacgtcgtctggggcctccatgacgcacttaaagcctacaatcctcagagcttgctctacggattcgtcggtggcacggagggactgtttgcaaacaagacgttggagatcacagacgatgttcttgcttcctataagaaccaaggtggtttcgatttgctcggtaggagtatcgatcagatccgcactactaagcaagtgaatgctgcaatgacaacatgccacagtctgaacttggatgggttggtcatcattggaggtgtgacctccaattcagatgctgcacagcttgcggagacccttattcagaataactgtaagaccaaggttgttggtgtgccagtttcattgaatggtgacctcaagaaccagtttgttgaaacaacagttggatttgatacagtatgtaaggttaattcacagcttgtaagcaatgtttgtcttgatgcgatctcagctggaaagtactattattttgttcgtctgatgggacgaaaagcatctcatgttgcctttgaatgtgcacttcaatcacacccaaacatgctcatcttaggcgaggaggtagcattgtcaaaactcacactgatggaaattataagcaagatttgtgatggagtacaagcaagggcaaaattagggaaatatcatggtgtgcttgttattcccgaaggacttatagaaagcattccagaaatgtatgctcttattcaggaaatcaatatccttcacaacagtaatgttcctgtggctgagatgtcatcacaactgtctccgtgggcagctgctctgttccagttcttgccacccttcatcaggagagagctgctgctccaccaagaatcagataactctgcgcagctgtcccaaattgacacggagcaactgctggcccatctagtagaaacagaaatg

SEQ ID NO: 33060 - protein, 235 aa, Zea mays subsp. mays
MTTCHSLNLDGLVIIGGVTSNSDAAQLAETLIQNNCKTKVVGVPVSLNGDLKNQFVETTVGFDTVCKVNSQLVSNVCLDAISAGKYYYFVRLMGRKASHVAFECALQSHPNMLILGEEVALSKLTLMEIISKICDGVQARAKLGKYHGVLVIPEGLIESIPEMYALIQEINILHNSNVPVAEMSSQLSPWAAALFQFLPPFIRRELLLHQESDNSAQLSQIDTEQLLAHLVETEM

SEQ ID NO: 33061 - protein, 143 aa, Zea mays subsp. mays
MGRKASHVAFECALQSHPNMLILGEEVALSKLTLMEIISKICDGVQARAKLGKYHGVLVIPEGLIESIPEMYALIQEINILHNSNVPVAEMSSQLSPWAAALFQFLPPFIRRELLLHQESDNSAQLSQIDTEQLLAHLVETEM

SEQ ID NO: 33062 - protein, 124 aa, Zea mays subsp. mays
MLILGEEVALSKLTLMEIISKICDGVQARAKLGKYHGVLVIPEGLIESIPEMYALIQEINILHNSNVPVAEMSSQLSPWAAALFQFLPPFIRRELLLHQESDNSAQLSQIDTEQLLAHLVETEM

SEQ ID NO: 33063 - DNA, 899 bp, Zea mays subsp. mays
ttattaggcttcatggatatgtctcaagagcaagaacaggattttggcgtactgctgaagcaaggtgcagaagggagggtatttgcttcgacatttgtgggacgaaagtgtgtaatcaaagagcgtttttcaaaaaagtaccgacacccattgttggactcgaagttgactctaaagcgcttaaatgctgaagctcggtgcatgacaaaagcaagaaggcttggtgttcctaccccagtactttatgctgtggatccagttctgcatactttgacctttgagcatgtggatggcttgtctgtcaaggatatacttcttaggtttggttcagatggggtcaatgaggaacgcctgaatgatattgccacacaaataggaaatgccattggcaaactacatgatggaggccttgttcatggtgatttgaccacgtcaaacatgataattaagaacagtaacaatcaattggttcttattgattttgggctgagtttcacttcgacaattcccgaggacaaagcggtggacctatatgtgctagagagagctttgatttccatgcattcgtcctgtggggatgtgatggagaaaatcctggctgcgtacagaaaggcttcgaagcaatggtgctccacccagaacaagctggctcaagtgaggcaacggggcaggaagcgcaccatggtcggatgaatggagaagaagaaaaatatgtggcatgcaatggatgtatgttattagaaagaccgtcgtctaaaacgagagtgatgtaccaccattgctgtattttttttagcggtgagtggctttggctgctgtaacgtttgtgaaatctggaactatgttgcatggctgcaccatttggtcagaactcagaagcagagtgccgtttcatccgg

SEQ ID NO: 33064 - protein, 230 aa, Zea mays subsp. mays
LLGFMDMSQEQEQDFGVLLKQGAEGRVFASTFVGRKCVIKERFSKKYRHPLLDSKLTLKRLNAEARCMTKARRLGVPTPVLYAVDPVLHTLTFEHVDGLSVKDILLRFGSDGVNEERLNDIATQIGNAIGKLHDGGLVHGDLTTSNMIIKNSNNQLVLIDFGLSFTSTIPEDKAVDLYVLERALISMHSSCGDVMEKILAAYRKASKQWCSTQNKLAQVRQRGRKRTMVG

SEQ ID NO: 33065 - protein, 226 aa, Zea mays subsp. mays
MDMSQEQEQDFGVLLKQGAEGRVFASTFVGRKCVIKERFSKKYRHPLLDSKLTLKRLNAEARCMTKARRLGVPTPVLYAVDPVLHTLTFEHVDGLSVKDILLRFGSDGVNEERLNDIATQIGNAIGKLHDGGLVHGDLTTSNMIIKNSNNQLVLIDFGLSFTSTIPEDKAVDLYVLERALISMHSSCGDVMEKILAAYRKASKQWCSTQNKLAQVRQRGRKRTMVG

SEQ ID NO: 33066 - protein, 224 aa, Zea mays subsp. mays
MSQEQEQDFGVLLKQGAEGRVFASTFVGRKCVIKERFSKKYRHPLLDSKLTLKRLNAEARCMTKARRLGVPTPVLYAVDPVLHTLTFEHVDGLSVKDILLRFGSDGVNEERLNDIATQIGNAIGKLHDGGLVHGDLTTSNMIIKNSNNQLVLIDFGLSFTSTIPEDKAVDLYVLERALISMHSSCGDVMEKILAAYRKASKQWCSTQNKLAQVRQRGRKRTMVG

SEQ ID NO: 33067 - DNA, 1220 bp, Zea mays subsp. mays
agccgctttacaactccccaccccatcccatccacacacacttcacccagcgcggcggccgccggccgccggcaatggaggccgtggcgcacagcggcgactacctttggcggttcgtggcggagacagagtggtacaacgaggttgtcctcagcgccgtggcgccaggcgactggtggcgcggcctgccgcacccggtgcagtcatggatgcgcaactgcgtcggcggttacctcctctatttcatctctggtttcctctggtgcttcgtcatctactactggaagcgccacgcctacatccccaaagatgccatccccacaaatgacgctatgaagaagcaaatagttgtagcatcgaaggctatgcctttttactgcgctcttccaactttatctgaatatatgattgagagcggatggactcagtgctacttcaatatcagcgaaattggtttttctatgtacctctgttatatggctatgtatctcatctttgtggagtttggaatttactggatgcacagggagttgcatgacataaaaccattatacaaatatctgcatgcaacccaccatatttacaacaaggagaataccttgtctccatttgctggacttgcatttcatccactggatggtattctgcaagcaataccacatgtgttcgcgctcttcctctttccaacgcacttcaggacacatattgcactcttgttcctagaggctgtgtggacaacaaacatccacgactgcattcatggcaagatatggccagtcatgggtgctggatatcacaccattcaccatacgacttaccgtcacaactatggccactacaccatctggatggactggatgtttggtacgctcaatgagccagaagatatcctcaagaaggcttgagtttctcggagctgtggtattcctatggtgctgctgctggaactgctcgatctgttcccagtgtttctaatccgttgagcctgttcagcactgtctgtttatgtaggcatcagtgtgttaattactttgctaggttcatatggctttgtgcttattctgtaatttagcgatgtttgtctcatgacgcaacggagttcaggacgaataaaactttgctagacacattctggattccagttgcttgtacaatgttggaactcaactgtcaatataggatgtaaaacggattccttctagtcttgtacctggtgagtt

SEQ ID NO: 33068 - protein, 300 aa, Zea mays subsp. mays
PLYNSPPHPIHTHFTQRGGRRPPAMEAVAHSGDYLWRFVAETEWYNEVVLSAVAPGDWWRGLPHPVQSWMRNCVGGYLLYFISGFLWCFVIYYWKRHAYIPKDAIPTNDAMKKQIVVASKAMPFYCALPTLSEYMIESGWTQCYFNISEIGFSMYLCYMAMYLIFVEFGIYWMHRELHDIKPLYKYLHATHHIYNKENTLSPFAGLAFHPLDGILQAIPHVFALFLFPTHFRTHIALLFLEAVWTTNIHDCIHGKIWPVMGAGYHTIHHTTYRHNYGHYTIWMDWMFGTLNEPEDILKKA

SEQ ID NO: 33069 - protein, 276 aa, Zea mays subsp. mays
MEAVAHSGDYLWRFVAETEWYNEVVLSAVAPGDWWRGLPHPVQSWMRNCVGGYLLYFISGFLWCFVIYYWKRHAYIPKDAIPTNDAMKKQIVVASKAMPFYCALPTLSEYMIESGWTQCYFNISEIGFSMYLCYMAMYLIFVEFGIYWMHRELHDIKPLYKYLHATHHIYNKENTLSPFAGLAFHPLDGILQAIPHVFALFLFPTHFRTHIALLFLEAVWTTNIHDCIHGKIWPVMGAGYHTIHHTTYRHNYGHYTIWMDWMFGTLNEPEDILKKA

SEQ ID NO: 33070 - protein, 231 aa, Zea mays subsp. mays
MRNCVGGYLLYFISGFLWCFVIYYWKRHAYIPKDAIPTNDAMKKQIVVASKAMPFYCALPTLSEYMIESGWTQCYFNISEIGFSMYLCYMAMYLIFVEFGIYWMHRELHDIKPLYKYLHATHHIYNKENTLSPFAGLAFHPLDGILQAIPHVFALFLFPTHFRTHIALLFLEAVWTTNIHDCIHGKIWPVMGAGYHTIHHTTYRHNYGHYTIWMDWMFGTLNEPEDILKKA

SEQ ID NO: 33071 - DNA, 1445 bp, Zea mays subsp. mays
ggccggggacctcacagccacatctctccactgctccgtccagcgcgtccacctcccaaacccctactcccccaggaagcaatggcttcccccacccagggccaggtcatcacctgcaaagcggcggtggcgtacgagccgaacaagccactcgtgatcgaggacgtgcaggtggcgccgccgcaggccggcgaggtccgcgtcaagatcctcttcaccgcgctctgccacaccgaccactacacctggagcggcaaggatcctgagggtctttttccttgcattcttggccacgaagctgctggaattgtggaaagtgtcggtgaaggagtaactgatgtgcagcctggggatcatgtcattccttgctaccaagcagaatgcaaagaatgcaagttttgcaagagcggaaagaccaacctctgtggtaaggtccgtagtgccacaggcgtaggtgtcatgatgaatgatatgaagagcaggttctctgtaaatggaaagcccatttaccatttcatggggacatcgacattcagccagtacactgtggtgcatgatgtcagtgttgcaaagatcaacccacaggcacccttagataaagtctgcctgctcggttgtggtgttcctactggtcttggagcggtgtggaatactgcaaaggttgaatctggctcagttgttgctgtttttggccttggaacagttggacttgcagttgctgagggagcaaaagctgctggtgcttctcgagttattggcattgacatcgacaataaaaagtttgatgttgcaaagaactttggagttacagaatttgttaacccaaaagagcatgacaaaccgatacagcaggtcctggtcgatcttacagatggcggcgtggattacagctttgagtgcattggaaatgtttcgattatgagggctgcactggaatgctccgacaagggctggggaacctccgtcatcgtcggagttgccgcctctggccaggagatctccacacgaccattccagctcgtgactggtcgtgtctggaagggaaccgcttttggtggcttcaagagccggacccaggtcccatggcttgttgacaagtacatgaagaaggaaattaaggtggacgagtacattacgcacaacatgaacctggctgacatcaacgacgccttccacctgctgcacgaaggtggctgtctgcgttgtgtgctggcgatgcagatctgaaattcctaagctaagcagtttttggatgtgtcggcatagactgtcttttgttttggaactagaattcctttttgcctcgttaggcctggacccactgtataatgctatgttgctttggatggctgacgatggttaccgctgtgttgctagccatgtggtacttgatctgtatcacggttgcaaataagtgctgtttctaaaacactccctcggtgaat

SEQ ID NO: 33072 - protein, 408 aa, Zea mays subsp. mays
GRGPHSHISPLLRPARPPPKPLLPQEAMASPTQGQVITCKAAVAYEPNKPLVIEDVQVAPPQAGEVRVKILFTALCHTDHYTWSGKDPEGLFPCILGHEAAGIVESVGEGVTDVQPGDHVIPCYQAECKECKFCKSGKTNLCGKVRSATGVGVMMNDMKSRFSVNGKPIYHFMGTSTFSQYTVVHDVSVAKINPQAPLDKVCLLGCGVPTGLGAVWNTAKVESGSVVAVFGLGTVGLAVAEGAKAAGASRVIGIDIDNKKFDVAKNFGVTEFVNPKEHDKPIQQVLVDLTDGGVDYSFECIGNVSIMRAALECSDKGWGTSVIVGVAASGQEISTRPFQLVTGRVWKGTAFGGFKSRTQVPWLVDKYMKKEIKVDEYITHNMNLADINDAFHLLHEGGCLRCVLAMQI

SEQ ID NO: 33073 - protein, 381 aa, Zea mays subsp. mays
MASPTQGQVITCKAAVAYEPNKPLVIEDVQVAPPQAGEVRVKILFTALCHTDHYTWSGKDPEGLFPCILGHEAAGIVESVGEGVTDVQPGDHVIPCYQAECKECKFCKSGKTNLCGKVRSATGVGVMMNDMKSRFSVNGKPIYHFMGTSTFSQYTVVHDVSVAKINPQAPLDKVCLLGCGVPTGLGAVWNTAKVESGSVVAVFGLGTVGLAVAEGAKAAGASRVIGIDIDNKKFDVAKNFGVTEFVNPKEHDKPIQQVLVDLTDGGVDYSFECIGNVSIMRAALECSDKGWGTSVIVGVAASGQEISTRPFQLVTGRVWKGTAFGGFKSRTQVPWLVDKYMKKEIKVDEYITHNMNLADINDAFHLLHEGGCLRCVLAMQI

SEQ ID NO: 33074 - protein, 255 aa, Zea mays subsp. mays
MMNDMKSRFSVNGKPIYHFMGTSTFSQYTVVHDVSVAKINPQAPLDKVCLLGCGVPTGLGAVWNTAKVESGSVVAVFGLGTVGLAVAEGAKAAGASRVIGIDIDNKKFDVAKNFGVTEFVNPKEHDKPIQQVLVDLTDGGVDYSFECIGNVSIMRAALECSDKGWGTSVIVGVAASGQEISTRPFQLVTGRVWKGTAFGGFKSRTQVPWLVDKYMKKEIKVDEYITHNMNLADINDAFHLLHEGGCLRCVLAMQI

SEQ ID NO: 33075 - DNA, 1128 bp, Zea mays subsp. mays
atctcctatccttcggccgcgtcagtgcgtcacgctagtagccggtaggcccctagggatgtccatggcggcgagccgccgcctcctccatctcctgccgcggctggagctgtgcctgcggtcccgtgcgcttagcatccccttgtcttcgcggtacatctctaccctgacagccccacgccgccggcccaactccaactgatttctctgcccccccaaattcagaaacttttgcttctttgcagggcacaggggatggctcgtcggaagcttgtgacctgccgacaaggtgctttcgagcaggggaatgcagcgagggataaggccgtgccgattccagataaagtgctccgtcattgcaagtacgccaatggcagggccctagacctagagcccattgaaaagaacttcgccaacgagtctatgcaattttctttcgaagaggagactgacgatatggtgtgcgaaattagcgaaagcgtggtgcgggatgtggagaaggctgcaattgaattgcttgctgccagagctttcactgtctctgagcttaggaagaaactacgaagtaagaagtatccttttgatacaattgatgccgtgattgctaatttcaaatcaaggggtttgttgaatgatggtttttatgctgaatcattttcgcgatcccggtggctaacatcaacatggggtccaaggcgaataaaacaggcacttcaccaaaaaggtgtcccagaggcagaagtagatcaggcaacgagaagagtgttccaggatggcgacgactatggaaaggaggcaacgttcggcatgtccgaagcttccatggatcatctgtttgctcaggcgtccaaacagtggcagcgtgcgcaaagcttgaccctggagagccgacgtgcgcgcatgttgaggtggcttcagtaccgagggttcaactgggctgtgaccaatgccgttatcaggaagctggaggctcagcaccctccaccctgactcttctgactagactaggtgtgtgtccgtgcgttgcaacgggtgtacgctgggatgagtatagacacatatctaatcggatcttatatttcctgggggggtctgtagaaagtttactcgaaagccaaatatgttaag

SEQ ID NO: 33076 - protein, 244 aa, Zea mays subsp. mays
MARRKLVTCRQGAFEQGNAARDKAVPIPDKVLRHCKYANGRALDLEPIEKNFANESMQFSFEEETDDMVCEISESVVRDVEKAAIELLAARAFTVSELRKKLRSKKYPFDTIDAVIANFKSRGLLNDGFYAESFSRSRWLTSTWGPRRIKQALHQKGVPEAEVDQATRRVFQDGDDYGKEATFGMSEASMDHLFAQASKQWQRAQSLTLESRRARMLRWLQYRGFNWAVTNAVIRKLEAQHPPP

SEQ ID NO: 33077 - protein, 188 aa, Zea mays subsp. mays
MQFSFEEETDDMVCEISESVVRDVEKAAIELLAARAFTVSELRKKLRSKKYPFDTIDAVIANFKSRGLLNDGFYAESFSRSRWLTSTWGPRRIKQALHQKGVPEAEVDQATRRVFQDGDDYGKEATFGMSEASMDHLFAQASKQWQRAQSLTLESRRARMLRWLQYRGFNWAVTNAVIRKLEAQHPPP

SEQ ID NO: 33078 - protein, 177 aa, Zea mays subsp. mays
MVCEISESVVRDVEKAAIELLAARAFTVSELRKKLRSKKYPFDTIDAVIANFKSRGLLNDGFYAESFSRSRWLTSTWGPRRIKQALHQKGVPEAEVDQATRRVFQDGDDYGKEATFGMSEASMDHLFAQASKQWQRAQSLTLESRRARMLRWLQYRGFNWAVTNAVIRKLEAQHPPP

SEQ ID NO: 33079 - DNA, 1422 bp, Zea mays subsp. mays
gaccaacccaaccgtgggggtgccgggtgccctacggcctacgggccggagcagcgcttgggagccgcggcacggaggcatcgacgccgttgagctcgaggcgaccggcggctggcggccccgccacagcgttgctgtggcagtgtggcttcttctggtttctgcgggctcagcgcggaggcctattgcaggattaaatggcaaatagggcaagatggatgatgaagtacgaaaagggtcttgttgatatacttcatgagaacaacacttcacattatcgtacccaaaacggttggagaacataggggtggaggaaaattgttagggatttcaatgtacggtaccctgaagcaaagtttagtaaaatgcaaatccaggaacatgagactcaattgaagaaagactacaggtcgataaaatatatcctccaacgtgatggtgtctcgtgggaccagagtgcgtccatgtttagaacaacagatgaaatctgggatgagattatcgaggatatgcccaaggcacggaagtaccaaagcaagagctttccattgcttgactcactagaaccgttatttgatggtcctattcctgaaggggcacaaaaatcaccttccagcatacctcagaatgttggtggaaacgttggtgatggaggcaacaatatcagcacagtcccagacttgtctgaaagacctagtggaacaattaacacaagcgttaatgaggcatggaataatatcagcctacttaagcaaacagcattgggaccccaaggtatagacaatctcgattctcgacacgctgcaaaatcgtgataaagaggtgctggaacggctacagcatggctcggaccggaggccgaagagagcggatgaacaggcacagtcaagttcttgcgtagaactgcagagagacaggcgcaagaagcggaaggccccagacatccagcagatcatggagacctatatgaatttcagaatgaagcaacctcgcgtcaaacaacgaagagcaaaggacggtgaccagttcacgatttcaagctgtatcaaggctctgcacaccatggctgatatgtcagatgaggtcaaggtattagcctctgatgttttcaaggacgctgagaacagggagacctttctttcgtatgaacccaggctgcgcaccttgtggctgaagagggaagttggcaagctactctcctatagaagtggcagcccttgcttgttttgtttgctacccgtgcctaggcttcatttaacaaactctactagtgacttaacttgttccatgcacagtacgtcactatactgcttagtcattcatgatcaatgatgtgcttgctgcatgtagtgcttccaaaattttgcatctgtgccaatacactgttaaaaaatgcgacagaatgcttgtttcttgacagct

SEQ ID NO: 33080 - protein, 149 aa, Zea mays subsp. mays
MQIQEHETQLKKDYRSIKYILQRDGVSWDQSASMFRTTDEIWDEIIEDMPKARKYQSKSFPLLDSLEPLFDGPIPEGAQKSPSSIPQNVGGNVGDGGNNISTVPDLSERPSGTINTSVNEAWNNISLLKQTALGPQGIDNLDSRHAAKS

SEQ ID NO: 33081 - protein, 125 aa, Zea mays subsp. mays
METYMNFRMKQPRVKQRRAKDGDQFTISSCIKALHTMADMSDEVKVLASDVFKDAENRETFLSYEPRLRTLWLKREVGKLLSYRSGSPCLFCLLPVPRLHLTNSTSDLTCSMHSTSLYCLVIHDQ

SEQ ID NO: 33082 - protein, 121 aa, Zea mays subsp. mays
MNFRMKQPRVKQRRAKDGDQFTISSCIKALHTMADMSDEVKVLASDVFKDAENRETFLSYEPRLRTLWLKREVGKLLSYRSGSPCLFCLLPVPRLHLTNSTSDLTCSMHSTSLYCLVIHDQ

SEQ ID NO: 33083 - DNA, 1232 bp, Zea mays subsp. mays
agatctcccccatttctcctccacgccgccccctccgcatttcccgtgctcctctcgttccggcatggcggagcagacgcagccacaaggggaaggcggcgctagccccaagcacgagtccctgatggagaagctcgccgacaagctccacgtcggcggcggcaaggccgactcctcctcctcctcggactccgacagtgacgagcggccccgcccctcggcaccgcccgccgacgagctcaagcagccctccttctccgacgccgccgccacggcggccgccgaggccaaggccaaggtgttccgtctcttcggccgcgagcagcccatccacaaggccctcggtggcggcaagcctgctgatgtgttcttgtggaggaacaagaacatctctgctggaatacttggtggtgccacagcaatctggatcttatttgaattgcttggctaccatctccttacttttgtttgccatggtctcatattcgccctgggtgttctctttctctggtccaatgcttcatcgtttatccacaaggctccaccaaagatcccagaggtgatcattcctgaagatttagttgtcaacattgcgctatccactcgttacgagatcaacagagcctttgccaatctccgccagattgctcttggccgggacctaaagaagttcctaatggttattgctgggttttggttgctttctgttcttggaagctgctgcaacttcttgaccttagtttacattgtctttgtggtgctgcacacagtacctgtcctgtatgagaagtacgaagatcagattgactcgtatggcgagaaggggtgggctgaaattaagaagcagtatgccgtgttcgatgagaaggttctgagcaaagtacccaggggtcctgcgaaagacaagaagcactagatgcaagtgattcgaggtccctgttagtagggaatgctagcaaaaccggttcgagtttctccggaggggcagcacttgtgggtgtgagcaccagtttgccacctgtgcattacgttgcgtatggctgcttagttgtttggtcttgatgggagtaagcccgaattgctagctttgcgcttcatcagtgatgcagacgcagcatacgaatttctgtagtgctgtttgagtttgatctgtgttgtatgatgtgtgcagactgtgcttgcgacacttttttggtacttataatcgatgcattttggaatttgatgatttc

SEQ ID NO: 33084 - protein, 304 aa, Zea mays subsp. mays
DLPHFSSTPPPPHFPCSSRSGMAEQTQPQGEGGASPKHESLMEKLADKLHVGGGKADSSSSSDSDSDERPRPSAPPADELKQPSFSDAAATAAAEAKAKVFRLFGREQPIHKALGGGKPADVFLWRNKNISAGILGGATAIWILFELLGYHLLTFVCHGLIFALGVLFLWSNASSFIHKAPPKIPEVIIPEDLVVNIALSTRYEINRAFANLRQIALGRDLKKFLMVIAGFWLLSVLGSCCNFLTLVYIVFVVLHTVPVLYEKYEDQIDSYGEKGWAEIKKQYAVFDEKVLSKVPRGPAKDKKH

SEQ ID NO: 33085 - protein, 283 aa, Zea mays subsp. mays
MAEQTQPQGEGGASPKHESLMEKLADKLHVGGGKADSSSSSDSDSDERPRPSAPPADELKQPSFSDAAATAAAEAKAKVFRLFGREQPIHKALGGGKPADVFLWRNKNISAGILGGATAIWILFELLGYHLLTFVCHGLIFALGVLFLWSNASSFIHKAPPKIPEVIIPEDLVVNIALSTRYEINRAFANLRQIALGRDLKKFLMVIAGFWLLSVLGSCCNFLTLVYIVFVVLHTVPVLYEKYEDQIDSYGEKGWAEIKKQYAVFDEKVLSKVPRGPAKDKKH

SEQ ID NO: 33086 - protein, 263 aa, Zea mays subsp. mays
MEKLADKLHVGGGKADSSSSSDSDSDERPRPSAPPADELKQPSFSDAAATAAAEAKAKVFRLFGREQPIHKALGGGKPADVFLWRNKNISAGILGGATAIWILFELLGYHLLTFVCHGLIFALGVLFLWSNASSFIHKAPPKIPEVIIPEDLVVNIALSTRYEINRAFANLRQIALGRDLKKFLMVIAGFWLLSVLGSCCNFLTLVYIVFVVLHTVPVLYEKYEDQIDSYGEKGWAEIKKQYAVFDEKVLSKVPRGPAKDKKH

SEQ ID NO: 33087 - DNA, 1425 bp, Zea mays subsp. mays
aatcattgatccctcaccaggttgaaccaattgcttcccgtacaatttttgccggtcctgtcttcggtaagacggattccgattccgttgttttcttgccaaatccttcgcagcttgggggcggtttcgctccggttcttgcgcttcggctccaggccatggagcagcggaggtggctcgcggtagccgttttgatgtgcctgctggtgctttgctccgggagagaactgaagaccaaacatgtgcccatatatgacccagtgctggcccggacacttgctgaatatacttctgctgtctatactgctgaccttacccaactgtttacatggacatgtgagagatgttgtgacttaacagaggggttcgaggtgatagagctgattgttgatgtgaaaaattgcttacaggcatatgttggatttgctagagacatgaatgcagttatagttgtgttcaggggcactcaagaaaacagcattcagaactggatcgaagatttattctggaaacaacttgatctcgactacccaggcatgcctgaagcaaaggttcacagtggattttattctgcttaccacaacacaacaatgcgtgacagagttatgagaggtgttaaaaatactaggaaactgtatggtgatattcccatcatggtcacaggacattccatgggaggagctatggcttcattttgtgcccttgatcttattgttaatgttgggttcaaggatgtgtcactcatgacatttgggcaacctcggattggcaatgctatatttgcatctaatttcaaaagatatttgccgaatgcaattcgattgatcaatgcacatgatattgtgcctcatttacccccatactatcactactttccacaaaagacataccaccattttccacgagaggtatggattcataatgttggcctaggaagcctcatatattcgattgaggaaatttgtgatgattctggagaagacccgacttgtagcaggtccgtgagtggaaacagcgtgcatgaccatgtacactatcttggcatcagcatgcatgccgagtcatggggacattgcagaattgttacggacaatagtaccctgccacagcagtataagatggatcctgatggcaatataatcttgtcgaagcagcctggattatcagtaaatgaactacacagtgcacagtgaaaaagtcaagatagcgttaataaatttcatttcttatatgatcctctggtggactcgaaggggatatattaggacggacgaccttggctacaaaaaaaaaggcagcaatcttcattccattggatgtatgtacatatgtctgtgatgttagttccaaaccttagcatctgctatctgtatatgatgtttcagtaaaatcaaacttctctttacacggaatactgttttggtc

SEQ ID NO: 33088 - protein, 396 aa, Zea mays subsp. mays
SLIPHQVEPIASRTIFAGPVFGKTDSDSVVFLPNPSQLGGGFAPVLALRLQAMEQRRWLAVAVLMCLLVLCSGRELKTKHVPIYDPVLARTLAEYTSAVYTADLTQLFTWTCERCCDLTEGFEVIELIVDVKNCLQAYVGFARDMNAVIVVFRGTQENSIQNWIEDLFWKQLDLDYPGMPEAKVHSGFYSAYHNTTMRDRVMRGVKNTRKLYGDIPIMVTGHSMGGAMASFCALDLIVNVGFKDVSLMTFGQPRIGNAIFASNFKRYLPNAIRLINAHDIVPHLPPYYHYFPQKTYHHFPREVWIHNVGLGSLIYSIEEICDDSGEDPTCSRSVSGNSVHDHVHYLGISMHAESWGHCRIVTDNSTLPQQYKMDPDGNIILSKQPGLSVNELHSAQ

SEQ ID NO: 33089 - protein, 344 aa, Zea mays subsp. mays
MEQRRWLAVAVLMCLLVLCSGRELKTKHVPIYDPVLARTLAEYTSAVYTADLTQLFTWTCERCCDLTEGFEVIELIVDVKNCLQAYVGFARDMNAVIVVFRGTQENSIQNWIEDLFWKQLDLDYPGMPEAKVHSGFYSAYHNTTMRDRVMRGVKNTRKLYGDIPIMVTGHSMGGAMASFCALDLIVNVGFKDVSLMTFGQPRIGNAIFASNFKRYLPNAIRLINAHDIVPHLPPYYHYFPQKTYHHFPREVWIHNVGLGSLIYSIEEICDDSGEDPTCSRSVSGNSVHDHVHYLGISMHAESWGHCRIVTDNSTLPQQYKMDPDGNIILSKQPGLSVNELHSAQ

SEQ ID NO: 33090 - protein, 332 aa, Zea mays subsp. mays
MCLLVLCSGRELKTKHVPIYDPVLARTLAEYTSAVYTADLTQLFTWTCERCCDLTEGFEVIELIVDVKNCLQAYVGFARDMNAVIVVFRGTQENSIQNWIEDLFWKQLDLDYPGMPEAKVHSGFYSAYHNTTMRDRVMRGVKNTRKLYGDIPIMVTGHSMGGAMASFCALDLIVNVGFKDVSLMTFGQPRIGNAIFASNFKRYLPNAIRLINAHDIVPHLPPYYHYFPQKTYHHFPREVWIHNVGLGSLIYSIEEICDDSGEDPTCSRSVSGNSVHDHVHYLGISMHAESWGHCRIVTDNSTLPQQYKMDPDGNIILSKQPGLSVNELHSAQ

SEQ ID NO: 33091 - DNA, 919 bp, Zea mays subsp. mays
gttccagacgccttcagcgagccgatccacgcgcatcgccgtgagctcctcctccagcgcggcgccgcgccgctgggcgtgaccggcgccgacgaagccagccgcgcagggcgccagcgtgccggcgaacacgacctcctcgccgtcctcgtccacgcctcgcctcgcggacctgcggatgaagcatcccacctggacgctgccgagcctgtcgccgtacgcgctggtgttggcctcgccgatcacctgtagcagcccggcctcggccttcccctcgccgtccacgaccacggcctccacagcctccttggccgcgctccgctccacggcggcgaacaggcacgctgccgcgcagcagagggaggtggaggccacgagtggcaggaagaaggccgcggctcgcgggaacgccgcggcggcgcagacgagcgcggccacggcggctgccgtcgtcgtcgaagagccggacgcgccggcgagggagcggcggcacgcccgcagctgcagctcaacggcgcggagcttgtcgtggagcactccgcgcagagcgtggcagctggcggcggcgagtctgggagcagccatggctgtgctgctgtgtgctgtgcctgtgcttgataggagagtttgcgagcgaactgatggtgcggcgaattaagctagccgtgggcgcgtggttggcctatggacgatggagaagaacatattctcgtggtgcacactaatgtgacatgtcggctcgtgcatggcgtaatcgcctagcttttgcgaatggaggacggggacgggggttggggttggacgaccggcaaagaatcttgtgacttgtgcagttgtgctcgtgtgtcatagcacaacacaatcgctttttactccgtgctattatttattattattgaatgttatcatttattattgg

SEQ ID NO: 33092 - protein, 159 aa, Zea mays subsp. mays
MKHPTWTLPSLSPYALVLASPITCSSPASAFPSPSTTTASTASLAALRSTAANRHAAAQQREVEATSGRKKAAARGNAAAAQTSAATAAAVVVEEPDAPARERRHARSCSSTARSLSWSTPRRAWQLAAASLGAAMAVLLCAVPVLDRRVCERTDGAAN

SEQ ID NO: 33093 - protein, 83 aa, Zea mays subsp. mays
VPDAFSEPIHAHRRELLLQRGAAPLGVTGADEASRAGRQRAGEHDLLAVLVHASPRGPADEASHLDAAEPVAVRAGVGLADHL

SEQ ID NO: 33094 - DNA, 1765 bp, Zea mays subsp. mays
ctccccaaaattctcatctagtcaccggccattccgttgtgtccataggctgtcagtcacttccagtcctagcccactcctccgatgctccaatcatcaacactctctacctgtgtccgtgtgctcttctcctctgcaccaccaaccaaccagtgctgtcctccgccgatccactgacctaccgcgagcgccaatggcgacccgccgcggtcctcgccgccacattagcgctgttcctcggcgccgccgccgcaacggccgcgacggctgcggcggaggcggaccggatcggcaggctgccgggccagccgccggtcaacttctccatgtactccggctacgtcaccgtggacgcggcggcggggcgggccctcttctactggttcatcgaggcggccggcgtgcccgcggagtccgcgccgctcgtgctgtggctcaacggcgggcccgggtgctcctccgtcggctacggcgcgtcagaggagctcggcgccttccggatcaacgccgacggcaggacgctctacttgaacccctacccctggaataaagtggcgaacatgctgttcttggactcgccggccggcgtcggctactcatactccaactccacctccgatctgtacactgccggtgacaacaagacagcccatgactcgtacaatttcttggtgaactggctggagcggtttccacaatacaagcatcgcgatttctacatcacaggagagagctacgcaggccactacgtgcctcagttgtctcagctagtctaccggaacaacaaaggcatcgagaagccgatcctaaacttcaaaggcttcatggttggaaatgcggtaattgacgattaccacgacttcatcggcacattcgagtacttgtggacgcacgggctgatctctgacgaaacctacgagaagctgcggcttgcctgccagttcgacgtatctgagcatgcgtcgaaggagtgcaacaaggtcttcgacatcgccgaggccgaggaaggcaatatcgatgcgtacagcatctacacgccgacttgcaagaagacttcactccacaagcgcaggctaatcagaggaagaacgccctggttgcccagagggtacgatccctgcacggagaagtactccacgaagtactacaacctacctgaggtgcagagagctctacacgccaatgtcaccggaataccgtatccctgggtaacctgcagtgacccagtgtatgatttttggaaagattcaccgaggtccatgcttcctatctaccgtgaactcatcgccgcgggcataaggatatgggttttcagtggcgacgctgattccgttgtcccgctcaccgcgacaaggtactccattgacgccctctttctaccgactatcacgaactggtatccttggtacgacgacgaagaggtcggtgggtggtgccaggtgtacgaggggctgacactggtgacggtccgaggcgcagggcacgaggttcccctgcaccggccgcggcagggcctgaagctgttcgagcacttcctgcggggtgagcccatgcccaggcctgtagatagcgtccagtcgttttagaactggttgctgtctccccgcttggtgaaggaggagacctggctgcgctgcgcattcttgttgctgtaaactcatccgtcacactccgttgttaggatggatttgctgaaaatcagaacataatgttgctcgtttcagtgagcagattgggtatttagcaatgtctcgttttgacagtg

SEQ ID NO: 33095 - protein, 527 aa, Zea mays subsp. mays
PQNSHLVTGHSVVSIGCQSLPVLAHSSDAPIINTLYLCPCALLLCTTNQPVLSSADPLTYRERQWRPAAVLAATLALFLGAAAATAATAAAEADRIGRLPGQPPVNFSMYSGYVTVDAAAGRALFYWFIEAAGVPAESAPLVLWLNGGPGCSSVGYGASEELGAFRINADGRTLYLNPYPWNKVANMLFLDSPAGVGYSYSNSTSDLYTAGDNKTAHDSYNFLVNWLERFPQYKHRDFYITGESYAGHYVPQLSQLVYRNNKGIEKPILNFKGFMVGNAVIDDYHDFIGTFEYLWTHGLISDETYEKLRLACQFDVSEHASKECNKVFDIAEAEEGNIDAYSIYTPTCKKTSLHKRRLIRGRTPWLPRGYDPCTEKYSTKYYNLPEVQRALHANVTGIPYPWVTCSDPVYDFWKDSPRSMLPIYRELIAAGIRIWVFSGDADSVVPLTATRYSIDALFLPTITNWYPWYDDEEVGGWCQVYEGLTLVTVRGAGHEVPLHRPRQGLKLFEHFLRGEPMPRPVDSVQSF

SEQ ID NO: 33096 - protein, 419 aa, Zea mays subsp. mays
MYSGYVTVDAAAGRALFYWFIEAAGVPAESAPLVLWLNGGPGCSSVGYGASEELGAFRINADGRTLYLNPYPWNKVANMLFLDSPAGVGYSYSNSTSDLYTAGDNKTAHDSYNFLVNWLERFPQYKHRDFYITGESYAGHYVPQLSQLVYRNNKGIEKPILNFKGFMVGNAVIDDYHDFIGTFEYLWTHGLISDETYEKLRLACQFDVSEHASKECNKVFDIAEAEEGNIDAYSIYTPTCKKTSLHKRRLIRGRTPWLPRGYDPCTEKYSTKYYNLPEVQRALHANVTGIPYPWVTCSDPVYDFWKDSPRSMLPIYRELIAAGIRIWVFSGDADSVVPLTATRYSIDALFLPTITNWYPWYDDEEVGGWCQVYEGLTLVTVRGAGHEVPLHRPRQGLKLFEHFLRGEPMPRPVDSVQSF

SEQ ID NO: 33097 - protein, 341 aa, Zea mays subsp. mays
MLFLDSPAGVGYSYSNSTSDLYTAGDNKTAHDSYNFLVNWLERFPQYKHRDFYITGESYAGHYVPQLSQLVYRNNKGIEKPILNFKGFMVGNAVIDDYHDFIGTFEYLWTHGLISDETYEKLRLACQFDVSEHASKECNKVFDIAEAEEGNIDAYSIYTPTCKKTSLHKRRLIRGRTPWLPRGYDPCTEKYSTKYYNLPEVQRALHANVTGIPYPWVTCSDPVYDFWKDSPRSMLPIYRELIAAGIRIWVFSGDADSVVPLTATRYSIDALFLPTITNWYPWYDDEEVGGWCQVYEGLTLVTVRGAGHEVPLHRPRQGLKLFEHFLRGEPMPRPVDSVQSF

SEQ ID NO: 33098 - DNA, 1475 bp, Zea mays subsp. mays
  misc_feature (964)..(964): n is a, c, g, or t
  misc_feature (1009)..(1009): n is a, c, g, or t
  misc_feature (1039)..(1040): n is a, c, g, or t
  misc_feature (1096)..(1096): n is a, c, g, or t
agggtctggggccggtcagtgttgtgccgcccgttgaaaccaccacgtaacgtctcggacggctagacgcggtccacgctagctccttgctatctccgtcctactcctcctcatactttaccgcaaagcgcgcaccacgaattgcacctaaccattttcgctaatctccctccaccgagccggccgaatcaaatcgaaccgcgggcagcgcgcacgcgcagcgactgccggcgatggcgagcctcaccctgccgccggcgccccccaacccacgccaggacgccatcgacctccacaaggccttcaaagggtttggatgtgacagtacaacagtgataaacatacttactcatcgcgattcggtgcagcgtggactcattcaacaggaatacagggctatgtatcatgaggaactctcccaccgtatttcatctgaactcagtggaaaccacaagaaagctatggttgctggggattcttgatcctgctggacgtgatgcaactgttttgagagaagctctaaatggtgacactatggatctgagagcagccactgagattatatgttccaggacaccatcacagttgcaaataatgaaacagacttattatgctagattcggtacttatcttgagcatgacattgctcaccacacatccggtgatcaccagaagcttttacttgcatatatggggattccacgctatgaaggtcccgaggttgatcctacaattgtgacacatgatgcaaaggatttgtacaaagctggtgagaaaaggctgggtacggacgagaagatttttatccgtgttttcactgaacgcagttgggcacacttggcatctgtttcttctgcttaccatcatatgtatgaccggaaattagagaaggttatcaagagcgaaacttctggaaactttgaatttgcacttttgactatcctcagatgcgcggaaaacccancaaagtattttgctaagctcttacgaaaggccatgaaaggtttangcactgatgacatgacacttataagggtgnnggtgacgaggaccgagattgacatgcaatatatcaaggcagagtacttgaagaagnacaagaagccattagctgaggctatcaactccgagacatcaggaaactatcggacgttccttctttcacttgttggtcatggccattaggctatgtttcgaccatgggacatgatatttctatcgatccaccctaaatgcagagacctacctggaaaacttatgatgttgccatttatctgtcgtgactcttggatctaactgccacacatcacatatgcggttcctagtatgcttgtgtaaagtattcgtgtatatatttccatctgggtttcttgttggaagattctggatggggcaccagatcagctgttgctggtcacagtgggcttgcctggtgtctctatgacgccaatattattatgtcatgttcttgtggt

SEQ ID NO: 33099 - protein, 259 aa, Zea mays subsp. mays
  misc_feature (187)..(187): Xaa can be any naturally occurring amino acid
  misc_feature (202)..(202): Xaa can be any naturally occurring amino acid
  misc_feature (212)..(212): Xaa can be any naturally occurring amino acid
  misc_feature (231)..(231): Xaa can be any naturally occurring amino acid
MRNSPTVFHLNSVETTRKLWLLGILDPAGRDATVLREALNGDTMDLRAATEIICSRTPSQLQIMKQTYYARFGTYLEHDIAHHTSGDHQKLLLAYMGIPRYEGPEVDPTIVTHDAKDLYKAGEKRLGTDEKIFIRVFTERSWAHLASVSSAYHHMYDRKLEKVIKSETSGNFEFALLTILRCAENPXKYFAKLLRKAMKGLXTDDMTLIRVXVTRTEIDMQYIKAEYLKKXKKPLAEAINSETSGNYRTFLLSLVGHGH

SEQ ID NO: 33100 - protein, 216 aa, Zea mays subsp. mays
  misc_feature (144)..(144): Xaa can be any naturally occurring amino acid
  misc_feature (159)..(159): Xaa can be any naturally occurring amino acid
  misc_feature (169)..(169): Xaa can be any naturally occurring amino acid
  misc_feature (188)..(188): Xaa can be any naturally occurring amino acid
MDLRAATEIICSRTPSQLQIMKQTYYARFGTYLEHDIAHHTSGDHQKLLLAYMGIPRYEGPEVDPTIVTHDAKDLYKAGEKRLGTDEKIFIRVFTERSWAHLASVSSAYHHMYDRKLEKVIKSETSGNFEFALLTILRCAENPXKYFAKLLRKAMKGLXTDDMTLIRVXVTRTEIDMQYIKAEYLKKXKKPLAEAINSETSGNYRTFLLSLVGHGH

SEQ ID NO: 33101 - protein, 196 aa, Zea mays subsp. mays
  misc_feature (124)..(124): Xaa can be any naturally occurring amino acid
  misc_feature (139)..(139): Xaa can be any naturally occurring amino acid
  misc_feature (149)..(149): Xaa can be any naturally occurring amino acid
  misc_feature (168)..(168): Xaa can be any naturally occurring amino acid
MKQTYYARFGTYLEHDIAHHTSGDHQKLLLAYMGIPRYEGPEVDPTIVTHDAKDLYKAGEKRLGTDEKIFIRVFTERSWAHLASVSSAYHHMYDRKLEKVIKSETSGNFEFALLTILRCAENPXKYFAKLLRKAMKGLXTDDMTLIRVXVTRTEIDMQYIKAEYLKKXKKPLAEAINSETSGNYRTFLLSLVGHGH

SEQ ID NO: 33102 - DNA, 1365 bp, Zea mays subsp. mays
aagatcgattatccggtcgcctcccgggccgggggcctttaactcgagtcgctaatccgtttccttgtatcgccccgtctccgacctcgctcgccgccatggatggttcgaaggggagcgtaggtggcggggacgggaccgggcccgaaaagccaagcgccgattcgaaccctagccttgacccgccccaacctaccgcggcggctgtcgaagccacagatgacggtgcggccgcggctgcggccgaggcggccaggcggcccttcacggccctcagccaagaggaagctgacctcgccctcgcccgcgtcctgcaggagcaggagcgggcgtacatgttgcttcggatgaacgggggcggtggcgagggcagcgactacgggagctctgatgaagggagctacgaatatgacgaagagggagaggaggactacgaagaggaactggagcaccgcctccgcgtccaccaccacgagcacccctcgggcgatggtgtgggagagggcgggggcgagggcgagggcgccgaggggagcgactacgacgaagagttcgaggaggacgaagaaggggagccggaggtagatcccgcggagtttgaggacgatgaggcttatgcgcgtgcgctgcaggatgctgaggagcgtgaggtcgccgctcggcttatggctctcgctggtctcagcgattggcgaacagtggaggtggagcatgaggaggatcatgcgaatgatccacaggaggcatggcaagaggttgatccagatgaatactcttatgaggagctagtcgcattgggtgaagtagttggcacagaaaacagaggtctctctgctgatacacttggttctttaccttcagtaacatacaagctgcaacatgttcaggatggcaacacagagcaatgcgtaatttgccgtgtggaattggaggagggtgaatctttgattgcactcccctgcaagcacttataccatcctgaatgcataaaccagtggctgcaaataaataaggtatgccctatgtgcagcgcagaagtatcaacctcgggtaacaaggagccatgactgctctccgatggcaatcttgggaacttggtgggaataactagcggcatcactgcagcatctgtattgtcgaaacaaaagcagaaaaaacggtctacatacatgcaaggagatcaggatataatcctcttgtcagtctaaagttctgccctggttccctgctaactggattgattggccttgccgcttattatctcagttccctatgaacgccttatggctgttgtatgatccataaattatgctaattatattatattgttagtcattctttttactgatcgcatgatcatcttct

SEQ ID NO: 33103 - protein, 354 aa, Zea mays subsp. mays
DRLSGRLPGRGPLTRVANPFPCIAPSPTSLAAMDGSKGSVGGGDGTGPEKPSADSNPSLDPPQPTAAAVEATDDGAAAAAAEAARRPFTALSQEEADLALARVLQEQERAYMLLRMNGGGGEGSDYGSSDEGSYEYDEEGEEDYEEELEHRLRVHHHEHPSGDGVGEGGGEGEGAEGSDYDEEFEEDEEGEPEVDPAEFEDDEAYARALQDAEEREVAARLMALAGLSDWRTVEVEHEEDHANDPQEAWQEVDPDEYSYEELVALGEVVGTENRGLSADTLGSLPSVTYKLQHVQDGNTEQCVICRVELEEGESLIALPCKHLYHPECINQWLQINKVCPMCSAEVSTSGNKEP

SEQ ID NO: 33104 - protein, 322 aa, Zea mays subsp. mays
MDGSKGSVGGGDGTGPEKPSADSNPSLDPPQPTAAAVEATDDGAAAAAAEAARRPFTALSQEEADLALARVLQEQERAYMLLRMNGGGGEGSDYGSSDEGSYEYDEEGEEDYEEELEHRLRVHHHEHPSGDGVGEGGGEGEGAEGSDYDEEFEEDEEGEPEVDPAEFEDDEAYARALQDAEEREVAARLMALAGLSDWRTVEVEHEEDHANDPQEAWQEVDPDEYSYEELVALGEVVGTENRGLSADTLGSLPSVTYKLQHVQDGNTEQCVICRVELEEGESLIALPCKHLYHPECINQWLQINKVCPMCSAEVSTSGNKEP

SEQ ID NO: 33105 - protein, 243 aa, Zea mays subsp. mays
MLLRMNGGGGEGSDYGSSDEGSYEYDEEGEEDYEEELEHRLRVHHHEHPSGDGVGEGGGEGEGAEGSDYDEEFEEDEEGEPEVDPAEFEDDEAYARALQDAEEREVAARLMALAGLSDWRTVEVEHEEDHANDPQEAWQEVDPDEYSYEELVALGEVVGTENRGLSADTLGSLPSVTYKLQHVQDGNTEQCVICRVELEEGESLIALPCKHLYHPECINQWLQINKVCPMCSAEVSTSGNKEP

SEQ ID NO: 33106 - DNA, 1793 bp, Zea mays subsp. mays
  misc_feature (822)..(822): n is a, c, g, or t
  misc_feature (945)..(945): n is a, c, g, or t
  misc_feature (979)..(979): n is a, c, g, or t
tttccttcgacagatcgaatcgtgcttaccgagctttataccatcgtcatctcccgccagctgccgtgccgtctgctcgtccgattgttcgtgttcctcgcgtgcgcggatcggatcggttcctctggattggcgcgcacgctcagcaagtagtagcaggtctttcgccgtcgcatgttactgcagcaggccaccggaagagcgcgccgtcatcagctagctgcctcctcctcctcgtcgtctcgaccaccggcggtggatgggcggcgtgctcggcgcgctgctgcaccggcggtccgggggcaggccgccaccggcgcgggccacgaggcgccgggcgctcacccgccagccgtcggcctatgacgccggcggcgggcaccggagggcgatgctgtccaagaagtactcgtacataccggacacctacacgtcgcttgacgaggtggcggcggcgctgcgcgagcaggggctggagtcgtcgaacctcatcctgggcatagacttcaccaagagcaacgagtggacagggaggcagtcgttcggcgggcagagcctgcacagggtcggcgacacgcccaacccctacgagcaggccatcagcatcatcggcaagacgctggctcccttcgacgaggacaacctcatcccctgcttcggcttcggagacggtgactgacgactgacgacggccttcctccgatcctgctgttgatgcatccatccatcttctcgcgtgtcgatcgcttgtccttctccttaatctatctaacctctcttcttgcattatattggttgcgtcgggactcgcgcctgcactgngcagccaccacccatgactacaacgtgtttcagcttccacccggacaactcgccgtgccacggcttcgaggaggtcctcgcctgctaccgcaagatcgtgccgcacctcaagctttccgggcngacgtcgttcgcgcccatcgtggaggcggccgtngacatcgtggaccggagcggggggcagtaccacgtgctcgtcgtggtcgcggacgggcaggtgaccaggagcgtcgacaccggtgacggcgacctcagcccgcaggagaagagaacggtagagtccattgtcacggcaagctcctacccgctgtccatcgttctggttggggtcggggacggcccctgggacgacatgcgcagattcgacgacaagctccccgcgcgcgacttcgacaacttccagttcgtcaacttcaccgccatcatggcccgcgccgcgacggcacagcagaaggagtcggcgttcgcgctcgccgcgctcatggaggtccccatccagtacaaggccaccatggagctcggcatcctgggacggtccacggggaacgccaagcgagtcgcccccgcgccgccgccactgccgcacgcgcagcggcaggcgtcgtcgctgaggaggggcgccagcaacgtcggcggcgccgccgcggcgccgagagatgaccaggtgtgcccgatctgcctgaccaatgccaaggatctggcgttcggctgtgggcatatgtgctgcagggagtgcggggaaagcctcaccagatgcccgatatgccggcagccgatacggtcgaagctgaggctatattcaggatgaagtggctatgctacaacagaggccacgaagaggaaaaaggatatatagcttactcgccgttaaaatgtacatgtgaatctgtcaaaacgtgtaagaaggaaccaccggtcgaggtcagtcctgttcgtctccaaatttggatgaaccgatgttccattttgtc

SEQ ID NO: 33107 - protein, 264 aa, Zea mays subsp. mays
  misc_feature (37)..(37): Xaa can be any naturally occurring amino acid
  misc_feature (48)..(48): Xaa can be any naturally occurring amino acid
MTTTCFSFHPDNSPCHGFEEVLACYRKIVPHLKLSGXTSFAPIVEAAXDIVDRSGGQYHVLVVVADGQVTRSVDTGDGDLSPQEKRTVESIVTASSYPLSIVLVGVGDGPWDDMRRFDDKLPARDFDNFQFVNFTAIMARAATAQQKESAFALAALMEVPIQYKATMELGILGRSTGNAKRVAPAPPPLPHAQRQASSLRRGASNVGGAAAAPRDDQVCPICLTNAKDLAFGCGHMCCRECGESLTRCPICRQPIRSKLRLYSG

SEQ ID NO: 33108 - protein, 166 aa, Zea mays subsp. mays
SFDRSNRAYRALYHRHLPPAAVPSARPIVRVPRVRGSDRFLWIGAHAQQVVAGLSPSHVTAAGHRKSAPSSASCLLLLVVSTTGGGWAACSARCCTGGPGAGRHRRGPRGAGRSPASRRPMTPAAGTGGRCCPRSTRTYRTPTRRLTRWRRRCASRGWSRRTSSWA

SEQ ID NO: 33109 - protein, 151 aa, Zea mays subsp. mays
MRRFDDKLPARDFDNFQFVNFTAIMARAATAQQKESAFALAALMEVPIQYKATMELGILGRSTGNAKRVAPAPPPLPHAQRQASSLRRGASNVGGAAAAPRDDQVCPICLTNAKDLAFGCGHMCCRECGESLTRCPICRQPIRSKLRLYSG

SEQ ID NO: 33110 - DNA, 1911 bp, Zea mays subsp. mays
atcccacgccccctcggcgctgcgcctggacccggcacctacctcccccctccccacctcgccgccggcgggtggagtcgggctggagcagccgctctcctctgttacccccctaaccccctataaagaaaaaaaaaaaaaaacagagagagagagcgagcgaccggcggctcggcagccatggggcacggcgtcagctgcgcccgcaccggcgacgagcacgactacttccgcgcggcgcaggtcggggacctcgaggccctggacgcgctcctcgacgccgacccctctctcgcccgccgcgccacgctctacgaccgcctctccgcgctccacatcgccgccgcgaatggccgcctcgaggtgctgtcaatggtcttggatcacggggtgccgccggacgtggtgaatcggcacaagcagacgccgctgatgctcgcggcgatgcacggcaagactgactgcgtgctgaagctcctgcaggccggcgccaatatcctcatgttcgattcccagcacgggcggacctgcctgcaccacgcgtcctacttcggccacgtcggctgcctgcaggccatcctcacggcggcgcggaccacgccggtggccgactcatggggtttcgcccggttcgtcaacgtgagggacgaccacggcgccacgccgctccacctcgccgccaggcagggccgccccggctgcgtgcaggcgctgctggagaacggcgccatcgtctccgctttgaccggctcatacgggtttcctggtagcacagtcgctgcacctcgccgctcgcagcgggagcctggattgcacccggaagctgctcgcctggggagcggatcgtctccggagggattcagcagggaggatcccttacgccgtggcgctgaagcgcaaccacgaggcgtgcgcagcgctgctgaacccgtcggcggcggagcccatggtgtggccgtccccgctcaagttcatcagcgagctggagccggaggccaaggcgctcctggaagcggcgctgacggaagccaacagggagagggaggagaagatcctcaggggcaccaagcactctccgcctcctcccacctgggaccacgcgagcgacgccgccgacgccgacgccatcgacgacgcgtcctcagatgccagcgccagcgacgcggagctgtgctgcatctgcttcgaccaggcgtgcaccatggaggtgcaggactgcgggcaccagatgtgcgcgccgtgcacgctcgcgctgtgctgccacagcaagcccgacccggtgactctggcgctgccgtcgccagcctgcccgttctgccgcggcagcatctcgcggctgctcctggtggcccgggcaagcagcgacgacgcggacaccgagaagtcggcggcggcggcagcgggctgcctcctccccgcagctcgtccggcggcggtcccggcggtcgcacaacctcagcgacggcggcagcagcagcttcaaggggctgtcgtccgccgtggccggttccttctccaagatcgggcgcgggtcgagccggacgatggccgacagcgacggctgcggcgtggacaagcccgagcacgacccgtgatcggcattggatcctgcgcatgtggagccgagcgcggggccattgcggacatccaatcgaatccaagccaagcgtgactgcttgctgcgaaaataaccgcatccttttcttcttcttctccccatgtccctgtctgtcaatcctattcttgggcgtgccaggatttgttcacctggccattgccgtattccattgtcaccgaccggctatagtatatagtactagattccatttccaaaaaaaaaaaaaaaaaaaaaaaaaaaaaaaaaaaaaaagaaaaaaaaaaaaaaaaaacggcacgagaagccggcacgag

SEQ ID NO: 33111 - protein, 577 aa, Zea mays subsp. mays
MGHGVSCARTGDEHDYFRAAQVGDLEALDALLDADPSLARRATLYDRLSALHIAAANGRLEVLSMVLDHGVPPDVVNRHKQTPLMLAAMHGKTDCVLKLLQAGANILMFDSQHGRTCLHHASYFGHVGCLQAILTAARTTPVADSWGFARFVNVRDDHGATPLHLAARQGRPGCVQALLENGAIVSALTGSYGFPGSTVAAPRRSQREPGLHPEAARLGSGSSPEGFSREDPLRRGAEAQPRGVRSAAEPVGGGAHGVAVPAQVHQRAGAGGQGAPGSGADGSQQGEGGEDPQGHQALSASSHLGPRERRRRRRRHRRRVLRCQRQRRGAVLHLLRPGVHHGGAGLRAPDVRAVHARAVLPQQARPGDSGAAVASLPVLPRQHLAAAPGGPGKQRRRGHREVGGGGSGLPPPRSSSGGGPGGRTTSATAAAAASRGCRPPWPVPSPRSGAGRAGRWPTATAAAWTSPSTTRDRHWILRMWSRARGHCGHPIESKPSVTACCENNRILFFFFSPCPCLSILFLGVPGFVHLAIAVFHCHRPAIVYSTRFHFQKKKKKKKKKKKKRKKKKKNGTRSRHE

SEQ ID NO: 33112 - protein, 513 aa, Zea mays subsp. mays
MVLDHGVPPDVVNRHKQTPLMLAAMHGKTDCVLKLLQAGANILMFDSQHGRTCLHHASYFGHVGCLQAILTAARTTPVADSWGFARFVNVRDDHGATPLHLAARQGRPGCVQALLENGAIVSALTGSYGFPGSTVAAPRRSQREPGLHPEAARLGSGSSPEGFSREDPLRRGAEAQPRGVRSAAEPVGGGAHGVAVPAQVHQRAGAGGQGAPGSGADGSQQGEGGEDPQGHQALSASSHLGPRERRRRRRRHRRRVLRCQRQRRGAVLHLLRPGVHHGGAGLRAPDVRAVHARAVLPQQARPGDSGAAVASLPVLPRQHLAAAPGGPGKQRRRGHREVGGGGSGLPPPRSSSGGGPGGRTTSATAAAAASRGCRPPWPVPSPRSGAGRAGRWPTATAAAWTSPSTTRDRHWILRMWSRARGHCGHPIESKPSVTACCENNRILFFFFSPCPCLSILFLGVPGFVHLAIAVFHCHRPAIVYSTRFHFQKKKKKKKKKKKKRKKKKKNGTRSRHE

SEQ ID NO: 33113 - protein, 493 aa, Zea mays subsp. mays
MLAAMHGKTDCVLKLLQAGANILMFDSQHGRTCLHHASYFGHVGCLQAILTAARTTPVADSWGFARFVNVRDDHGATPLHLAARQGRPGCVQALLENGAIVSALTGSYGFPGSTVAAPRRSQREPGLHPEAARLGSGSSPEGFSREDPLRRGAEAQPRGVRSAAEPVGGGAHGVAVPAQVHQRAGAGGQGAPGSGADGSQQGEGGEDPQGHQALSASSHLGPRERRRRRRRHRRRVLRCQRQRRGAVLHLLRPGVHHGGAGLRAPDVRAVHARAVLPQQARPGDSGAAVASLPVLPRQHLAAAPGGPGKQRRRGHREVGGGGSGLPPPRSSSGGGPGGRTTSATAAAAASRGCRPPWPVPSPRSGAGRAGRWPTATAAAWTSPSTTRDRHWILRMWSRARGHCGHPIESKPSVTACCENNRILFFFFSPCPCLSILFLGVPGFVHLAIAVFHCHRPAIVYSTRFHFQKKKKKKKKKKKKRKKKKKNGTRSRHE

SEQ ID NO: 33114 - DNA, 729 bp, Zea mays subsp. mays
caaaggggaaggccaagatagaagtgtatgaaaaggaccggaagcagggtgctggggctttagcaactcatgctaaggcatacaaacctgcagctgatatggtactttctgaagaaacaccaaagaagtcagaattggcttcaaagaagaggaaacatcatgaggttcaaactgaaccatcggcagagcttgcagagggagcagtccaggaggataggaagaagaagaaaaagaacaaggaaagcgatgaggctcctgctgctgaaggtgatggtgagaagaaaaagaaaaagaagtccaaggatgtcggggaagagcctgctgtggctgctgctgctgccacagaaggtgagaaaaagaagaagaaaaagaagtctgacgcggacggtgagggtgttacaacgcaaaccgaagagtctggtaagaaagataagaagaaaaagaagaaaaggcatgccgatgatgagtgagacattcttcggaagagaatgtgcgggtaccaaatgctgggactcagctgttctgtaaaatgggtatcacggggttagaaaacatattgagatcagtttttggggttacctggtttttttgggggacctggcttgtattcaacaattacttgctcggtctagatgatgatggaatttttaacttttgctgttgtaaccccataaatttagtatgatgattgtcatggtaactctgcaactgagagaccttccattctcg

SEQ ID NO: 33115 - protein, 155 aa, Zea mays subsp. mays
KGKAKIEVYEKDRKQGAGALATHAKAYKPAADMVLSEETPKKSELASKKRKHHEVQTEPSAELAEGAVQEDRKKKKKNKESDEAPAAEGDGEKKKKKKSKDVGEEPAVAAAAATEGEKKKKKKKSDADGEGVTTQTEESGKKDKKKKKKRHADDE

SEQ ID NO: 33116 - protein, 152 aa, Zea mays subsp. mays
MLRHTNLQLIWYFLKKHQRSQNWLQRRGNIMRFKLNHRQSLQREQSRRIGRRRKRTRKAMRLLLLKVMVRRKRKRSPRMSGKSLLWLLLLPQKVRKRRRKRSLTRTVRVLQRKPKSLVRKIRRKRRKGMPMMSETFFGRECAGTKCWDSAVL

SEQ ID NO: 33117 - protein, 123 aa, Zea mays subsp. mays
MVLSEETPKKSELASKKRKHHEVQTEPSAELAEGAVQEDRKKKKKNKESDEAPAAEGDGEKKKKKKSKDVGEEPAVAAAAATEGEKKKKKKKSDADGEGVTTQTEESGKKDKKKKKKRHADDE

SEQ ID NO: 33118 - DNA, 2266 bp, Zea mays subsp. mays
gttgtgtgcgaccgacgacgcacagacgatcagagaggtctcctgccgccgtgccacggacgcgaccgacgcgtaaaagttacgctccgcctaggtcgcgcacgggcgccttgcatccgcgccccagtggcctcatttccaggaggcctggggcctgggcacggaacgtgcagcgggcctgtgctttatgccaaacacgaaagggttattaggccccgctcaatattggttttggtctaagagccaagcctggaacgcttggttgggctacgatcctttcggcccacgattgctgtgagatcatcgactgaaagcatgtgatggcggcaatgctttccgctgcttttctttaccgtcctcctagtagacactgacattttaaagactacgattctagtggttgtaataaacagcgacacgtgactgtcgactgtcgttatagccggcagtaaccgccatacagcttgtttcacttgtctcactgagtcactatcagcttctttcatccataaccaaagcaatttgttttctcaccattccttttaaaaaaaggtgaaataaacatgagtccgagtgagcactgagtcgcagaaatatcaaacctaggaccggagacgaggtgctacttcttcaaaatctgaactgtgccatcacaaaagaaagaaagaaagaaaaaagaagagaaatccacaccacagccaccgcaagatcccgggcgcccaatcacccttctccacggagattcctagcctcagccacagcccacatctgcctcatcgtctccctgaggctcccgtcgcgccacgtgttccagcatcccggacgcaccaatggcatccaagcatcagatttatttttattttctggcaacattcaagatagaacttgatcgcggcggtgtttcctccgtcgctttaaataccttcgtcgcctccacaagtccacagcatctcaagccaccatcgatcttcaagtctcgctacgtagcagtgcaataaaaaaagcagccgcaatggcgagcagcaccatggccctctcctccacggccttcgccggcaaggccgtgaacgtgccgtcgtcgtccgccttcggcgaggcccgcgtgacgatgcgcaagacggcggcgaaggccaagccagcggcggcgtccgggagcccgtggtacggccccgaccgcgtgctgtacctgggcccactgtccggcgagccgccgagctacctgacgggcgagttcccgggcgactacggctgggacaccgcggggctgtcggcggacccggagacgttcgccaagaaccgggagctggaggtgatccactcccgctgggccatgctgggcgcgctcggctgcgtcttcccggagctgctcgcccgcaacggcgtcaagttcggcgaggccgtgtggttcaaggccggctcccagatcttcagcgagggtggactggactacctcgggaacccgagcctcatccacgcgcagagcatcctcgccatctgggcctgccaggtcgtgctcatgggcgccgtcgagggctaccgcatcgccggcggcccgctcggcgaggtcgtcgacccgctctatcccggcggcagcttcgacccgctcggcctcgccgacgaccccgaggccttcgctgagctcaaggtgaaggagctcaagaacggccgcctcgccatgttctccatgttcggattcttcgtccaggccatcgtcaccgggaagggcccgctcgagaacctcgctgaccacattgccgaccccgtcaacaacaacgcttgggcctacgccaccaacttcgtccccggcaagtgagggaggcgccgccggtgacctttaggtgtccggatgcatgtgagcgcacgctggttttcggtttgtaccatgatgtaaactattgttcaatcaacaaggaataattgtgttcattgtcattatttttcccctctctttttcgttcctgccgattttatctaaatcaggtgtttgataaacggcatgattggtttcctgcttggccgtgtccagtctcaccaccagtgttgaccgtgtgcatgcacatgattggtgacctacactggctgagcgtagtctgaatgtacgagcacaacctagtcattttaccaccgcttccacatgcacgcgcagaaacgctagaaggaacgttcgctggttacccagaccggcggtaaccaatcacgcgaaaaaagagtagccgaattttacatattagagttcacacatcctagattaagcaccaagaattcg

SEQ ID NO: 33119 - protein, 266 aa, Zea mays subsp. mays
MASSTMALSSTAFAGKAVNVPSSSAFGEARVTMRKTAAKAKPAAASGSPWYGPDRVLYLGPLSGEPPSYLTGEFPGDYGWDTAGLSADPETFAKNRELEVIHSRWAMLGALGCVFPELLARNGVKFGEAVWFKAGSQIFSEGGLDYLGNPSLIHAQSILAIWACQVVLMGAVEGYRIAGGPLGEVVDPLYPGGSFDPLGLADDPEAFAELKVKELKNGRLAMFSMFGFFVQAIVTGKGPLENLADHIADPVNNNAWAYATNFVPGK

SEQ ID NO: 33120 - protein, 261 aa, Zea mays subsp. mays
MALSSTAFAGKAVNVPSSSAFGEARVTMRKTAAKAKPAAASGSPWYGPDRVLYLGPLSGEPPSYLTGEFPGDYGWDTAGLSADPETFAKNRELEVIHSRWAMLGALGCVFPELLARNGVKFGEAVWFKAGSQIFSEGGLDYLGNPSLIHAQSILAIWACQVVLMGAVEGYRIAGGPLGEVVDPLYPGGSFDPLGLADDPEAFAELKVKELKNGRLAMFSMFGFFVQAIVTGKGPLENLADHIADPVNNNAWAYATNFVPGK

SEQ ID NO: 33121 - protein, 234 aa, Zea mays subsp. mays
MRKTAAKAKPAAASGSPWYGPDRVLYLGPLSGEPPSYLTGEFPGDYGWDTAGLSADPETFAKNRELEVIHSRWAMLGALGCVFPELLARNGVKFGEAVWFKAGSQIFSEGGLDYLGNPSLIHAQSILAIWACQVVLMGAVEGYRIAGGPLGEVVDPLYPGGSFDPLGLADDPEAFAELKVKELKNGRLAMFSMFGFFVQAIVTGKGPLENLADHIADPVNNNAWAYATNFVPGK

SEQ ID NO: 33122 - DNA, 1083 bp, Zea mays subsp. mays
tcccacatccatctccacctccctcatacaacgccgcgcgtgccctagtggtagcaccaattgcgggcctgtggcaacagtgatggccaatgccactgtccccgagttgcagccgcatgttcaagcggcgggtggccgcaaggtggtggacgaggtgtccggctggctgcgcgttctggacgacggcagcgtcgaccgcacgtggaccggcccacccgaggtcctcccgatgatgcagcccgtggcgccgtacgacgtgccccgcgacgggcacacgctgcacgacctcccaggggagcccaatttccggatctacctccccgaggtcgacgacgaccgcaagggcgggcgcctgcccgtcatcgtgcacttccacggcggcggcttctgcttctcccacccgtcctggctcatgtaccaccagttctactcgcgtctcgcgtgcgccgtccctgccgtggtcgtctctgtcgagctcccgctcgcgcccgagcgacgcctgccagcgcacatcgacacggccgtcgccgcggtccgccggctccgctgcatcgcgctgtcggaggacggagctcttggtgacaaggcaggtaagctcctccgtgaggccgccgacgtctcccgggtgttcctcgtcggcgacagctctggcgcgaacgtcagccacttcaccgccgcgcgtgtgggccaggacggcgctggcgtctgggcgcccctgcgcgtcgccggctgcgttctgatccaaccgggattcgtgcgcgcaacaaggagccggtcggagctggaggtgggagagtcggtgttcttcacgctggacatgctggacaagtgccaggccatggcgctgcctgttggcgccaccaaggagcacccgttctcgtgccccatgggtccgcaggcgccgcccctggagtccgtgccgctcccgccgatgatggtggccgtcggcgagaaggacctcgtccgcgacacaaaggagcacccttgcaagcatttagggggtgtttggtttgaagaattaattcattttagatgatgcgatgcatcatgagtttattccacaaattatataagtttggtttg

SEQ ID NO: 33123 - protein, 344 aa, Zea mays subsp. mays
PTSISTSLIQRRACPSGSTNCGPVATVMANATVPELQPHVQAAGGRKVVDEVSGWLRVLDDGSVDRTWTGPPEVLPMMQPVAPYDVPRDGHTLHDLPGEPNFRIYLPEVDDDRKGGRLPVIVHFHGGGFCFSHPSWLMYHQFYSRLACAVPAVVVSVELPLAPERRLPAHIDTAVAAVRRLRCIALSEDGALGDKAGKLLREAADVSRVFLVGDSSGANVSHFTAARVGQDGAGVWAPLRVAGCVLIQPGFVRATRSRSELEVGESVFFTLDMLDKCQAMALPVGATKEHPFSCPMGPQAPPLESVPLPPMMVAVGEKDLVRDTKEHPCKHLGGVWFEELIHFR

SEQ ID NO: 33124 - protein, 317 aa, Zea mays subsp. mays
MANATVPELQPHVQAAGGRKVVDEVSGWLRVLDDGSVDRTWTGPPEVLPMMQPVAPYDVPRDGHTLHDLPGEPNFRIYLPEVDDDRKGGRLPVIVHFHGGGFCFSHPSWLMYHQFYSRLACAVPAVVVSVELPLAPERRLPAHIDTAVAAVRRLRCIALSEDGALGDKAGKLLREAADVSRVFLVGDSSGANVSHFTAARVGQDGAGVWAPLRVAGCVLIQPGFVRATRSRSELEVGESVFFTLDMLDKCQAMALPVGATKEHPFSCPMGPQAPPLESVPLPPMMVAVGEKDLVRDTKEHPCKHLGGVWFEELIHFR

SEQ ID NO: 33125 - protein, 268 aa, Zea mays subsp. mays
MMQPVAPYDVPRDGHTLHDLPGEPNFRIYLPEVDDDRKGGRLPVIVHFHGGGFCFSHPSWLMYHQFYSRLACAVPAVVVSVELPLAPERRLPAHIDTAVAAVRRLRCIALSEDGALGDKAGKLLREAADVSRVFLVGDSSGANVSHFTAARVGQDGAGVWAPLRVAGCVLIQPGFVRATRSRSELEVGESVFFTLDMLDKCQAMALPVGATKEHPFSCPMGPQAPPLESVPLPPMMVAVGEKDLVRDTKEHPCKHLGGVWFEELIHFR

SEQ ID NO: 33126 - DNA, 1289 bp, Zea mays subsp. mays
ctttgttgcctacagcctgtaacctactaccacaccaagctaatctgggtgaggtatcccgtgctcagcgcactattgaagccgtggagaagctgttgctgcaggggatgggttcagttattgaatccaaggacattattggaatctacaggactccattattggatgaccacggacaagtccgttaccatattcaccaaaagcaagtacaggttaccggatgtcatcgtggaaacgcaaatgtccgttatgcatggcttccttgctccaaaagcactgtgcatgtaatgatgctgaatggtgttttgcaagttgataagcctcccaataagtgtgcagcctatggagagggcactctccttacaccagcaaatcgttcggatgcctgtgtgaaatactctgatgttgatgaaaatggcattgtccgtatgatgttgtgccgtgtaataatggggaacgtagaaatagttcaccctggatctaagcagtgccaacctagtaataagtattttgatagtggagtagacgaccttaaaaatccacggcattacgttgtgtgggatatgaatctgaatagtcatatctattctgagtttgtagtcactgtcaaattgccttctaaaaccaaagattcctttgtatcgcaagaaaactgtcagaattcgtctgatctatcactggtgttgaactctagttcacctgattgtatttcacaggagatgaacctggaggcacctccagcattgggaggtggatgtgcagcccccatgctaggagattcgatggaaaaggctccaagctcaccttggatgcctttctccatgctgtttgcagcgatctctaccaaagtgtctcctgagaatatggacgtgattattggttgctatgaagagtttaagagcaagaaaataagccgaggtgaactagtgaagaagctgaggcatgtagttggtgatagagtgctaatatcgacgataatgcgtctccaagataagttacctccagtggataagcgtgaggaaccagacacatcggcgtccaaggtggtggcggaaccatgagatgggtgtcaggaggtgggcgaggaatgcagaaagggaggaaccagccgacttgacatagaaaaccctgtgggaagcagcaactatgaagcctcttgcatcagtcttgtgcatggaggctgctgtttgttctctgtatcgtaggtgtctacgtttgcgaggaaattgtatccggtgtttctctttcttcaaattaaaccacgcacatgcagctgccgtactttttgg

SEQ ID NO: 33127 - protein, 352 aa, Zea mays subsp. mays
LLPTACNLLPHQANLGEVSRAQRTIEAVEKLLLQGMGSVIESKDIIGIYRTPLLDDHGQVRYHIHQKQVQVTGCHRGNANVRYAWLPCSKSTVHVMMLNGVLQVDKPPNKCAAYGEGTLLTPANRSDACVKYSDVDENGIVRMMLCRVIMGNVEIVHPGSKQCQPSNKYFDSGVDDLKNPRHYVVWDMNLNSHIYSEFVVTVKLPSKTKDSFVSQENCQNSSDLSLVLNSSSPDCISQEMNLEAPPALGGGCAAPMLGDSMEKAPSSPWMPFSMLFAAISTKVSPENMDVIIGCYEEFKSKKISRGELVKKLRHVVGDRVLISTIMRLQDKLPPVDKREEPDTSASKVVAEP

SEQ ID NO: 33128 - protein, 317 aa, Zea mays subsp. mays
MGSVIESKDIIGIYRTPLLDDHGQVRYHIHQKQVQVTGCHRGNANVRYAWLPCSKSTVHVMMLNGVLQVDKPPNKCAAYGEGTLLTPANRSDACVKYSDVDENGIVRMMLCRVIMGNVEIVHPGSKQCQPSNKYFDSGVDDLKNPRHYVVWDMNLNSHIYSEFVVTVKLPSKTKDSFVSQENCQNSSDLSLVLNSSSPDCISQEMNLEAPPALGGGCAAPMLGDSMEKAPSSPWMPFSMLFAAISTKVSPENMDVIIGCYEEFKSKKISRGELVKKLRHVVGDRVLISTIMRLQDKLPPVDKREEPDTSASKVVAEP

SEQ ID NO: 33129 - protein, 257 aa, Zea mays subsp. mays
MMLNGVLQVDKPPNKCAAYGEGTLLTPANRSDACVKYSDVDENGIVRMMLCRVIMGNVEIVHPGSKQCQPSNKYFDSGVDDLKNPRHYVVWDMNLNSHIYSEFVVTVKLPSKTKDSFVSQENCQNSSDLSLVLNSSSPDCISQEMNLEAPPALGGGCAAPMLGDSMEKAPSSPWMPFSMLFAAISTKVSPENMDVIIGCYEEFKSKKISRGELVKKLRHVVGDRVLISTIMRLQDKLPPVDKREEPDTSASKVVAEP

SEQ ID NO: 33130 - DNA, 1482 bp, Zea mays subsp. mays
atcgcctccaccgttctctcttcctctgctcttctctgcctgcctgagctcaccgcacctcgcctcctcaccgcgtttcctccgttaatccggtaaccgtctctcaccatctctgcggtcaccctagagtccctctctgcctgcccctgccagcgcgggggcgcggtgtggctctcccagatccgcctggcattgctcgctcggggtcgtgccaagccgatccgatctcgcgcttgcgcgctcctgccgcggatccggctggatctcgctggaattggggcgcgcgtttatttgaaatgcagcagatccgcgtgcttgcgcgcgtgatctggcgtcgtcgcgggcctttctttaacgaaatggcccgatctgtggtttggtggtcaatgccatgtttttttttattattactgtcttatgctgggagaaaaataggaacagagaatagcttcaattgatgccttttagaacggattctatagagcaactcatggatactttctgcttgttttaacaaaatgtggcatcgggcgagctctgctgtaggtagaaaatggccgatgccgaggatatccagcccctcgtctgcgacaacggaactggcatggtcaaggctgggttcgccggcgacgacgccccgagggccgtcttccccagcatcgtggggcgcccgcgccacactggtgtcatggtcgggatggggcagaaggacgcctacgtcggtgacgaggcgcagtccaagaggggtatcctgaccctcaagtaccccatcgagcacgggatcgtcagcaactgggacgacatggagaagatctggcatcacaccttctacaacgagctccgcgtggctcccgaggagcaccccgtcctcctcaccgaggcgcccctgaaccccaaggctaacagggagaagatgacccagatcatgttcgagaccttcaacacccccgctatgtacgtcgccatccaggccgtgctctctctgtatgccagtggccgtaccacaggtatcgtgctcgactcgggagatggtgtgagccacaccgtccccatctacgagggatacgccctcccccacgccatccttcgccttgatctggccggtcgcgacctcaccgactacctgatgaagatcctgactgagcgcggctactccttcaccaccaccgctgagcgggaaatcgtgagggacatgaaggagaagctcgcctacatcgccctggactacgaccaggagatggagaccgccaagaccagcagtttgagctgtatatgtaggtagtaggtaatagggtagttgccaaaaggacggctcccttttcctattgggaattgcgaatttttgtaggaactaataccttgcacagcaatgcctcgatgccaagatacagactttaaatttaatgttggattagatgctggaagagaaacatcctggtgtatattgcagtggaatgtactgctggaatacatgtttttccg

SEQ ID NO: 33131 - protein, 242 aa, Zea mays subsp. mays
MADAEDIQPLVCDNGTGMVKAGFAGDDAPRAVFPSIVGRPRHTGVMVGMGQKDAYVGDEAQSKRGILTLKYPIEHGIVSNWDDMEKIWHHTFYNELRVAPEEHPVLLTEAPLNPKANREKMTQIMFETFNTPAMYVAIQAVLSLYASGRTTGIVLDSGDGVSHTVPIYEGYALPHAILRLDLAGRDLTDYLMKILTERGYSFTTTAEREIVRDMKEKLAYIALDYDQEMETAKTSSLSCICR

SEQ ID NO: 33132 - protein, 225 aa, Zea mays subsp. mays
MVKAGFAGDDAPRAVFPSIVGRPRHTGVMVGMGQKDAYVGDEAQSKRGILTLKYPIEHGIVSNWDDMEKIWHHTFYNELRVAPEEHPVLLTEAPLNPKANREKMTQIMFETFNTPAMYVAIQAVLSLYASGRTTGIVLDSGDGVSHTVPIYEGYALPHAILRLDLAGRDLTDYLMKILTERGYSFTTTAEREIVRDMKEKLAYIALDYDQEMETAKTSSLSCICR

SEQ ID NO: 33133 - protein, 197 aa, Zea mays subsp. mays
MVGMGQKDAYVGDEAQSKRGILTLKYPIEHGIVSNWDDMEKIWHHTFYNELRVAPEEHPVLLTEAPLNPKANREKMTQIMFETFNTPAMYVAIQAVLSLYASGRTTGIVLDSGDGVSHTVPIYEGYALPHAILRLDLAGRDLTDYLMKILTERGYSFTTTAEREIVRDMKEKLAYIALDYDQEMETAKTSSLSCICR

SEQ ID NO: 33134 - DNA, 1159 bp, Zea mays subsp. mays
ggccacaccttccgtcccccggcctccgctcgcctcgccgcccgcctgtccctgtctgtctctctctctcctcgctgagtcgccgccagccatgaacaacctcctcacggattcctttgagctcccccggcgggactcctcaagagatgcagacattgaaatgggaatgcatcaagctgatgcttcagacaacttaaaagatttcttgaagaaggtcgatacaattgagagtttaattgcaaagctgacaaatctattgaataagctacagactgcaaatgaggaatccaaagcagttacaaaagcaagttccatgaaagcaattaagcagcggatggagaaagatattgatgaagtggggaaaattgctcgtcaggcgaagacaaaagttgatgaattggaaaaagacaacttatcaaataggcaaaaacctggatgtggaaaaggttctgccgtggaccgatcaagagagcaaactactggagcagtgaaaaagaaattgaaggagcggatggatgactttcagaccttgagagaagcaatcaggcaagagtatcgggaggttgttgaaagaagggtttttactgtaactggtaatcgtcctgatgaagagacaattgatgacttgatagagaccggaaaaagtgagcaaatattcaaagatgctatccaacatcagggaagaggccagatactagacactgttgctgaaatacaggagcgacatgatgctgtaagggatctagagaggaagcttctggagttgcaacagatattcatggacatggcagttcttgttgaggcgcaaggagacatgatcaacaacatcgagacccatgtctcgaacgccaccaaccacatacagcaaggtgtgagcgcgctccagaacgcgaagaaactgcagaggaattcgaggaagtggatgtgctacgccatcatcatactgctggtgatagtcgtggtcattgtcgtcgcagtcatccagccatggaagaagggcacctagcgtggtggtgccttttttcctgtttgtgtaatatgtgtgcagttttttttgtgggtgattcgtgatttgttgttgtacctatagtcgacgcaacaggagctctggcatttcgattcattctgtctagtgaaaggacactgccatcatatgccg

SEQ ID NO: 33135 - protein, 334 aa, Zea mays subsp. mays
ATPSVPRPPLASPPACPCLSLSLLAESPPAMNNLLTDSFELPRRDSSRDADIEMGMHQADASDNLKDFLKKVDTIESLIAKLTNLLNKLQTANEESKAVTKASSMKAIKQRMEKDIDEVGKIARQAKTKVDELEKDNLSNRQKPGCGKGSAVDRSREQTTGAVKKKLKERMDDFQTLREAIRQEYREVVERRVFTVTGNRPDEETIDDLIETGKSEQIFKDAIQHQGRGQILDTVAEIQERHDAVRDLERKLLELQQIFMDMAVLVEAQGDMINNIETHVSNATNHIQQGVSALQNAKKLQRNSRKWMCYAIIILLVIVVVIVVAVIQPWKKGT

SEQ ID NO: 33136 - protein, 304 aa, Zea mays subsp. mays
MNNLLTDSFELPRRDSSRDADIEMGMHQADASDNLKDFLKKVDTIESLIAKLTNLLNKLQTANEESKAVTKASSMKAIKQRMEKDIDEVGKIARQAKTKVDELEKDNLSNRQKPGCGKGSAVDRSREQTTGAVKKKLKERMDDFQTLREAIRQEYREVVERRVFTVTGNRPDEETIDDLIETGKSEQIFKDAIQHQGRGQILDTVAEIQERHDAVRDLERKLLELQQIFMDMAVLVEAQGDMINNIETHVSNATNHIQQGVSALQNAKKLQRNSRKWMCYAIIILLVIVVVIVVAVIQPWKKGT

SEQ ID NO: 33137 - protein, 281 aa, Zea mays subsp. mays
MGMHQADASDNLKDFLKKVDTIESLIAKLTNLLNKLQTANEESKAVTKASSMKAIKQRMEKDIDEVGKIARQAKTKVDELEKDNLSNRQKPGCGKGSAVDRSREQTTGAVKKKLKERMDDFQTLREAIRQEYREVVERRVFTVTGNRPDEETIDDLIETGKSEQIFKDAIQHQGRGQILDTVAEIQERHDAVRDLERKLLELQQIFMDMAVLVEAQGDMINNIETHVSNATNHIQQGVSALQNAKKLQRNSRKWMCYAIIILLVIVVVIVVAVIQPWKKGT

SEQ ID NO: 33138 - DNA, 1624 bp, Zea mays subsp. mays
aacttggccccaaatcgtggagtggaaaccctactcgtccccttccgcatcgccgcccaattcccccacccaattcccactctccgctcgacagatccatacatgatgggagaggccaaggagaacgacgtttatgaggaggagctcctggactacgaggaggacgacgacaagacggtcgatggctccgctgctaagcccaccggagaggtcgcaaagaagggctacgtcgggatccacagttccggtttcagagacttcctgctcaagccagagctgctccgtgctatccaggattgtggttttgagcatccttccgaagtgcaacacgagtgtatccctcaagccattcttggaatggatgtcatctgtcaagctaaatctgggatggggaaaactgctgtttttgtcctttcatccctccaacaaattgaccctgttgcgggtcaggtagcagcacttgtactgtgccacacaagggaactggcttatcagatatgccacgaatttgagaggttcagcaaatatcttactgaagttaaagttgctgtcttctatggaggtgttcacatcaggaagcataaagatttgttgaagaatgaatgccctcatattgtggttggcacgcctggtaggatacttgctcttgccagggataaggatctctccttgaagaatgtgaggcacttcattcttgatgaatgtgacaaaatgctggaatcacttgacatgcggagagatgttcaggagatcttcaaaatgactcctcatgataagcaagtcatgatgttttcagcaacgctcagcaaggagatccgtcctgtatgcaagaaatttatgcaagatccgatggaaatatatgttgatgatgaggcaaagttgaccctccatggtcttgtacagcactatataaaacttagcgaggcagagaagaaccggaaactgaatgatctcttggacgctcttgatttcaaccaagttgtgatattcgtgaagagtgttagcagagctgccgaactgaataagttactttgtgaatgcaacttcccatcaatctgcattcattctggaatgactcaggaagaaaggctaacaagatataagaacttcaaggaaggccacaagaaaattcttgtggctacagatttagttggcaggggcattgacattgagcgtgtcaacattgtgataaactatgacatgccagactcagctgatacttatttgcacagggttggaagggctggacgttttggcacgaagggacttgcaattacctttgtttcctctgcttcggattctgatgttcttaaccaggtgcaagaaaggtttgaggtagacataaaggaactgcctgagcaaattgacacctcgacctacatgccatcataaatgggaaggacaactgagaagagaggaggataggggagtgagcagccgtctggagatggttacctttgaactatccgatctggaggatttgatttgcctcctttgtgtactttaaaaagggcagccaggatgatgatctgtattttaagacaatgctgtctgtttgggtttaggattttgctttgtcgaaaactagcacacttattgtactactgagcagcatatttgtttt

SEQ ID NO: 33139 - protein, 463 aa, Zea mays subsp. mays
NLAPNRGVETLLVPFRIAAQFPHPIPTLRSTDPYMMGEAKENDVYEEELLDYEEDDDKTVDGSAAKPTGEVAKKGYVGIHSSGFRDFLLKPELLRAIQDCGFEHPSEVQHECIPQAILGMDVICQAKSGMGKTAVFVLSSLQQIDPVAGQVAALVLCHTRELAYQICHEFERFSKYLTEVKVAVFYGGVHIRKHKDLLKNECPHIVVGTPGRILALARDKDLSLKNVRHFILDECDKMLESLDMRRDVQEIFKMTPHDKQVMMFSATLSKEIRPVCKKFMQDPMEIYVDDEAKLTLHGLVQHYIKLSEAEKNRKLNDLLDALDFNQVVIFVKSVSRAAELNKLLCECNFPSICIHSGMTQEERLTRYKNFKEGHKKILVATDLVGRGIDIERVNIVINYDMPDSADTYLHRVGRAGRFGTKGLAITFVSSASDSDVLNQVQERFEVDIKELPEQIDTSTYMPS

SEQ ID NO: 33140 - protein, 429 aa, Zea mays subsp. mays
MMGEAKENDVYEEELLDYEEDDDKTVDGSAAKPTGEVAKKGYVGIHSSGFRDFLLKPELLRAIQDCGFEHPSEVQHECIPQAILGMDVICQAKSGMGKTAVFVLSSLQQIDPVAGQVAALVLCHTRELAYQICHEFERFSKYLTEVKVAVFYGGVHIRKHKDLLKNECPHIVVGTPGRILALARDKDLSLKNVRHFILDECDKMLESLDMRRDVQEIFKMTPHDKQVMMFSATLSKEIRPVCKKFMQDPMEIYVDDEAKLTLHGLVQHYIKLSEAEKNRKLNDLLDALDFNQVVIFVKSVSRAAELNKLLCECNFPSICIHSGMTQEERLTRYKNFKEGHKKILVATDLVGRGIDIERVNIVINYDMPDSADTYLHRVGRAGRFGTKGLAITFVSSASDSDVLNQVQERFEVDIKELPEQIDTSTYMPS

SEQ ID NO: 33141 - protein, 428 aa, Zea mays subsp. mays
MGEAKENDVYEEELLDYEEDDDKTVDGSAAKPTGEVAKKGYVGIHSSGFRDFLLKPELLRAIQDCGFEHPSEVQHECIPQAILGMDVICQAKSGMGKTAVFVLSSLQQIDPVAGQVAALVLCHTRELAYQICHEFERFSKYLTEVKVAVFYGGVHIRKHKDLLKNECPHIVVGTPGRILALARDKDLSLKNVRHFILDECDKMLESLDMRRDVQEIFKMTPHDKQVMMFSATLSKEIRPVCKKFMQDPMEIYVDDEAKLTLHGLVQHYIKLSEAEKNRKLNDLLDALDFNQVVIFVKSVSRAAELNKLLCECNFPSICIHSGMTQEERLTRYKNFKEGHKKILVATDLVGRGIDIERVNIVINYDMPDSADTYLHRVGRAGRFGTKGLAITFVSSASDSDVLNQVQERFEVDIKELPEQIDTSTYMPS

SEQ ID NO: 33142 - DNA, 1578 bp, Zea mays subsp. mays
attcgatcgcctcacccgaagcacatcccgtcgcatcccatcccactaccacccatctcgtcgtccgccgattcgatccggttcttccaacccaggggcagtgatggcgacgaagaggagcgtgggcaccctcggcgaggcggatctgaaggggaagaaggtgttcgtgcgcgccgacctcaacgtcccgctcgacgatgcccagaagatcaccgacgacacccgcatccgcgcctccgtccccaccatcaagttcctcctcgagaagggcgccaaggtcatcctcgccagccacctgggtcgtccaaaaggtgtcaccccaaagtacagcttgaagcctcttgttccacgcttgtctgagctccttggagttgaagtcgtgatggccaatgattgcattggtgaggaagtcgagaagttggctgccgctttgccagaaggtggagttctgctcctagagaatgttagattctacaaggaggaagagaagaacgaacctgagtttgctaagaagcttgcatctgttgctgacctttatgtcaatgatgcttttggcacggcacacagagctcatgcttcaaccgaaggagttaccaagtatttgaagcctgctgttgctggcttcctcatgcagaaggaacttgactaccttgttggagctgttgccaacccaaagaagccatttgccgccattgttggtggatccaaggtctcaactaagattggtgtcattgagtcgttgctggcgaaggtcgatatcctcatccttggtggtggtatgatctacacattttacaaggcacagggatattctgttggaaaatctctcgtggaagaggataaactcgagctcgcaacttctcttattgagaaggcgaaggcaaagggggtttctcttttgcttcccactgatattgtagtagcggacaagtttgcagccgatgctgagagcaagattgtccctgccactgctatccctgatgactggatgggtcttgatgttggccctgatgccaccaaaacattcgacgaagcattggacaccaccaagactgttatttggaacggccccatgggagtgtttgagttccagaagtttgcagctggcaccgaggcgattgccaagaagctagctgagcttacaaccacgaagggtgtcactaccatcatcggcggtggcgactctgtcgctgctgtcgagaaggctgggctggccgacaagatgagccacatttcgaccggcggcggtgcgagcttggaactcttggaaggcaagactctacctggtgtccttgccctcgatgacgcctagatccgctgctgctgctgctactcaggttctgccagctttgcgtgtcatcttgtttcggaccttggtgtagcactgcaaggctaaggtttactcctccacacatggactttcgaggataggcttgccaccgtgttttgctagatgagtcgtgaaataagcttttacttcctcgctgctgtgggtgaagtgactggaattcggaaatttggaactaacaaaaccccccgtggatttgtatgatacgttttgttcgacagtttgcgtcc

SEQ ID NO: 33143 - protein, 436 aa, Zea mays subsp. mays
FDRLTRSTSRRIPSHYHPSRRPPIRSGSSNPGAVMATKRSVGTLGEADLKGKKVFVRADLNVPLDDAQKITDDTRIRASVPTIKFLLEKGAKVILASHLGRPKGVTPKYSLKPLVPRLSELLGVEVVMANDCIGEEVEKLAAALPEGGVLLLENVRFYKEEEKNEPEFAKKLASVADLYVNDAFGTAHRAHASTEGVTKYLKPAVAGFLMQKELDYLVGAVANPKKPFAAIVGGSKVSTKIGVIESLLAKVDILILGGGMIYTFYKAQGYSVGKSLVEEDKLELATSLIEKAKAKGVSLLLPTDIVVADKFAADAESKIVPATAIPDDWMGLDVGPDATKTFDEALDTTKTVIWNGPMGVFEFQKFAAGTEAIAKKLAELTTTKGVTTIIGGGDSVAAVEKAGLADKMSHISTGGGASLELLEGKTLPGVLALDDA

SEQ ID NO: 33144 - protein, 402 aa, Zea mays subsp. mays
MATKRSVGTLGEADLKGKKVFVRADLNVPLDDAQKITDDTRIRASVPTIKFLLEKGAKVILASHLGRPKGVTPKYSLKPLVPRLSELLGVEVVMANDCIGEEVEKLAAALPEGGVLLLENVRFYKEEEKNEPEFAKKLASVADLYVNDAFGTAHRAHASTEGVTKYLKPAVAGFLMQKELDYLVGAVANPKKPFAAIVGGSKVSTKIGVIESLLAKVDILILGGGMIYTFYKAQGYSVGKSLVEEDKLELATSLIEKAKAKGVSLLLPTDIVVADKFAADAESKIVPATAIPDDWMGLDVGPDATKTFDEALDTTKTVIWNGPMGVFEFQKFAAGTEAIAKKLAELTTTKGVTTIIGGGDSVAAVEKAGLADKMSHISTGGGASLELLEGKTLPGVLALDDA

SEQ ID NO: 33145 - protein, 309 aa, Zea mays subsp. mays
MANDCIGEEVEKLAAALPEGGVLLLENVRFYKEEEKNEPEFAKKLASVADLYVNDAFGTAHRAHASTEGVTKYLKPAVAGFLMQKELDYLVGAVANPKKPFAAIVGGSKVSTKIGVIESLLAKVDILILGGGMIYTFYKAQGYSVGKSLVEEDKLELATSLIEKAKAKGVSLLLPTDIVVADKFAADAESKIVPATAIPDDWMGLDVGPDATKTFDEALDTTKTVIWNGPMGVFEFQKFAAGTEAIAKKLAELTTTKGVTTIIGGGDSVAAVEKAGLADKMSHISTGGGASLELLEGKTLPGVLALDDA

SEQ ID NO: 33146 - DNA, 1233 bp, Zea mays subsp. mays
acacaactcaagcacacgaatccaaagaacacgaaccggcagttcagcttcctgtccgagacctcggggaggcctgccctctcggctctcgcgttaccgatcgaggcgtggagagaaatggcggcggcagcagcaacaagagcaggagcgtggggcgtggcgtggctcctggcggccaccgtggcggcggcgctgctggcctcggcgtcggcgcagtccgggtgcacgaccacgctgatcagcctgtacccgtgcctcaactacatcagcggcaacgtgtcggcgccgccgtcctcgtgctgctcgcagctcgccagcgtcgtgcagaccaacccgcagtgcctctgcgccgcgctcagcggcgactcctcgtccctcggcggcgtcaccgtcgacaagacgcgcgcgctccagctcccccaggcgtgcaacgtcaagaccccgccggcgagcaagtgcaactgtaagtgctccactcgacgggaccccaccggtgcagtgcagagctgctgctggcggcgccggctgccgagcgacgtgattcttgcatactcctacagtccttttgttgaggcgtgctaattgaccgcattccttgctttggcagctgctggcggcggcagcgctccgggcgccgcgacgccggccacgccgtcggccggcgtaccatcgaccgcaggtaaggcgacgaacaactgtgctcatcaatcatcatacggttcagctgtccacggcttctctcttacaccacacgaaccgatgcaggaaccggcactggatcgaaggcgacgccgacggccccgttcctgacgtccggcgccgcgtcgacccggggggcggtgagcctggtgctggcattcgcgactgttgccgtctacggcatctcggccgcgtgacaatcttggctcatctagctctgttgcccacggcgtttggggatacagacattcgacattcaggatttgtggtgtcactgttccgcattggttgagcattgtcgagtatagataattgggcgtcgcatttgtattattgcttgtatttggctgtcacaataaagaacaccgttttttccttgtttgtacaaatcgttttaagaagatgtccactactccgttgtctggaaaatctccctcgtgaatggacattaacccctaaatatgcccattttaaaacctttgttagttccttgttaagctcaaatacgaaattgaccaacatatcactattttt

SEQ ID NO: 33147 - protein, 193 aa, Zea mays subsp. mays
TQLKHTNPKNTNRQFSFLSETSGRPALSALALPIEAWREMAAAAATRAGAWGVAWLLAATVAAALLASASAQSGCTTTLISLYPCLNYISGNVSAPPSSCCSQLASVVQTNPQCLCAALSGDSSSLGGVTVDKTRALQLPQACNVKTPPASKCNCKCSTRRDPTGAVQSCCWRRRLPSDVILAYSYSPFVEAC

SEQ ID NO: 33148 - protein, 154 aa, Zea mays subsp. mays
MAAAAATRAGAWGVAWLLAATVAAALLASASAQSGCTTTLISLYPCLNYISGNVSAPPSSCCSQLASVVQTNPQCLCAALSGDSSSLGGVTVDKTRALQLPQACNVKTPPASKCNCKCSTRRDPTGAVQSCCWRRRLPSDVILAYSYSPFVEAC

SEQ ID NO: 33149 - protein, 154 aa, Zea mays subsp. mays
TTQAHESKEHEPAVQLPVRDLGEACPLGSRVTDRGVERNGGGSSNKSRSVGRGVAPGGHRGGGAAGLGVGAVRVHDHADQPVPVPQLHQRQRVGAAVLVLLAARQRRADQPAVPLRRAQRRLLVPRRRHRRQDARAPAPPGVQRQDPAGEQVQL

SEQ ID NO: 33150 - DNA, 1387 bp, Zea mays subsp. mays
acttccaaactgcaacgaaaacccacgtctaaaacaggtggcccaccaacgattcacttccccgatcccagggggcggcgatcggaattcgcaacttctcccacgcggcgaacacggcagagatgatgagctcccgggccggatccatcctcctccgccacgccggctcccgtctcttcaccgcagcggcgatctctccggcggcggcctcgaggccactgctcgccggcggcaatggtgttccggcagtcatgctacggcttatgtccacgtcctcccccgccgctcccacggaggcgaaggacgaggcagccaaggcctccaaggtgggaggagacaagaaggcggtggtgatcaacagctactgggggatcgagcaaaacaacaagctagcgcgggacgacggcaccgagtggaagtggacttgctttaggccatgggagacgtacacggcggacacgtccattgacctcaccagacaccatgagcccaagacgctgatggataaggtcgcatactggaccgtcaagtcgctgcgcttccccacggacatcttcttccagaggcggtatggctgccgggcgatgatgctggaaaccgtggctgcggtgcctgggatggtgggcggcatgctgctccacctgcgctcactccgccgcttcgagcagagcggcggctggatccgcgctttgctggaggaggccgagaacgagcgcatgcacctcatgaccttcatggaggtggcgaagccgaggtggtacgagcgcgcgctcgttatcaccgtccagggcgtcttcttcaacgcatacttcctcggctacctcttgtccccgaagttcgcgcaccgcgtcgtcggctacctggaggaggaggccatccactcgtacaccgagtacctcaaggatctggaggccggcaagatcgagaacgtccccgccccggccatcgccatcgactactggcgcctccccgctaacgccacgctcaaggacgtagtcaccgtcgtccgcgccgacgaggctcaccaccgcgacgtcaaccactttgcatcggacatccattgccagggaatgcagctgaagcagtcccctgcgccgatcggataccactgaggatgtttgtgctcttcttaattttgcatcgctaataagcaattgtctttaagggaaggaaaggatgcttattgagttacgagtactgctacggcgattaggatattttccaaccagttgtttgagagtgaaacctattatatgtacgcatgttacatgtacatatctctaagtgcgagaggtgcttttctggcgtttatcacttcttcctggagttcctttgttcttcatgtcagctgaattgggctcgctaatatcgaatgtacaatttttgc

SEQ ID NO: 33151 - protein, 329 aa, Zea mays subsp. mays
MMSSRAGSILLRHAGSRLFTAAAISPAAASRPLLAGGNGVPAVMLRLMSTSSPAAPTEAKDEAAKASKVGGDKKAVVINSYWGIEQNNKLARDDGTEWKWTCFRPWETYTADTSIDLTRHHEPKTLMDKVAYWTVKSLRFPTDIFFQRRYGCRAMMLETVAAVPGMVGGMLLHLRSLRRFEQSGGWIRALLEEAENERMHLMTFMEVAKPRWYERALVITVQGVFFNAYFLGYLLSPKFAHRVVGYLEEEAIHSYTEYLKDLEAGKIENVPAPAIAIDYWRLPANATLKDVVTVVRADEAHHRDVNHFASDIHCQGMQLKQSPAPIGYH

SEQ ID NO: 33152 - protein, 328 aa, Zea mays subsp. mays
MSSRAGSILLRHAGSRLFTAAAISPAAASRPLLAGGNGVPAVMLRLMSTSSPAAPTEAKDEAAKASKVGGDKKAVVINSYWGIEQNNKLARDDGTEWKWTCFRPWETYTADTSIDLTRHHEPKTLMDKVAYWTVKSLRFPTDIFFQRRYGCRAMMLETVAAVPGMVGGMLLHLRSLRRFEQSGGWIRALLEEAENERMHLMTFMEVAKPRWYERALVITVQGVFFNAYFLGYLLSPKFAHRVVGYLEEEAIHSYTEYLKDLEAGKIENVPAPAIAIDYWRLPANATLKDVVTVVRADEAHHRDVNHFASDIHCQGMQLKQSPAPIGYH

SEQ ID NO: 33153 - protein, 286 aa, Zea mays subsp. mays
MLRLMSTSSPAAPTEAKDEAAKASKVGGDKKAVVINSYWGIEQNNKLARDDGTEWKWTCFRPWETYTADTSIDLTRHHEPKTLMDKVAYWTVKSLRFPTDIFFQRRYGCRAMMLETVAAVPGMVGGMLLHLRSLRRFEQSGGWIRALLEEAENERMHLMTFMEVAKPRWYERALVITVQGVFFNAYFLGYLLSPKFAHRVVGYLEEEAIHSYTEYLKDLEAGKIENVPAPAIAIDYWRLPANATLKDVVTVVRADEAHHRDVNHFASDIHCQGMQLKQSPAPIGYH

SEQ ID NO: 33154 - DNA, 1207 bp, Zea mays subsp. mays
aaccatttggacaccgatccatccatccatccagccccgtacgtgtctcgctggccgtccgtatatatagagagaggcatcggagattggccgccacgttgccatcgcgcgcggcgcccgccggccaaggccaaccatgctggcgagggctcctccgccgcggcccgtgctccagcggcgtttgcatcgcccgcgcacatccaagagccgccgccgtcgcggccaggccggggacgacgaggacgacgacgacggtcgcggcggcggcggcagaggccgcttctaacgggtcagcggcggcggccgtcgcagggatcagcagcagcagcagcgcgctggtgacctcgaccgtcgggaaatcgacgaacatcctgtggcatgagtgcgccatcgggcagaaggagcgacagggtctgctgaaccagaagggctgcgtcgtgtggatcactggcctaagcggttcagggaaaagcacgctcgcgtgcgcgctgagccgcgagctgcacggcagaggccacctcacgtacgtcctcgacggcgacaacctcaggcacgggctgaacagggacctcagcttcggagcagaggaccgcgccgagaacatccgcagagtaggggaagtagcgaagctgttcgccgacgctggcctcgtctgcatcgccagcctcatatcgccctacagaagcgaccgaagcgcgtgtcgcgatctgctgcccaagcactcgtttatcgaggtgttcctggacgtgccgcttcaagtgtgcgaagccagggaccccaaaggcctctacaagctcgcacgcgccggcaaaatcaaagggttcaccggcatcgacgatccttacgaaccgccgtcggactgtgagatagtgatccagtgtaaagtcggcgactgcccttcgcctgaatcgatggctggtcacgttgtgtcgtaccttgagacgaatggtttcctccaggactagacatggaatgcgatcgatgcgtctgatgtgtatatatgtagcagcagccggagcggcattgccaaggctgtgtaatctcatggctgtctttctctttaagaccaaaacaaacaagagatggcagtgtaaaaaggaaaaaaaaaactgcgtctgacagagtcgctgaatcaaccatgcttctgataaaagctattgtttgtaggtacggcgttgattcttacgacatttatgacaatgctttc

SEQ ID NO: 33155 - protein, 320 aa, Zea mays subsp. mays
PFGHRSIHPSSPVRVSLAVRIYRERHRRLAATLPSRAAPAGQGQPCWRGLLRRGPCSSGVCIARAHPRAAAVAARPGTTRTTTTVAAAAAEAASNGSAAAAVAGISSSSSALVTSTVGKSTNILWHECAIGQKERQGLLNQKGCVVWITGLSGSGKSTLACALSRELHGRGHLTYVLDGDNLRHGLNRDLSFGAEDRAENIRRVGEVAKLFADAGLVCIASLISPYRSDRSACRDLLPKHSFIEVFLDVPLQVCEARDPKGLYKLARAGKIKGFTGIDDPYEPPSDCEIVIQCKVGDCPSPESMAGHVVSYLETNGFLQD

SEQ ID NO: 33156 - DNA, 1193 bp, Zea mays subsp. mays
agattcctcgcccaaccctaccccaggcgatctcgcatcgcatggccaccggaccgcggtctctccacgccctcctcggcggcggtgcagttgccgacttgctgctgtggcgacggaggaatgcctcggcggcagccgtggtgggcgccaccacggtctggttcgtcttcgagcgcgcggggtacagcttcccctccgtcctctccaacgccctgctcctcctcgtcgccatcctcttcttctgggccaagtctgcgtcgctgctcaacaggcctcttccacctcttcctaatcttgaggtctcagatgcgattgttgaaaaagctgcaaatcatgctcttgtatggatcaataggctgctggctgttggtcatgacatcgccatcaagagagataggaaagtttttataaaggtgatactgattttgtgggtggtttcattcattggaatgctcttcaattttcttacgcttatttacattggtgtaatgctttctctgttggttccaccactctatgagaagtaccaggaccaggttgatgagaaggttggtgtagcgtacagtgtactatcaaggcacatagataccatcattaccagggctgggcaatcagccaagcagaagaagactgagtaaaagaaacgttttgctgtattgtggaacatctctggttgtcaagtgaagttgacagtgggcctttcatctttgaccctctattccactaatatgaaccctcgatatgctgatctgaggttctgatgtgcattatgggaaatgaggcggcttgtgtatttcctttttgaacatggggtttactatgggtgcatatcgcactcggaatgatatcgagaaattgcgactcgtacatgcaattatgcaggctgcttgctctgttagtcatatgatctttccgtcagtgattttaaattttaggctgctccgaggaactttgcaggctgctccgagcaattatgcaggctgcttgctcattcgatgcccatctactggtagctcgttttctgaaatactagtacctaataaggtgtattctacgtagacagttgcatatcatgtgaataaataggtattttctggcggcagttctgtttttgctttacctgtgtttatactcccaccgtttattttgacaatgcgtacaaggtctagataagtcttttttagtgcgcttct

SEQ ID NO: 33157 - protein, 211 aa, Zea mays subsp. mays
IPRPTLPQAISHRMATGPRSLHALLGGGAVADLLLWRRRNASAAAVVGATTVWFVFERAGYSFPSVLSNALLLLVAILFFWAKSASLLNRPLPPLPNLEVSDAIVEKAANHALVWINRLLAVGHDIAIKRDRKVFIKVILILWVVSFIGMLFNFLTLIYIGVMLSLLVPPLYEKYQDQVDEKVGVAYSVLSRHIDTIITRAGQSAKQKKTE

SEQ ID NO: 33158 - protein, 198 aa, Zea mays subsp. mays
MATGPRSLHALLGGGAVADLLLWRRRNASAAAVVGATTVWFVFERAGYSFPSVLSNALLLLVAILFFWAKSASLLNRPLPPLPNLEVSDAIVEKAANHALVWINRLLAVGHDIAIKRDRKVFIKVILILWVVSFIGMLFNFLTLIYIGVMLSLLVPPLYEKYQDQVDEKVGVAYSVLSRHIDTIITRAGQSAKQKKTE

SEQ ID NO: 33159 - protein, 136 aa, Zea mays subsp. mays
RFLAQPYPRRSRIAWPPDRGLSTPSSAAVQLPTCCCGDGGMPRRQPWWAPPRSGSSSSARGTASPPSSPTPCSSSSPSSSSGPSLRRCSTGLFHLFLILRSQMRLLKKLQIMLLYGSIGCWLLVMTSPSREIGKFL

SEQ ID NO: 33160 - DNA, 2042 bp, Zea mays subsp. mays
ctctcctacctccacctccacgacaacaagcaaatccccatccagttccaaaccctaactcaaatgctcgctttgactgcctcagcctcatccgcttcgtcccatccttatcgccacgcctccgcgcacactcgtcgcccccgcctacgtgcggtcctcgcgatggcgggctccgacgacccccgtgcagcgcccgccagatcggtcgccgtcgtcggcgccggggtcagcgggctcgcggcggcgtacaggctcagacagagcggcgtgaacgtaacggtgttcgaagcggccgacagggcgggaggaaagatacggaccaattccgagggcgggtttgtctgggatgaaggagctaacaccatgacagaaggtgaatgggaggccagtagactgattgatgatcttggtctacaagacaaacagcagtatcctaactcccaacacaagcgttacattgtcaaagatggagcaccagcactgattccttcggatcccatttcgctaatgaaaagcagtgttctttcgacaaaatcaaagattgcgttattttttgaaccatttctctacaagaaagctaacacaagaaactctggaaaagtgtctgaggagcacttgagtgagagtgttgggagcttctgtgaacgccactttggaagagaagttgttgactattttgttgatccatttgtagctggaacaagtgcaggagatccagagtcactatctattcgtcatgcattcccagcattgtggaatttggaaagaaagtatggttcagttattgttggtgccatcttgtctaagctagcagctaaaggtgatccagtaaagacaagacatgattcatcagggaaaagaaggaatagacgagtgtcgttttcatttcatggtggaatgcagtcactaataaatgcacttcacaatgaagttggagatgataatgtgaagcttggtacagaagtgttgtcattggcatgtacatttgatggagttcctgcactaggcaggtggtcaatttctgttgattcgaaggatagcggtgacaaggaccttgctagtaaccaaacctttgatgctgttataatgacagctccattgtcaaatgtccggaggatgaagttcaccaaaggtggagctccggttgttcttgactttcttcctaagatggattatctaccactatctctcatggtgactgcttttaagaaggatgatgtcaagaaacctctggaaggatttggggtcttaataccttacaaggaacagcaaaaacatggtctgaaaacccttgggactctcttttcctcaatgatgttcccagatcgagctcctgatgaccaatatttatatacaacatttgttgggggtagccacaatagagatcttgctggagctccaacgtctattctgaaacaacttgtgacctctgaccttaaaaaactcttgggcgtagaggggcaaccaacttttgtcaagcatgtatactggggaaatgcttttcctttgtatggccatgattatagttctgtattggaagctatagaaaagatggagaaaaaccttccagggttcttctacgcaggaaatagcaaggatgggcttgctgttggaagtgttatagcttcaggaagcaaggctgctgaccttgcaatctcatatcttgaatctcacaccaagcataataattcacattgaaagtgtctgacctatcctctagcagttgtcgacaaatttctccagttcatgtacagtagaaaccgatgcgttgcagtttcagaacatcttcacttcttcagatattaacccttcgttgaacatccaccagaaaggtagtcacatgtgtaagtgggaaaatgaggttaaaaactattatggcggccgaaatgttcctttttgttttcctcacaagtggcctacgacacttgatgttggaaatacatttaaatttgttgaattgtttgagaacacatgcgtgacgtgtaatatttgcctattgtgattttagcagtagtcttggccagattatgctttacgccttt

SEQ ID NO: 33161 - protein, 565 aa, Zea mays subsp. mays
LSYLHLHDNKQIPIQFQTLTQMLALTASASSASSHPYRHASAHTRRPRLRAVLAMAGSDDPRAAPARSVAVVGAGVSGLAAAYRLRQSGVNVTVFEAADRAGGKIRTNSEGGFVWDEGANTMTEGEWEASRLIDDLGLQDKQQYPNSQHKRYIVKDGAPALIPSDPISLMKSSVLSTKSKIALFFEPFLYKKANTRNSGKVSEEHLSESVGSFCERHFGREVVDYFVDPFVAGTSAGDPESLSIRHAFPALWNLERKYGSVIVGAILSKLAAKGDPVKTRHDSSGKRRNRRVSFSFHGGMQSLINALHNEVGDDNVKLGTEVLSLACTFDGVPALGRWSISVDSKDSGDKDLASNQTFDAVIMTAPLSNVRRMKFTKGGAPVVLDFLPKMDYLPLSLMVTAFKKDDVKKPLEGFGVLIPYKEQQKHGLKTLGTLFSSMMFPDRAPDDQYLYTTFVGGSHNRDLAGAPTSILKQLVTSDLKKLLGVEGQPTFVKHVYWGNAFPLYGHDYSSVLEAIEKMEKNLPGFFYAGNSKDGLAVGSVIASGSKAADLAISYLESHTKHNNSH

SEQ ID NO: 33162 - protein, 544 aa, Zea mays subsp. mays
MLALTASASSASSHPYRHASAHTRRPRLRAVLAMAGSDDPRAAPARSVAVVGAGVSGLAAAYRLRQSGVNVTVFEAADRAGGKIRTNSEGGFVWDEGANTMTEGEWEASRLIDDLGLQDKQQYPNSQHKRYIVKDGAPALIPSDPISLMKSSVLSTKSKIALFFEPFLYKKANTRNSGKVSEEHLSESVGSFCERHFGREVVDYFVDPFVAGTSAGDPESLSIRHAFPALWNLERKYGSVIVGAILSKLAAKGDPVKTRHDSSGKRRNRRVSFSFHGGMQSLINALHNEVGDDNVKLGTEVLSLACTFDGVPALGRWSISVDSKDSGDKDLASNQTFDAVIMTAPLSNVRRMKFTKGGAPVVLDFLPKMDYLPLSLMVTAFKKDDVKKPLEGFGVLIPYKEQQKHGLKTLGTLFSSMMFPDRAPDDQYLYTTFVGGSHNRDLAGAPTSILKQLVTSDLKKLLGVEGQPTFVKHVYWGNAFPLYGHDYSSVLEAIEKMEKNLPGFFYAGNSKDGLAVGSVIASGSKAADLAISYLESHTKHNNSH

SEQ ID NO: 33163 - protein, 511 aa, Zea mays subsp. mays
MAGSDDPRAAPARSVAVVGAGVSGLAAAYRLRQSGVNVTVFEAADRAGGKIRTNSEGGFVWDEGANTMTEGEWEASRLIDDLGLQDKQQYPNSQHKRYIVKDGAPALIPSDPISLMKSSVLSTKSKIALFFEPFLYKKANTRNSGKVSEEHLSESVGSFCERHFGREVVDYFVDPFVAGTSAGDPESLSIRHAFPALWNLERKYGSVIVGAILSKLAAKGDPVKTRHDSSGKRRNRRVSFSFHGGMQSLINALHNEVGDDNVKLGTEVLSLACTFDGVPALGRWSISVDSKDSGDKDLASNQTFDAVIMTAPLSNVRRMKFTKGGAPVVLDFLPKMDYLPLSLMVTAFKKDDVKKPLEGFGVLIPYKEQQKHGLKTLGTLFSSMMFPDRAPDDQYLYTTFVGGSHNRDLAGAPTSILKQLVTSDLKKLLGVEGQPTFVKHVYWGNAFPLYGHDYSSVLEAIEKMEKNLPGFFYAGNSKDGLAVGSVIASGSKAADLAISYLESHTKHNNSH

SEQ ID NO: 33164 - DNA, 657 bp, Zea mays subsp. mays
gtagtttcaattatcataacctccgactccgacgatctgaactgtgaagatgagcacttatccaccgccgacgggggaatggaccaccggcctctgtggctgcttcagcgactgcaagagctgttgcctgtcgttcttgtgcccgtgtatcccgttcggacaggtggcagaggtcttggacaagggcatgacatcctgtggtctggccggcctcctctactgtttgctgctgcatgccggggtggctgtggtcccgtgccactgcatctacacctgcacctaccgtcgcaagctccgggcggcgtacgacctgccgccggagccgtgcgccgattgctgcgtccacatgtggtgcgggccatgcgccatctcccagatgtaccgggagctcaagaacagaggcgccgacccggccatgggatgggaagtgctctcgaaaaagacgactatggctcctgtaccaatgcaagacatgacgcgctgacgacagcaactcgatctcctagcaaaccaggattacgtgttgcatatatgcacagtttgtgtgttatgtggctatgtcagcaagtaaatggatcggagtctatgagtggataaaattaagtggatgtgttcgcgtcttagtaataagtgaataaaatttcataagtgttactt

SEQ ID NO: 33165 - protein, 198 aa, Zea mays subsp. mays
VVSIIITSDSDDLNCEDEHLSTADGGMDHRPLWLLQRLQELLPVVLVPVYPVRTGGRGLGQGHDILWSGRPPLLFAAACRGGCGPVPLHLHLHLPSQAPGGVRPAAGAVRRLLRPHVVRAMRHLPDVPGAQEQRRRPGHGMGSALEKDDYGSCTNARHDALTTATRSPSKPGLRVAYMHSLCVMWLCQQVNGSESMSG

SEQ ID NO: 33166 - protein, 172 aa, Zea mays subsp. mays
MDHRPLWLLQRLQELLPVVLVPVYPVRTGGRGLGQGHDILWSGRPPLLFAAACRGGCGPVPLHLHLHLPSQAPGGVRPAAGAVRRLLRPHVVRAMRHLPDVPGAQEQRRRPGHGMGSALEKDDYGSCTNARHDALTTATRSPSKPGLRVAYMHSLCVMWLCQQVNGSESMSG

SEQ ID NO: 33167 - protein, 144 aa, Zea mays subsp. mays
MSTYPPPTGEWTTGLCGCFSDCKSCCLSFLCPCIPFGQVAEVLDKGMTSCGLAGLLYCLLLHAGVAVVPCHCIYTCTYRRKLRAAYDLPPEPCADCCVHMWCGPCAISQMYRELKNRGADPAMGWEVLSKKTTMAPVPMQDMTR

SEQ ID NO: 33168 - DNA, 507 bp, Zea mays subsp. mays
gcttggaaggggagcgccacgggaaggagctccaactctatgcgtgagtttctggagaagaactacaaggagacctccggcaaggagaccatcaagcttgctattcgtgcacttctagaggttgttgaaagtggtgggaagaacatcgaggttgcagtgatgacaaagaaggatggtctccgggaacttgaggaggctgagattgatgaatatgttgctgagatagaggcagagaaggctgcagctgaggctgcaaagaagggtggtcctagggacacctagtccctgtattgtggtattcctccctttgtgtgtcttgtttttatgttccatagcaccatcttaattgttttagaagaaggatgcttatatggctgtggctgccttgtgacttgtgtgggtctgtgggctgcggggtggttctaaagctctgcagccccgagtgtttatttattaattattgttgaggttgagagaagagggatgacaccacaccatggtttctcc

SEQ ID NO: 33169 - protein, 93 aa, Zea mays subsp. mays
AWKGSATGRSSNSMREFLEKNYKETSGKETIKLAIRALLEVVESGGKNIEVAVMTKKDGLRELEEAEIDEYVAEIEAEKAAAEAAKKGGPRDT

SEQ ID NO: 33170 - protein, 80 aa, Zea mays subsp. mays
MREFLEKNYKETSGKETIKLAIRALLEVVESGGKNIEVAVMTKKDGLRELEEAEIDEYVAEIEAEKAAAEAAKKGGPRDT

SEQ ID NO: 33171 - DNA, 873 bp, Zea mays subsp. mays
atgacctaatcaccaagatccaatccctcccccttcgagcaagaacaggcgacaaggctggacctgctgccaattcacaagtgcagcagcagaagcttgtcgttgcacaatggctactactgctgctgcagcccccgacctctcgctgcatatcagccctccctcgccgcccgatgatgctaggagcagtgacatgctcttctccaagcagacgctgtgcctcggactcgttcagacgacgacggcggcggcagcgcatgatcaggatggccaatgcgacgacgtccagcagcagcagcggctgcaccagcctagccagatccagaggttcaagaaaacctcgtcatcgtccgcgtcgttgttatctgccggaggaggcacgacgagatctgggaacggcaacagcgggggcgggaagaggagctccagagcgccgaggatgaggtggaccacggctcttcatgcacacttcgtccatgccgtagagctccttggcggccatgagagagcaacgccaaagtcagtgctggagctgatgaacgttaaggacctcacattggctcatgttaagagccacttgcagatgtatcgaacagtgaagggaacgacggcagacagatcatgtgctgcaggccatgtccagatgagagacatgggctttctgcacaggggttgtgaactgaatggcttcgaagcgtttagcaacggtacttctaatgctaccgccaataatagaatgcaggcagctgccgggtcgccggcagggaagcatgctgaggtagcctggttcttgcggccacccttggcacaccagagtagtggtggtggtggtggtggtggggcggtgccgctgccgctgccgctgccctgccc

SEQ ID NO: 33172 - protein, 254 aa, Zea mays subsp. mays
MATTAAAAPDLSLHISPPSPPDDARSSDMLFSKQTLCLGLVQTTTAAAAHDQDGQCDDVQQQQRLHQPSQIQRFKKTSSSSASLLSAGGGTTRSGNGNSGGGKRSSRAPRMRWTTALHAHFVHAVELLGGHERATPKSVLELMNVKDLTLAHVKSHLQMYRTVKGTTADRSCAAGHVQMRDMGFLHRGCELNGFEAFSNGTSNATANNRMQAAAGSPAGKHAEVAWFLRPPLAHQSSGGGGGGGAVPLPLPLPC

SEQ ID NO: 33173 - protein, 226 aa, Zea mays subsp. mays
MLFSKQTLCLGLVQTTTAAAAHDQDGQCDDVQQQQRLHQPSQIQRFKKTSSSSASLLSAGGGTTRSGNGNSGGGKRSSRAPRMRWTTALHAHFVHAVELLGGHERATPKSVLELMNVKDLTLAHVKSHLQMYRTVKGTTADRSCAAGHVQMRDMGFLHRGCELNGFEAFSNGTSNATANNRMQAAAGSPAGKHAEVAWFLRPPLAHQSSGGGGGGGAVPLPLPLPC

SEQ ID NO: 33174 - protein, 146 aa, Zea mays subsp. mays
DLITKIQSLPLRARTGDKAGPAANSQVQQQKLVVAQWLLLLLQPPTSRCISALPRRPMMLGAVTCSSPSRRCASDSFRRRRRRQRMIRMANATTSSSSSGCTSLARSRGSRKPRHRPRRCYLPEEARRDLGTATAGAGRGAPERRG

SEQ ID NO: 33175 - DNA, 754 bp, Zea mays subsp. mays
atcgccccgcgaaccctagctcccgcaactgccgccgccactcccacgctcgcagccatgccgcccaagctcgacccgtcgcaggtggtggaggtgttcgtccgtgtgaccggcggcgaggtcggcgcagcgtcttcgctggcccccaagatcggcccgctcggtctttcccccaagaagatcggagaggacatcgccaaggagacggccaaggactggaagggcctccgcgtcaccgtcaagctcaccgtccagaaccggcaggccaaggtctccgtcgtcccctccgccgcggcgctcgtcatcaaggcgctcaaggagccagagagggaccgcaagaaggtcaagaacatcaagcacagcggcaacatcagcctcgacgacgtcatcgagatcgccaggaccatgaggcacaggtccatggccaaggaattggccggcaccgtcaaggagatcctcggtacctgcgtcagcgtcgggtgcaccgtcgacggcaaggaccccaaggacctgcagcaggagattgacgacggcgaggtggagatcccgtccgcttaagaaggattggtgtccaggactgtgttatctttgctgctgaagccattctctgcctagattttctcatatttatttgaggtgggggtggacgtggacgtggaactatggaagttatcacagcggagttttgcttagaaactttgtcatgctttaagtctgagacaatttctgtcaaattttatgaacattcctaggt

SEQ ID NO: 33176 - protein, 185 aa, Zea mays subsp. mays
IAPRTLAPATAAATPTLAAMPPKLDPSQVVEVFVRVTGGEVGAASSLAPKIGPLGLSPKKIGEDIAKETAKDWKGLRVTVKLTVQNRQAKVSVVPSAAALVIKALKEPERDRKKVKNIKHSGNISLDDVIEIARTMRHRSMAKELAGTVKEILGTCVSVGCTVDGKDPKDLQQEIDDGEVEIPSA

SEQ ID NO: 33177 - protein, 174 aa, Zea mays subsp. mays
RPANPSSRNCRRHSHARSHAAQARPVAGGGGVRPCDRRRGRRSVFAGPQDRPARSFPQEDRRGHRQGDGQGLEGPPRHRQAHRPEPAGQGLRRPLRRGARHQGAQGAREGPQEGQEHQAQRQHQPRRRHRDRQDHEAQVHGQGIGRHRQGDPRYLRQRRVHRRRQGPQGPAAGD

SEQ ID NO: 33178 - protein, 166 aa, Zea mays subsp. mays
MPPKLDPSQVVEVFVRVTGGEVGAASSLAPKIGPLGLSPKKIGEDIAKETAKDWKGLRVTVKLTVQNRQAKVSVVPSAAALVIKALKEPERDRKKVKNIKHSGNISLDDVIEIARTMRHRSMAKELAGTVKEILGTCVSVGCTVDGKDPKDLQQEIDDGEVEIPSA

SEQ ID NO: 33179 - DNA, 1362 bp, Zea mays subsp. mays
  misc_feature (460)..(460): n is a, c, g, or t
  misc_feature (658)..(659): n is a, c, g, or t
  misc_feature (666)..(667): n is a, c, g, or t
caacaacttgggcgcgcgcgcggccgggtagcaaaagctcgcgatctgtgcgcccaccaccgggaggagcgaagatgcggatgagctgcaatggctgccgcgtcctgcgcaagggctgcggcgacgcctgcaccatccgcccctgcctgcagtggatcgaggcccccgaggcgcaggccaacgccaccgtcttcctcgcaaagttctacggccgggcgggcctgctcaacctgctcgccgccgcgcccgacgacggcgtccgccccgcggtcttccgctccctgctctacgaggcgtgcggccgcatcgtcaacccggtctacggctccgtcggcctgctctggtcgcgccagtggcacaggtgcgccgacgccgtcgaggccgtgctcaggggggaccccgtcgtgcaggtcgacgccgggtccgacgccgccgctgccccgccgctgctcgccggcgncaggccgccgccgccggccgccttcgacatccgccacgtccccagggatcccgacgccaccgccgccgacctcctccgcgccggccgcaagaggttcaagcgcgcgggttcgtcttccaacgcctccaaggcgaagcccctgcccctcgagctcgagggcaaggccggcaacaacgaacgcgcgtcgcccagccctcnnccgacgnnacaactgagaggcggaggagctgcagccggtgccgatggtcgtcgagccagaacacggcgaggagtccgccggcagccacgaccaccacctgcagctgcaggggtggtcggaggaggacaccgacgtggaggcggcctcacacgtgagccaagccgaggctgagccgccagccagcagccagagccaggtgctggtagcggatcaggaggaagaggaggttgggctcgagctcacgcttgggttcgagcctgtcgtcaggcagcagccgaggtcgtcgcgctgcgacaagagcggcttgagcgcggcatcgagcctcatcggcctgcggctgcagctgccggccgcctaagcacaggcacagctcgcacctaaacgaatagagcagttttgcgaccctgcgcctgcggtgtttgcttaaaaataagcttttggacccccgggtgccaggagacacacagtagccaacttcaaattttctaggttttgtttatctttttcaatttttcttcttgtctttaactgtaaaagttgatggactgcacaattactcaggtagagggggtttggttccccgatcaaagagggcgtttggttactcggtttagttcttatatcgaatgtttaaatgccagttataagtattatatgtagtatatttaaaaattaattatataaatgaagactaaacattagt

SEQ ID NO: 33180 - protein, 275 aa, Zea mays subsp. mays
  misc_feature (153)..(153): Xaa can be any naturally occurring amino acid
  misc_feature (219)..(219): Xaa can be any naturally occurring amino acid
  misc_feature (222)..(222): Xaa can be any naturally occurring amino acid
TTWARARPGSKSSRSVRPPPGGAKMRMSCNGCRVLRKGCGDACTIRPCLQWIEAPEAQANATVFLAKFYGRAGLLNLLAAAPDDGVRPAVFRSLLYEACGRIVNPVYGSVGLLWSRQWHRCADAVEAVLRGDPVVQVDAGSDAAAAPPLLAGXRPPPPAAFDIRHVPRDPDATAADLLRAGRKRFKRAGSSSNASKAKPLPLELEGKAGNNERASPSPXPTXQLRGGGAAAGADGRRARTRRGVRRQPRPPPAAAGVVGGGHRRGGGLTREPSRG

SEQ ID NO: 33181 - protein, 251 aa, Zea mays subsp. mays
  misc_feature (129)..(129): Xaa can be any naturally occurring amino acid
  misc_feature (195)..(195): Xaa can be any naturally occurring amino acid
  misc_feature (198)..(198): Xaa can be any naturally occurring amino acid
MRMSCNGCRVLRKGCGDACTIRPCLQWIEAPEAQANATVFLAKFYGRAGLLNLLAAAPDDGVRPAVFRSLLYEACGRIVNPVYGSVGLLWSRQWHRCADAVEAVLRGDPVVQVDAGSDAAAAPPLLAGXRPPPPAAFDIRHVPRDPDATAADLLRAGRKRFKRAGSSSNASKAKPLPLELEGKAGNNERASPSPXPTXQLRGGGAAAGADGRRARTRRGVRRQPRPPPAAAGVVGGGHRRGGGLTREPSRG

SEQ ID NO: 33182 - protein, 249 aa, Zea mays subsp. mays
  misc_feature (127)..(127): Xaa can be any naturally occurring amino acid
  misc_feature (193)..(193): Xaa can be any naturally occurring amino acid
  misc_feature (196)..(196): Xaa can be any naturally occurring amino acid
MSCNGCRVLRKGCGDACTIRPCLQWIEAPEAQANATVFLAKFYGRAGLLNLLAAAPDDGVRPAVFRSLLYEACGRIVNPVYGSVGLLWSRQWHRCADAVEAVLRGDPVVQVDAGSDAAAAPPLLAGXRPPPPAAFDIRHVPRDPDATAADLLRAGRKRFKRAGSSSNASKAKPLPLELEGKAGNNERASPSPXPTXQLRGGGAAAGADGRRARTRRGVRRQPRPPPAAAGVVGGGHRRGGGLTREPSRG

SEQ ID NO: 33183 - DNA, 1818 bp, Zea mays subsp. mays
atcccgggatcctcgttttgtttcccttcccccacccttcctcttcctccctatctatcagcactgctcgccggcgccgcctctgcaaaaggctcacttttgcctccggaacccagcggaatccgccggcggaccggaaacactccctcgcccccctcaccccctgtctgcccggccgtcggagcgcgtcgcctccgggcgtgcagcagcagtccgtggaggtggagccgggaggaggaggaggaggacgaggacgaggcataatctgccgagagcgggacagcaggagtgggctgctccgctcgcgctggagccaaagctactgattgccttgtcctgaccagcgaaagagggatctttgggaggcaatcagaggtgttcggtttggtcaaacaaagctcagctctcttgggatgcttgctgcgagctgcttgtgttcatacttgagagaataaaacagtgcatcatcttgctgtcttgtccttcgtgattggaagagaaaacgtgctgctgttcttgctatgtctgtctcggagaaggtggcgccatcgaagtcatcagtttcttcgtcgtcagatttggatccgctgctgaaggatctcacggagaagaagttgacctttaggaggaacgtggtgtcattggcagctgagctcaaggatgcgaggaacaagcttgcctcccaggagcagctgtttgtaaaggaatctcaaactagaaaggttgttgagacaaaggcaaggagcatggaagaggaagtaagcaagctgcagaaatgcttgcaggacaaggatgagcaactgcgttcatccgcaagtagcacggaacagtacctccatgagttggatgatcttagaacacaactgtcaattactcaagctacagcagaagcgagtgctgcatcagccaagtcagctcaggtgcagtgcttgtcattgctgaaagagctgaatgagaaggacatctcgctcaaagagcatgagcttcgagtgaacaagctaggtgagcagctcgatcttctccagaaggatctacaagcaagggagctctcacaaatgcaacttaaggatgaagttctaagaattgagaccgacatcatggatgcaattgccaaagctgggtctaggtctgacaaagacaatgagcttttaaagatcttatctgacgtttcaccaaggaatgtccagaacctcaacagccttttgaatgctaagaatacagaaattgcgaggttgagagaggaaatcagaatattatctgctcactggacgaacaaaaccaaggaacttgaatcacagttagaaaagcagcgaagaactgatcaggagctgaagaagagggtcctgaagcttgaattttgccttcaagaatctcagtcccagatgcgaaaattaaagaggatgggggagaaaagagacaaggctctcaaggagctcatggaccaggtggccatgaagcagcccaacagcatgtgccatggaaacaaggataatttctgggagagccagggcttcaggttcattgcctctatgtcgatgctggcgctagtgatcctcgcaaagcgttgaagcggcatagtttaagcagatgtgaatgtagcgtttacattagcttgtaggcttgggcagttgtgcatactgcatgccaaaatttgccgacatccaatcctagtctgtaaactgtaaaaatagttgtggcctgtaatccgtagcgcagtttctgctagttcatgtaaacccatataagctgtcttgtagtcacagctagtgaatgtcagctcatgtagtcaagaatctacaaccttataatttcagttcc

SEQ ID NO: 33184 - protein, 348 aa, Zea mays subsp. mays
MSVSEKVAPSKSSVSSSSDLDPLLKDLTEKKLTFRRNVVSLAAELKDARNKLASQEQLFVKESQTRKVVETKARSMEEEVSKLQKCLQDKDEQLRSSASSTEQYLHELDDLRTQLSITQATAEASAASAKSAQVQCLSLLKELNEKDISLKEHELRVNKLGEQLDLLQKDLQARELSQMQLKDEVLRIETDIMDAIAKAGSRSDKDNELLKILSDVSPRNVQNLNSLLNAKNTEIARLREEIRILSAHWTNKTKELESQLEKQRRTDQELKKRVLKLEFCLQESQSQMRKLKRMGEKRDKALKELMDQVAMKQPNSMCHGNKDNFWESQGFRFIASMSMLALVILAKR

SEQ ID NO: 33185 - protein, 273 aa, Zea mays subsp. mays
MEEEVSKLQKCLQDKDEQLRSSASSTEQYLHELDDLRTQLSITQATAEASAASAKSAQVQCLSLLKELNEKDISLKEHELRVNKLGEQLDLLQKDLQARELSQMQLKDEVLRIETDIMDAIAKAGSRSDKDNELLKILSDVSPRNVQNLNSLLNAKNTEIARLREEIRILSAHWTNKTKELESQLEKQRRTDQELKKRVLKLEFCLQESQSQMRKLKRMGEKRDKALKELMDQVAMKQPNSMCHGNKDNFWESQGFRFIASMSMLALVILAKR

SEQ ID NO: 33186 - DNA, 1198 bp, Zea mays subsp. mays
tctagtctctagtttctagtctctacccccaggccccagcccccccattcctgcctcttctctctctcgcccacccgccccggccccaatgtcgccgcccctcgagccccacgactacatcggcctctccgccgccgccgcggcgccgccgaccccgacctcctcctcgtcgtcctcgtcctcgccggcgccccgcctcaccctccgcctcggcctgccgggctccgagtcccccgaccgcgaccgcgaccgctgcgaggacgtcgccgccgcgctctccctcggcccgctgcctgctacccccaaggcgcccgctgccgtctccgccaagcgcgccttcccggaccccgcccagcgccccggcgctgccaaggctagcgacgacaggcaggcctcccccgccgcgccgccggccgccaaggcgcaggtggtgggatggccgcccgtgcggaactaccggaagaacaccctcgccgcgagcgcctccaggagcaaggcgccggcgccggcggcggaggacgccgcgtctgcggcccggcccatgtacgtgaaggtgagcatggatggcgcgccctacctcaggaaggtggacatcaagatgtactccagctacgaggacctctccgtggcgctcgagaagatgttcagctgcttcatcgctggtcaaagtgtcctgcataaatcatcgagcaaagacaggctaactaatggctcgaaggtggatgccctcaaagatcaggagtatgtacttacatatgaggataaggatgcagactggatgcttgtcggtgatcttccctgggattattttacctctatctgtcggaagctcaaaatcatgaggggctctgatgctgttggaatagctccaagaaccatagagcagacaggtcagaacaaataagcttggtctttgcctgcacccacgcaagaaatctgagctagctgggaggccatgttgaaggctgaaatagttgctcggaattatcaaaagtcgtcaaatgttagtgtagtttccacgtgttcttgagacgtgtgtatttgtatgtctgtgatgtgatccgtcagatctgttcttgtgcccttcaaaggccaaatcagggagctctctgcttcctgtgtatgcttgcttttccagtattccctgttattctactatgaaatcatccatcgtgccacaaagaactgatggttcctg

SEQ ID NO: 33187 - protein, 271 aa, Zea mays subsp. mays
MSPPLEPHDYIGLSAAAAAPPTPTSSSSSSSSPAPRLTLRLGLPGSESPDRDRDRCEDVAAALSLGPLPATPKAPAAVSAKRAFPDPAQRPGAAKASDDRQASPAAPPAAKAQVVGWPPVRNYRKNTLAASASRSKAPAPAAEDAASAARPMYVKVSMDGAPYLRKVDIKMYSSYEDLSVALEKMFSCFIAGQSVLHKSSSKDRLTNGSKVDALKDQEYVLTYEDKDADWMLVGDLPWDYFTSICRKLKIMRGSDAVGIAPRTIEQTGQNK

SEQ ID NO: 33188 - DNA, 399 bp, Zea mays subsp. mays
  misc_feature (172)..(172): n is a, c, g, or t
  misc_feature (251)..(251): n is a, c, g, or t
  misc_feature (321)..(321): n is a, c, g, or t
agcaaaccctagcgccacccacccacccacccactcgcttcagccgcctccgccgcgcgtacaagcaggtggagacaggatgccggctggccacggcctgcgctcgcggacgcgcgacctcttcgcgcgccccttccgcaagaagggctacatcccgctcaccacctacctncgcacctacaagatcggcgattacgtcgatgtcaaggtgaacggcgccgtccacaaggggatgccgcacaagttcttgntgggtttttttaacaagggactggccttgttacaactctgctactaggctggagcctggagggagggacnatgatccatcagatgggctatgttactctgtagatcatcgagatgttaattaggtctcttgtgcagtgcagctcagcc

SEQ ID NO: 33189 - protein, 98 aa, Zea mays subsp. mays
  misc_feature (57)..(57): Xaa can be any naturally occurring amino acid
  misc_feature (84)..(84): Xaa can be any naturally occurring amino acid
ANPSATHPPTHSLQPPPPRVQAGGDRMPAGHGLRSRTRDLFARPFRKKGYIPLTTYXRTYKIGDYVDVKVNGAVHKGMPHKFLXGFFNKGLALLQLCY

SEQ ID NO: 33190 - protein, 72 aa, Zea mays subsp. mays
  misc_feature (31)..(31): Xaa can be any naturally occurring amino acid
  misc_feature (58)..(58): Xaa can be any naturally occurring amino acid
MPAGHGLRSRTRDLFARPFRKKGYIPLTTYXRTYKIGDYVDVKVNGAVHKGMPHKFLXGFFNKGLALLQLCY

SEQ ID NO: 33191 - protein, 69 aa, Zea mays subsp. mays
  misc_feature (57)..(57): Xaa can be any naturally occurring amino acid
QTLAPPTHPPTRFSRLRRAYKQVETGCRLATACARGRATSSRAPSARRATSRSPPTXAPTRSAITSMSR

SEQ ID NO: 33192 - DNA, 1024 bp, Zea mays subsp. mays
  misc_feature (129)..(130): n is a, c, g, or t
  misc_feature (137)..(138): n is a, c, g, or t
acttcgattcgctcccacgcacacacactcctgcctgcggttgccactcgcgtagcaccagacagcgggagcagcacgcgcgcgacgttcgcaatggcggcgcgggcaaccgtcgtcctctgcgccgcnntcctcgnnctgctctccgccaccagctccctcgcgcagtcccccgcggccgcgccggctaaggcgccgcccaagtcctcctccaaggccacgccggccgccgcgcccgcgcccaagtcctcctccaaggccagcccattggcgccggccgccgcgccaaccaccccggcacccgcggcggcgccggccacgccaaagcccaaggcccccgcgcccgcgcccgccaccaaggccgcagccccggccccggctacccctgctcccgtcgccactccccccgcggcgacgcctcccgccgccgaggcgcccgtgcccgccgcggcgccggcccccgagaccaagcccgtcgaggcccccgcccccgcccccgcgccggccaagaagaagaagccgtcgtccccctcctccaaggacaagaagaagaagaagggcgcgtccgcccctgccccggccgccgacgcccccgtcgccaagaagcccagaaccgccgacgcgcccacgtccgcagccgaggctcccggggcccagcggcgacgccgccgctgccgacaccgcgagggccgcagcgaggaggacaccggcgggcgtgatcgcgtcgtcggccgtcgcggtgctgctgggtgcggcggccctgctcgcctagataagatccccggatgccaccatcacaggatttgatgcccttttcctgcttttactttttctttcgctattttgtggaaaaaaggggttttcttctgtgtagtagagtagtaccgtagcagtagactagtagggcggatgatttcttctgcttccagagatgatacgagagagagagtggttagagtagagaggggactgcccgtgtaatgttcagatttatctacatatttatatatccctgttatagccc

SEQ ID NO: 33193 - protein, 268 aa, Zea mays subsp. mays
  misc_feature (43)..(44): Xaa can be any naturally occurring amino acid
  misc_feature (46)..(46): Xaa can be any naturally occurring amino acid
TSIRSHAHTLLPAVATRVAPDSGSSTRATFAMAARATVVLCAXXLXLLSATSSLAQSPAAAPAKAPPKSSSKATPAAAPAPKSSSKASPLAPAAAPTTPAPAAAPATPKPKAPAPAPATKAAAPAPATPAPVATPPAATPPAAEAPVPAAAPAPETKPVEAPAPAPAPAKKKKPSSPSSKDKKKKKGASAPAPAADAPVAKKPRTADAPTSAAEAPGAQRRRRRCRHREGRSEEDTGGRDRVVGRRGAAGCGGPARLDKIPGCHHHRI

SEQ ID NO: 33194 - protein, 237 aa, Zea mays subsp. mays
  misc_feature (12)..(13): Xaa can be any naturally occurring amino acid
  misc_feature (15)..(15): Xaa can be any naturally occurring amino acid
MAARATVVLCAXXLXLLSATSSLAQSPAAAPAKAPPKSSSKATPAAAPAPKSSSKASPLAPAAAPTTPAPAAAPATPKPKAPAPAPATKAAAPAPATPAPVATPPAATPPAAEAPVPAAAPAPETKPVEAPAPAPAPAKKKKPSSPSSKDKKKKKGASAPAPAADAPVAKKPRTADAPTSAAEAPGAQRRRRRCRHREGRSEEDTGGRDRVVGRRGAAGCGGPARLDKIPGCHHHRI

SEQ ID NO: 33195 - DNA, 1245 bp, Zea mays subsp. mays
gttccctctccgaattcgaccccgccgctaaaccccgcaccggttgccgaggcgtctcccgctccagctccgactctcacgcgactagggttctgtgcgtccacttccccgtcggcgcaatggaggtcgggggtcaagaagtgaagccaggagccacggtttcttgcaaagttggtgatggcttggttatccacctttcacaggctgcactgggggaatcaaagaaagcgagtgagaatgccattttgtctgttaatattgatgataagaaactagtgcttggaaccttatcagttgagaagcatcctcagatctcttgtgatcttgtatttgataaggattttgagctaccacacaattcaaaaacacgtagcgttttcttccgtggctacaagtcccctgttcctctgtttgagtctaattctggtgaagatagttccgatgaagagctaaaaaccgatcaaattccattgcagaataatgaaattaaaatttctgcggcaaaggttcctgcgaaggatgatgatgatgatgttttcattattctagcgatgatgatgatgatttatagcagtgatgatgatgatgatgatttcactactagtgatagtgataatgaaatgtctgaggaagatgactccagtgatgaagatgaaatgtctgaggaagatgactccagtgatgaagatgaaatgtcaggtggtgctgatcctagtgatgattccagtgatgaatctggttcagaacatacttctgccccaaagaagactgatgtagtagttggcaagaagagagcaatcaaagctgaggcaccttatggtaagaaggctaagtctgaacaatcttctcagaaaacaggtgacaaggcttcaacttctcatcctgcaaagcagtccatcaagactcctgcagacaaatctaggaagacccccacagctgacaagaaatcccccaaatctgggagccatggctgcaagtaacgcaacaaatctttcagcagtgcgtcagcactttagtcccatcagaagccaaaaaagcatgaagcctagaggagcatgtgctgtaccttataggttgatctacttgaattatcaaaatcagtggtcttatttttgaacttgaaaatatcaagtttggaacttgcctagtagttatgcgattagtggtcttactatttttaaacttaggaaatctcaagtttggaacatacctggtatgtcttgttaataacatgggtgtgagagg

SEQ ID NO: 33196 - protein, 325 aa, Zea mays subsp. mays
SLSEFDPAAKPRTGCRGVSRSSSDSHATRVLCVHFPVGAMEVGGQEVKPGATVSCKVGDGLVIHLSQAALGESKKASENAILSVNIDDKKLVLGTLSVEKHPQISCDLVFDKDFELPHNSKTRSVFFRGYKSPVPLFESNSGEDSSDEELKTDQIPLQNNEIKISAAKVPAKDDDDDVFIILAMMMMIYSSDDDDDDFTTSDSDNEMSEEDDSSDEDEMSEEDDSSDEDEMSGGADPSDDSSDESGSEHTSAPKKTDVVVGKKRAIKAEAPYGKKAKSEQSSQKTGDKASTSHPAKQSIKTPADKSRKTPTADKKSPKSGSHGCK

SEQ ID NO: 33197 - protein, 286 aa, Zea mays subsp. mays
MEVGGQEVKPGATVSCKVGDGLVIHLSQAALGESKKASENAILSVNIDDKKLVLGTLSVEKHPQISCDLVFDKDFELPHNSKTRSVFFRGYKSPVPLFESNSGEDSSDEELKTDQIPLQNNEIKISAAKVPAKDDDDDVFIILAMMMMIYSSDDDDDDFTTSDSDNEMSEEDDSSDEDEMSEEDDSSDEDEMSGGADPSDDSSDESGSEHTSAPKKTDVVVGKKRAIKAEAPYGKKAKSEQSSQKTGDKASTSHPAKQSIKTPADKSRKTPTADKKSPKSGSHGCK

SEQ ID NO: 33198 - DNA, 747 bp, Zea mays subsp. mays
gccgtgtgcatagcagcaaatagtggtcggcctgttggtactctatatcgtcccttccagtgtacccgtcctccagcccattatacatcatacttgctccagataagaccaagagcatcatggccaacgccttgcctctcatcgtcgcgctggtcgccgccgccgggtgcgcggcgctggcttcggccacgtcgtacaccgtcggcgactcgcagggctggacgaccaccggcgtcgactacagcagctgggccagccgcaacactttcgtcgtcggagacacactagtgttcaactacgtgagcaaggcgcacacggtgacggaggtgagcaaggccggctacgacgcctgctccggcgccaacgcgctcagcgacgacgacaccggctccaccaccatcacgctccagaccccgggcacgcactatttcatctgcaacgtccccggccactgcgccagcggcatgaagctagcggtcgccgtctccgcctcgccctcgggcacggccccttccaccggagccctgcaggttccggcgatggcatccgtcgtcgccgcggccgcgggcgctgccatcaagctcgcgctcttctgacggagcacggccgggtcgtctcaggggagagacagtgcatgcagactacgttcttggcggttgatagtttcccgctggcgattgttcgccgcgcagttcatgtacgtatgtatgtgtgtatgctactctgcggtggcgaatgctttttctg

SEQ ID NO: 33199 - protein, 158 aa, Zea mays subsp. mays
MANALPLIVALVAAAGCAALASATSYTVGDSQGWTTTGVDYSSWASRNTFVVGDTLVFNYVSKAHTVTEVSKAGYDACSGANALSDDDTGSTTITLQTPGTHYFICNVPGHCASGMKLAVAVSASPSGTAPSTGALQVPAMASVVAAAAGAAIKLALF

SEQ ID NO: 33200 - protein, 95 aa, Zea mays subsp. mays
AVCIAANSGRPVGTLYRPFQCTRPPAHYTSYLLQIRPRASWPTPCLSSSRWSPPPGARRWLRPRRTPSATRRAGRPPASTTAAGPAATLSSSETH

SEQ ID NO: 33201 - DNA, 814 bp, Zea mays subsp. mays
actagaacctgctgattcctggtcgccagcttctctttcccacacccacaccacaaccccccgccggcacggctcccggtgtcccttccactctccaccctctccttcccttcggcgccaagtccatccgcccctccgaatctccgattgccgccgtccagttttggcaggtgccggccgacagttgagaatgggactgaggcgcctgatgagatgctgctgctgctgcattgcaaagcacgcggacgacggcgacaagatcgatttcggaggtggcaatgttcacgttgtcacaagcaaagaggactgggaccaaagaattgcggaggcaaacaaggatgggaaaaccgtggttgcaaacttcagcgcttcctggtgtgggccgtgccgtgtcatcgcacctgtctacgccgaaatgtcgcagacgtaccctcagctcatgttcctgacgatcgatgttgatgacttgatggagttcagctcgtcgtgggacatccgcgcgaccccgaccttcttcttcctcaagaacgagcagcaggtggacaagctggtcggcgccaacaagcctgagctggagaagaaagtggccgccgtcgccgacgccgccggcagcaagacagtgtagtgtaggcaaagacccgcctagcttgttgacctggccctgtacatcgttatatcctattgttgctgtgtgtttctttcttggcaccgtgcgcatgcgtcgatctgtcggcggtaatgtcttccgccatgtgctgattgtaagagttgcccggtaatggtaatggtaatggtaatggtgtcttacagtttc

SEQ ID NO: 33202 - protein, 207 aa, Zea mays subsp. mays
LEPADSWSPASLSHTHTTTPRRHGSRCPFHSPPSPSLRRQVHPPLRISDCRRPVLAGAGRQLRMGLRRLMRCCCCCIAKHADDGDKIDFGGGNVHVVTSKEDWDQRIAEANKDGKTVVANFSASWCGPCRVIAPVYAEMSQTYPQLMFLTIDVDDLMEFSSSWDIRATPTFFFLKNEQQVDKLVGANKPELEKKVAAVADAAGSKTV

SEQ ID NO: 33203 - protein, 144 aa, Zea mays subsp. mays
MGLRRLMRCCCCCIAKHADDGDKIDFGGGNVHVVTSKEDWDQRIAEANKDGKTVVANFSASWCGPCRVIAPVYAEMSQTYPQLMFLTIDVDDLMEFSSSWDIRATPTFFFLKNEQQVDKLVGANKPELEKKVAAVADAAGSKTV

SEQ ID NO: 33204 - protein, 138 aa, Zea mays subsp. mays
MRCCCCCIAKHADDGDKIDFGGGNVHVVTSKEDWDQRIAEANKDGKTVVANFSASWCGPCRVIAPVYAEMSQTYPQLMFLTIDVDDLMEFSSSWDIRATPTFFFLKNEQQVDKLVGANKPELEKKVAAVADAAGSKTV

SEQ ID NO: 33205 - DNA, 1380 bp, Zea mays subsp. mays
acacatcagttcatttcagtttcagcaggtcagttttcgtcctgatactctgtcgctgcagcggtgccggtgcagtgcagcgctagctgcagttgggttgcggccgcagagcagcagcaggaaggatggcgaccaaggtggtggtggacctgcggtccgacacggtcaccaagccttccgaggccatgcgcgcgtccatggccgcggccgacgtcgacgacgacgtccggggcgcggacccgaccgcgcgccgcttccaggaggagatggcggcgctcatgggcaaggaggccgcgctcttcgtcccgtcggggaccatgggcaacctcgtgtccgtcctcgcgcactgcgacgtccgcggcagcgaggtcatcctcggcgacgactcgcacatccacctctacgagaacggcggcatctccaccctcggcggcgtgcaccctaagaccgtcagaaacaactccgacggcaccatggacatcgacagcatcgtcgctgcaatcaggcctcccggcggtggcctgtattacccgaccaccaggctcatctgcttggagaacacacatgggaattccggagggaagtgtttatccgcagaatacactgaaaaggttggcgaaattgccaagagtcatggcctgaagcttcatatcgatggagctcgcattttcaacgcctctgtggcacttggagttcctgtggacagacttgtgagagctgcagattcagtttcggtatgcatttctaaaggtttaggcgcccccgttggatcagttattgttggctcgaaggccttcatcgacaaggccaaaattctccggaagaccctaggtggtggaatgaggcaggttggagttctctgtgctgctgctcatgttgccgttcgtgacaatgtgggaaagcttgcagatgaccacagaaaggctaaagctttggcagacggactgaataaaatcgaacagttcagagtggattcagcatcagtccagaccaatatggtattcttggacatcgtggattcacgcatatcatctaacaagctgtgccaggttctgggaacgcacaatgtgctcgcaagtccaaggagtccaaaaagtgtcaggcttgtccttcattaccaaatttcagatgatgatgttcaatatgcactgacgtgttttaagaaagctgctgaacagctactaatgggcagtactgaactcgagcatttggctgaacagctactgatgggcactaccaagaactcgtacgggcaatagggcaccctgatgcataagctcggtgtggtcttatctgtaatcagctcgaaatattgtagccgcaccaaacctttgctgaataactgttgcttctcacttgtttattggatgtgttcgttcc

SEQ ID NO: 33206 - protein, 377 aa, Zea mays subsp. mays
MATKVVVDLRSDTVTKPSEAMRASMAAADVDDDVRGADPTARRFQEEMAALMGKEAALFVPSGTMGNLVSVLAHCDVRGSEVILGDDSHIHLYENGGISTLGGVHPKTVRNNSDGTMDIDSIVAAIRPPGGGLYYPTTRLICLENTHGNSGGKCLSAEYTEKVGEIAKSHGLKLHIDGARIFNASVALGVPVDRLVRAADSVSVCISKGLGAPVGSVIVGSKAFIDKAKILRKTLGGGMRQVGVLCAAAHVAVRDNVGKLADDHRKAKALADGLNKIEQFRVDSASVQTNMVFLDIVDSRISSNKLCQVLGTHNVLASPRSPKSVRLVLHYQISDDDVQYALTCFKKAAEQLLMGSTELEHLAEQLLMGTTKNSYGQ

SEQ ID NO: 33207 - protein, 357 aa, Zea mays subsp. mays
MRASMAAADVDDDVRGADPTARRFQEEMAALMGKEAALFVPSGTMGNLVSVLAHCDVRGSEVILGDDSHIHLYENGGISTLGGVHPKTVRNNSDGTMDIDSIVAAIRPPGGGLYYPTTRLICLENTHGNSGGKCLSAEYTEKVGEIAKSHGLKLHIDGARIFNASVALGVPVDRLVRAADSVSVCISKGLGAPVGSVIVGSKAFIDKAKILRKTLGGGMRQVGVLCAAAHVAVRDNVGKLADDHRKAKALADGLNKIEQFRVDSASVQTNMVFLDIVDSRISSNKLCQVLGTHNVLASPRSPKSVRLVLHYQISDDDVQYALTCFKKAAEQLLMGSTELEHLAEQLLMGTTKNSYGQ

SEQ ID NO: 33208 - protein, 353 aa, Zea mays subsp. mays
MAAADVDDDVRGADPTARRFQEEMAALMGKEAALFVPSGTMGNLVSVLAHCDVRGSEVILGDDSHIHLYENGGISTLGGVHPKTVRNNSDGTMDIDSIVAAIRPPGGGLYYPTTRLICLENTHGNSGGKCLSAEYTEKVGEIAKSHGLKLHIDGARIFNASVALGVPVDRLVRAADSVSVCISKGLGAPVGSVIVGSKAFIDKAKILRKTLGGGMRQVGVLCAAAHVAVRDNVGKLADDHRKAKALADGLNKIEQFRVDSASVQTNMVFLDIVDSRISSNKLCQVLGTHNVLASPRSPKSVRLVLHYQISDDDVQYALTCFKKAAEQLLMGSTELEHLAEQLLMGTTKNSYGQ

SEQ ID NO: 33209 - DNA, 1151 bp, Zea mays subsp. mays
gtgacacctccgcccaccctcgccccctccctaccggcaccgcccagatggcctgctcccacatcgtcgccgccgcgggggtctcctcccccgccgcagcggcggctcgttccccggcgcattctcccgcttccgccttcgcgcgcctccggtcgacgcctcgtttcgcgagcgctggcttgtcggttaagggaaacggagcggcgtttccgttggtcgccgccgcggggccggccgcggcggcaccggtggccgacctggacggccgcccggccacggagaagcagcccatcatcgtcatcgacaactacgacagcttcacatacaacctctgccagtatatgggggagcttggattgaacttcgaagtataccgcaatgatgaactgaccatagaagatgtgagaaggaagaacccaaggggaatacttatttctccaggacctggtgaaccacaagattcgggaatatcattgcagactgttcttgaattaggcccaaccatcccaatttttggagtttgcatgggtctgcaatgcattggagaggcatttggaggaaagattatccgtgctccttctggagtgatgcatgggaaaagctctccagtttattacgatgaggaattaggaaaggcattgttcaatggcttgccaaacccttttactgccgcgaggtaccacagcttggtcattgagcgagaaaccttcccacatgatgctttggaggctactgcatggactgaagatggacttatcatggctgctcgccacaagaagtacaaacacatccagggtgtccaattccacccggagagcatcatcacccctgaaggcaagaaaatcatcctcaactttgtcagattcattgaggaactggagaagcagcgttcgtaggggaggtagacgcgacaggtggtttcatttcatagatcagacggaagcagagacaaggcgcttaaagctgcgccaggttccggggctggcagttgaagcatagctaggaaacagctttccctctcttaattcgttgtgttcgtggtgacataatctgtgtgcggaccgaatttagaataaagtacaggcgtccgtctgatcaaataagcaccggtgttggtgctctatagatgaatatatccggtgattttcggc

SEQ ID NO: 33210 - protein, 297 aa, Zea mays subsp. mays
DTSAHPRPLPTGTAQMACSHIVAAAGVSSPAAAAARSPAHSPASAFARLRSTPRFASAGLSVKGNGAAFPLVAAAGPAAAAPVADLDGRPATEKQPIIVIDNYDSFTYNLCQYMGELGLNFEVYRNDELTIEDVRRKNPRGILISPGPGEPQDSGISLQTVLELGPTIPIFGVCMGLQCIGEAFGGKIIRAPSGVMHGKSSPVYYDEELGKALFNGLPNPFTAARYHSLVIERETFPHDALEATAWTEDGLIMAARHKKYKHIQGVQFHPESIITPEGKKIILNFVRFIEELEKQRS

SEQ ID NO: 33211 - protein, 282 aa, Zea mays subsp. mays
MACSHIVAAAGVSSPAAAAARSPAHSPASAFARLRSTPRFASAGLSVKGNGAAFPLVAAAGPAAAAPVADLDGRPATEKQPIIVIDNYDSFTYNLCQYMGELGLNFEVYRNDELTIEDVRRKNPRGILISPGPGEPQDSGISLQTVLELGPTIPIFGVCMGLQCIGEAFGGKIIRAPSGVMHGKSSPVYYDEELGKALFNGLPNPFTAARYHSLVIERETFPHDALEATAWTEDGLIMAARHKKYKHIQGVQFHPESIITPEGKKIILNFVRFIEELEKQRS

SEQ ID NO: 33212 - protein, 184 aa, Zea mays subsp. mays
MGELGLNFEVYRNDELTIEDVRRKNPRGILISPGPGEPQDSGISLQTVLELGPTIPIFGVCMGLQCIGEAFGGKIIRAPSGVMHGKSSPVYYDEELGKALFNGLPNPFTAARYHSLVIERETFPHDALEATAWTEDGLIMAARHKKYKHIQGVQFHPESIITPEGKKIILNFVRFIEELEKQRS

SEQ ID NO: 33213 - DNA, 1504 bp, Zea mays subsp. mays
gtcttgtttcgctgtcttgttccgcgctccccaacccccctcccaaccccaaccccgtcccaacccccactacggccttccccccatggctcccctggcctcccttcctctcccgcccagtactgccgtcaccgctcgcttcctcgccgcccccgccatccgcgtgatcagcccatcgcggcccgcgctgccgctcctctcatccgcctccgcaggcggcttccctcacgcctctcgcgctccctgcagtgccgcccgcgagcaccgccgcggcaccgtgcgggaatgctctcgagctgatgctgctggagcagctccattatcaaagacactgttagacctcaaggattcctgctggagatttttaaggccacatacaatccgaggaactgctttaggatccatagcattggttgcgagagccttgatagagaattcccatctgataaactggtggttgatattcaaagcattctatggacttggggcattgatatttggcaatggttacatagttgggattaatcagatctatgatgttgctattgacaagataaacaagccatatttacccattgctgctggtgatctctcaattcagtcagcatggttgttggtgatattatttgcagctgcaggtttttcaattgttatatcaaactttggacctttcattacctctctatactgccttggcctatttcttggcactatatattctgttcctccattcagactgaagagatatccggttgctgcttttcttatcattgcaacggttcgtggtttccttctcaactttggcgtgtactatgctactagggctgcactaggtcttacattccaatggagctcccctgttgctttcattacatgcttcgtgacactatttgctttggtcattgctataaccaaagatctccctgatgttgaaggagatcgcaagtatcaaatatcaactttggcaacaaagcttggtgtcagaaatattgcattccttggatctggtttattattagcaaactatattgctgctattgctgtagcttttaccatgcctcaggctttcaggtgcactgtaatggttcctgtgcatgctgtccttgctggtggtttaattttccagacatgggttctggagcaagcgaagtacagaaaggatgctatttcgcagtactatcggttcatctggaatctcttctatgctgaatatatcttcttcccgttaatatagagaggtgagtttcctgattagcattcagcatccatgaccctttgcttctgacatttgtctgcacaaaaaaatgtcagatcttgtagttcatcttgatcttgggctacagcctaattcatggtgaaaagagggagaagttggcaaagtgaggtctgtcgtgcatattttcaacggaaacaatggagtagcaatattgctatgctagggttctgaagttgtaggagcttttctaagcttttacgatgttgaaggcgttgttggagctgtggc

SEQ ID NO: 33214 - protein, 410 aa, Zea mays subsp. mays
SCFAVLFRAPQPPSQPQPRPNPHYGLPPMAPLASLPLPPSTAVTARFLAAPAIRVISPSRPALPLLSSASAGGFPHASRAPCSAAREHRRGTVRECSRADAAGAAPLSKTLLDLKDSCWRFLRPHTIRGTALGSIALVARALIENSHLINWWLIFKAFYGLGALIFGNGYIVGINQIYDVAIDKINKPYLPIAAGDLSIQSAWLLVILFAAAGFSIVISNFGPFITSLYCLGLFLGTIYSVPPFRLKRYPVAAFLIIATVRGFLLNFGVYYATRAALGLTFQWSSPVAFITCFVTLFALVIAITKDLPDVEGDRKYQISTLATKLGVRNIAFLGSGLLLANYIAAIAVAFTMPQAFRCTVMVPVHAVLAGGLIFQTWVLEQAKYRKDAISQYYRFIWNLFYAEYIFFPLI

SEQ ID NO: 33215 - protein, 382 aa, Zea mays subsp. mays
MAPLASLPLPPSTAVTARFLAAPAIRVISPSRPALPLLSSASAGGFPHASRAPCSAAREHRRGTVRECSRADAAGAAPLSKTLLDLKDSCWRFLRPHTIRGTALGSIALVARALIENSHLINWWLIFKAFYGLGALIFGNGYIVGINQIYDVAIDKINKPYLPIAAGDLSIQSAWLLVILFAAAGFSIVISNFGPFITSLYCLGLFLGTIYSVPPFRLKRYPVAAFLIIATVRGFLLNFGVYYATRAALGLTFQWSSPVAFITCFVTLFALVIAITKDLPDVEGDRKYQISTLATKLGVRNIAFLGSGLLLANYIAAIAVAFTMPQAFRCTVMVPVHAVLAGGLIFQTWVLEQAKYRKDAISQYYRFIWNLFYAEYIFFPLI

SEQ ID NO: 33216 - DNA, 1379 bp, Zea mays subsp. mays
aatctaccacgccacttacctcccgtcccgtcccgtctcgttctcgtcgcacctcgccccgcccgcagagagacggggcgcgcccgctcgagccgtgcgcgccagccagcgccatggcctcggaccaacaggccctcccggtcccggtccccgtcccgcccaaccctaacccgaccgcaccagccgacctgaccccgccctcggcgtccgccgcgcgcaagctccccatcaagcgccgctccccgcggccgtcgtcctcgcccccgtcctcttcctccccggcctcctccgacccgctccgcgcgcccggcggcggcggatccgaccagcagcagccgcccttcaagttccagcgcatctggtcggagtccgacgagctccgcttcctgcagggcctcctcggctgcggcacgcagggcctcgtcttcccgcgcgacctcaacgtcttctacgaccgcttctccgagtccatgccccagccctacacccgcgcccagctctcggagaagctccgccgcctcaagaacaagttccgcagcatgtccgcgcgcgtcgcgggaggcgtagacccggcccgcctcgcgccgcacgaccgcgacgtgctccacctctgctccaggctgtgggaccccgccaacgccgccacctcgcccttcgcggccagcgccggaacgtcggggaacaagcgccgccgctccaacccgcgtggcacgccgctccctcccccagacgcgtctggggatagcaactcccatgactacaatgggattagctcctctgctcccggtttgtttccggatggttccaacggcgaggttacgttttaccttgagcaagaaagcgggcagctgggcaatcatgaaggcgctgctcttgtagcagatagcaaattcgacgttattgtgcaggagcagcctgaggccgtggttactctcccgaatgggaacaacggagttggcaatgagatgagtgcggagtgtaaaacggtggtgccgtgcagcaacgagcaccgaatggcaaatgctgtcctagatgtgtttgaggaatgcctgagggaggcaaagagtaacgggattatcaatggtggcaatgtggagagcgagctctccaagaggtggagagcacagaggatggatgagcttgatgtcttgagccggaggctgaggttgctcgtcgagtatgctgcagcggctgggcagtgaagcgtagattttggtggttttggtgatgtgcctcccaccatttgcccctttgttgtgtatagaacctaggttattgtgctatgctttgtaatgtcttcctcagctggacccttagaaagcctactatatttgcctatgtacccctcgtgtttaataatttgagcagcataataatcc

SEQ ID NO: 33217 - protein, 399 aa, Zea mays subsp. mays
STTPLTSRPVPSRSRRTSPRPQRDGARPLEPCAPASAMASDQQALPVPVPVPPNPNPTAPADLTPPSASAARKLPIKRRSPRPSSSPPSSSSPASSDPLRAPGGGGSDQQQPPFKFQRIWSESDELRFLQGLLGCGTQGLVFPRDLNVFYDRFSESMPQPYTRAQLSEKLRRLKNKFRSMSARVAGGVDPARLAPHDRDVLHLCSRLWDPANAATSPFAASAGTSGNKRRRSNPRGTPLPPPDASGDSNSHDYNGISSSAPGLFPDGSNGEVTFYLEQESGQLGNHEGAALVADSKFDVIVQEQPEAVVTLPNGNNGVGNEMSAECKTVVPCSNEHRMANAVLDVFEECLREAKSNGIINGGNVESELSKRWRAQRMDELDVLSRRLRLLVEYAAAAGQ

SEQ ID NO: 33218 - protein, 362 aa, Zea mays subsp. mays
MASDQQALPVPVPVPPNPNPTAPADLTPPSASAARKLPIKRRSPRPSSSPPSSSSPASSDPLRAPGGGGSDQQQPPFKFQRIWSESDELRFLQGLLGCGTQGLVFPRDLNVFYDRFSESMPQPYTRAQLSEKLRRLKNKFRSMSARVAGGVDPARLAPHDRDVLHLCSRLWDPANAATSPFAASAGTSGNKRRRSNPRGTPLPPPDASGDSNSHDYNGISSSAPGLFPDGSNGEVTFYLEQESGQLGNHEGAALVADSKFDVIVQEQPEAVVTLPNGNNGVGNEMSAECKTVVPCSNEHRMANAVLDVFEECLREAKSNGIINGGNVESELSKRWRAQRMDELDVLSRRLRLLVEYAAAAGQ

SEQ ID NO: 33219 - protein, 243 aa, Zea mays subsp. mays
MPQPYTRAQLSEKLRRLKNKFRSMSARVAGGVDPARLAPHDRDVLHLCSRLWDPANAATSPFAASAGTSGNKRRRSNPRGTPLPPPDASGDSNSHDYNGISSSAPGLFPDGSNGEVTFYLEQESGQLGNHEGAALVADSKFDVIVQEQPEAVVTLPNGNNGVGNEMSAECKTVVPCSNEHRMANAVLDVFEECLREAKSNGIINGGNVESELSKRWRAQRMDELDVLSRRLRLLVEYAAAAGQ

SEQ ID NO: 33220 - DNA, 1971 bp, Zea mays subsp. mays
attccacactaccccgcgctggactggagtcgagttgagctcacgctctcgcacactcgcactcccattcccactggccagattgatcttgcttcgctaatcatcctagatctccattcccgcccatgggatgcttccagtcgaaggtggcggggcccctgccgcccaacgacgccgccgctctccccgccgacaagcctgcagatcctgaggcggcgaatggcggcgccgacggggaaggcgacggtgacgacaaggaggctgtgaagcgcgcggtgccggtgttcagggagtttgctctggccgagctgcgcgccgccaccaagggattcagcgccgacctcatcgtctccgagagcggcgagaaggcgcccaacgccgtctaccgcggccgcctcgacggcgggcggctcatcgccgtcaagcgcttctcgcgcctctcctggcctgacccgcagcagttcctcgcggaggcggcgggcgttgggaaggtgcggcacaagcgcctcgtcaacctcattggctgctgcgccgagggtgacgagaggctgcttgtcgccgagtacatgcccaacgacaccctgtccaagcatctcttccactgggataagcagccgttaccatgggaaatgaggctgagggttgcatatttcattgcgcaagctctcgaccattgcaatgctgagaacaggaaaatctatcatgatttgaatgcttatagggtactttttgatgaggaaggtgatccccgcttgtcaagttttggattaatgaagaacagccgtgatgggaaaagttatagcactaacctggcttacactccaccagagtttctacgaactggcagagtaattccggagagtgtgatctatagctatggaactgtcctgttggatcttttgagcggaaaacacattcctcctagtcatgccctagatttaataaggggaaagaatatactgttgctgatggattcctccttagaagggcagtatgctaatgaagatgcttcgaaattggttgatcttgcatcaaagtgtctgcaatttgaatctagggatagaccgaacataaagtatcttctgtcttctgttggtcctcttcagaatcaaaaggaggttgcatcacatgtgttcatgggtattacaaaagccacatcagtactgccaaccatttgttctccactcagaaaggcctgcactggtatggatctttcagcggtgcatgatattttgctcaaaacaggttataaagatgatgagggtgcagaaaacgagctatcctttcaagaatggacccagcaagtgcaagagatgctgaacacaaagaagtttggtgacattgcatttagagacaaggattttaagactgcaattgactactactccaagctagttgcgatgatgtcgacgccttcagctacggtttttgtcaggcgcagtttttcctacttgatgaatgggcaagcagagctcgctctacgggacgcaatgcaagcccaggtctgcatgcccgagtggcctacggccttctacctccaggccctggctctttcaaagctcggcatggaaaccgatgcccaggacatgctcaacgatggcgccacgtttgaggccaagaagcagaacggctggcgcagttaggagccgacgacgaacaaagtctctcttccaacgactccgtgccgttgccctttgagagaagaaggtacaatggcgagtctcctccaaatcagttcactgggacacgcctgttgcactactagtagtgggattgaaacgcactgttttatcgtgcaatctcctctcgaatgtcggtaacgagtgatgatcatgatcaggggtggaaaaataggtcagggcctttgaacgcatagcgtactcttccgtgggttgcgctttgtgttgctggcgatggtggcaggatctgcctgattgttgcaactgcagttgtaattaaagggatgctctc

SEQ ID NO: 33221 - protein, 505 aa, Zea mays subsp. mays
MGCFQSKVAGPLPPNDAAALPADKPADPEAANGGADGEGDGDDKEAVKRAVPVFREFALAELRAATKGFSADLIVSESGEKAPNAVYRGRLDGGRLIAVKRFSRLSWPDPQQFLAEAAGVGKVRHKRLVNLIGCCAEGDERLLVAEYMPNDTLSKHLFHWDKQPLPWEMRLRVAYFIAQALDHCNAENRKIYHDLNAYRVLFDEEGDPRLSSFGLMKNSRDGKSYSTNLAYTPPEFLRTGRVIPESVIYSYGTVLLDLLSGKHIPPSHALDLIRGKNILLLMDSSLEGQYANEDASKLVDLASKCLQFESRDRPNIKYLLSSVGPLQNQKEVASHVFMGITKATSVLPTICSPLRKACTGMDLSAVHDILLKTGYKDDEGAENELSFQEWTQQVQEMLNTKKFGDIAFRDKDFKTAIDYYSKLVAMMSTPSATVFVRRSFSYLMNGQAELALRDAMQAQVCMPEWPTAFYLQALALSKLGMETDAQDMLNDGATFEAKKQNGWRS

SEQ ID NO: 33222 - protein, 358 aa, Zea mays subsp. mays
MPNDTLSKHLFHWDKQPLPWEMRLRVAYFIAQALDHCNAENRKIYHDLNAYRVLFDEEGDPRLSSFGLMKNSRDGKSYSTNLAYTPPEFLRTGRVIPESVIYSYGTVLLDLLSGKHIPPSHALDLIRGKNILLLMDSSLEGQYANEDASKLVDLASKCLQFESRDRPNIKYLLSSVGPLQNQKEVASHVFMGITKATSVLPTICSPLRKACTGMDLSAVHDILLKTGYKDDEGAENELSFQEWTQQVQEMLNTKKFGDIAFRDKDFKTAIDYYSKLVAMMSTPSATVFVRRSFSYLMNGQAELALRDAMQAQVCMPEWPTAFYLQALALSKLGMETDAQDMLNDGATFEAKKQNGWRS

SEQ ID NO: 33223 - protein, 337 aa, Zea mays subsp. mays
MRLRVAYFIAQALDHCNAENRKIYHDLNAYRVLFDEEGDPRLSSFGLMKNSRDGKSYSTNLAYTPPEFLRTGRVIPESVIYSYGTVLLDLLSGKHIPPSHALDLIRGKNILLLMDSSLEGQYANEDASKLVDLASKCLQFESRDRPNIKYLLSSVGPLQNQKEVASHVFMGITKATSVLPTICSPLRKACTGMDLSAVHDILLKTGYKDDEGAENELSFQEWTQQVQEMLNTKKFGDIAFRDKDFKTAIDYYSKLVAMMSTPSATVFVRRSFSYLMNGQAELALRDAMQAQVCMPEWPTAFYLQALALSKLGMETDAQDMLNDGATFEAKKQNGWRS

SEQ ID NO: 33224 - DNA, 1704 bp, Zea mays subsp. mays
acaaattagatgggcattcacatcagatcgagtgttttgattactttagtggtggtgattttgataagctatatatagtcaccggctctcaagataaaactgccaagatctgggactgcgagaatgcgggctgtgtccagacactggaaggacatgcaggtcccgttagagctgtctgttaccatcagaatctctcgttattaattacagggtgctctgacggatcaattcatctatggaactccactaccttcaggcttgagcataaactgaactttgctgacttcggattactgagttctgtagcttgtttgaaaggatcgaaaaggattgcaatcagaagcagggaaggattagcacttgtagacatagacatagaggacaagaaggatagcgatgtggagagcatcacgactactgcttccatgaacgacacaggtccaattacagaagagaacggagtggcagcagaccatatctctgatgaccacctggcgcagggcgtagtatatgtacatacagagattataggcaaagtcaattcagcatgcaccatagacgtccatccgacaaagccatggatggtcatcactcaagctaacaagtttgttcatgtttgggactaccatacaaaggtagtggaatggacgattcagattaagggagcgaaagttagttcagctaaatttatagccagccaggattggattgtggcgggtactacccgtggattcctccacgtgtacgattgcgaatcgaggaaggaaatacgccgtctttgtgaacacccgaaatctatcacgtcattggctgttgacgatgatgcccttgagctggtgctgtcagcgtccatcgatggcaagattttgatctggagctactggcactactatcacgcacgtagacgtagtacctggcatttggaaaaaacatttgacgcgggaagccagtgtctgaagcaagtcgcgtttattgctccaagtgtccatcgcagcagcagcactatcatcgctactgctcgagacggaacagtaaagatttgggatcccgatcgttctgacggatgccgtgagttcacattggctgcggattcaggtcagattgttgaatgtttcgattggtttagtcgtggtactgatatatacttggtcaccggttctcgagacaacactgccaagatctgggacatagaggatgggagttgtgtccgaacactggaaggacacgcagatcatgttaccgttgtctgttaccatccggatctttcaatgctcattacaggttcaagggacggctcgattcgtctgtggaactccactaccttcaggtttgagcatgagctgaactttgacctcgggtctctgagttctttagcttgtatcaagggatcaacaaggattgcaatcggatatgaaagaggtctagtactggcagacatttgcactcaggaacatagagcatgatctataaagcggcataataccttgagagcgacagaataaaatctaaacattgataaagcggcaaaaatccctggcaaacatttgctgatgcgatgggattgcatccaaacatttttcttggtaagctaatagactgcaataagtttttccatggacttgggaggtgtcgatctgcggatatgcttttgtatggtttaaacatatcatcggatagaaatttatactactatattaaaaattt

SEQ ID NO: 33225 - protein, 486 aa, Zea mays subsp. mays
KLDGHSHQIECFDYFSGGDFDKLYIVTGSQDKTAKIWDCENAGCVQTLEGHAGPVRAVCYHQNLSLLITGCSDGSIHLWNSTTFRLEHKLNFADFGLLSSVACLKGSKRIAIRSREGLALVDIDIEDKKDSDVESITTTASMNDTGPITEENGVAADHISDDHLAQGVVYVHTEIIGKVNSACTIDVHPTKPWMVITQANKFVHVWDYHTKVVEWTIQIKGAKVSSAKFIASQDWIVAGTTRGFLHVYDCESRKEIRRLCEHPKSITSLAVDDDALELVLSASIDGKILIWSYWHYYHARRRSTWHLEKTFDAGSQCLKQVAFIAPSVHRSSSTIIATARDGTVKIWDPDRSDGCREFTLAADSGQIVECFDWFSRGTDIYLVTGSRDNTAKIWDIEDGSCVRTLEGHADHVTVVCYHPDLSMLITGSRDGSIRLWNSTTFRFEHELNFDLGSLSSLACIKGSTRIAIGYERGLVLADICTQEHRA

SEQ ID NO: 33226 - protein, 345 aa, Zea mays subsp. mays
MNDTGPITEENGVAADHISDDHLAQGVVYVHTEIIGKVNSACTIDVHPTKPWMVITQANKFVHVWDYHTKVVEWTIQIKGAKVSSAKFIASQDWIVAGTTRGFLHVYDCESRKEIRRLCEHPKSITSLAVDDDALELVLSASIDGKILIWSYWHYYHARRRSTWHLEKTFDAGSQCLKQVAFIAPSVHRSSSTIIATARDGTVKIWDPDRSDGCREFTLAADSGQIVECFDWFSRGTDIYLVTGSRDNTAKIWDIEDGSCVRTLEGHADHVTVVCYHPDLSMLITGSRDGSIRLWNSTTFRFEHELNFDLGSLSSLACIKGSTRIAIGYERGLVLADICTQEHRA

SEQ ID NO: 33227 - protein, 293 aa, Zea mays subsp. mays
MVITQANKFVHVWDYHTKVVEWTIQIKGAKVSSAKFIASQDWIVAGTTRGFLHVYDCESRKEIRRLCEHPKSITSLAVDDDALELVLSASIDGKILIWSYWHYYHARRRSTWHLEKTFDAGSQCLKQVAFIAPSVHRSSSTIIATARDGTVKIWDPDRSDGCREFTLAADSGQIVECFDWFSRGTDIYLVTGSRDNTAKIWDIEDGSCVRTLEGHADHVTVVCYHPDLSMLITGSRDGSIRLWNSTTFRFEHELNFDLGSLSSLACIKGSTRIAIGYERGLVLADICTQEHRA

SEQ ID NO: 33228 - DNA, 1005 bp, Zea mays subsp. mays
  misc_feature (983)..(983): n is a, c, g, or t
  misc_feature (1000)..(1000): n is a, c, g, or t
aggagagcacaacgttacaaggacgcatcgaggagactacctacggccatggcgaggagaaggcttctcgcgctcgcctcccggctctacgggaggcctcaggcgacgcagccgtggcggcgacccccgccccggtttctctcctcagctgcgtccggcaccctcgatcacctgaagtcgccgcctttcgcgcgtccggctgcccggaaccccgcctcctatccatgggatcgattcggaggagggcagaagaggaccatgttcatccagacacagtcgaccccgaacccgcagtcactcatgttctatcctggaaagccagttatggagattgggagctctgatttccctaatgctcggactgcgatgacatcccctttggctaagtcgctttttgctattgatggagtaaccagggtattctttggatctgattttgtaactgttacaaaatcagaagaaacttcatgggattgcctcaaacctgaggtttttgctgcaataatggacttctactcatctgggcaaccactttttctggactcaaatgctgcagcttctatggacacagcaattcacgaggatgattctgaaatagttgccatgataaaagaattattggagactcgtattcgaccagctgttcaagatgacggcggtgacattgaataccgaggattcgacccagaaacaggaacagttaagcttaaaatgcaaggtgcctgcagcggctgtccaagttcgtcagtcacattgaagtctgggatagaaaacatgcttatgcactatgtgcctgaggtgaaaggagtagaacaggagttcgatggtgatgaggaagctgaagtggctggatagatcgagagagtttttacaggttttgagggtcaacacagcctgatgttatagcaacttcgcacgtacggtattgccgatcctgatgtatgcaggaggcaggcttagatagcagaggcgtcaatagtctnaaataacatccgttgcnctagt

SEQ ID NO: 33229 - protein, 284 aa, Zea mays subsp. mays
RRAQRYKDASRRLPTAMARRRLLALASRLYGRPQATQPWRRPPPRFLSSAASGTLDHLKSPPFARPAARNPASYPWDRFGGGQKRTMFIQTQSTPNPQSLMFYPGKPVMEIGSSDFPNARTAMTSPLAKSLFAIDGVTRVFFGSDFVTVTKSEETSWDCLKPEVFAAIMDFYSSGQPLFLDSNAAASMDTAIHEDDSEIVAMIKELLETRIRPAVQDDGGDIEYRGFDPETGTVKLKMQGACSGCPSSSVTLKSGIENMLMHYVPEVKGVEQEFDGDEEAEVAG

SEQ ID NO: 33230 - protein, 268 aa, Zea mays subsp. mays
MARRRLLALASRLYGRPQATQPWRRPPPRFLSSAASGTLDHLKSPPFARPAARNPASYPWDRFGGGQKRTMFIQTQSTPNPQSLMFYPGKPVMEIGSSDFPNARTAMTSPLAKSLFAIDGVTRVFFGSDFVTVTKSEETSWDCLKPEVFAAIMDFYSSGQPLFLDSNAAASMDTAIHEDDSEIVAMIKELLETRIRPAVQDDGGDIEYRGFDPETGTVKLKMQGACSGCPSSSVTLKSGIENMLMHYVPEVKGVEQEFDGDEEAEVAG

SEQ ID NO: 33231 - protein, 198 aa, Zea mays subsp. mays
MFIQTQSTPNPQSLMFYPGKPVMEIGSSDFPNARTAMTSPLAKSLFAIDGVTRVFFGSDFVTVTKSEETSWDCLKPEVFAAIMDFYSSGQPLFLDSNAAASMDTAIHEDDSEIVAMIKELLETRIRPAVQDDGGDIEYRGFDPETGTVKLKMQGACSGCPSSSVTLKSGIENMLMHYVPEVKGVEQEFDGDEEAEVAG

SEQ ID NO: 33232 - DNA, 1611 bp, Zea mays subsp. mays
gccgtatctgcagttctcgacctctcctcctacctcctcttcactcccttcctccctcttgcatcactatcaccaccaacaacaaggctaacgcacaccaatccaacaaggagaacaaaaaacaattaatcgtgttttgagcttttgatatcacctcgttcgagttaagtgcgtgaagaggcaataatggtggcagtggaggttgtgccggcgtccgcggagtccccgattccgatcgaggctaagaccgcggtgacgtcggaggcggaggcggaggcggaggccgagagcgaagtggaggcggagatgaagggtgatgcggcagccacggcgggagaaacggcggaggaggaggaggaggagaaggtgtacaagagcgacctgaagaagctggagaacctcatgtccaagcttaacccctccgcgcaggagttcgtgccgtcgtcgcgccgcacggccccagccgccgtggcggcggcgaagccggcgggaggaagggtgctctcagccgacgcgcccgtgttcgtgtccgccgccgagtactacggcgctgccggtgggcacctggagataggcggcggcggcggcaaagtcgtcgttggcggcgggggcagggactccagcagcgacggatccagcaacggcggcggcggcggcagtcgccaccaaccgaatcgccggaggaggaacagcttcaaccacgggaggcggaggggggccggaggccggccccggcggggtgatagggaggacagcgtgcgccggaccgtctacgtgtccgacattgatcagcatgtgaccgagcagaagctcgctgaagtgttctccaactgcgggcgagtggtagattgccgtatctgtggcgacccccactctgtcctacgctttgcgttcatcgagttttctgacgatgctggcgcaagagcggcgctaacactcgcgggaaccatacttggctgctatcctgtcagagttttgccttctaaaacagcaattctacctgtcaacccgaaatttcttcctcagactgacgatgagaaagaaatggtatcaaggactgtatattgtactaacatagacaagaaggttacggaggaggatgtaaagggtttcttccagcaagcctgcgggaaggtttctcggctgaggctccttactgacatagtacactccacatgcattgcttttgttgagtttgctcaggctgaaagtgcaattatggcattaaattttagtggtatggtccttggctcacttcctatcagggtgagcccttccaaaactccagtccgtccacgttctcctcgtgtgatgtccaattgatcaggctgctaccaatagcaaatcatcctaggcagagcttattgtagctatgatcgccctagaacccacttcacggatcaatgacgtcgttgtcctgagagtgtccaagtcagtcataggaaaccaacttgttgccaaatgctaatgtttttctgtttgccagatccatgcaccatttcccttctttttttcattcccccttatgttaattatgaacataattgtttataatcgcctttctcaggcatcagaataagaatgaataactctggcattttttgttgttct

SEQ ID NO: 33233 - protein, 378 aa, Zea mays subsp. mays
MVAVEVVPASAESPIPIEAKTAVTSEAEAEAEAESEVEAEMKGDAAATAGETAEEEEEEKVYKSDLKKLENLMSKLNPSAQEFVPSSRRTAPAAVAAAKPAGGRVLSADAPVFVSAAEYYGAAGGHLEIGGGGGKVVVGGGGRDSSSDGSSNGGGGGSRHQPNRRRRNSFNHGRRRGAGGRPRRGDREDSVRRTVYVSDIDQHVTEQKLAEVFSNCGRVVDCRICGDPHSVLRFAFIEFSDDAGARAALTLAGTILGCYPVRVLPSKTAILPVNPKFLPQTDDEKEMVSRTVYCTNIDKKVTEEDVKGFFQQACGKVSRLRLLTDIVHSTCIAFVEFAQAESAIMALNFSGMVLGSLPIRVSPSKTPVRPRSPRVMSN

SEQ ID NO: 33234 - protein, 338 aa, Zea mays subsp. mays
MKGDAAATAGETAEEEEEEKVYKSDLKKLENLMSKLNPSAQEFVPSSRRTAPAAVAAAKPAGGRVLSADAPVFVSAAEYYGAAGGHLEIGGGGGKVVVGGGGRDSSSDGSSNGGGGGSRHQPNRRRRNSFNHGRRRGAGGRPRRGDREDSVRRTVYVSDIDQHVTEQKLAEVFSNCGRVVDCRICGDPHSVLRFAFIEFSDDAGARAALTLAGTILGCYPVRVLPSKTAILPVNPKFLPQTDDEKEMVSRTVYCTNIDKKVTEEDVKGFFQQACGKVSRLRLLTDIVHSTCIAFVEFAQAESAIMALNFSGMVLGSLPIRVSPSKTPVRPRSPRVMSN

SEQ ID NO: 33235 - protein, 306 aa, Zea mays subsp. mays
MSKLNPSAQEFVPSSRRTAPAAVAAAKPAGGRVLSADAPVFVSAAEYYGAAGGHLEIGGGGGKVVVGGGGRDSSSDGSSNGGGGGSRHQPNRRRRNSFNHGRRRGAGGRPRRGDREDSVRRTVYVSDIDQHVTEQKLAEVFSNCGRVVDCRICGDPHSVLRFAFIEFSDDAGARAALTLAGTILGCYPVRVLPSKTAILPVNPKFLPQTDDEKEMVSRTVYCTNIDKKVTEEDVKGFFQQACGKVSRLRLLTDIVHSTCIAFVEFAQAESAIMALNFSGMVLGSLPIRVSPSKTPVRPRSPRVMSN

SEQ ID NO: 33236 - DNA, 1476 bp, Zea mays subsp. mays
agcccactcgtagtcgtaggcactttcatctgtgccctctgcgttcgagatcgatctcagctggcaccgtcccagttcgccatggcggaggaccggagccccaagcccatccactgcaaagcggcggtgtgccgagccgccggcgagccactcaccatcgaggagatcgtcgtcgacccgccgaaagcgtacgagatccgcatccgggtcatctgcacctcactctgccacaccgatatcaccttctggaaagctaaggtggcaccggtgtttccaagaatactagggcatgaggcgtacggggtagtggagagcgtgggggagcacgtggagggcttcgccggcgggggacaccgtggtgccgacgttcctggggcagtgcgagcgctgcgccagctgcgcgtcggagcacagcaacgtgtgcgacgcggtgccgttcgtcatcggccccgggatgcggcgcgacggcaccacccggttccgggacgcgcgggggagcccgctgcacgacctcctcgccgtctccagcttcagcgagtacaccgtcgtggacgtgaaccaggtggtcaaggtcgaccccgccgtgccgcccaagctcgcctgcctcctcagctgcggcgccggcaccggggtaggagcagcgtggaggtctgccaaggtggagccaggatccactgttgcaatctttggccttggatctgtcggtttggcggtggtccaaggcgcgaaaatgtgtggcgcatccaagatcatcggcgttgatctcaaccctgacaaggaggaagtagggagatcgttcggcgtcacagacttcgtcaatccatcgcagctggacaagcgttccgtcgtagaggtgatcgttgagatgaccggcggcggcgtggactacagcttcgagtgcatcggcgtgccgtcggtgatgaccgacgccttcagatgcaccaagatggggaagggcaagacgatcgtgctggggctggggagggacagcgacgaggtgtgcctgccgtcgctggagctgctgttcgggaggtgcgtcatggggtcgctcttcggcgggctgaagcccaagacccacatccccgtcctcgccaagaaatgcatggacaaggagctgcagctggacgcgctggtcacgcatgagcttggactgcaggacatcaacaaggccttcgacctgctcctgcaggggaaaagtctgcgctgcatcctctggatggacaaggacaagtaacggaaggagaggggcggccggaccaatccttcctgtctctgaataaatttgccctgttttttcagcgaggcgtcgctgaaagctgctgttagcggcgaccaagactatctgttcctgaaagccggtgtatcagtatcgtttcgttgtctgaactgattaaatcctaatatcgatagattagactctcccagcaactgctttgtcccctaaataaagtgattcatcatctcttttttacatct

SEQ ID NO: 33237 - protein, 259 aa, Zea mays subsp. mays
MRRDGTTRFRDARGSPLHDLLAVSSFSEYTVVDVNQVVKVDPAVPPKLACLLSCGAGTGVGAAWRSAKVEPGSTVAIFGLGSVGLAVVQGAKMCGASKIIGVDLNPDKEEVGRSFGVTDFVNPSQLDKRSVVEVIVEMTGGGVDYSFECIGVPSVMTDAFRCTKMGKGKTIVLGLGRDSDEVCLPSLELLFGRCVMGSLFGGLKPKTHIPVLAKKCMDKELQLDALVTHELGLQDINKAFDLLLQGKSLRCILWMDKDK

SEQ ID NO: 33238 - protein, 253 aa, Zea mays subsp. mays
SPLVVVGTFICALCVRDRSQLAPSQFAMAEDRSPKPIHCKAAVCRAAGEPLTIEEIVVDPPKAYEIRIRVICTSLCHTDITFWKAKVAPVFPRILGHEAYGVVESVGEHVEGFAGGGHRGADVPGAVRALRQLRVGAQQRVRRGAVRHRPRDAARRHHPVPGRAGEPAARPPRRLQLQRVHRRGREPGGQGRPRRAAQARLPPQLRRRHRGRSSVEVCQGGARIHCCNLWPWICRFGGGPRRENVWRIQDHRR

SEQ ID NO: 33239 - protein, 226 aa, Zea mays subsp. mays
MAEDRSPKPIHCKAAVCRAAGEPLTIEEIVVDPPKAYEIRIRVICTSLCHTDITFWKAKVAPVFPRILGHEAYGVVESVGEHVEGFAGGGHRGADVPGAVRALRQLRVGAQQRVRRGAVRHRPRDAARRHHPVPGRAGEPAARPPRRLQLQRVHRRGREPGGQGRPRRAAQARLPPQLRRRHRGRSSVEVCQGGARIHCCNLWPWICRFGGGPRRENVWRIQDHRR

SEQ ID NO: 33240 - DNA, 1136 bp, Zea mays subsp. mays
aaccctatccctttcgacggttccacttgcaccctacccacaaccccatccatcgtaacccgccgccgccgcgatacacgcaaatcctgccggcgcatccaaccccgcccgacgtggacgccagagaggtgcacgacttccgcaactcgtggcactcagtgcggtggtcgtccaagctcgtcctctggctcgtcctcaacgccttcagcttcctcgtgccgtcgccgctcgcccagatctacgatgcaatggtgagtggctctgtgaggaggcacacaagctcacattggcggcagcaagaacggtgtcgcctccttggtgggtggcaaccaggcgcacgacacctgctccctcccacaccgcgccagcaccagaataccggcgtcgcgtcggcgagcacagcgcagcgcgcaacggcccgggtgcatgaggagggggcgtcggctgccgaggccgaggctgtgacgaaggagcgcggagggcgatgccgctggtcaggttcgaggtgcggaatgaggtggggctgggggaccccggcctctacggcggcggagcttccgctgccgcgggggaggaggaggagcccaatgcgctgctcgagggcgtcgccgtcgcgggcctcgtcgggatcctgcgccagctcggagatctcgcggagcgaggcaggttcatatccaaacaagaagccacgatggaatctggatttcccctctatctgatggaatctggatttggtgccagtctgttttcctgtgattttgggataccagccccattccccttcatggagggtatgcgttgctgttggtcggcacactggaatggaacagatatagacagaaccttcaggttcataagcaaggagttgcgcttgaccgatctatggatctctctagatgcactgactaaggtgaattgaaagcggaactagacatgatgtttgaattcgagggtgaattagtatctgcaaaccaaaactggcagattgtttataccgacaacgagggtgatatgatgcttgtgggagatgacccgtgggagaatttgatgtggttgtgtatgatgtactttatattttggcatactatgcacaaaaacaaatgccttctatgaccatcgtgatttatacattttcg

SEQ ID NO: 33241 - protein, 238 aa, Zea mays subsp. mays
PYPFRRFHLHPTHNPIHRNPPPPRYTQILPAHPTPPDVDAREVHDFRNSWHSVRWSSKLVLWLVLNAFSFLVPSPLAQIYDAMVSGSVRRHTSSHWRQQERCRLLGGWQPGARHLLPPTPRQHQNTGVASASTAQRATARVHEEGASAAEAEAVTKERGGRCRWSGSRCGMRWGWGTPASTAAELPLPRGRRRSPMRCSRASPSRASSGSCASSEISRSEAGSYPNKKPRWNLDFPSI

SEQ ID NO: 33242 - protein, 156 aa, Zea mays subsp. mays
MVSGSVRRHTSSHWRQQERCRLLGGWQPGARHLLPPTPRQHQNTGVASASTAQRATARVHEEGASAAEAEAVTKERGGRCRWSGSRCGMRWGWGTPASTAAELPLPRGRRRSPMRCSRASPSRASSGSCASSEISRSEAGSYPNKKPRWNLDFPSI

SEQ ID NO: 33243 - protein, 144 aa, Zea mays subsp. mays
MPLVRFEVRNEVGLGDPGLYGGGASAAAGEEEEPNALLEGVAVAGLVGILRQLGDLAERGRFISKQEATMESGFPLYLMESGFGASLFSCDFGIPAPFPFMEGMRCCWSAHWNGTDIDRTFRFISKELRLTDLWISLDALTKVN

SEQ ID NO: 33244 - DNA, 1386 bp, Zea mays subsp. mays
actgagcaactcaaaaaggccaaaacccttccccaggggccgtctcgctagtcgctactcactgtaccgcaccgccgccgccgtctcgcacacggggcacaggacgcgcgcgatccccttgagtccggattgccatggccaccacggcgttcgccgccgccaggttcttccccgcccacctcgactcctccccacgcatcgcgccccaccgcgtcgggcccaccgcgaatctctccttctcaccgctttccgccaactcctcgtccctgcgccgcctccattccccctgcccatccggccccgggggtaggctgcccccgccgccgcgatcgtacggcggcgccggcggatctggcgacgccgcgaactccggtggcggcgaaggccgccgcggaggcatcctcgggctcctcctcgccgggtgggccgcccgcgtcgctgcggacccgcagttccctttcaaggtgctcatggaggagctcgtcggcgtcaccgcttgcgtgcttggcgacatggcctcccgccctaacttcggcctcaacgagttggacttcgtcttctccacgctcgtcgtcggatccatcctcaacttcgtcctcatgtacctcctcgcccccaccgccggcgtcgccgccgccgcgtcgtccgccgcgtccgcgctccccagccacatgttcgagcccggcgcgtactccctcggctcccgcgtcgccacgatcatgtccaagggcgccaccttcgcggtggtcgggttcgcggccgggctcaccggaaccgcgatctccaacgggctgatcgcgatgcggaagcgcatggacccggcgttcgagacgcccaacaagccgccgcccacgctgctcaacgcggccacctgggcgctccacatgggtgtcagcagcaacctgcggtaccagacgctgaatgggatcgagtacctgctcggcaaggtcgcaccggcgccggtgttcaaggtgtccgttgttgctctccgctgcatgaacaacgtgctgggtgggatgtccttcgtgctgcttgccaggctgaccggggcgcagaaatcagacaagccagcgacggtcgcggaagagaaggagaggttgatagctgtgggcaatgccgcagcagatgccatcaacgaggcgaggcatggagagggtaagtaggtggtagaggagagagacgagtaagttgatggtgcatcatctcagactcgtttgctggttcttggacatagaccaagaaactcacctagtcacctgtagagttggttggaataaggagtggagtgaggttcagaacttcttttttaaaaaactctgtttgtggtttatcggtgttgatgatgacatgcttagtgatggtagaataaagtttttttttcctccc

SEQ ID NO: 33245 - protein, 342 aa, Zea mays subsp. mays
MATTAFAAARFFPAHLDSSPRIAPHRVGPTANLSFSPLSANSSSLRRLHSPCPSGPGGRLPPPPRSYGGAGGSGDAANSGGGEGRRGGILGLLLAGWAARVAADPQFPFKVLMEELVGVTACVLGDMASRPNFGLNELDFVFSTLVVGSILNFVLMYLLAPTAGVAAAASSAASALPSHMFEPGAYSLGSRVATIMSKGATFAVVGFAAGLTGTAISNGLIAMRKRMDPAFETPNKPPPTLLNAATWALHMGVSSNLRYQTLNGIEYLLGKVAPAPVFKVSVVALRCMNNVLGGMSFVLLARLTGAQKSDKPATVAEEKERLIAVGNAAADAINEARHGEGK

SEQ ID NO: 33246 - protein, 230 aa, Zea mays subsp. mays
MEELVGVTACVLGDMASRPNFGLNELDFVFSTLVVGSILNFVLMYLLAPTAGVAAAASSAASALPSHMFEPGAYSLGSRVATIMSKGATFAVVGFAAGLTGTAISNGLIAMRKRMDPAFETPNKPPPTLLNAATWALHMGVSSNLRYQTLNGIEYLLGKVAPAPVFKVSVVALRCMNNVLGGMSFVLLARLTGAQKSDKPATVAEEKERLIAVGNAAADAINEARHGEGK

SEQ ID NO: 33247 - protein, 216 aa, Zea mays subsp. mays
MASRPNFGLNELDFVFSTLVVGSILNFVLMYLLAPTAGVAAAASSAASALPSHMFEPGAYSLGSRVATIMSKGATFAVVGFAAGLTGTAISNGLIAMRKRMDPAFETPNKPPPTLLNAATWALHMGVSSNLRYQTLNGIEYLLGKVAPAPVFKVSVVALRCMNNVLGGMSFVLLARLTGAQKSDKPATVAEEKERLIAVGNAAADAINEARHGEGK

SEQ ID NO: 33248 - DNA, 870 bp, Zea mays subsp. mays
  misc_feature (78)..(78): n is a, c, g, or t
acctccgaatttactgatccatccatctccatccccatcccgtgcgctgtgccagcgctgctggtggcggcggcgacngcgacgctagtgcttctgctgctgctgtcaccgtcgagcgcgcagccggtgccgtccccggcggcggcgccgggccccgcgggcgggaccgggatcgactcggcgtgcctgaactcgctgctcaacatgtcggactgcctcccgtacgtgagccaggggagcacggcgcggcgccccgacgcgccctgctgcccggagctggcgggcctcgtcggctccaaccccgtctgcctctgcgagctcctctccggcgccgccgactcctacggcatcgccgtcgactacggccgcgcgctcgcgctccccggggtctgccgcgtcgccacaccgcccgtctccacctgcacagccctcggatatcacgtccgcgtgggcccagctgcggcgcccatgtcagggtctccctcgcccatgtcaggcatctctccctccggggagggcccacagttcccaggaacatcgccgaccgcctcgccgccgtcctcgaccagcaccgcggcgcgccgctcctccgccggcgcgggcagccacctcgtggccctcgccatgctgccgttggccgccgccgtcagcgggatgctctaaggtcgacgactccttcgtctccgcatgcattgcgcagctggacattgttgcgtagtataagctttcactgtgttttctattctatgctgcctctgttgtactatacacataccgcggactcgatcgattatcataaggcgttagccttgcttcttgccagccgagatgagaatgagaatacatgcatgtcatgtcccgttcatgtcc

SEQ ID NO: 33249 - protein, 220 aa, Zea mays subsp. mays
  misc_feature (26)..(26): Xaa can be any naturally occurring amino acid
TSEFTDPSISIPIPCAVPALLVAAAXATLVLLLLLSPSSAQPVPSPAAAPGPAGGTGIDSACLNSLLNMSDCLPYVSQGSTARRPDAPCCPELAGLVGSNPVCLCELLSGAADSYGIAVDYGRALALPGVCRVATPPVSTCTALGYHVRVGPAAAPMSGSPSPMSGISPSGEGPQFPGTSPTASPPSSTSTAARRSSAGAGSHLVALAMLPLAAAVSGML

SEQ ID NO: 33250 - protein, 152 aa, Zea mays subsp. mays
MSDCLPYVSQGSTARRPDAPCCPELAGLVGSNPVCLCELLSGAADSYGIAVDYGRALALPGVCRVATPPVSTCTALGYHVRVGPAAAPMSGSPSPMSGISPSGEGPQFPGTSPTASPPSSTSTAARRSSAGAGSHLVALAMLPLAAAVSGML

SEQ ID NO: 33251 - DNA, 1746 bp, Zea mays subsp. mays
gttctcccccaaccccaattcgccttcacctcgccgcttcctccattgaccgccaccgttgacgtcgtcttccggcgaggtagctcgccggaagacctcacctggactttcccgaagcaccctccacacactctttaaccctccggaatggccgcctgcttctagctcgtcgacgccccaatctccgcttgcttcctcgacagccccatccgcctcttctcgctctcgctacggctcctctgcctgttcgccatggcgatccgcatcaccgtctcctactccggctacgtggcgcagaacctcgccgcgtcgctcggccaccgcttctcctccgcctccgcctcgggcagccgcctcctccatgacggcgcctggcgccccttctgcatcttcacctccacccgccagcccgagaagcaccgcagtagcggcagcgaccgccatgacggaggcgactacaaccacccgaagccccaggccatcgccgccggagctcactcgttgctgctcacgcgtgcgtgcttatcgtccaagtcgccgccgccgtctcttgccgtgggggctgctctcggtgctcgcgcagaggacgggaccgacgcctggaaccaccggatcggcggcatctctctcaggctcgtcgccgatttccctcggtttcaaccccacctccttcctcccgttcctgcagacagcgaggtggctcccgtgcagcgaccttgccacctcgtcgtcttcggcaccctcttcccctccccgctcgcttgcgccttcggctccccccaagaaggcgttgattggtgctgctactggttctaccggaattgcgacgagcagtggtgctggtgcagcgatgagcaggagcaactggctgtcgaggtgggtcagctcctgctccgatgacgccaagacggcgtttgcggctgtgaccgtgccacttctctacggctcgtccctggccgagccgaagtccatcccgtccaagtccatgtacccgaccttcgatgtcggtgatcggattcttgctgagaaggtctcatacatattccgggatccagaaatttcggacatcgtgatcttccgggctcccccaggacttcaggtttatggctacagctcaggtgatgtgttcatcaagagagttgttgccaagggaggagactatgtcgaagtgcgtgatggcaagctgtttgttaatggagtagttcaggatgaggattttgtgctggagccacacaactacgagatggaaccagtgcttgtgccggaaggttatgtgttcgtgctgggagacaaccgcaacaacagctttgattcccacaactggggtccacttccagtgaggaacattgtcgggagatctatcctccggtattggccgccatcgaagatcaatgatacaatttatgagcctgatgtgtcccgcctcgcggtgccgtcctcgtagtagtcgttgcagtgatgctggatatccagtgtgtgtgtacaatgaccttattacttcgtggagcctcatttgatgagctgagctccagttccaattctctcagaatattttgtctcctgagtgttccctgtaaattctctttgcctgacagatttgttttccctgccgcttggcagatgcttgttcaaagcacgggaaagtgtagtaccttgcatcttgcaatataaactaattaaaccggttacccttttttttcttttatcgagataaactctgcttttaagaaagcaataaggtttcgt

SEQ ID NO: 33252 - protein, 360 aa, Zea mays subsp. mays
MTAPGAPSASSPPPASPRSTAVAAATAMTEATTTTRSPRPSPPELTRCCSRVRAYRPSRRRRLLPWGLLSVLAQRTGPTPGTTGSAASLSGSSPISLGFNPTSFLPFLQTARWLPCSDLATSSSSAPSSPPRSLAPSAPPKKALIGAATGSTGIATSSGAGAAMSRSNWLSRWVSSCSDDAKTAFAAVTVPLLYGSSLAEPKSIPSKSMYPTFDVGDRILAEKVSYIFRDPEISDIVIFRAPPGLQVYGYSSGDVFIKRVVAKGGDYVEVRDGKLFVNGVVQDEDFVLEPHNYEMEPVLVPEGYVFVLGDNRNNSFDSHNWGPLPVRNIVGRSILRYWPPSKINDTIYEPDVSRLAVPSS

SEQ ID NO: 33253 - protein, 333 aa, Zea mays subsp. mays
MTEATTTTRSPRPSPPELTRCCSRVRAYRPSRRRRLLPWGLLSVLAQRTGPTPGTTGSAASLSGSSPISLGFNPTSFLPFLQTARWLPCSDLATSSSSAPSSPPRSLAPSAPPKKALIGAATGSTGIATSSGAGAAMSRSNWLSRWVSSCSDDAKTAFAAVTVPLLYGSSLAEPKSIPSKSMYPTFDVGDRILAEKVSYIFRDPEISDIVIFRAPPGLQVYGYSSGDVFIKRVVAKGGDYVEVRDGKLFVNGVVQDEDFVLEPHNYEMEPVLVPEGYVFVLGDNRNNSFDSHNWGPLPVRNIVGRSILRYWPPSKINDTIYEPDVSRLAVPSS

SEQ ID NO: 33254 - protein, 215 aa, Zea mays subsp. mays
MAIRITVSYSGYVAQNLAASLGHRFSSASASGSRLLHDGAWRPFCIFTSTRQPEKHRSSGSDRHDGGDYNHPKPQAIAAGAHSLLLTRACLSSKSPPPSLAVGAALGARAEDGTDAWNHRIGGISLRLVADFPRFQPHLLPPVPADSEVAPVQRPCHLVVFGTLFPSPLACAFGSPQEGVDWCCYWFYRNCDEQWCWCSDEQEQLAVEVGQLLLR

SEQ ID NO: 33255 - DNA, 757 bp, Zea mays subsp. mays
ctcaccggccgccctcccggcggccaccaccgcccccgcggcttcgtccatatctccccacgccggatcgaagcggccgctcctcgcgggcgacgacgcgccctggcgggccaccgcggccacctccgcggggcaggggatccgacccgtcccgcgcatcaaccacgcctccgtcctccgcgtttccacgcaggaagactccgccgcctacgccctcgccatcatgaagcatccggatccgattggcgaggggctggctatggaggcgttcgcggaggcagccgggccggagtgcatcgtgcccggacagcaagcgcctctaaggcttatggggctcaaggtctggcccgttgatatagatatgaagttcctagatccatttggacgggaactacattcaatgaaaaaattcatggacaaatcgtgcagtgttatggactcatctatggcaaacaagtaggcacatggcacatcagttccgcccaatacagctgttgttgtatccacctgcttcctgaagttacaagacctgaaaaatagaagagacattggagagaagccacattcttttgcgtatcttgctcaccgtcacctgacgaacaaaatatgacatcgggagtgcagtaacgattagtgagtggtcctgtattgagcctgggtgcagcctctgccagtataagtgctctacgtgttatacatttttttatgtccatgaaacattgatccactgagaaaatatatcttcaggtgccaatcc

SEQ ID NO: 33256 - protein, 152 aa, Zea mays subsp. mays
SPAALPAATTAPAASSISPHAGSKRPLLAGDDAPWRATAATSAGQGIRPVPRINHASVLRVSTQEDSAAYALAIMKHPDPIGEGLAMEAFAEAAGPECIVPGQQAPLRLMGLKVWPVDIDMKFLDPFGRELHSMKKFMDKSCSVMDSSMANK

SEQ ID NO: 33257 - protein, 117 aa, Zea mays subsp. mays
LTGRPPGGHHRPRGFVHISPRRIEAAAPRGRRRALAGHRGHLRGAGDPTRPAHQPRLRPPRFHAGRLRRLRPRHHEASGSDWRGAGYGGVRGGSRAGVHRARTASASKAYGAQGLAR

SEQ ID NO: 33258 - protein, 78 aa, Zea mays subsp. mays
MKHPDPIGEGLAMEAFAEAAGPECIVPGQQAPLRLMGLKVWPVDIDMKFLDPFGRELHSMKKFMDKSCSVMDSSMANK

SEQ ID NO: 33259 - DNA, 1280 bp, Zea mays subsp. mays
aaatccttctctcggctacctccaccactgctctgctcagctcgaacgaacaaaaagaactcccctcggccctctcctcttgtgcttctgcttccccaaccgagtctcctcaaccccaggcactcgccctctttcccctcgcctcggcccgcgactccgatgccgccgccgctcctcgagccgcgcgactacctcggcgccggcgccacctcgtcgtgctgctcgtcgtcctgctcctccggccgcgagggcgcggggccccacctcgcgctgcggctcgggcttccggggtccgacgactcccccggccgcggcgcggacgcggagcacgcccgcgcccacgtcgacgccgcgctcaccctcggccccgcccccgcccccgcccccgcgcctcccaggggcagcgccaagcgcgggttcgccgactccctcgaccggtccgcgaagcgggacggcgttgccgcggatgacgctgctgggggcgtcacacgggtagctgaagctgctgccggagctccgcccgctgccaaggcacaagttgttggatggccgcctgttaggagctaccggaagaataccctagctgccagtgccacaaagacaaatgggggagatgaaggtaggagtgaggcgggatgctgttatgtcaaggtcagcatggatggagccccatacctaaggaaggtggacctcaagacctattcaagctatgaggatctctcgcttggtctggagaaaatgttcagttgcttcatcactggtcaaaacagttcatgcaagacatcaagaagggataggcttactgatggttctagggctgatgcccttcaggaccaagaatatgtcctcacttacgaagataaagatgctgactggatgctcgttggtgatctgccctgggacttgttcaccacattttgccggaaacttaggatcatgagaggctctgatgctgctggcatggctcctccaagaccaccggaacagacagttcggaacaaatgagggcggacagcttacttacctggcgctgaactgaagggagagcgacgctgccttggtcaggccttctttcacttgtgcagtgggaactgcgtcctgctgtctcggacgcccattttgcccacgagctggtcgtcacgtgctgtcgctttttgtctgggaaagatagcgtactgcttgctgtatgatactttcatctgtgttcggaagtttgtagcgcttcatatcctggaagggagtaaagaaaatgtccatgctgtccggtgagaatttcttcc

SEQ ID NO: 33260 - protein, 334 aa, Zea mays subsp. mays
KSFSRLPPPLLCSARTNKKNSPRPSPLVLLLPQPSLLNPRHSPSFPSPRPATPMPPPLLEPRDYLGAGATSSCCSSSCSSGREGAGPHLALRLGLPGSDDSPGRGADAEHARAHVDAALTLGPAPAPAPAPPRGSAKRGFADSLDRSAKRDGVAADDAAGGVTRVAEAAAGAPPAAKAQVVGWPPVRSYRKNTLAASATKTNGGDEGRSEAGCCYVKVSMDGAPYLRKVDLKTYSSYEDLSLGLEKMFSCFITGQNSSCKTSRRDRLTDGSRADALQDQEYVLTYEDKDADWMLVGDLPWDLFTTFCRKLRIMRGSDAAGMAPPRPPEQTVRNK

SEQ ID NO: 33261 - protein, 281 aa, Zea mays subsp. mays
MPPPLLEPRDYLGAGATSSCCSSSCSSGREGAGPHLALRLGLPGSDDSPGRGADAEHARAHVDAALTLGPAPAPAPAPPRGSAKRGFADSLDRSAKRDGVAADDAAGGVTRVAEAAAGAPPAAKAQVVGWPPVRSYRKNTLAASATKTNGGDEGRSEAGCCYVKVSMDGAPYLRKVDLKTYSSYEDLSLGLEKMFSCFITGQNSSCKTSRRDRLTDGSRADALQDQEYVLTYEDKDADWMLVGDLPWDLFTTFCRKLRIMRGSDAAGMAPPRPPEQTVRNK

SEQ ID NO: 33262 - DNA, 1354 bp, Zea mays subsp. mays
atcccggtttcgcgataccccctccctgctccctcctcccctcccctccgatcaagtcggggcaacgcgcatcactcgctttaaatccgcacctcccggcgtctccctcctcccggccggtccccttatcacctcaccttctcctttgagtcctctctctccgccgccgcagctagctgtgacgttatgctctcgccggcgccatagcgccagcgcctaccgtctacaactatccagccttaggcttacctatcccgtcaatcaagcctctcgtaaggaacaaggaaggtagctagctagttctatagctgctgtcgtcgtcgtcatcggcggcggcggcgcctgttcttagaggataaggttgtcctagcggagagggagctagccaggatttcggttgagatcaagagggggagcaggcggcggcggcggcgatggggcgcgggaaggtgcagctgaagcggatcgagaacaagatcaaccgccaggtgaccttctccaagcgccgctcggggctgctcaagaaggcgcacgagatctccgtgctctgcgacgccgaggtcgcgctcatcatcttctccaccaaagggaagctctacgagtattccaccgattcatgtatggacaaaattcttgaccggtacgagcgctactcctatgcagaaaaggttcttatttcagcagaatctgaaactcagggcaattggtgccacgagtatagaaaactaaaggcgaaggtcgagacaatacaaaaatgtcaaaagcacctcatgggagaggatcttgaaacgttgaatctcaaagagcttcagcaactagagcagcagctggagagttcactgaaacatatcagaaccaggaagaaccaacttatgctcgagtcaatttcggagctccaacggaaggagaagtcgctgcaggaggagaacaaggttctgcagaaggagctcgcggagaagcagaaagcccagcggaagcaagtgcaatggggccaaacccaacagcagaccagttcgtcttcctcgtgcttcgtgataagggaagctgccccaacaacaaatatcagcatttttcctgtggcagcaggcgggaggttggtggaaggtgcagcagcgcagccacaggctcgcgttggactaccaccatggatgcttagccacctgagcagctgaaggtttcagcaactcttcccgtttatccgcctggtgcagtatagtatcatcgtgatcgcgagagcagcagcagtgggtttgccgtatctttttttaccaatgtatgtctatatatgtaagtatcaaatctgcaatgtgttaatcaccatttccgctggggcggccgcacgagtactttacgc

SEQ ID NO: 33263 - protein, 245 aa, Zea mays subsp. mays
MGRGKVQLKRIENKINRQVTFSKRRSGLLKKAHEISVLCDAEVALIIFSTKGKLYEYSTDSCMDKILDRYERYSYAEKVLISAESETQGNWCHEYRKLKAKVETIQKCQKHLMGEDLETLNLKELQQLEQQLESSLKHIRTRKNQLMLESISELQRKEKSLQEENKVLQKELAEKQKAQRKQVQWGQTQQQTSSSSSCFVIREAAPTTNISIFPVAAGGRLVEGAAAQPQARVGLPPWMLSHLSS

SEQ ID NO: 33264 - protein, 183 aa, Zea mays subsp. mays
MDKILDRYERYSYAEKVLISAESETQGNWCHEYRKLKAKVETIQKCQKHLMGEDLETLNLKELQQLEQQLESSLKHIRTRKNQLMLESISELQRKEKSLQEENKVLQKELAEKQKAQRKQVQWGQTQQQTSSSSSCFVIREAAPTTNISIFPVAAGGRLVEGAAAQPQARVGLPPWMLSHLSS

SEQ ID NO: 33265 - protein, 133 aa, Zea mays subsp. mays
MGEDLETLNLKELQQLEQQLESSLKHIRTRKNQLMLESISELQRKEKSLQEENKVLQKELAEKQKAQRKQVQWGQTQQQTSSSSSCFVIREAAPTTNISIFPVAAGGRLVEGAAAQPQARVGLPPWMLSHLSS

SEQ ID NO: 33266 - DNA, 1717 bp, Zea mays subsp. mays
gcgttattattctcgtctccctccagccccccacacgcgctcccctccaccgtccgccgcgcgtccccaccggcggccaccgctaccggcccacctccccggcgccccttacccttctttctccgcgcgatggtaactcgcggcggcggtggccagtcctacggcttcccgatctactgcgccgcctggctcccgctcgcccacatcatcaagcccgaccctcccgctgccgaggcggatgcggatggctcctccccctccaccccctcacttccgatggttgtcctcgggggcggtggcggggagggccggagcggggtgccgaacaagctcgtggtggcggccctcgccaccgaggaagaggccgcgccggctctctcccccgatacggtggtcgaggtgaatagtgaggaggaggtgccgtacagaatggccgtccacccgcgtggcggatggcgtgttctgtgccttcccaaacggctgcaggttgtatcgatgggaatcacaggaaggagagggaccacagaggttggctttagagccggaccaggatgctttagcagagctgaaagatgtcggtttgcagttggccgtatccttcagtggagaaggttcaatacttgcaattggtggtgaagatgggcatttaagagttttcaactggcctaccatggggtctgttctcacagaaatcgatactaaaacatcgattaaggatcttactatcagttcggacgagaagtttcttgctgtgaataggagcagtggcccatgtagagtgtgggatttgcagtcatctgaagttgtagccagtctgccaagagaagcaggggaaatatttggattctgcagattctctaataaggctgacaacagtcatgtcctatttataactgtgatggaaggcgattatggaaaaatagtgtcttggaatactacctcatggacgagaaccggatcaaagaaaataactcgtgaggcaatttcagcttttgctgtgtcacccaacggtgctcttcttgcaattggaacaatagaaggaagcatcatcgtagttggctcaaaagacatgcggacacttgtaacagttaaaaaggctcatcttggtattgttactacgctgaccttctctcaggattcaagaacattgctgtcaacttccttcgactcttctgcaagggtgacatctgttgggtccccaaagagtaatggaacaagcatatggcccatgctactagttgttattcttgcaattttggtgtactactgtatgcagcacaaagaagacattttggcaatgttgcagcgttgagatagatttctgttcagcccctgactggtctactctgctggacgtattattagtgttgcttcagtgattgaagaaattttggacttgggtcaacttcattattctctcaacaaggacaaacaatacagcaaaaggcactgagccctgttatgttttgtagtaaaaagggtcatgtactcatgttgtcggaagtttttgtaagttgatggccgcaagtgatagacatatgtggcaatgtttcttcatgctgcacttgtgaattgcaaggtgttcgccccaagagtccaatatagagagttcagaaacaaatttttttggtgtgccaaacaatttattatgtatgcgtaataaagctgtacaaagaatatctaaaaatgcagatagcttctgggtgcttatacatgc

SEQ ID NO: 33267 - protein, 213 aa, Zea mays subsp. mays
MGSVLTEIDTKTSIKDLTISSDEKFLAVNRSSGPCRVWDLQSSEVVASLPREAGEIFGFCRFSNKADNSHVLFITVMEGDYGKIVSWNTTSWTRTGSKKITREAISAFAVSPNGALLAIGTIEGSIIVVGSKDMRTLVTVKKAHLGIVTTLTFSQDSRTLLSTSFDSSARVTSVGSPKSNGTSIWPMLLVVILAILVYYCMQHKEDILAMLQR

SEQ ID NO: 33268 - protein, 211 aa, Zea mays subsp. mays
ALLFSSPSSPPHALPSTVRRASPPAATATGPPPRRPLPFFLRAMVTRGGGGQSYGFPIYCAAWLPLAHIIKPDPPAAEADADGSSPSTPSLPMVVLGGGGGEGRSGVPNKLVVAALATEEEAAPALSPDTVVEVNSEEEVPYRMAVHPRGGWRVLCLPKRLQVVSMGITGRRGTTEVGFRAGPGCFSRAERCRFAVGRILQWRRFNTCNWW

SEQ ID NO: 33269 - protein, 168 aa, Zea mays subsp. mays
MVTRGGGGQSYGFPIYCAAWLPLAHIIKPDPPAAEADADGSSPSTPSLPMVVLGGGGGEGRSGVPNKLVVAALATEEEAAPALSPDTVVEVNSEEEVPYRMAVHPRGGWRVLCLPKRLQVVSMGITGRRGTTEVGFRAGPGCFSRAERCRFAVGRILQWRRFNTCNWW

SEQ ID NO: 33270 - DNA, 1794 bp, Zea mays subsp. mays
cttccgctttctcccttactcgcgctcagcacgcaggcgacggcgtcggcgctcaggtcgggctctgggcgacggcgtcatcggcttctcctcccgcctctctccagtcgcctcgcgccctcgcctccggtcctccgcacaccggccggtgaccctgcaattgccgtgagcttccaggatctgttgtagatggatatgatgtcttcaaaaagcaaattgcacaaacagctttgttatctgctgacacagggttgctgccagtgtctacggcgattggttttgatgaaagaatgctgctccacagtgagctagaagttaaaccaaatccacatccagaaagaccggatcgccttcgcgccattgctgcaagtcttgctgctgcagggatctttccctcaaaatgtgctttggtacctcctcgagaaatcacgaaggaggaacttcttatggttcatagtccagaccacattgaaagtgtcgagcagacaaagaacatgctttacagttacttcacttcggatacttacgcaaatggacattcagcatgtgctgccaaacttgcagctggattatgtgctgatcttgctagtttgatagtatctgggcgtgttcgcaatggctttgcgctggtaagacctcctgggcatcatgcaggggtgaagcaagcaatggggttttgtcttcacaacaatgcagcagtagctgcgttagctgcaaaaagagcaggtgccaagaaagtcctcatagttgactgggatgtgcaccatggaaatggcacacaagagatattcgacggggacaaaacagtcttgtacatatcattacatcgtcatgaggatggaaacttttaccctggaactggagctgctcatgaggtgggagttcttgatggtcaaggattctcagttaatataccttggagccgtggtggtgttggagatgatgactacatctttgcttttcagactgtggtgcttccaatagcttcagagtttgccgcagacatcactataatatctgcaggattcgatgcagctagaggtgaccctctgggttgttgtgacgtcactccaactggatactcttggatgacatccctgctagctggttcctcaaatggaagattgttggtgatacttgagggaggatacaatctccggtcgatatcctcatcagctactgaagttgttaaggtcctacttggggagggtcccaatcgtgcttcatttgtagtttcaccatcaaaagaggccttgagtactgtttctcaagtcctgaagattcaacaacagttttggccagttttaggtccaacatacgcatcactacaggcgcagcaggggtcggtttcttccaatcatagtaatgagctgaagaaaaggaagcgtccaggaggaggaccagggcccttctggtggaagatgggaagcaaaaggcttctatacgaagcgcttattgagcctcgcagccgtccgaggaaactcaaggggtcaactggttcagcagcgccttagacttagatgggcagtttgctggccgttgatcttctagacatgaacagggtagctcgctgaccgcgtttcctcaagcagagtaggctgcgtttacctagaaaacctagttttggctggttacttgcatgatggtcgaccgtttcagatggagtttgacagcaaacccgttgtgttaaccatgcgtggcgtatcagccgatgtttcatgcatgctactgtctttttctttggttggtttcgtaccatagatagacgtgtgtagcgaccatcgatgaagggcg

SEQ ID NO: 33271 - protein, 407 aa, Zea mays subsp. mays
MLLHSELEVKPNPHPERPDRLRAIAASLAAAGIFPSKCALVPPREITKEELLMVHSPDHIESVEQTKNMLYSYFTSDTYANGHSACAAKLAAGLCADLASLIVSGRVRNGFALVRPPGHHAGVKQAMGFCLHNNAAVAALAAKRAGAKKVLIVDWDVHHGNGTQEIFDGDKTVLYISLHRHEDGNFYPGTGAAHEVGVLDGQGFSVNIPWSRGGVGDDDYIFAFQTVVLPIASEFAADITIISAGFDAARGDPLGCCDVTPTGYSWMTSLLAGSSNGRLLVILEGGYNLRSISSSATEVVKVLLGEGPNRASFVVSPSKEALSTVSQVLKIQQQFWPVLGPTYASLQAQQGSVSSNHSNELKKRKRPGGGPGPFWWKMGSKRLLYEALIEPRSRPRKLKGSTGSAAP

SEQ ID NO: 33272 - protein, 355 aa, Zea mays subsp. mays
MVHSPDHIESVEQTKNMLYSYFTSDTYANGHSACAAKLAAGLCADLASLIVSGRVRNGFALVRPPGHHAGVKQAMGFCLHNNAAVAALAAKRAGAKKVLIVDWDVHHGNGTQEIFDGDKTVLYISLHRHEDGNFYPGTGAAHEVGVLDGQGFSVNIPWSRGGVGDDDYIFAFQTVVLPIASEFAADITIISAGFDAARGDPLGCCDVTPTGYSWMTSLLAGSSNGRLLVILEGGYNLRSISSSATEVVKVLLGEGPNRASFVVSPSKEALSTVSQVLKIQQQFWPVLGPTYASLQAQQGSVSSNHSNELKKRKRPGGGPGPFWWKMGSKRLLYEALIEPRSRPRKLKGSTGSAAP

SEQ ID NO: 33273 - protein, 339 aa, Zea mays subsp. mays
MLYSYFTSDTYANGHSACAAKLAAGLCADLASLIVSGRVRNGFALVRPPGHHAGVKQAMGFCLHNNAAVAALAAKRAGAKKVLIVDWDVHHGNGTQEIFDGDKTVLYISLHRHEDGNFYPGTGAAHEVGVLDGQGFSVNIPWSRGGVGDDDYIFAFQTVVLPIASEFAADITIISAGFDAARGDPLGCCDVTPTGYSWMTSLLAGSSNGRLLVILEGGYNLRSISSSATEVVKVLLGEGPNRASFVVSPSKEALSTVSQVLKIQQQFWPVLGPTYASLQAQQGSVSSNHSNELKKRKRPGGGPGPFWWKMGSKRLLYEALIEPRSRPRKLKGSTGSAAP

SEQ ID NO: 33274 - DNA, 1001 bp, Zea mays subsp. mays
ctcaggctctcagctcagctgcgtcctcctgccacccatggcaaacgcttctctgcaatccttccttctcccgcacgaccattctttcgccggcgccggcggcagccgtgacggctccgcgtccgccgtgcacaagctctccaccaacaccagcggcagcatttccttcaggctctacaccaaaacctccccctcggtgacagcagcctcagccaccaattcgtcagctccgactccagttgccccggcatctgcaccagcggcaggggacgaagaagaagaagaaggcccctctctcgacctcctccgccgccagctcgccgcgggcgactaccggcaggcggacgagaccacgcgggcgctgatcatcgacctcgccggcgagcccgcgaggcgccgagggtacgtcttcttctccgaggtccagttcatcccggccgaggacctcgccgccatcgacgggctctggaaggagcacagcggcggcaggttcgggtacagcgtgcagcggcggctctgggagaagtcgcggcgcgacttcacccgcttcttcatccgggtcggctggatgaggaagctggacacggaggtggagcagtacaactacagggccttccccgacgagttcatgtgggaattgacggacgacacgcccgagggacacctgccgctcaccaacgccctcaggggcacgcagctcctggcgaacatcctcacccacccggccttccaggaggaggaccagggagacggagctgctgctgcagaagagagtgcaaacaccaaagatgataacaaagggagggagagacccaggtccatgagagatttcaagcctgattattctttttgattcaggctggcgaaggaaaccaaaaaaaaaaggggcatgggagtttgtggtgcagagatgctggcatggtgtaattgatttaaaagatcatgtatccgtagttctgtttgggttacttttgtcttaaaacatgcatggaagcttgtgt

SEQ ID NO: 33275 - protein, 283 aa, Zea mays subsp. mays
SGSQLSCVLLPPMANASLQSFLLPHDHSFAGAGGSRDGSASAVHKLSTNTSGSISFRLYTKTSPSVTAASATNSSAPTPVAPASAPAAGDEEEEEGPSLDLLRRQLAAGDYRQADETTRALIIDLAGEPARRRGYVFFSEVQFIPAEDLAAIDGLWKEHSGGRFGYSVQRRLWEKSRRDFTRFFIRVGWMRKLDTEVEQYNYRAFPDEFMWELTDDTPEGHLPLTNALRGTQLLANILTHPAFQEEDQGDGAAAAEESANTKDDNKGRERPRSMRDFKPDYSF

SEQ ID NO: 33276 - protein, 271 aa, Zea mays subsp. mays
MANASLQSFLLPHDHSFAGAGGSRDGSASAVHKLSTNTSGSISFRLYTKTSPSVTAASATNSSAPTPVAPASAPAAGDEEEEEGPSLDLLRRQLAAGDYRQADETTRALIIDLAGEPARRRGYVFFSEVQFIPAEDLAAIDGLWKEHSGGRFGYSVQRRLWEKSRRDFTRFFIRVGWMRKLDTEVEQYNYRAFPDEFMWELTDDTPEGHLPLTNALRGTQLLANILTHPAFQEEDQGDGAAAAEESANTKDDNKGRERPRSMRDFKPDYSF

SEQ ID NO: 33277 - DNA, 1157 bp, Zea mays subsp. mays
atatcttcctccctcgcctcttccccttccccgcgtgccgcgtcaaacaaatctaggcttccaagcgagcgaaagcctacctccgccagccgatctaccaacatcctctccgccgattggaggcacctgcgaagatgccgcagcggcactcaaagaacaacaacgacctcgccttcttcacgtacgaggagaagcggaagctcgggtacggcacgcagcgggagcgcctggggaaggactccatcaagcccttcgacgcctgctgcctctgcctcaagccgctcatcgacccgctctgctgccccaagggccataccttctgcaaggagtgcatccttgagtgcctcctcgcccagaagaaggacatcaagcgtaagctagcagctcacgaggcccagaagaagcaagagaaggaagaggaggaggaaaagctaattctgcagaaggctaaggagttggatgcctttgatcagcaaaatcatggggctgttccccagtaccatgatcgcagtggttcccaaggcaagaatgggtttcatggagcgaacagtgtgaaggtcacttcttttgaagaggaagccctccgtaacatgaaggcattctggcttccttcagctactcctgaagctacggtcaaggtagatgcaccctccaccgacactgtctgccctgaggggcaggagaagctcaagttgaaatcgctcttccctatctcatttatggaggaaactgctgatcagaagaggaagaaggcaatggaaaagagctatatgtgccctagttgcaaatccactctcacaaatacaatgtccctcgtggcggtcagcgcctgtggccacgtcttctgcaagaagtgctctgacaagtttctagtaaaggataaagtttgcttagagtgcagcaaatcattcaaggagaggaatctggttccattagagaaaggaggaactgggtttgcggcacatgatgaacgcttggaggcaagggatttcaagcatttgggcagcggttctgggttaggactagtgaagcctgcaccaaaagcttactagccttgaatacttgtagccgctgttatatatcgtttatcatggtgtcatgaaattatgtataacctggaaattttgttttgtggcatcaaaatcgctctattcagg

SEQ ID NO: 33278 - protein, 305 aa, Zea mays subsp. mays
MPQRHSKNNNDLAFFTYEEKRKLGYGTQRERLGKDSIKPFDACCLCLKPLIDPLCCPKGHTFCKECILECLLAQKKDIKRKLAAHEAQKKQEKEEEEEKLILQKAKELDAFDQQNHGAVPQYHDRSGSQGKNGFHGANSVKVTSFEEEALRNMKAFWLPSATPEATVKVDAPSTDTVCPEGQEKLKLKSLFPISFMEETADQKRKKAMEKSYMCPSCKSTLTNTMSLVAVSACGHVFCKKCSDKFLVKDKVCLECSKSFKERNLVPLEKGGTGFAAHDERLEARDFKHLGSGSGLGLVKPAPKAY

SEQ ID NO: 33279 - protein, 153 aa, Zea mays subsp. mays
MKAFWLPSATPEATVKVDAPSTDTVCPEGQEKLKLKSLFPISFMEETADQKRKKAMEKSYMCPSCKSTLTNTMSLVAVSACGHVFCKKCSDKFLVKDKVCLECSKSFKERNLVPLEKGGTGFAAHDERLEARDFKHLGSGSGLGLVKPAPKAY

SEQ ID NO: 33280 - DNA, 1857 bp, Zea mays subsp. mays
gaattcactagtgattcgagagcgagagcaaagagctgagcgggacggagcagctagcgctagggataacgcacacccaccaccatggcgacgcccggagagcagccggcggaggtcgtgtccgtcgagatgcccgcacccgacgggtggaccaagaagtttactcccttgagaggggggagatctgagattgtttttgtttcaccaactggcgaggaaattaagaacaagaggcaattaagtcagtacctaaaggcacaccctggaggccctgctgtttcagagtttgattggggaactggtgataccccaaggcgttctgctcgtattagcgagaaagtcaaggtatttgatagcccagagggcgagaagatcccgaagcgcagcaggaactccagtggtaggaagggtaagcaggggaagaaggaaacccctgagaccgaagaagccaaagatgctgaaactggcaaggaggcagaggaggccccaagcgaagatgccgcaaaggagactgatgtggagatgaagcctgctgaagaggtgaagggggcctctgctgaaacagaagatgctgacatggctgatgctcctgcaccagcaccaatggaagaagataagaaacaaactgaagaactggcagaagctattgcagctcctcctgtgccatcggaggagaagaaagatgtcaagccagctgagcctgaagctgcagcaagcaacccaactgaggattcggcccctgctcctgctgaacctgctgatgttgctgctccagctgctgagcccaaatcagacgccaaacctgctgctgttgctgctccagtgcctgagaccaaatcagacgccgagcctgctgctgttgctgctccagcgcctgagaccaaatcagacgctgagcctgctgctgttgctgctccagctcctgagaccaaatcagtagccgagcctgctgctgttgctgctccagcgcctgagaccaaatcagatgccgagcctgctgctgttgctgctccagtgcctgagaccaaatcagatgccgagcctgctgctgttgctgctccagtgcctgaaacgaaatcagatgctgagcctgctgctgatgctgctccagttcctgagatgaaatcagagtccgagcctgctgctgttgctgctccagcgtctgaaaccaaatcagacgccgagcctgctgccgttgctgctccagcgcctgagaccaaatcagatgccgagcctgctgctgctgctgctccagtgcctggaaccaactcagatgctgctgctactgatccagcacctggaaccaaggccactgccgccgatccagcacctggagctccagcagagaactccaccgacaaagacggaagccaggagagccagcccgtgaacaatggacagctgccgcactcgacggtgaagtgcacctgaagccgcaacgccggaaaaacctgaaccccttccggcgccgtgtatctcatttaggaacaaacattcgcattcgcattcacattgttatcagttaaaaagtctatggaacggtaagcatgttaattagtcagtctgacgctgctgggtgacaggttggtaattaggctctgcatttagctgttttgtatggctgctgtcgccgccatacatgtatcatctcttgtggttgtatggtacctaaccgcgtaaacatgttaaccttaggccatgtattaattactccgctctaatgtttgtatgtgtattgtcaaacttgcagaaccagttgcatgcatgaaaaataataagtgtctgggtatctatgggtgcggggtacccatctccgcaccagcgcacccagccagaaacagcagtttgtttggatcc

SEQ ID NO: 33281 - protein, 448 aa, Zea mays subsp. mays
MATPGEQPAEVVSVEMPAPDGWTKKFTPLRGGRSEIVFVSPTGEEIKNKRQLSQYLKAHPGGPAVSEFDWGTGDTPRRSARISEKVKVFDSPEGEKIPKRSRNSSGRKGKQGKKETPETEEAKDAETGKEAEEAPSEDAAKETDVEMKPAEEVKGASAETEDADMADAPAPAPMEEDKKQTEELAEAIAAPPVPSEEKKDVKPAEPEAAASNPTEDSAPAPAEPADVAAPAAEPKSDAKPAAVAAPVPETKSDAEPAAVAAPAPETKSDAEPAAVAAPAPETKSVAEPAAVAAPAPETKSDAEPAAVAAPVPETKSDAEPAAVAAPVPETKSDAEPAADAAPVPEMKSESEPAAVAAPASETKSDAEPAAVAAPAPETKSDAEPAAAAAPVPGTNSDAAATDPAPGTKATAADPAPGAPAENSTDKDGSQESQPVNNGQLPHSTVKCT

SEQ ID NO: 33282 - protein, 433 aa, Zea mays subsp. mays
MPAPDGWTKKFTPLRGGRSEIVFVSPTGEEIKNKRQLSQYLKAHPGGPAVSEFDWGTGDTPRRSARISEKVKVFDSPEGEKIPKRSRNSSGRKGKQGKKETPETEEAKDAETGKEAEEAPSEDAAKETDVEMKPAEEVKGASAETEDADMADAPAPAPMEEDKKQTEELAEAIAAPPVPSEEKKDVKPAEPEAAASNPTEDSAPAPAEPADVAAPAAEPKSDAKPAAVAAPVPETKSDAEPAAVAAPAPETKSDAEPAAVAAPAPETKSVAEPAAVAAPAPETKSDAEPAAVAAPVPETKSDAEPAAVAAPVPETKSDAEPAADAAPVPEMKSESEPAAVAAPASETKSDAEPAAVAAPAPETKSDAEPAAAAAPVPGTNSDAAATDPAPGTKATAADPAPGAPAENSTDKDGSQESQPVNNGQLPHSTVKCT

SEQ ID NO: 33283 - protein, 302 aa, Zea mays subsp. mays
MKPAEEVKGASAETEDADMADAPAPAPMEEDKKQTEELAEAIAAPPVPSEEKKDVKPAEPEAAASNPTEDSAPAPAEPADVAAPAAEPKSDAKPAAVAAPVPETKSDAEPAAVAAPAPETKSDAEPAAVAAPAPETKSVAEPAAVAAPAPETKSDAEPAAVAAPVPETKSDAEPAAVAAPVPETKSDAEPAADAAPVPEMKSESEPAAVAAPASETKSDAEPAAVAAPAPETKSDAEPAAAAAPVPGTNSDAAATDPAPGTKATAADPAPGAPAENSTDKDGSQESQPVNNGQLPHSTVKCT

SEQ ID NO: 33284 - DNA, 1207 bp, Zea mays subsp. mays
acctcacgagtctcacacacctcccccctcctttttagggagagaaagcaacgaaacgccgagagaggcgtgcgagcgggagcaaggagatggagcgggcggcgccggtgaggagctcccacacctccacggccgacctactcgcgtggccgcagccccatggccccgccccagcaacgccgtcgccgccgcgccggcccggtcagccgtcggaggctatcaggaaggtggtgttcgggggtcaggtcaccgaggaggaggccgacagcctcaccaagaggaagccgtgctccgcgcccaagtggaaggagatgactgggagcggcattttcgctgccgggagcaatggagacgctggggaggcagctgctgccgcgaagcccgcccgaacctcctcgcgccaggcgagcagtactgtaagccacatctcgttcgctgaggatggaaccgatcctcccaaaaagcccacatcagtagctgaggtggcaaagcagcgtgagcttagtggcactcttcaaagcgaggcggatagtaagacgaagaagcagatctcaaatgcaaagtccaaggagctcagcggccacgacatctttgctgatactctggattccaggtctaacagggcaaggaactcatcgaatggcagcgcagcctcacacgcacctgccaaaaatacaaacgccagcaccttctcgtttggagatgccaacactgacagcacgccaaagacggcaaggaagataaccggcaagaaggtcaacgacctcaccggcaacgacatcttcaagggagacgcgccgcccgcttctgcagagaagcatctgagcaccgcgaagctgaaggagatcactggaagcaacatttttgcagatgggaaggaaccaatccgcgagcgtgtgggcggaaaccgcaagcctcctggcggtgagagcagcatcgcgctgatttagcataatccgggactcagtgtcgacccctagaggaggatttccaccagtaccaggcagcaggctgttggatcgtcagtttggtgtcttgttcctgatcaaggtgcggcagtgaagagccccgttttagtcttgatgatgtttattaactgttggtgtgtgcatgtttggtttggctgtgagatacccatgccgtcctcatcatggcagtgtgtagtgtttacggttgatgtgtttttacaaataatagctcgagtctg

SEQ ID NO: 33285 - protein, 286 aa, Zea mays subsp. mays
MERAAPVRSSHTSTADLLAWPQPHGPAPATPSPPRRPGQPSEAIRKVVFGGQVTEEEADSLTKRKPCSAPKWKEMTGSGIFAAGSNGDAGEAAAAAKPARTSSRQASSTVSHISFAEDGTDPPKKPTSVAEVAKQRELSGTLQSEADSKTKKQISNAKSKELSGHDIFADTLDSRSNRARNSSNGSAASHAPAKNTNASTFSFGDANTDSTPKTARKITGKKVNDLTGNDIFKGDAPPASAEKHLSTAKLKEITGSNIFADGKEPIRERVGGNRKPPGGESSIALI

SEQ ID NO: 33286 - protein, 212 aa, Zea mays subsp. mays
MTGSGIFAAGSNGDAGEAAAAAKPARTSSRQASSTVSHISFAEDGTDPPKKPTSVAEVAKQRELSGTLQSEADSKTKKQISNAKSKELSGHDIFADTLDSRSNRARNSSNGSAASHAPAKNTNASTFSFGDANTDSTPKTARKITGKKVNDLTGNDIFKGDAPPASAEKHLSTAKLKEITGSNIFADGKEPIRERVGGNRKPPGGESSIALI

SEQ ID NO: 33287 - protein, 145 aa, Zea mays subsp. mays
PHESHTPPPSFLGRESNETPREACEREQGDGAGGAGEELPHLHGRPTRVAAAPWPRPSNAVAAAPARSAVGGYQEGGVRGSGHRGGGRQPHQEEAVLRAQVEGDDWERHFRCREQWRRWGGSCCREARPNLLAPGEQYCKPHLVR

SEQ ID NO: 33288 - DNA, 779 bp, Zea mays subsp. mays
ccacctcaattattgcccacccatccccgctccctcctctcctctcctcccgtcccacccatctcctcgcaccagcgccggggaaatggcggccgcgctgtggacgctgctgctggtggtggccctgtcggcggcgctggcgctggcctcgaaccgccccgtggcggcggcggcgaccgcggcggcggaggcggcgaacgaggtgctccgcgcgcaccagctgccggggggcctgctgccggcggggatcacggcgttccggcacgacgccgccacgggagcgttcgaggcccggctggacgcgccctgcacggcgcgcttcgaggtcggcctccgctacaacgccaccgtctccggggtcatcagccccggccagatcgccgacatctccggcgtcgccgcgcaggacctcttcatgtggttccccgtccacgacatcaaggtcgacatcccctcctccggcgtcatctacttcaacgtcggcgtcgtcaagaagcacctcccgctcgccgtcttcgacgcgccgccggcctgcacgcccgacccgctcctgcaggtcatttctcatcctagcctcactctctcgatggcacgagctctaattcatcgatcttgggaccagtgacctccttgacatcattcaatcctcaatgatcttgaatgttggcacaacctttatacccagtttctttactgaaagctgcaagtagcatgcgcaggagcttttcagcatgtcatattccacggagcagagagtcgtgaatacacaagagatacgg

SEQ ID NO: 33289 - protein, 207 aa, Zea mays subsp. mays
HLNYCPPIPAPSSPLLPSHPSPRTSAGEMAAALWTLLLVVALSAALALASNRPVAAAATAAAEAANEVLRAHQLPGGLLPAGITAFRHDAATGAFEARLDAPCTARFEVGLRYNATVSGVISPGQIADISGVAAQDLFMWFPVHDIKVDIPSSGVIYFNVGVVKKHLPLAVFDAPPACTPDPLLQVISHPSLTLSMARALIHRSWDQ

SEQ ID NO: 33290 - protein, 199 aa, Zea mays subsp. mays
TSIIAHPSPLPPLLSSRPTHLLAPAPGKWRPRCGRCCWWWPCRRRWRWPRTAPWRRRRPRRRRRRTRCSARTSCRGACCRRGSRRSGTTPPRERSRPGWTRPARRASRSASATTPPSPGSSAPARSPTSPASPRRTSSCGSPSTTSRSTSPPPASSTSTSASSRSTSRSPSSTRRRPARPTRSCRSFLILASLSRWHEL

SEQ ID NO: 33291 - protein, 190 aa, Zea mays subsp. mays
PPQLLPTHPRSLLSSPPVPPISSHQRRGNGGRAVDAAAGGGPVGGAGAGLEPPRGGGGDRGGGGGERGAPRAPAAGGPAAGGDHGVPARRRHGSVRGPAGRALHGALRGRPPLQRHRLRGHQPRPDRRHLRRRRAGPLHVVPRPRHQGRHPLLRRHLLQRRRRQEAPPARRLRRAAGLHARPAPAGHFSS

SEQ ID NO: 33292 - protein, 179 aa, Zea mays subsp. mays
MAAALWTLLLVVALSAALALASNRPVAAAATAAAEAANEVLRAHQLPGGLLPAGITAFRHDAATGAFEARLDAPCTARFEVGLRYNATVSGVISPGQIADISGVAAQDLFMWFPVHDIKVDIPSSGVIYFNVGVVKKHLPLAVFDAPPACTPDPLLQVISHPSLTLSMARALIHRSWDQ

SEQ ID NO: 33293 - DNA, 1191 bp, Zea mays subsp. mays
cttccagttcgcaagggtttcccagccaaagaaccagcatcctggttgtgaaaatggggggtgtgcgtagctacttcttcatcatcgccgccgcggtcgttgccgtcgtcctcgcgcttctcccggccggcgccacaggtgccggcctcaaggtcggcttctacagcaagacatgcccgtcggcggagtccctggtgcagcaggcggtggctgccgccttcaagaacaacagcggcatcgccgccggcctcatccgcctgcacttccatgactgcttcgtcaggggctgcgacggctcggtgctgatcgactcgacggcgaacaacacggcggagaaggacgcggtcccgaacaacccgagcctgcggggcttcgaggtcatcgacgccgccaagaaggcggtggaggcacggtgccccaagacggtgtcctgcgccgacatcctggcgttcgcggcgcgggacagcatcgcgctggcggggaacaacctgacgtacaaggtccccgcggggcggcgcgacgggcgggtgtccagggacacggacgccaacagcaacctcccctcgccgctctccaccgccgccgagctcgtcggcaacttcacgcgcaagaacctcaccgccgaggacatggtggtgctctccggcgcgcacaccgtcggccgctcccactgctcctccttcaccaaccgcctctacggcttcagcaacgccagcgacgtcgaccccaccatcagctccgcctacgccctcctgctgcgggccatctgcccgtccaacaccagccagttcttccccaacaccaccaccgacatggacctcatcacgcccgcgctgctcgacaacaggtactacgtcggcctcgccaacaacctcggcctcttcacgtccgaccaggctctgctcaccaacgccacgctcaagaagtccgtcgacgccttcgtcaagagcgaaagcgcgtggaagaccaagttcgccaagtccatggtcaagatgggcaatatcgacgtgctcacgggcaccaagggggagatcaggctcaactgcagggtcatcaacagcggcagcagcagctctggattattccagcttcacacggcaaccgcctctgacgaggaattcgcccacgttgcaactaactagcagctactatatctctatccgtagaggatctagtgatctactgctaccc

SEQ ID NO: 33294 - protein, 379 aa, Zea mays subsp. mays
SSSQGFPSQRTSILVVKMGGVRSYFFIIAAAVVAVVLALLPAGATGAGLKVGFYSKTCPSAESLVQQAVAAAFKNNSGIAAGLIRLHFHDCFVRGCDGSVLIDSTANNTAEKDAVPNNPSLRGFEVIDAAKKAVEARCPKTVSCADILAFAARDSIALAGNNLTYKVPAGRRDGRVSRDTDANSNLPSPLSTAAELVGNFTRKNLTAEDMVVLSGAHTVGRSHCSSFTNRLYGFSNASDVDPTISSAYALLLRAICPSNTSQFFPNTTTDMDLITPALLDNRYYVGLANNLGLFTSDQALLTNATLKKSVDAFVKSESAWKTKFAKSMVKMGNIDVLTGTKGEIRLNCRVINSGSSSSGLFQLHTATASDEEFAHVATN

SEQ ID NO: 33295 - protein, 362 aa, Zea mays subsp. mays
MGGVRSYFFIIAAAVVAVVLALLPAGATGAGLKVGFYSKTCPSAESLVQQAVAAAFKNNSGIAAGLIRLHFHDCFVRGCDGSVLIDSTANNTAEKDAVPNNPSLRGFEVIDAAKKAVEARCPKTVSCADILAFAARDSIALAGNNLTYKVPAGRRDGRVSRDTDANSNLPSPLSTAAELVGNFTRKNLTAEDMVVLSGAHTVGRSHCSSFTNRLYGFSNASDVDPTISSAYALLLRAICPSNTSQFFPNTTTDMDLITPALLDNRYYVGLANNLGLFTSDQALLTNATLKKSVDAFVKSESAWKTKFAKSMVKMGNIDVLTGTKGEIRLNCRVINSGSSSSGLFQLHTATASDEEFAHVATN

SEQ ID NO: 33296 - DNA, 1618 bp, Zea mays subsp. mays
aatcgaaaaatcctcagatccgccccctcctccacccttgcgccgcgctttcacagctctcccgcctccggatccagatccgccgccaccaacgcctgctcctccccctcctgctgcaccaccaccatcaagaggtccagcagggcggcagcggcagcggcggcggcggcggcggcggcgacatggggcgtgacggcggtggcggtgtcgccggcggcatgtctgactcggtgctccggaaggtgctcctctcctacttctacgtggcggtgtggatcttcctctccttctccgtcatcgtctacaacaagtacatcctcgacccaaagatgtacaactggcccttccccatctcgctcaccatggtgcacatgggtttctgctcatccctcgccgtcgcgctcgtccgcgtcctccgcgtcgtcgacctccccacttcgccatctatgacgccgcagttctacacctcctccgtcgtccccatcggcgcgctctacgcgatgtcgctctggttctccaactcagcctacatctacctgtccgtgtcattcatccagatgctcaaggcgctgatgcccgtcgccgtctactccatcggcgtcctcttcaagaaggagaccttcaggtcctcctccatgctcaacatgctctccatctcattcggtgtggccatcgccgcctacggcgaggcgcgcttcgacgtgcgcggtgtcgcgctgcagctcgccgccgtcgccttcgaggccacgcggctcgtgctcatccagatcctgctcacgtccaagggcatctcgctcaaccctatcacctcgctctactatgtcgcgccgtgctgcttctgtttcctcctcgtgccctgggccttcgtcgagctgcccaggctgcgcgccgtcggcaccttccaaccggatttcttcgtctttgggacgaactcactctgcgcctttgcgctcaaccttgccgtctttctgctggtcggcaagacctcggcgctgaccatgaacgtcgcgggagtagtcaaggactggctgttgattgccttctcgtggtccgtgatccgggacaccgtcacaccgatcaacctgttcgggtacgggatcgcgtttttaggggtgggctactacaatcatgtcaagctgcaggcgctcaaggctaaggaggcccagaagaaagccacacaggctgatgaggaggccgggtcgctcttgcaggagcgcgatggacacagtgatcgcaagagcgacaatcaagcctagagggccagatctgatcctggcttccccatattgggcatctgatgcaaggtgcaaagactggtgtttggtctgtggttgctttcaaggaggtgtgtgccggttgcttgcacatctttaactctgggtctgaagagcaaatcagaagtatttatggcttaggaaatatgcacctgctttgctggagaactttgtcctgctatttatttatagacacttctgatctacaggaaggcggccattcctcactacctctctttgcccattgtctacatttatttgttctactagtagattaggggactacagatgtactcctgcagatggttaatttggtggctattttcgatatataatgagcttac

SEQ ID NO: 33297 - protein, 417 aa, Zea mays subsp. mays
SKNPQIRPLLHPCAALSQLSRLRIQIRRHQRLLLPLLLHHHHQEVQQGGSGSGGGGGGGDMGRDGGGGVAGGMSDSVLRKVLLSYFYVAVWIFLSFSVIVYNKYILDPKMYNWPFPISLTMVHMGFCSSLAVALVRVLRVVDLPTSPSMTPQFYTSSVVPIGALYAMSLWFSNSAYIYLSVSFIQMLKALMPVAVYSIGVLFKKETFRSSSMLNMLSISFGVAIAAYGEARFDVRGVALQLAAVAFEATRLVLIQILLTSKGISLNPITSLYYVAPCCFCFLLVPWAFVELPRLRAVGTFQPDFFVFGTNSLCAFALNLAVFLLVGKTSALTMNVAGVVKDWLLIAFSWSVIRDTVTPINLFGYGIAFLGVGYYNHVKLQALKAKEAQKKATQADEEAGSLLQERDGHSDRKSDNQA

SEQ ID NO: 33298 - protein, 357 aa, Zea mays subsp. mays
MGRDGGGGVAGGMSDSVLRKVLLSYFYVAVWIFLSFSVIVYNKYILDPKMYNWPFPISLTMVHMGFCSSLAVALVRVLRVVDLPTSPSMTPQFYTSSVVPIGALYAMSLWFSNSAYIYLSVSFIQMLKALMPVAVYSIGVLFKKETFRSSSMLNMLSISFGVAIAAYGEARFDVRGVALQLAAVAFEATRLVLIQILLTSKGISLNPITSLYYVAPCCFCFLLVPWAFVELPRLRAVGTFQPDFFVFGTNSLCAFALNLAVFLLVGKTSALTMNVAGVVKDWLLIAFSWSVIRDTVTPINLFGYGIAFLGVGYYNHVKLQALKAKEAQKKATQADEEAGSLLQERDGHSDRKSDNQA

SEQ ID NO: 33299 - protein, 345 aa, Zea mays subsp. mays
MSDSVLRKVLLSYFYVAVWIFLSFSVIVYNKYILDPKMYNWPFPISLTMVHMGFCSSLAVALVRVLRVVDLPTSPSMTPQFYTSSVVPIGALYAMSLWFSNSAYIYLSVSFIQMLKALMPVAVYSIGVLFKKETFRSSSMLNMLSISFGVAIAAYGEARFDVRGVALQLAAVAFEATRLVLIQILLTSKGISLNPITSLYYVAPCCFCFLLVPWAFVELPRLRAVGTFQPDFFVFGTNSLCAFALNLAVFLLVGKTSALTMNVAGVVKDWLLIAFSWSVIRDTVTPINLFGYGIAFLGVGYYNHVKLQALKAKEAQKKATQADEEAGSLLQERDGHSDRKSDNQA

SEQ ID NO: 33300 - DNA, 1677 bp, Zea mays subsp. mays
acaccgggccgtgccgatgggtgtttacgagtagcagctgtatctcgttgacctcaccgcctgcagggcaccaaggaggagatgacttccccgaagcgggcagcagggcgggaagggtgcggatgcttggccgccgtcgcgcggggcctccgcggggcgtgcttccggccggcggtgacggcggacggtgacggcggcggctcggccaagggcagccacgttcacgacgcagcagagacaagatatctgaatgctagcaatcgggagcttggtgatcattttcagacaaaacgtgatggtgaaaatggtgttgatgcatcaattgaaaagagaacacccaagctacttcagtttacctttcaagagttgaaatctgccacgcttaacttcaggccagacagtattcttggggagggtgggttcggttatgtattcaaggggtggattgagccaaacagcactgctcctgcaaaacctggcacaggggttactgtggcagtcaaaagtttgaagccagatgcgcttcaaggtcatagagaatgggtggcagaagttgactttctgggacagttgcatcataaacaccttgttaagctgattggattgtattgaggatgatcaaaggttacttgtatatgaattcatggcacggggaagtcttgaaaatcatcttttcagaagggctcttcccctaccttggtccaacaggatgaagattgctctaggtgccgcgaaaggactagccttcctccatggaggtcccaaacctgttatttacagggattttaagacatcgaatgttcttcttgatgtggagtacaacgcaaaactatctgatttcggtttagcaaaagctggtcctcagggtgataaaactcatgtatctactcgggttgttggcacctatggttatgctgcaccagagtatgtaatgacagggcacttgacatctaagagtgatgtttatagcttcggagttgtgctactcgagatgttgactgggagaagatcaatggacaagaagcggcctacgggggagcagaacctggttgcatgggcaaggccttacctaaatgatcggcgaaggctctatcagcttgtagatcctcgcttggggctgaactactctgtcaaaggggtgcaaaaggtcgctcagatctgccactactgccttacccgtgacagtaagtctcgcccatcgatggatgaagttgtcaagcaactcacaccattacaagatctaaacgacatggcatctgcttcgccaaggcctcgctcaactcagcgcggaaaggtgcatcgatgacaacccggttctgttgtaagaagagcagtgtggtcctggttgcttgatgcttgtttggtttaattgtatagcaaaattaggtgttgcctgccgatacctggagatgtgactccgcctgatgtgtcgctcaggtcagtcacactgctctgctgtttggctggttgccaaagcaagataacgatgtatctggttgcatcatgtaataattattataattaccatttaacttctggcgggggtacatcatgtaatggttggtgtacacccaggttagtaatcttaatagtgtttggctgacaggctgagggtcagtagacggtttgcagttcgcttttttcaggggaaaggtacaggtgttaaattgtgattgt

SEQ ID NO: 33301 - protein, 220 aa, Zea mays subsp. mays
MARGSLENHLFRRALPLPWSNRMKIALGAAKGLAFLHGGPKPVIYRDFKTSNVLLDVEYNAKLSDFGLAKAGPQGDKTHVSTRVVGTYGYAAPEYVMTGHLTSKSDVYSFGVVLLEMLTGRRSMDKKRPTGEQNLVAWARPYLNDRRRLYQLVDPRLGLNYSVKGVQKVAQICHYCLTRDSKSRPSMDEVVKQLTPLQDLNDMASASPRPRSTQRGKVHR

SEQ ID NO: 33302 - protein, 198 aa, Zea mays subsp. mays
MKIALGAAKGLAFLHGGPKPVIYRDFKTSNVLLDVEYNAKLSDFGLAKAGPQGDKTHVSTRVVGTYGYAAPEYVMTGHLTSKSDVYSFGVVLLEMLTGRRSMDKKRPTGEQNLVAWARPYLNDRRRLYQLVDPRLGLNYSVKGVQKVAQICHYCLTRDSKSRPSMDEVVKQLTPLQDLNDMASASPRPRSTQRGKVHR

SEQ ID NO: 33303 - protein, 176 aa, Zea mays subsp. mays
MTSPKRAAGREGCGCLAAVARGLRGACFRPAVTADGDGGGSAKGSHVHDAAETRYLNASNRELGDHFQTKRDGENGVDASIEKRTPKLLQFTFQELKSATLNFRPDSILGEGGFGYVFKGWIEPNSTAPAKPGTGVTVAVKSLKPDALQGHREWVAEVDFLGQLHHKHLVKLIGLY

SEQ ID NO: 33304 - DNA, 1653 bp, Zea mays subsp. mays
actgttcaaacaaaccctccactgccctccccactctccccttcaccgcgccgcactcccaagtcccaacaggcctaaatggcggcggccggaacaattcccggcgccgccgcagccattggcgcttctgtgtcccaacgccaacgtcgcgtcggcgctccttctttcgtagctgcctacgtctccgagggcacccgcctcgtctgccggaggcagctccgtccggctccggtcctcgcttcttccttcatctccctttctcatccagcgaggcggcggttcctctgcgatgctgcggccggagcctcctcaggtcccgctggagaagccaagccccagggatttgcagagagatacccagctcttgtcacaggtttcttcttcttcttgtggtattttctgaatgtaatatttaacatcctcaacaagaagatcttcgactacttcccctatccatattttgtgtcagtgagccatctttttattggagtactatacttccttattggctggagcttcggcatcccaaagcgcgcgccaatcaactcaacacttctgaagcagcttgttccagttgcggtttgccatgccattggccatgtaacaagcactgtgtcatttgctgctgtagctgtgtcatttgcccacactattaaagctctcgagccattcttcaatgcggctgcttcccagtttatccttggacaaccagttccattgacactctggctgtctcttgttccagtggtgattggtgtctcggtagcatccctcactgaactctcatttaattggactggcttcattaatgccatgatctcaaatatttctttcacctaccgaagcatctattctaagaaggctatgactgacatggatagtaccaacttgtatgcatacatatcaataattgctctctttgtctgcatcccccctgcaattattattgaaggacctcaattagtgcagcatggttttaaagatgcaattgccaaagttggattaacaaagttgatttctaatttttttgtggtgggcttattctatcacctttataaccaggttgctacaaacacattggagcgggtagcccctttaacacatgccatcggcaatgtgttgaaacgtgttttcgtcattggcttttccatcatcgcattcggcaacaagatcaccacacagactggaattggcacttccattgctgtttctggtgttgccctctactcatttataaaggctaagattgaggagaaaaagcaaataaagagtgcataaggtgttggctgatgtggatgcggttggtttgtcgctttgatggacctctattctctcggtgaacgaacaaacttgcaagatggataaaatcttgctatctcctagtacatttgattgttattcccagtctggtactgaggtgtgcggttgttgttggctaacttgtttatttgaagcaaatttgagcaatgctcagtggcatggaatttccatttctgttttccttcgctcatttattctgacttgacatggtgctattgtaatcttaagcagtagtgtctctagaatgttttccccaaggagatttcagtaccaaatttgaacaatcctcaaactagaaattttgatttccatgcaccccactcagcaattctg

SEQ ID NO: 33305 - protein, 399 aa, Zea mays subsp. mays
MAAAGTIPGAAAAIGASVSQRQRRVGAPSFVAAYVSEGTRLVCRRQLRPAPVLASSFISLSHPARRRFLCDAAAGASSGPAGEAKPQGFAERYPALVTGFFFFLWYFLNVIFNILNKKIFDYFPYPYFVSVSHLFIGVLYFLIGWSFGIPKRAPINSTLLKQLVPVAVCHAIGHVTSTVSFAAVAVSFAHTIKALEPFFNAAASQFILGQPVPLTLWLSLVPVVIGVSVASLTELSFNWTGFINAMISNISFTYRSIYSKKAMTDMDSTNLYAYISIIALFVCIPPAIIIEGPQLVQHGFKDAIAKVGLTKLISNFFVVGLFYHLYNQVATNTLERVAPLTHAIGNVLKRVFVIGFSIIAFGNKITTQTGIGTSIAVSGVALYSFIKAKIEEKKQIKSA

SEQ ID NO: 33306 - DNA, 2165 bp, Zea mays subsp. mays
tacctagaacatcctaatcgaaaaatgcgttactgtaccaatggctccccacctcctggccgtggccgtggccgtggcggccatcatcgccaccgtctcgttgctggcgcccggcgccgctgcctacccgtggccagtttgtgggacgagcaacgacttcgagcccaacagcacataccaggccaacctcaacctcctcgccgccatgctgcccaacaacgtgtccgcatccccggtcctctacgccaccgccgtcgtcggcgccgtcccggagcaggtctggggcatgggactctgccgcggcgacgccaacgccagcagctgcctcgcctgcctcacccaggcgttccaggacctgcccaacgactgctcctacaacaaggacgccgccatctactacgacccctgcaccctccactactccgacgtccacaccctcgccgacgacgacaccggcccgacgaccatgtcgtacaacatcaacaacaacgccaacgtcacctcggacccggcccggttcgagcgcctcctcgccgccctcgtcaacgccaccgccgagcacgccgcgtccaactccacccggcgattcgccacgggggaggccgacgccgacttcgaccggcagttccccaaggtgtacgcgctggcgcagtgcacgccggaccagacgccggcgcagtgccgcaagtgcctcgccggcctcatatcgcagtcgctggacgggttccagaacaacatcggaggcagggtgctctgggtcaactgcacctggcggtacgagacctcgcccttcttcaatggaccggccatggtgcgcctggcatcgtcgtcgagccctccggcagcggcagcggcaggtggaggggagaggaagtacagcgtgttcatcgtggttcttgcagttgtgctgcccactctagctgccctgaatcttgtgttttgcttctgtttctggcggcggccagcaccacaggcaaagcagtcacagcccatgtattccaccgaagcagaggacgtggaaacggtggactccatgatgatcgacgtctccgccctgcgagccgcaacagggaatttcgacgagagcaacaagctcggcgaaggcgggtttggcgcggtgtacaagggcgtcctcccggacggcgacgagatagcggtgaagcgtctgtcgaagagctcgacgcagggagtggaggagctgaagaacgagctcgcgctggtcgccaggctgaggcacaggaacctcgtcaggctcgtcggcgtgtgcctggagcagcaagaacggctgctcgtctacgagtttgtccccaaccggagcctcgacctggtactcttcggtaccgacacgcgtgagccgctcagctgggagcagaggtacaggatcataaacggcatcgctcgaggcctgcagtacctccacgaggactcccagctcaaggtagtccaccgtgatctcaaggccagcaacatcctgctagacgtggagatgaaccccaagatctcagatttcggcctcgcgaggatcttcggccgggaccagacgcaggccgtcaccagccgcgttgtcggaacctatgggtacctagcaccagaatacctgatgcgcgggaactactccgtgaaatcggacgccttcagcttcggcgtcatggtgctggagatcgtcaccgggaggaagaacaacggcagctcccacaagtccggagacctcttgaccaccgtatgggagcactgggaggccgggacggtggcggagctggtggacccgtccctgggcggaagcttcccggagggcgacgtgctgaggtgcatccacatcggtctgctctgcgtccagggggaccccgctgcccgcccggtgatgtcgtccgtcgtgacgatgcttggaaccgacacggtcaccctccaggctccatccaagccgggattcttcgccagaaagagtggcactagcacgaccgtgtccgctgatgatgggtcgatttagagattgccactagagtacagagttgccagaaagagtagctcctttttttaacgatagccatctctatcgctaataagatcctgcgttttattagtatgggaggcatgggattattgaaggtctccttgactctaaagaaaatgtcttaggacagacttgagcctaaacgtctttgttc

SEQ ID NO: 33307 - protein, 648 aa, Zea mays subsp. mays
MAPHLLAVAVAVAAIIATVSLLAPGAAAYPWPVCGTSNDFEPNSTYQANLNLLAAMLPNNVSASPVLYATAVVGAVPEQVWGMGLCRGDANASSCLACLTQAFQDLPNDCSYNKDAAIYYDPCTLHYSDVHTLADDDTGPTTMSYNINNNANVTSDPARFERLLAALVNATAEHAASNSTRRFATGEADADFDRQFPKVYALAQCTPDQTPAQCRKCLAGLISQSLDGFQNNIGGRVLWVNCTWRYETSPFFNGPAMVRLASSSSPPAAAAAGGGERKYSVFIVVLAVVLPTLAALNLVFCFCFWRRPAPQAKQSQPMYSTEAEDVETVDSMMIDVSALRAATGNFDESNKLGEGGFGAVYKGVLPDGDEIAVKRLSKSSTQGVEELKNELALVARLRHRNLVRLVGVCLEQQERLLVYEFVPNRSLDLVLFGTDTREPLSWEQRYRIINGIARGLQYLHEDSQLKVVHRDLKASNILLDVEMNPKISDFGLARIFGRDQTQAVTSRVVGTYGYLAPEYLMRGNYSVKSDAFSFGVMVLEIVTGRKNNGSSHKSGDLLTTVWEHWEAGTVAELVDPSLGGSFPEGDVLRCIHIGLLCVQGDPAARPVMSSVVTMLGTDTVTLQAPSKPGFFARKSGTSTTVSADDGSI

SEQ ID NO: 33308 - protein, 593 aa, Zea mays subsp. mays
MLPNNVSASPVLYATAVVGAVPEQVWGMGLCRGDANASSCLACLTQAFQDLPNDCSYNKDAAIYYDPCTLHYSDVHTLADDDTGPTTMSYNINNNANVTSDPARFERLLAALVNATAEHAASNSTRRFATGEADADFDRQFPKVYALAQCTPDQTPAQCRKCLAGLISQSLDGFQNNIGGRVLWVNCTWRYETSPFFNGPAMVRLASSSSPPAAAAAGGGERKYSVFIVVLAVVLPTLAALNLVFCFCFWRRPAPQAKQSQPMYSTEAEDVETVDSMMIDVSALRAATGNFDESNKLGEGGFGAVYKGVLPDGDEIAVKRLSKSSTQGVEELKNELALVARLRHRNLVRLVGVCLEQQERLLVYEFVPNRSLDLVLFGTDTREPLSWEQRYRIINGIARGLQYLHEDSQLKVVHRDLKASNILLDVEMNPKISDFGLARIFGRDQTQAVTSRVVGTYGYLAPEYLMRGNYSVKSDAFSFGVMVLEIVTGRKNNGSSHKSGDLLTTVWEHWEAGTVAELVDPSLGGSFPEGDVLRCIHIGLLCVQGDPAARPVMSSVVTMLGTDTVTLQAPSKPGFFARKSGTSTTVSADDGSI

SEQ ID NO: 33309 - protein, 566 aa, Zea mays subsp. mays
MGLCRGDANASSCLACLTQAFQDLPNDCSYNKDAAIYYDPCTLHYSDVHTLADDDTGPTTMSYNINNNANVTSDPARFERLLAALVNATAEHAASNSTRRFATGEADADFDRQFPKVYALAQCTPDQTPAQCRKCLAGLISQSLDGFQNNIGGRVLWVNCTWRYETSPFFNGPAMVRLASSSSPPAAAAAGGGERKYSVFIVVLAVVLPTLAALNLVFCFCFWRRPAPQAKQSQPMYSTEAEDVETVDSMMIDVSALRAATGNFDESNKLGEGGFGAVYKGVLPDGDEIAVKRLSKSSTQGVEELKNELALVARLRHRNLVRLVGVCLEQQERLLVYEFVPNRSLDLVLFGTDTREPLSWEQRYRIINGIARGLQYLHEDSQLKVVHRDLKASNILLDVEMNPKISDFGLARIFGRDQTQAVTSRVVGTYGYLAPEYLMRGNYSVKSDAFSFGVMVLEIVTGRKNNGSSHKSGDLLTTVWEHWEAGTVAELVDPSLGGSFPEGDVLRCIHIGLLCVQGDPAARPVMSSVVTMLGTDTVTLQAPSKPGFFARKSGTSTTVSADDGSI

SEQ ID NO: 33310 - DNA, 1123 bp, Zea mays subsp. mays
gttcgcaagaagctcagaacagaacccatcaaaagcgaggctgcgagagagagagagagagagagagagagagagagagagagagcgagagagagagagagagagagagagagagagagagagagagagagagagagagagagtgagtgagggaggcgccgccgcgccgacgccgagtcctttctccatcctgcatctgccgctgtttccgacaggatgtttctcacgaggacggagtacgaccgcggggtgaacaccttctctccggaggggcggctgttccaggtcgagtacgccatcgaggccatcaagttgggatccactgcgatcggtttgaagacaaaggatggtgttgtactcgccgttgagaaacgtgtgacctcaccactgctggaaccaagcagtgtggaaaaaataatggaaattgatgagcacataggctgtgccatgagtggacttattgctgatgctagaacactagtggaacatgctcgtgttgaaactcagaatcataggttctcatacggagagccaatgactgtagaatcttcgacacaagctatctgtgacttagctctgcgttttggcgaaggtgacgaagagtcaatgtcacggccatttggagtctctctcctaattgctggacatgatgagaatggacctagcctgtactacactgacccatctggtacattttggcaatgcaacgcaaaggcaattggatcaggttctgagggagctgatagttccttgcaggaacagtacaacaaggaattgaccctccaggaggcggagaccatagccctttctatcctgaagcaggttatggaagagaaggtgaccccaaacaacgtcgatattgccaaggttgcccccaagtaccacctctacacccctgccgaggtggaagccgtcatcgcgaggctgtgaaacgcttccgagctcttgctatccacgtcatcaatcggtaatagacgacccttgtacgaagcgtgggcaccatggtccttgattatggcttgattatggcaaggacagtcgatgttagtttgattcacagctcagccgggctcacttgtctttttaaatttttatgaattagcgttgagaactttgtactgcc

SEQ ID NO: 33311 - protein, 237 aa, Zea mays subsp. mays
MFLTRTEYDRGVNTFSPEGRLFQVEYAIEAIKLGSTAIGLKTKDGVVLAVEKRVTSPLLEPSSVEKIMEIDEHIGCAMSGLIADARTLVEHARVETQNHRFSYGEPMTVESSTQAICDLALRFGEGDEESMSRPFGVSLLIAGHDENGPSLYYTDPSGTFWQCNAKAIGSGSEGADSSLQEQYNKELTLQEAETIALSILKQVMEEKVTPNNVDIAKVAPKYHLYTPAEVEAVIARL

SEQ ID NO: 33312 - protein, 170 aa, Zea mays subsp. mays
MEIDEHIGCAMSGLIADARTLVEHARVETQNHRFSYGEPMTVESSTQAICDLALRFGEGDEESMSRPFGVSLLIAGHDENGPSLYYTDPSGTFWQCNAKAIGSGSEGADSSLQEQYNKELTLQEAETIALSILKQVMEEKVTPNNVDIAKVAPKYHLYTPAEVEAVIARL

SEQ ID NO: 33313 - protein, 160 aa, Zea mays subsp. mays
MSGLIADARTLVEHARVETQNHRFSYGEPMTVESSTQAICDLALRFGEGDEESMSRPFGVSLLIAGHDENGPSLYYTDPSGTFWQCNAKAIGSGSEGADSSLQEQYNKELTLQEAETIALSILKQVMEEKVTPNNVDIAKVAPKYHLYTPAEVEAVIARL

SEQ ID NO: 33314 - DNA, 1182 bp, Zea mays subsp. mays
aacagctcaacagccaccggagagcacggaggaaaagcatctccaaaaccctagcccccatcccctcgctggaaagtctcgtcggcggccgcggagatgggcaaggcgaaggggaagcagcgtcaggacaagttctaccacctagccaaggagcaagggtatcggagtcgcgcggcgttcaagctgctccagctcgacgcgcggttccgcttcctcctgacggcgcactcggtgctcgacctctgcgccgcgccgggagggtgggttcaggtggccgtcaaccatgccccagtcggagccttcgtcgtcggcgtcgacctcgttcccatccgccccattcgcggggcccactcgctcaccgaggacatcaccaccaccaagtgccgcgccgcggtgcggaggctcatggactccaatggcgtctccgccttcgacgtcgtgctccacgatgggtcgcccaacgtcggtggtgcctgggcgcaggaggccacatcgcagtcggcgctagttattgacgcactgcgcctcgctaccatgttcctcgcccccaagggcgccttcatcacgaaggtttttaggtctcaagattacaacgctattatgtactgtcttaaacagttgtttgagaaggttgaggcaactaaacctacggcaagtcggtctacatctgctgaaatttatatcatctgcctgaaatataaggctcccgcaaagattcaaccagaacttcttgatataaagcacttgttcagtgtggttccagaacagaccaaatctagggatgttatggatggtaggaaaaagagacaccgtgatgggtatgaagaagggaatacgacattacggaaagttggtttggcatctgattttatatggtctgatgcccaggcgccactggagtttttgggctcttacaatgcaatttcatttgataatccagaatccctgaccataaagaatcatgagcttacaacagatgatataaaaaatttctgtgaggacttacttctgttggataaaaatagtttcaagcatatcttgaaatggcgtattcgcttacgaaaagcactgtcagtgtcttcacaagtcaccctaaaggccaatgatgctgtggagaacacaaaggtcatggatgatgatgtacttctacaggaaatggaagaattgaccagtgttattgat

SEQ ID NO: 33315 - protein, 362 aa, Zea mays subsp. mays
MGKAKGKQRQDKFYHLAKEQGYRSRAAFKLLQLDARFRFLLTAHSVLDLCAAPGGWVQVAVNHAPVGAFVVGVDLVPIRPIRGAHSLTEDITTTKCRAAVRRLMDSNGVSAFDVVLHDGSPNVGGAWAQEATSQSALVIDALRLATMFLAPKGAFITKVFRSQDYNAIMYCLKQLFEKVEATKPTASRSTSAEIYIICLKYKAPAKIQPELLDIKHLFSVVPEQTKSRDVMDGRKKRHRDGYEEGNTTLRKVGLASDFIWSDAQAPLEFLGSYNAISFDNPESLTIKNHELTTDDIKNFCEDLLLLDKNSFKHILKWRIRLRKALSVSSQVTLKANDAVENTKVMDDDVLLQEMEELTSVID

SEQ ID NO: 33316 - protein, 259 aa, Zea mays subsp. mays
MDSNGVSAFDVVLHDGSPNVGGAWAQEATSQSALVIDALRLATMFLAPKGAFITKVFRSQDYNAIMYCLKQLFEKVEATKPTASRSTSAEIYIICLKYKAPAKIQPELLDIKHLFSVVPEQTKSRDVMDGRKKRHRDGYEEGNTTLRKVGLASDFIWSDAQAPLEFLGSYNAISFDNPESLTIKNHELTTDDIKNFCEDLLLLDKNSFKHILKWRIRLRKALSVSSQVTLKANDAVENTKVMDDDVLLQEMEELTSVID

SEQ ID NO: 33317 - protein, 216 aa, Zea mays subsp. mays
MFLAPKGAFITKVFRSQDYNAIMYCLKQLFEKVEATKPTASRSTSAEIYIICLKYKAPAKIQPELLDIKHLFSVVPEQTKSRDVMDGRKKRHRDGYEEGNTTLRKVGLASDFIWSDAQAPLEFLGSYNAISFDNPESLTIKNHELTTDDIKNFCEDLLLLDKNSFKHILKWRIRLRKALSVSSQVTLKANDAVENTKVMDDDVLLQEMEELTSVID

SEQ ID NO: 33318 - DNA, 1550 bp, Zea mays subsp. mays
ctctctcgctgcgcctccgcccccaaatctgcgcaaaggtctcccactcaaattcctcgcggcgaccgatatggttgggagcgtgggcaacgggctggccgatctgggtgcaagagccgtctccatgaacggggcggggaaggcgctgcgtcctaccgaggcggcggcggccgccgccgccgcggagacgctcccgatggagctggatccgtcggaggccttagttgccgctgcggtggaggcgaagggcgaggaggctgccaacgggaggagggagttcgtgatggggaggaacgtacacacctcctgcttcgccgtgaaggagcccgacgcggacgacgaggaaaccggcgagcgggaggcaaccatggctagcgttctcgcgctctaccgccgctcgctcgtcgaacgcaccaagcaccacctcggttacccatacaatctggactttgattatggtgcactgacccagctgcagcacttctcaattaacaaccttggtgatcccttcatcgagagcaactatggtgtccattcccggcagtttgaggttggagtgctggattggtttgctcgcctctgggagttagaaaaggacgagtactggggatatattactaactgtggtacagaaggaaatctgcatgggattcttgttgggagggaggtgttccctgatggaatattgtatgcttctcgtgagtcccattattcagtattcaaagcagcaagaatgtacagaatggattgtgtcaaagttgacacccttatgtctggggaaatagattgtgctgatttccagagaaagttattgcagaaccgagacaaacctgccatcattaatgttaacattggaacaactgtgaagggggcagttgatgatctagacttggttatcaaaaccctagaggaaaacggctttaaaaatcggttttatattcattgtgatggtgccctttttggattgatgataccatttgttaagaaggcacctcaagtgacatttaaaaagcctattgggagtgtcagcgtctctgggcacaagtttgtcggatgccccatgccatgtggtgtccagataacaaggttggagcacataaatgccctttctagcaatgtggagtatctggcgtcaagggatgcaacaatcatgggaagcaggaatggtcatgcccctatcttcctctggtacaccctcaacaggaagggctacagaggcttccagaaagaagtccaaaagtgcttgagaaacgcgcactacctaaaagatcgcctcaaggaagcaggaatcggagcgatgcttaacgagctcagtagcacagtcgtgtttgaaaggccaaaggatgaagaatttgtccgaaggtgggcagctggcttgtgaagggaatatagctcacgttgtggtgatgcccagtgtcaacattgacaagctagactatttcctgaatgagttagtggacaaacgggcgacttggtaccaggacgggataagccagccaccctgcattgccagagacgtaggtgttgagaactgtctctgtggccttcac

SEQ ID NO: 33319 - protein, 459 aa, Zea mays subsp. mays
SLAAPPPPNLRKGLPLKFLAATDMVGSVGNGLADLGARAVSMNGAGKALRPTEAAAAAAAAETLPMELDPSEALVAAAVEAKGEEAANGRREFVMGRNVHTSCFAVKEPDADDEETGEREATMASVLALYRRSLVERTKHHLGYPYNLDFDYGALTQLQHFSINNLGDPFIESNYGVHSRQFEVGVLDWFARLWELEKDEYWGYITNCGTEGNLHGILVGREVFPDGILYASRESHYSVFKAARMYRMDCVKVDTLMSGEIDCADFQRKLLQNRDKPAIINVNIGTTVKGAVDDLDLVIKTLEENGFKNRFYIHCDGALFGLMIPFVKKAPQVTFKKPIGSVSVSGHKFVGCPMPCGVQITRLEHINALSSNVEYLASRDATIMGSRNGHAPIFLWYTLNRKGYRGFQKEVQKCLRNAHYLKDRLKEAGIGAMLNELSSTVVFERPKDEEFVRRWAAGL

SEQ ID NO: 33320 - protein, 436 aa, Zea mays subsp. mays
MVGSVGNGLADLGARAVSMNGAGKALRPTEAAAAAAAAETLPMELDPSEALVAAAVEAKGEEAANGRREFVMGRNVHTSCFAVKEPDADDEETGEREATMASVLALYRRSLVERTKHHLGYPYNLDFDYGALTQLQHFSINNLGDPFIESNYGVHSRQFEVGVLDWFARLWELEKDEYWGYITNCGTEGNLHGILVGREVFPDGILYASRESHYSVFKAARMYRMDCVKVDTLMSGEIDCADFQRKLLQNRDKPAIINVNIGTTVKGAVDDLDLVIKTLEENGFKNRFYIHCDGALFGLMIPFVKKAPQVTFKKPIGSVSVSGHKFVGCPMPCGVQITRLEHINALSSNVEYLASRDATIMGSRNGHAPIFLWYTLNRKGYRGFQKEVQKCLRNAHYLKDRLKEAGIGAMLNELSSTVVFERPKDEEFVRRWAAGL

SEQ ID NO: 33321 - protein, 418 aa, Zea mays subsp. mays
MNGAGKALRPTEAAAAAAAAETLPMELDPSEALVAAAVEAKGEEAANGRREFVMGRNVHTSCFAVKEPDADDEETGEREATMASVLALYRRSLVERTKHHLGYPYNLDFDYGALTQLQHFSINNLGDPFIESNYGVHSRQFEVGVLDWFARLWELEKDEYWGYITNCGTEGNLHGILVGREVFPDGILYASRESHYSVFKAARMYRMDCVKVDTLMSGEIDCADFQRKLLQNRDKPAIINVNIGTTVKGAVDDLDLVIKTLEENGFKNRFYIHCDGALFGLMIPFVKKAPQVTFKKPIGSVSVSGHKFVGCPMPCGVQITRLEHINALSSNVEYLASRDATIMGSRNGHAPIFLWYTLNRKGYRGFQKEVQKCLRNAHYLKDRLKEAGIGAMLNELSSTVVFERPKDEEFVRRWAAGL

SEQ ID NO: 33322 - DNA, 1362 bp, Zea mays subsp. mays
agttcaccgtccctccctgtccttgccatggccatccccaccgcccccgccctcctcttcccctccgttctccctaactcattcccccgccggacaccctggcgacacctcgtccggcggcaaccgcgtcacctccgcgcgggccgcccgcgcctgcaggcgccggcgccggctcctcccccggtggcggaggtcgcggcggagcgggacgacacgcctccgctcaggctgctcgagccgccgcaggaggacgaccccttcccgcccgagatggagcccgcggaccctgatttctaccggataggatatgcgcggatgatgcgcgcctatgggatcgagttcctcgaaggccccgacgggatgggcgtctacgcttcccgggacgtggagccacttcgcagagctagagtgattatggagattccgttggagctgatgctgactataactcaaaagaaaccttggatgtttttccctgacattattccactaggccatcctatatttgatgttatcgagtcaacagatccagagacagattgggatctaagattagcatgtcttcttctatatgcatttgatatagaagacaacttttggcagttatattctgattttttgccaagtgttgatgaatgcactagtttgctgctggcaccaaaggaagatctaatggaactagaagatgaagatcttgcttcacaaatgttaaaacaccaggaacgagcaattgacttttggcaaaagcattgggacaaaccaattcctctaaagctgaaacgccttgcacgtgaccatgagagatttctctgggcactgagtatagtacagtctcgttctgtcaacttgaagttgagaatgggagccttcatccaagatgcaaatgtgctagctccttatgctgatatgttgaaccactcacccaatgctaattgcttcctgcattggcgttttaaagaccgtatgcttgaagttatgattaaggctggacaagctatcaagaaaggagacgagatgacgatagattatatgagtggcgtcaacagcaaatttatggaaagatatgggttctcatcaccaacgaatccttgggagctcataaatttctcgagtcctgcaacaattcacatggattccttcttatcggtcttcaatatcgctggcttgcatgatgagctgtaccacaattctgcattgacctcagtagtagaaaccgactttgtggacggagcagtcgtagcagcagccagagcattgccgacatggtcagatggtgatgttcctgcaattcctagtgtggagagaaaatctgctcaggcactgcaagaggagtgccgccaaatgttggattcattcccaact

SEQ ID NO: 33323 - protein, 454 aa, Zea mays subsp. mays
SSPSLPVLAMAIPTAPALLFPSVLPNSFPRRTPWRHLVRRQPRHLRAGRPRLQAPAPAPPPVAEVAAERDDTPPLRLLEPPQEDDPFPPEMEPADPDFYRIGYARMMRAYGIEFLEGPDGMGVYASRDVEPLRRARVIMEIPLELMLTITQKKPWMFFPDIIPLGHPIFDVIESTDPETDWDLRLACLLLYAFDIEDNFWQLYSDFLPSVDECTSLLLAPKEDLMELEDEDLASQMLKHQERAIDFWQKHWDKPIPLKLKRLARDHERFLWALSIVQSRSVNLKLRMGAFIQDANVLAPYADMLNHSPNANCFLHWRFKDRMLEVMIKAGQAIKKGDEMTIDYMSGVNSKFMERYGFSSPTNPWELINFSSPATIHMDSFLSVFNIAGLHDELYHNSALTSVVETDFVDGAVVAAARALPTWSDGDVPAIPSVERKSAQALQEECRQMLDSFPT

SEQ ID NO: 33324 - protein, 445 aa, Zea mays subsp. mays
MAIPTAPALLFPSVLPNSFPRRTPWRHLVRRQPRHLRAGRPRLQAPAPAPPPVAEVAAERDDTPPLRLLEPPQEDDPFPPEMEPADPDFYRIGYARMMRAYGIEFLEGPDGMGVYASRDVEPLRRARVIMEIPLELMLTITQKKPWMFFPDIIPLGHPIFDVIESTDPETDWDLRLACLLLYAFDIEDNFWQLYSDFLPSVDECTSLLLAPKEDLMELEDEDLASQMLKHQERAIDFWQKHWDKPIPLKLKRLARDHERFLWALSIVQSRSVNLKLRMGAFIQDANVLAPYADMLNHSPNANCFLHWRFKDRMLEVMIKAGQAIKKGDEMTIDYMSGVNSKFMERYGFSSPTNPWELINFSSPATIHMDSFLSVFNIAGLHDELYHNSALTSVVETDFVDGAVVAAARALPTWSDGDVPAIPSVERKSAQALQEECRQMLDSFPT

SEQ ID NO: 33325 - protein, 364 aa, Zea mays subsp. mays
MEPADPDFYRIGYARMMRAYGIEFLEGPDGMGVYASRDVEPLRRARVIMEIPLELMLTITQKKPWMFFPDIIPLGHPIFDVIESTDPETDWDLRLACLLLYAFDIEDNFWQLYSDFLPSVDECTSLLLAPKEDLMELEDEDLASQMLKHQERAIDFWQKHWDKPIPLKLKRLARDHERFLWALSIVQSRSVNLKLRMGAFIQDANVLAPYADMLNHSPNANCFLHWRFKDRMLEVMIKAGQAIKKGDEMTIDYMSGVNSKFMERYGFSSPTNPWELINFSSPATIHMDSFLSVFNIAGLHDELYHNSALTSVVETDFVDGAVVAAARALPTWSDGDVPAIPSVERKSAQALQEECRQMLDSFPT

SEQ ID NO: 33326 - DNA, 1242 bp, Zea mays subsp. mays
acaattctcaaataatggaaagtatttagcctcagcgtcaaatgataaatctgcaattatatgggaggttgatgaggatggagagctattactgaggcatacattgagtggccatcgaaagtcagtgatgatggttgcatggagccctgatgattgtcagctcctcacatgtgggcaggaagaaaccatccgacgctgggatgttaaatctggcaaatgtcttcatgtttacgagaagtctgccactggtttgatatcatgtgcttggttcccagatggaaagcaattatctggtttagctgatcaaaacttttgcatttgggatttagatggtaaggaagtagattgctggaaagggcagggatcaacaggaacatctgattttgctgtagcaaaagatggaaaccttataataagcatgagcaagcagaacacaattcttctatttgatagggagacaaaacaggagagaataattgaagagggtagtacaattacttcattttgtctatcagaagacggtgatttcctgcttgtaaatcttgtaagcgaagagattcatttgtggaacataagaaatgatcctgttcgtgtcaaccggtacaatggtcataagcgcacccggtttgtgataaggtcttgttttggcggatttgagcaggcgttcattgctagtgggagtgaagattcacaggtctacatatggcatagagccactggcgatctcattgagactcttgctggtcactcgggcacagtcaactgcgtcagttggaatcctgcgaatccccacatgctcgcctcagcgagcgacgatcacacagttcgtatatggggggcaaagaagtccagtcttaagcgcaaggatgttgggagcagcaattgcaacagtaacggttctcgctcgaatggcaatgcacataacaacgttttcgttcaaaagtgcaacgggaacaacaccaaatgatttgccagggcaatgtatcatggatggttgactggcgtctgtaaatccccctgtcctttacttccctcgtggaagaagaatcgccaccgccatagttaagacaacaacaacaaagctgcagcacaaagtgtggggaacctgctaggtttcgtgcgctatctttcccttgttccttcatgactgtcatcacatgtatttcttaattcaagctgggatgtaattatggtattactttgcatctttgatatcttgatttgccctctctgattgattgt

SEQ ID NO: 33327 - protein, 321 aa, Zea mays subsp. mays
QFSNNGKYLASASNDKSAIIWEVDEDGELLLRHTLSGHRKSVMMVAWSPDDCQLLTCGQEETIRRWDVKSGKCLHVYEKSATGLISCAWFPDGKQLSGLADQNFCIWDLDGKEVDCWKGQGSTGTSDFAVAKDGNLIISMSKQNTILLFDRETKQERIIEEGSTITSFCLSEDGDFLLVNLVSEEIHLWNIRNDPVRVNRYNGHKRTRFVIRSCFGGFEQAFIASGSEDSQVYIWHRATGDLIETLAGHSGTVNCVSWNPANPHMLASASDDHTVRIWGAKKSSLKRKDVGSSNCNSNGSRSNGNAHNNVFVQKCNGNNTK

SEQ ID NO: 33328 - protein, 279 aa, Zea mays subsp. mays
MMVAWSPDDCQLLTCGQEETIRRWDVKSGKCLHVYEKSATGLISCAWFPDGKQLSGLADQNFCIWDLDGKEVDCWKGQGSTGTSDFAVAKDGNLIISMSKQNTILLFDRETKQERIIEEGSTITSFCLSEDGDFLLVNLVSEEIHLWNIRNDPVRVNRYNGHKRTRFVIRSCFGGFEQAFIASGSEDSQVYIWHRATGDLIETLAGHSGTVNCVSWNPANPHMLASASDDHTVRIWGAKKSSLKRKDVGSSNCNSNGSRSNGNAHNNVFVQKCNGNNTK

SEQ ID NO: 33329 - protein, 278 aa, Zea mays subsp. mays
MVAWSPDDCQLLTCGQEETIRRWDVKSGKCLHVYEKSATGLISCAWFPDGKQLSGLADQNFCIWDLDGKEVDCWKGQGSTGTSDFAVAKDGNLIISMSKQNTILLFDRETKQERIIEEGSTITSFCLSEDGDFLLVNLVSEEIHLWNIRNDPVRVNRYNGHKRTRFVIRSCFGGFEQAFIASGSEDSQVYIWHRATGDLIETLAGHSGTVNCVSWNPANPHMLASASDDHTVRIWGAKKSSLKRKDVGSSNCNSNGSRSNGNAHNNVFVQKCNGNNTK

SEQ ID NO: 33330 - DNA, 2526 bp, Zea mays subsp. mays
ctctgtagtgacgacgactgggcggcggccgctgccgccgacctacgtgcgcaggtctccatcttccggaccttcgctggagacgagcacccaccaccagaaattttctatacatttaagatgtacagggcctcaaatttcatacctgatcctaatcaggtgcttctagatgccaatccattaaggtctttagctccaatgttccctgcccccatgggagtcaatgttaatcagtcaagtacaccaccattggtttgtgtcactccggttggtcaatttccaattgggtttggtgcagggaaccttcctgcctttggatcgttcactactttcagcgccactacaaacggtgtttcttatacgggcaccagtggtaatggtgccattgatgccactcctatctctgcatacaagacaagatcaagcatatcacttgatgatgatgatgatgagccttactcgggcaaccaaggtttggcatctgaacggaaggctaggagaggccgtcctcctggttctggtcgtgatggatcaaatggtaagttaaagcgccctaagcctacatacaagaattttgttgctggcaaagagcttgtctttctgtcttctacatccgatcccagggagtttgtggaatcagttcacatgacttttgaggccctcaggcgaagacatctgcagatggatgaaacacaggatgctagcagacgtgcagacctgaaggctggtgccatcatgatggccagtaacatcagggcgaattcaggcaagagggtaggaactgtacctggagttgaaataggagatattttctattttaggatggagctgtgtgtcattgggttgcatgcacctagtatgggaggcattgattacatgactactaaatttggaaaagatgaggattctgtagccatatgtattgtctctgcaggaggttatgagaatgaggatgatgacacagatgtgctcgtgtacagtggtcaaggtggaaataataggaatactgaggagaggcatgatcagaagcttgagaggggtaacctagctcttgagaggagtttgcataggaagaatgagataagggttgtacgcggcttcaaggatccattttgcctaactgggaaaatttacatatatgatggtctctacaagattcacgagtcctggaaggagagaacaaagtacggtgtcaattgcttcaagtacaagctgctgcgggaacctggacagcgtgatggagctgcattatggaagatgactcagagatggatagataatcctgctaccagaggcagggtcctactagctgatctgtcatctaaggctgaaattttgcctgtttgtctcgtcaatgaggtagaccatgagaaaggacctgtacatttcacttatactaatcaggtcaaatacttgaggcctctcagttctatgaaaaagttgcagggctgtggatgccagagcgtttgcttgcctggcgacgccagttgtgcttgtggacaacataatggaggcgatttacccttcagttcatcaggattgttgtcatgccgcaaaccaatagtctacgaatgtggtgaatcttgcaactgttctacaaattgcaggaacagagtgacccaaaaagggtccaggctacatttcgaggtcttcaggaccacaaatcgaggctggggtcttcgctgctgggaacctattcgtgctggttcatttatatgtgagtatgccggtgaggttattgatgagctcaaatttaatttgaatgatagtgaagatgattacatttttcaaactgtatgccctggcgagaagacattaaaatggaattatggacctgaactgataggtgaagtaagcacatatgtatcgcctgatgaatttgaaccactgcctgtcaagataagtgcaaaaaacatgggaaatgtctcccgtttcatgaaccacagttgctcacccaatgtcttttggcaaccagttcaatatgatcacggagatgatggacacccgcatataatgttctttgcactgaagcatattccacccatgacagaactgacttatgactatggtgttgctggagctgaatctagtggttcaggttctcgtagaacgaagaactgcgtgtgtggatcacaaaactgcaggggattattttgatgggttgagagacgtgctcttggtggttaatcatgcaaaccactttctgctagatcctttctatgaaaccaaatttagtctccggataatatgacagatgatgtcatttgccatgtgtactgtgaagacagtaagttgtcgagcgagctgtagaatttctgttgctctgaactgcatggtggtcgctttcccaccatttcctcggatgtttatgtgggcgtggattgctgcattgcttccgctaaacttgtccaccaattgcaccggcttttgtagacttgttatcagccccgcttgcgttggacgcctggttgttaggatatggtcttgtaaattatcctggttaaggatcatgttgctttcgactcg

SEQ ID NO: 33331 - protein, 718 aa, Zea mays subsp. mays
LCSDDDWAAAAAADLRAQVSIFRTFAGDEHPPPEIFYTFKMYRASNFIPDPNQVLLDANPLRSLAPMFPAPMGVNVNQSSTPPLVCVTPVGQFPIGFGAGNLPAFGSFTTFSATTNGVSYTGTSGNGAIDATPISAYKTRSSISLDDDDDEPYSGNQGLASERKARRGRPPGSGRDGSNGKLKRPKPTYKNFVAGKELVFLSSTSDPREFVESVHMTFEALRRRHLQMDETQDASRRADLKAGAIMMASNIRANSGKRVGTVPGVEIGDIFYFRMELCVIGLHAPSMGGIDYMTTKFGKDEDSVAICIVSAGGYENEDDDTDVLVYSGQGGNNRNTEERHDQKLERGNLALERSLHRKNEIRVVRGFKDPFCLTGKIYIYDGLYKIHESWKERTKYGVNCFKYKLLREPGQRDGAALWKMTQRWIDNPATRGRVLLADLSSKAEILPVCLVNEVDHEKGPVHFTYTNQVKYLRPLSSMKKLQGCGCQSVCLPGDASCACGQHNGGDLPFSSSGLLSCRKPIVYECGESCNCSTNCRNRVTQKGSRLHFEVFRTTNRGWGLRCWEPIRAGSFICEYAGEVIDELKFNLNDSEDDYIFQTVCPGEKTLKWNYGPELIGEVSTYVSPDEFEPLPVKISAKNMGNVSRFMNHSCSPNVFWQPVQYDHGDDGHPHIMFFALKHIPPMTELTYDYGVAGAESSGSGSRRTKNCVCGSQNCRGLF

SEQ ID NO: 33332 - protein, 678 aa, Zea mays subsp. mays
MYRASNFIPDPNQVLLDANPLRSLAPMFPAPMGVNVNQSSTPPLVCVTPVGQFPIGFGAGNLPAFGSFTTFSATTNGVSYTGTSGNGAIDATPISAYKTRSSISLDDDDDEPYSGNQGLASERKARRGRPPGSGRDGSNGKLKRPKPTYKNFVAGKELVFLSSTSDPREFVESVHMTFEALRRRHLQMDETQDASRRADLKAGAIMMASNIRANSGKRVGTVPGVEIGDIFYFRMELCVIGLHAPSMGGIDYMTTKFGKDEDSVAICIVSAGGYENEDDDTDVLVYSGQGGNNRNTEERHDQKLERGNLALERSLHRKNEIRVVRGFKDPFCLTGKIYIYDGLYKIHESWKERTKYGVNCFKYKLLREPGQRDGAALWKMTQRWIDNPATRGRVLLADLSSKAEILPVCLVNEVDHEKGPVHFTYTNQVKYLRPLSSMKKLQGCGCQSVCLPGDASCACGQHNGGDLPFSSSGLLSCRKPIVYECGESCNCSTNCRNRVTQKGSRLHFEVFRTTNRGWGLRCWEPIRAGSFICEYAGEVIDELKFNLNDSEDDYIFQTVCPGEKTLKWNYGPELIGEVSTYVSPDEFEPLPVKISAKNMGNVSRFMNHSCSPNVFWQPVQYDHGDDGHPHIMFFALKHIPPMTELTYDYGVAGAESSGSGSRRTKNCVCGSQNCRGLF

SEQ ID NO: 33333 - protein, 652 aa, Zea mays subsp. mays
MFPAPMGVNVNQSSTPPLVCVTPVGQFPIGFGAGNLPAFGSFTTFSATTNGVSYTGTSGNGAIDATPISAYKTRSSISLDDDDDEPYSGNQGLASERKARRGRPPGSGRDGSNGKLKRPKPTYKNFVAGKELVFLSSTSDPREFVESVHMTFEALRRRHLQMDETQDASRRADLKAGAIMMASNIRANSGKRVGTVPGVEIGDIFYFRMELCVIGLHAPSMGGIDYMTTKFGKDEDSVAICIVSAGGYENEDDDTDVLVYSGQGGNNRNTEERHDQKLERGNLALERSLHRKNEIRVVRGFKDPFCLTGKIYIYDGLYKIHESWKERTKYGVNCFKYKLLREPGQRDGAALWKMTQRWIDNPATRGRVLLADLSSKAEILPVCLVNEVDHEKGPVHFTYTNQVKYLRPLSSMKKLQGCGCQSVCLPGDASCACGQHNGGDLPFSSSGLLSCRKPIVYECGESCNCSTNCRNRVTQKGSRLHFEVFRTTNRGWGLRCWEPIRAGSFICEYAGEVIDELKFNLNDSEDDYIFQTVCPGEKTLKWNYGPELIGEVSTYVSPDEFEPLPVKISAKNMGNVSRFMNHSCSPNVFWQPVQYDHGDDGHPHIMFFALKHIPPMTELTYDYGVAGAESSGSGSRRTKNCVCGSQNCRGLF

SEQ ID NO: 33334 - DNA, 1409 bp, Zea mays subsp. mays
  misc_feature (170)..(170): n is a, c, g, or t
  misc_feature (356)..(356): n is a, c, g, or t
  misc_feature (1025)..(1025): n is a, c, g, or t
  misc_feature (1064)..(1064): n is a, c, g, or t
  misc_feature (1066)..(1066): n is a, c, g, or t
acccgtgccgctcccgccccgcatcccttagcctgacgctggcgctgcagccgcccatgtccgccgccccgccccgccgcgtggtcatctgcggcggcggcgtggtgggcgcgtgcacggcctacttcctcgccacccacgccgcgtcccccaccgtcccgacgctcgtngagaggtgcgccccggcgtgcgccgcctcggggaaagccggcggcttcctggcgctggactggtgcgactccaccccggcgctgtccaggctcgcgcgggcctccttcgcgctccaccgccgcctggccgacgccctcggcggcgccgacgcctacggcttccgccccgtccacaccctctccatnctgctccccccgcaccccgccgcctcctcctcctcgccgcagcacccgctgctcccgccctgggtcgacccctccgcgtccgccgccccgccgagggagctcgggacccccgacaccaccgcgcaggtccacccgggcctcttcaccaaggccgtcctcgccgcgtcgggagccgaggtcgtcatcggcgaggtggagcgcgtcgtcgtggcccgggacggccgcgtcgccggcgtcgtggtcagggggcgcgacggcgtgctggacgccgacgccgtcgtgctcgcgctcggcccgtggtccggccgcctcgaggtggtcagcgaggtgttcgacgtgtccgggctcaaggcgcacagcatcgtgctccggccgcgcgagcccgagaaggtcacgccgcactgcctcttcctcagctaccagccggagcccggcgccaagatgctcgaccccgaggtgtacccgcggcccaccggggaggtgtacatatgtgggatgagcaaggacgagaacccgccagatgacccagcaacgatagtaggcgagccagactcgattgcaatgctgcataagatcgcaggcaaagtgtccagccagctgaagaaggaggagggcgctgaggtggtcgcggagcaggcgtgctacctgccgtgcaccgccggcgggctnccggtcatcggggagataccaggcgtgaaagggtgctantngccacgggccacagctgctggggtatcctcaatggtccggccaccggcgcagccctcgccgagctcatcctggacggcaagtccaagatcgttgatctctagcctttcagcccggcaaggtttctcaagagaaggagcaggcgtggagtctgaccgtgtgaatgttcagattcaagctcgctactgaataaaacactcttggttctcccgtttgcatgactgatgagtgttgcaaaacatgtatgtgcgaataaatcatggatatatagtacttgatgttctgtatttgttgtacatcacagacggtcccaacttgccaacacccatgatcagatgttcattt

SEQ ID NO: 33335 - protein, 416 aa, Zea mays subsp. mays
  misc_feature (56)..(56): Xaa can be any naturally occurring amino acid
  misc_feature (118)..(118): Xaa can be any naturally occurring amino acid
  misc_feature (341)..(341): Xaa can be any naturally occurring amino acid
  misc_feature (354)..(355): Xaa can be any naturally occurring amino acid
PCRSRPASLSLTLALQPPMSAAPPRRVVICGGGVVGACTAYFLATHAASPTVPTLXERCAPACAASGKAGGFLALDWCDSTPALSRLARASFALHRRLADALGGADAYGFRPVHTLSXLLPPHPAASSSSPQHPLLPPWVDPSASAAPPRELGTPDTTAQVHPGLFTKAVLAASGAEVVIGEVERVVVARDGRVAGVVVRGRDGVLDADAVVLALGPWSGRLEVVSEVFDVSGLKAHSIVLRPREPEKVTPHCLFLSYQPEPGAKMLDPEVYPRPTGEVYICGMSKDENPPDDPATIVGEPDSIAMLHKIAGKVSSQLKKEEGAEVVAEQACYLPCTAGGXPVIGEIPGVKGCXXPRATAAGVSSMVRPPAQPSPSSSWTASPRSLISSLSARQGFSREGAGVESDRVNVQIQARY

SEQ ID NO: 33336 - protein, 398 aa, Zea mays subsp. mays
  misc_feature (38)..(38): Xaa can be any naturally occurring amino acid
  misc_feature (100)..(100): Xaa can be any naturally occurring amino acid
  misc_feature (323)..(323): Xaa can be any naturally occurring amino acid
  misc_feature (336)..(337): Xaa can be any naturally occurring amino acid
MSAAPPRRVVICGGGVVGACTAYFLATHAASPTVPTLXERCAPACAASGKAGGFLALDWCDSTPALSRLARASFALHRRLADALGGADAYGFRPVHTLSXLLPPHPAASSSSPQHPLLPPWVDPSASAAPPRELGTPDTTAQVHPGLFTKAVLAASGAEVVIGEVERVVVARDGRVAGVVVRGRDGVLDADAVVLALGPWSGRLEVVSEVFDVSGLKAHSIVLRPREPEKVTPHCLFLSYQPEPGAKMLDPEVYPRPTGEVYICGMSKDENPPDDPATIVGEPDSIAMLHKIAGKVSSQLKKEEGAEVVAEQACYLPCTAGGXPVIGEIPGVKGCXXPRATAAGVSSMVRPPAQPSPSSSWTASPRSLISSLSARQGFSREGAGVESDRVNVQIQARY

SEQ ID NO: 33337 - DNA, 1624 bp, Zea mays subsp. mays
cattacctagaacatcctaatcgaaaacaacagaagctagaaacagccagtactgaagaaaaggacatggttttttcagaaataatgcctcaagctctcacattgatgactgatgtatttggaaattatgttgtccaaaagttttttgagcatggaagcactacccagataaaggaattggctggtcagcttattggacgtgtccttgctcttagtcttcagatgtatgggtgccgggttatacagaaggctatagaagttgttgatttggatctgcagactaaaatggttgcggagctggagggccatgtcatgcgctgtgtacgtgatcaaaatgggaaccatgttatacagaaatgcatagagtgcattcctcagcatgctatcgagttcattgtctcgacattctatggccaagttgtaatgttatccactcatccatatggttgccgagttattcagagggttctagagcattgtgatgatcctaagacacagcaaataatgatggatgagattctccagtctgtttgcttgctagctcaggatcagtatggcaactatgtggttcagcatgttctggaacatggcaaaccccatgagagatcagccattattgagaagctaattggccaagttgtgcaaatgagccagcaaaagtttgcctcaaatgtcattgagaagtgcttagcctttggaaatcctgtagaacgtcaggttctgattggtgagatgcttggatccactagcgaaagcgaacctcttgaggtaatgatgaaagaccagtttgcaaactatgtggtgcagaaggtgctagaaacttgtgacgatcagcagagggagatgatcctaacaaggataaagacacacctgaacacactcaagaagtacacatacgggaagcacatagtagcgcgtgtagagaagcttgttgctgctggagagaagcgccttgggcttcaaccagcatgcaccgccgcctgaagggcaaactctctaagttgtacagctaacagttgctaggtttgcgctcatgtttttttctctactaaaaaccttatatgaaggccccttttggcctcgccaggaaaaaaaatactgtatgtttgcggggaagagtgtacattaattctttagcagaaagaccccccctacccatgcggcggaatcaagggaggagtgatgcgtgagtccgatcgatctgaaggctgctgtaaagaggaagatggaaggaaggagtgagaagcatgtcagttactctgctgctgtacaaattaaacttagctcttagagtgaggagaaagtaagctgttagctgtctgcctaaaggaaagaaaggaaaaaaaagaagctggaggccattggcaccctgtttcatgtgttggtatagctgctgtggctctcctgttgtctgtctggcctttgttgtaacataaagctgaggcgcactagcctgccttcgttttcacagttaagctgaagttattagtatcagctttcctgaactgcttggtatgtaatgtgactgtgttttcttccttgtactaatgcttgtctcatgtaatccattcccctaatgtctgaatgttttaatctcaattttcacctctgaaacgttttttct

SEQ ID NO: 33338 - protein, 327 aa, Zea mays subsp. mays
HYLEHPNRKQQKLETASTEEKDMVFSEIMPQALTLMTDVFGNYVVQKFFEHGSTTQIKELAGQLIGRVLALSLQMYGCRVIQKAIEVVDLDLQTKMVAELEGHVMRCVRDQNGNHVIQKCIECIPQHAIEFIVSTFYGQVVMLSTHPYGCRVIQRVLEHCDDPKTQQIMMDEILQSVCLLAQDQYGNYVVQHVLEHGKPHERSAIIEKLIGQVVQMSQQKFASNVIEKCLAFGNPVERQVLIGEMLGSTSESEPLEVMMKDQFANYVVQKVLETCDDQQREMILTRIKTHLNTLKKYTYGKHIVARVEKLVAAGEKRLGLQPACTAA

SEQ ID NO: 33339 - protein, 305 aa, Zea mays subsp. mays
MVFSEIMPQALTLMTDVFGNYVVQKFFEHGSTTQIKELAGQLIGRVLALSLQMYGCRVIQKAIEVVDLDLQTKMVAELEGHVMRCVRDQNGNHVIQKCIECIPQHAIEFIVSTFYGQVVMLSTHPYGCRVIQRVLEHCDDPKTQQIMMDEILQSVCLLAQDQYGNYVVQHVLEHGKPHERSAIIEKLIGQVVQMSQQKFASNVIEKCLAFGNPVERQVLIGEMLGSTSESEPLEVMMKDQFANYVVQKVLETCDDQQREMILTRIKTHLNTLKKYTYGKHIVARVEKLVAAGEKRLGLQPACTAA

SEQ ID NO: 33340 - protein, 299 aa, Zea mays subsp. mays
MPQALTLMTDVFGNYVVQKFFEHGSTTQIKELAGQLIGRVLALSLQMYGCRVIQKAIEVVDLDLQTKMVAELEGHVMRCVRDQNGNHVIQKCIECIPQHAIEFIVSTFYGQVVMLSTHPYGCRVIQRVLEHCDDPKTQQIMMDEILQSVCLLAQDQYGNYVVQHVLEHGKPHERSAIIEKLIGQVVQMSQQKFASNVIEKCLAFGNPVERQVLIGEMLGSTSESEPLEVMMKDQFANYVVQKVLETCDDQQREMILTRIKTHLNTLKKYTYGKHIVARVEKLVAAGEKRLGLQPACTAA

SEQ ID NO: 33341 - DNA, 1222 bp, Zea mays subsp. mays
cacgaggattaattggtggcttactggcttgctttctagtctccggcacaagattccctctccagcggcgcaccaccgctaccatcctccgacccccaacctgaacccgccatgtcaccggcgccgtcgcgcccccgcatccgtccgtggctggtggtgggtgacctggcactggcggccgcgtgggtttgcgcgggcgcgctggtcaagctgctcgtttacggcggactcggcctcgggggacggcccgaggccgaggccgtcaaggtctcgctctccctcgtatacatgttcctcttcgcctggctcgaggctgcctcgggtggggcctcctacaatccgctcaccgtcctcgccgctgcgctcgcctcccacggcggacccgccgtgtacctgttcaccgcgttcgcgcgaatcccagctcaggtgattggggcggttcttggagtaaagctcattcaagtaactttccctaatgtgggtaaaggagcccgcttaagtgttggtgctcatcatggtgcgttagctgaaggcttagcaactttcatggttgttatggtatcggtgaccctgaaaaagaaggagatgaaaagtttctttatgaagacatggatcacaagcatttggaagaacacaattcatctccttagctcggatataactggagggattatgaaccctgcatctgcttttgcttgggcgtacgctcgaggagatcatacaacatttgaccacctactggtatattggctggcgcccctgcaagcaacccttctgggagtatgggcggtgaccttcttcactaaaccaaagaagatcaaggagcaaaaggtagatgaaaacaagataaagaaggaatagactattcttgaattagagctagagcttcataccatcttcttagtcagataacttgtggctacacacaaggcgaaatgtttcgaagctaatctaagaaatggcaacctatcatggtcagcttctgtgaagtctccttgatgtgtattccttgtatctggcttagcttagattgtgcagaagcttgtaagcaactgctccaggcttccattcaagacattgtcgtattggaaacagtatatatggaagctaaagcttctcagagttgactcacaacctacactaatgttccacagcattgttgaaagtatcttgagttccattatctatgataatgggaaattgcaggtctcatctagtttcc

SEQ ID NO: 33342 - protein, 249 aa, Zea mays subsp. mays
MSPAPSRPRIRPWLVVGDLALAAAWVCAGALVKLLVYGGLGLGGRPEAEAVKVSLSLVYMFLFAWLEAASGGASYNPLTVLAAALASHGGPAVYLFTAFARIPAQVIGAVLGVKLIQVTFPNVGKGARLSVGAHHGALAEGLATFMVVMVSVTLKKKEMKSFFMKTWITSIWKNTIHLLSSDITGGIMNPASAFAWAYARGDHTTFDHLLVYWLAPLQATLLGVWAVTFFTKPKKIKEQKVDENKIKKE

SEQ ID NO: 33343 - protein, 190 aa, Zea mays subsp. mays
MFLFAWLEAASGGASYNPLTVLAAALASHGGPAVYLFTAFARIPAQVIGAVLGVKLIQVTFPNVGKGARLSVGAHHGALAEGLATFMVVMVSVTLKKKEMKSFFMKTWITSIWKNTIHLLSSDITGGIMNPASAFAWAYARGDHTTFDHLLVYWLAPLQATLLGVWAVTFFTKPKKIKEQKVDENKIKKE

SEQ ID NO: 33344 - protein, 142 aa, Zea mays subsp. mays
TRINWWLTGLLSSLRHKIPSPAAHHRYHPPTPNLNPPCHRRRRAPASVRGWWWVTWHWRPRGFARARWSSCSFTADSASGDGPRPRPSRSRSPSYTCSSSPGSRLPRVGPPTIRSPSSPLRSPPTADPPCTCSPRSRESQLR

SEQ ID NO: 33345 - DNA, 1573 bp, Zea mays subsp. mays
gcattttggctcctcactgccgcgccgccacccactacaggtgaatgaatataacgaatccgccgccggcgtcatctcctcctcccacctcgactcgccttgctcgccgtcggcggccatttcgtcgcctcgcggcgagccgcccaagttgagctcgcggcggatctgatgggcttgttgtgatctcctgcaggtaaggaagaggaggagggcaggatgtcgcaccgtaagttcgagcacccgaggcacggctccctcggcttccttcccaggaagcgctcctcccgccaccgcggcaaggtgaagtcatttcccagggatgaccccaagaagccttgccatctcactgccttccttggctacaaggctggcatgactcacattgtccgtgaggttgagaagccaggatccaaactccataagaaggaaacttgtgaggctgttaccatcattgaaacccctcctcttgtcattgttgggctcgtggcatatgtgaagactcctcgtggcctccgcacactcaactctgtttgggcccaacatcttagcgaagaagtgaggagaaggttctacaagaactggtgcaagagcaagaagaaggctttcacaaagtatgctctcaaatatgaaaatgatgctggcaagaaggaaattcagctgcagcttgagaagatgaagaaatatgcttctgttatccgtgtcattgctcatacccagattaggaagatgaagggtttgaagcagaagaaggctcacctgatggagattcaggtcaatggtggtaccattgctgacaaggtggactacggctataaattttttgagaaagaggtccctgttgatgctgtcttccagaaggatgagatgattgacatcattggtgtgaccaaaggtaaaggttatgagggtgtggtcactcgttggggtgtcacccgccttccccgcaaaacccacaggggtctccgcaaggttgcttgtatcggtgcatggcatccggctagggtctcgtatacggttgcccgtgctggtcagaatgggtaccaccaccgcactgagatgaacaagaaggtctacaagatcggcaaggctggacaagagacccacgatgcctccacagagtttgacaggaccgagaaggacatcactcccatgggtggcttcccccactatggtatcgtgaagggtgactacctgatgatcaagggatgctgtgtgggtccaaaaaagagggtggtgaccctccgccagtccctcctgaagcagacttcccggctggcgctggaggagatcaagctcaagttcattgacacatcgtccaaatttgggcacggtcgcttccagactaccgatgagaagcagaggttctttggtaagctcaaggcgtaaggtgctgcggtgcagcgaaagtcccatttgtcaaaatcatcaaactgtgaaacctttgtttgttaccttgctgtaccaagttttgtagcaggatgatttgggagcatgttccggtcttcaatggattgttctacgcttcagaactgcagtgactatgttttgtgctattttggttgttttaatgccc

SEQ ID NO: 33346 - protein, 389 aa, Zea mays subsp. mays
MSHRKFEHPRHGSLGFLPRKRSSRHRGKVKSFPRDDPKKPCHLTAFLGYKAGMTHIVREVEKPGSKLHKKETCEAVTIIETPPLVIVGLVAYVKTPRGLRTLNSVWAQHLSEEVRRRFYKNWCKSKKKAFTKYALKYENDAGKKEIQLQLEKMKKYASVIRVIAHTQIRKMKGLKQKKAHLMEIQVNGGTIADKVDYGYKFFEKEVPVDAVFQKDEMIDIIGVTKGKGYEGVVTRWGVTRLPRKTHRGLRKVACIGAWHPARVSYTVARAGQNGYHHRTEMNKKVYKIGKAGQETHDASTEFDRTEKDITPMGGFPHYGIVKGDYLMIKGCCVGPKKRVVTLRQSLLKQTSRLALEEIKLKFIDTSSKFGHGRFQTTDEKQRFFGKLKA

SEQ ID NO: 33347 - protein, 337 aa, Zea mays subsp. mays
MTHIVREVEKPGSKLHKKETCEAVTIIETPPLVIVGLVAYVKTPRGLRTLNSVWAQHLSEEVRRRFYKNWCKSKKKAFTKYALKYENDAGKKEIQLQLEKMKKYASVIRVIAHTQIRKMKGLKQKKAHLMEIQVNGGTIADKVDYGYKFFEKEVPVDAVFQKDEMIDIIGVTKGKGYEGVVTRWGVTRLPRKTHRGLRKVACIGAWHPARVSYTVARAGQNGYHHRTEMNKKVYKIGKAGQETHDASTEFDRTEKDITPMGGFPHYGIVKGDYLMIKGCCVGPKKRVVTLRQSLLKQTSRLALEEIKLKFIDTSSKFGHGRFQTTDEKQRFFGKLKA

SEQ ID NO: 33348 - protein, 237 aa, Zea mays subsp. mays
MKKYASVIRVIAHTQIRKMKGLKQKKAHLMEIQVNGGTIADKVDYGYKFFEKEVPVDAVFQKDEMIDIIGVTKGKGYEGVVTRWGVTRLPRKTHRGLRKVACIGAWHPARVSYTVARAGQNGYHHRTEMNKKVYKIGKAGQETHDASTEFDRTEKDITPMGGFPHYGIVKGDYLMIKGCCVGPKKRVVTLRQSLLKQTSRLALEEIKLKFIDTSSKFGHGRFQTTDEKQRFFGKLKA

SEQ ID NO: 33349 - DNA, 678 bp, Zea mays subsp. mays
attccaaaacatcactccctcgcgaaccccaagaactgcagcgacggcaatggcgatggcggcggagggcgcggcgagcgagccagagctggtgtcgatcccggcgacgccgcacggtctgtcgacgccggagggcgcggccacgccgaccggagcgggcgggggcggcggcggcaggagcaagggctccgggaccccagggcgtcgcgtggtggagggcctgcgcgggtacctggaggacgtgggccacctcacgcgcctcgacccgcgcgacgcctggctgcccgtcaccgagagccgcggcggcaacgcccgctacgccgctttccactccctcaacgccggcctcggcttccaggcacttctcctcccgctcgccttcccggacctcggctggagctgggggataatttcattgactattgcttatttctggcaactgtacacactgtggatcctagtgaagcttcatgaggctgtgccaggcaggaggtacaacagatatgttgagcttgcacaggcagcatttggagaaaatgggaatgtggctggcctcttttcccaactatttatctctcggcaggcactgcaactgcactgatccttgttggaggggagaccatgaagctgttcttccaaatagtgtgtggcccactctgctcgccgaatcccattacg

SEQ ID NO: 33350 - protein, 199 aa, Zea mays subsp. mays
FQNITPSRTPRTAATAMAMAAEGAASEPELVSIPATPHGLSTPEGAATPTGAGGGGGGRSKGSGTPGRRVVEGLRGYLEDVGHLTRLDPRDAWLPVTESRGGNARYAAFHSLNAGLGFQALLLPLAFPDLGWSWGIISLTIAYFWQLYTLWILVKLHEAVPGRRYNRYVELAQAAFGENGNVAGLFSQLFISRQALQLH

SEQ ID NO: 33351 - protein, 183 aa, Zea mays subsp. mays
MAMAAEGAASEPELVSIPATPHGLSTPEGAATPTGAGGGGGGRSKGSGTPGRRVVEGLRGYLEDVGHLTRLDPRDAWLPVTESRGGNARYAAFHSLNAGLGFQALLLPLAFPDLGWSWGIISLTIAYFWQLYTLWILVKLHEAVPGRRYNRYVELAQAAFGENGNVAGLFSQLFISRQALQLH

SEQ ID NO: 33352 - protein, 181 aa, Zea mays subsp. mays
MAAEGAASEPELVSIPATPHGLSTPEGAATPTGAGGGGGGRSKGSGTPGRRVVEGLRGYLEDVGHLTRLDPRDAWLPVTESRGGNARYAAFHSLNAGLGFQALLLPLAFPDLGWSWGIISLTIAYFWQLYTLWILVKLHEAVPGRRYNRYVELAQAAFGENGNVAGLFSQLFISRQALQLH

SEQ ID NO: 33353 - DNA, 788 bp, Zea mays subsp. mays
atcctgtatgtattgcctgccgcccctggcttgtgctcatgggcgctgctgctgcggccaatgaaggggcgttgccggagccgtgcggcggccggcggccgggagcggcgccgatggggcgctacgagctcgtccgcagcgacgacgcgcctgccgtcgccgcggatctggaggccggcaccgccgcgccgtgcgacggctaccccaagcgccgcgtgcccacgccctctccgtctccggcgccggcgccgacccggcagcgcctcgtctcgctcgacgtgttccgcgggatcaccgtcctgctgatgatcatcgtggatgacgccggggcattcgttccggcgatgaaccactccccctgggatggcgtaacggtggccgactttgtcatgcctttcttcctcttcatcgtcggagtcgccctggcgctcgcgtacaagagagtccctgacaagttggacgcctcgagaaaggcattgctccgtgcgctgaagctgttttgtcttggtcttgttctacaaggtgtgatggcagctgagctatgtttcttcaactaaccaaaaatacatttgtggaaatgaaaatgtgtttgatgcctttttttttgctgcactacgctctgcgcaggtggattctttcatggtgttcgtagtctaagttttggggttgaccttcaagaaatacggttgatgggtgtgctgcaggtatatgtagtaatgcgtgtttctgttatgagctatgtattttgtccatatggacaacataaaactggtgcttggtaagtatgt

SEQ ID NO: 33354 - protein, 184 aa, Zea mays subsp. mays
PVCIACRPWLVLMGAAAAANEGALPEPCGGRRPGAAPMGRYELVRSDDAPAVAADLEAGTAAPCDGYPKRRVPTPSPSPAPAPTRQRLVSLDVFRGITVLLMIIVDDAGAFVPAMNHSPWDGVTVADFVMPFFLFIVGVALALAYKRVPDKLDASRKALLRALKLFCLGLVLQGVMAAELCFFN

SEQ ID NO: 33355 - protein, 172 aa, Zea mays subsp. mays
MGAAAAANEGALPEPCGGRRPGAAPMGRYELVRSDDAPAVAADLEAGTAAPCDGYPKRRVPTPSPSPAPAPTRQRLVSLDVFRGITVLLMIIVDDAGAFVPAMNHSPWDGVTVADFVMPFFLFIVGVALALAYKRVPDKLDASRKALLRALKLFCLGLVLQGVMAAELCFFN

SEQ ID NO: 33356 - protein, 147 aa, Zea mays subsp. mays
MGRYELVRSDDAPAVAADLEAGTAAPCDGYPKRRVPTPSPSPAPAPTRQRLVSLDVFRGITVLLMIIVDDAGAFVPAMNHSPWDGVTVADFVMPFFLFIVGVALALAYKRVPDKLDASRKALLRALKLFCLGLVLQGVMAAELCFFN

SEQ ID NO: 33357 - DNA, 1499 bp, Zea mays subsp. mays
atagaccatagtcatctcatccctcccaactccgctgctacgccttcttctacatcgcaatcacgcgcccgtccggctctcccccttctccctcgccctcacgcgctcacgccctcacctcagtcctcatcgctctcggccgcctgcttaaaccctccgctcgaaccggaacccaaccgagaacagatccaaaacgcaagccgcaccatgtctcgtgtcgcgggctcgcgcctcctccctaggatctctgcgctctccttctgcaccgcctccccggcaaccgccgccgcttcctcctcctcatccacagcggcggtggcagcggcagccgccaccgccggagacccatcttcccagccgccccagactgcccgcaacccgtggggcgcgctcaagttcgccgccttcgccgccgtgtccgccgcggttggcggcacgggctacgtcagctacgcttattctctagaggaagtggatcagatgacgcgggagctccggaagaagtcgaagcagcccattcctgaggatgcttctggctttgagaggtttcaggctatggcctattcagcagctatgaaagttcctgttgccgctattgaggtatacctggatgtgaggagccaaattgaagatcaaattcggggatttagcgaaccagtatcagacaaacttcttccagatcttgctcctcaagagcagcatgtattgactctagttctggatctgaacgagactcttgtatactcagattggaagcgtgagagaggatggaggacctttaagcggccaggagtggatgcttttcttgaacatctcgggaggttttatgaaattgttgtgtattctgatcagcttagtatgtatgttgatccggttgttgataggctggatccaaagggcaatattcgacataggctatcaagagttgcaactaagtatgaaaatggaaaacattatcgggatttgtcgaagctgaacagaaatcctgctcaagttctttatatcagcgctcatgctaaagagtcaagtctgcagcctgaaaattctgtggaaattaaaccttggaagcttgaaaatgatgacactcaactgcttgatcttattccatttctagaatatgttgctatggcaagaccttctgacatcagggctgttcttgcatcctatcaaagtggtgatattgctgcggagtttattgagcgctctaaggagcaccagaggcgcatgcaagaacaaaagaaatcaggacgcatatggaggcggtgaggactaaaaattggaaggaaaacataccaatgattttgacgcttcagtccgaatgaagtgaatggatccatcaaggattacaattttgtcatcttttgccttggcggttaataaacataccaaacgttatttataatcattcagaagacgccataccggctgaagtatagcgcttgctgtttgtatttttaagggtaatggaagtattaatgtggcggttgctgctttgtttc

SEQ ID NO: 33358 - protein, 421 aa, Zea mays subsp. mays
IDHSHLIPPNSAATPSSTSQSRARPALPLLPRPHALTPSPQSSSLSAACLNPPLEPEPNREQIQNASRTMSRVAGSRLLPRISALSFCTASPATAAASSSSSTAAVAAAAATAGDPSSQPPQTARNPWGALKFAAFAAVSAAVGGTGYVSYAYSLEEVDQMTRELRKKSKQPIPEDASGFERFQAMAYSAAMKVPVAAIEVYLDVRSQIEDQIRGFSEPVSDKLLPDLAPQEQHVLTLVLDLNETLVYSDWKRERGWRTFKRPGVDAFLEHLGRFYEIVVYSDQLSMYVDPVVDRLDPKGNIRHRLSRVATKYENGKHYRDLSKLNRNPAQVLYISAHAKESSLQPENSVEIKPWKLENDDTQLLDLIPFLEYVAMARPSDIRAVLASYQSGDIAAEFIERSKEHQRRMQEQKKSGRIWRR

SEQ ID NO: 33359 - protein, 352 aa, Zea mays subsp. mays
MSRVAGSRLLPRISALSFCTASPATAAASSSSSTAAVAAAAATAGDPSSQPPQTARNPWGALKFAAFAAVSAAVGGTGYVSYAYSLEEVDQMTRELRKKSKQPIPEDASGFERFQAMAYSAAMKVPVAAIEVYLDVRSQIEDQIRGFSEPVSDKLLPDLAPQEQHVLTLVLDLNETLVYSDWKRERGWRTFKRPGVDAFLEHLGRFYEIVVYSDQLSMYVDPVVDRLDPKGNIRHRLSRVATKYENGKHYRDLSKLNRNPAQVLYISAHAKESSLQPENSVEIKPWKLENDDTQLLDLIPFLEYVAMARPSDIRAVLASYQSGDIAAEFIERSKEHQRRMQEQKKSGRIWRR

SEQ ID NO: 33360 - protein, 261 aa, Zea mays subsp. mays
MTRELRKKSKQPIPEDASGFERFQAMAYSAAMKVPVAAIEVYLDVRSQIEDQIRGFSEPVSDKLLPDLAPQEQHVLTLVLDLNETLVYSDWKRERGWRTFKRPGVDAFLEHLGRFYEIVVYSDQLSMYVDPVVDRLDPKGNIRHRLSRVATKYENGKHYRDLSKLNRNPAQVLYISAHAKESSLQPENSVEIKPWKLENDDTQLLDLIPFLEYVAMARPSDIRAVLASYQSGDIAAEFIERSKEHQRRMQEQKKSGRIWRR

SEQ ID NO: 33361 - DNA, 1502 bp, Zea mays subsp. mays
aattcggcacgacacaactacactactccaaaacgaccctcaagcaggaaggccggccacccagcactcaagctagatagctcatcacagccacagcagctagagcctagtagctcactcgcgctcgtgccatgatgaatacccgagcctgtggtagcagcggcagtggcggcaggaacgaccagaccatgatgggcttctccgagcatccgaagccggcggcgtcggggcaggcgcagccgtccccgccgtcgtcgccgagcgagcgtccgccagcaggccgcgggcgccggcgcgcgcaggagcccgggcggttcctcggcgttcggcgccggccgtggggccggtacgcggcggagatacgcgaccccacgaccaaggagcggcattggctgggcacgttcgacaccgcgcaggaggcggcgctcgcctacgaccgcgcggcgctgtccatgaagggcgcgcaggcgcgcaccaacttcgtctacacgcacgccgcgtacaactacccgcccttcctggcgccgttccaccacccgtcgtcggtgcagcagcagcattacggcgccgcgccgcacgttggctcgtacggccaccaccactaccaccaccagggctcggcagcagctgtcggcgcgtcgtcgggcgagtgctcgtcgacgatggcgacggcggtgccgcccgtggagcgcgccgacggcacgctgctgctggaccgcggcggcggcgggcaccaccaccaccccgagttcctgttcgcgagcgcggacgacaactccgggtacctgagcagcgtggtcccagagagctgcctccggccgcggagcagcgcggcggcggtggaggacctgcggcggtactcggacgcggacgcctacgggatgggcgtggggctccgggaggacgtggacgacctcgcgcagatggtggccgggttctggggcggcggcgccggcgacgcggaccagctgtgcggcggagggttcccgtcgggcggagccggggacagcatggccgtggcgtcgtcgcaggggtcgtccgacggctactcgcccttcagcttcctctcccactgatgacaaatgagctagctgccgcgcgcgcatggattgcattgcatctgctgcgcacgtaatgtagatcgatcgatcgatcgatcaccagttagcctagctagctagtttgcttatcatgcatggtgatcgatcggtcctgatcatcggttcttccgatccctgctgtttaattcctttcgagagagtacgttgggtcgaccagtgtgagagtgagcagtatagtagtgttagcatttagcatcagaagtagagggaggagcgatcgagagagaagaagagagagtacgtagctgcgtgccctagcttcttcatgtgtactccgtcttcgttctagtacgtcctacaagacctacgtactctcgatctgtagctttaaccatccaactttattattaagatcatcaactcggtcgaacgcttgctctt

SEQ ID NO: 33362 - protein, 314 aa, Zea mays subsp. mays
MMNTRACGSSGSGGRNDQTMMGFSEHPKPAASGQAQPSPPSSPSERPPAGRGRRRAQEPGRFLGVRRRPWGRYAAEIRDPTTKERHWLGTFDTAQEAALAYDRAALSMKGAQARTNFVYTHAAYNYPPFLAPFHHPSSVQQQHYGAAPHVGSYGHHHYHHQGSAAAVGASSGECSSTMATAVPPVERADGTLLLDRGGGGHHHHPEFLFASADDNSGYLSSVVPESCLRPRSSAAAVEDLRRYSDADAYGMGVGLREDVDDLAQMVAGFWGGGAGDADQLCGGGFPSGGAGDSMAVASSQGSSDGYSPFSFLSH

SEQ ID NO: 33363 - protein, 313 aa, Zea mays subsp. mays
MNTRACGSSGSGGRNDQTMMGFSEHPKPAASGQAQPSPPSSPSERPPAGRGRRRAQEPGRFLGVRRRPWGRYAAEIRDPTTKERHWLGTFDTAQEAALAYDRAALSMKGAQARTNFVYTHAAYNYPPFLAPFHHPSSVQQQHYGAAPHVGSYGHHHYHHQGSAAAVGASSGECSSTMATAVPPVERADGTLLLDRGGGGHHHHPEFLFASADDNSGYLSSVVPESCLRPRSSAAAVEDLRRYSDADAYGMGVGLREDVDDLAQMVAGFWGGGAGDADQLCGGGFPSGGAGDSMAVASSQGSSDGYSPFSFLSH

SEQ ID NO: 33364 - protein, 295 aa, Zea mays subsp. mays
MMGFSEHPKPAASGQAQPSPPSSPSERPPAGRGRRRAQEPGRFLGVRRRPWGRYAAEIRDPTTKERHWLGTFDTAQEAALAYDRAALSMKGAQARTNFVYTHAAYNYPPFLAPFHHPSSVQQQHYGAAPHVGSYGHHHYHHQGSAAAVGASSGECSSTMATAVPPVERADGTLLLDRGGGGHHHHPEFLFASADDNSGYLSSVVPESCLRPRSSAAAVEDLRRYSDADAYGMGVGLREDVDDLAQMVAGFWGGGAGDADQLCGGGFPSGGAGDSMAVASSQGSSDGYSPFSFLSH

SEQ ID NO: 33365 - DNA, 1168 bp, Zea mays subsp. mays
  misc_feature (432)..(432): n is a, c, g, or t
atcgaaaacttcaatgtgcacaatataaactagctgggatcaaatacaggagcacctcgagtctgagagaatggctaacactgctaagggtaaggtctgtgtcactggggcgtctggtttcatcgcctcctggctcgtcaagcggcttcttgagtctgggtaccatgtcctgggaacagtcagagacccagggaatggcaagaaagtagggcacctctggggcctggaaggcgcaaaggaaaggctgcagctcgtgagagctgatctcttggaggaagggagcttcgacgacgctgtgatggcttgcgagggcgtcttccacaccgcatcgcccgtcgtcaccggatctaattccaaggaggagatgcttgattcagcaataaacggcacgatgaacgtgctacgctcgtgcaagaagaacccatcgctcangagggttgtcctgacatcctcgtcgtcgacagtgaggatcaaggacgaagccgacctgccccctaacgtgctgctggacgaatcgtcgtggagctccatcgagttctgcgaaagtctccagatatggtacgccgtcgcaaagatcctcgccgagaaggcagcctgggagttcgccggagagcacaggatcgacctcgtcaccgttcttccgaccttcgttgtcggacctactctgtctcctgagctcggccccaccgcttctgatgtcctcggcctgttccaaggagagacggggaagttcacgacgtacgggaggatggggtacgtccacatcgacgacgtggcgaggtgccacatgctggcgtacgaggccgcgggcgcccgagggaggtacatctgcagcgcggcggtgctggactgcggcgacctcgccgccctgctcgcgcggcggttcccagcgtaccccgtcccgaggagcctgccccgcgcctacggcgagcagtcgtacggcttcgacacgtccaaggcccgcgcgctggggctggcggaattcaagggcgtcgaggagatgttcgacgacgccgtcgcctcgttcataggccatggccatctccccgccgccgaggaacgccggcacgcgtagcctcttggtctgaaactacatgaatgaacgtatcatgtactaattaaattatttaatacttttaactagcatctaatcatgccgtttagtctc

SEQ ID NO: 33366 - protein, 334 aa, Zea mays subsp. mays
  misc_feature (121)..(121): Xaa can be any naturally occurring amino acid
MANTAKGKVCVTGASGFIASWLVKRLLESGYHVLGTVRDPGNGKKVGHLWGLEGAKERLQLVRADLLEEGSFDDAVMACEGVFHTASPVVTGSNSKEEMLDSAINGTMNVLRSCKKNPSLXRVVLTSSSSTVRIKDEADLPPNVLLDESSWSSIEFCESLQIWYAVAKILAEKAAWEFAGEHRIDLVTVLPTFVVGPTLSPELGPTASDVLGLFQGETGKFTTYGRMGYVHIDDVARCHMLAYEAAGARGRYICSAAVLDCGDLAALLARRFPAYPVPRSLPRAYGEQSYGFDTSKARALGLAEFKGVEEMFDDAVASFIGHGHLPAAEERRHA

SEQ ID NO: 33367 - protein, 258 aa, Zea mays subsp. mays
  misc_feature (45)..(45): Xaa can be any naturally occurring amino acid
MACEGVFHTASPVVTGSNSKEEMLDSAINGTMNVLRSCKKNPSLXRVVLTSSSSTVRIKDEADLPPNVLLDESSWSSIEFCESLQIWYAVAKILAEKAAWEFAGEHRIDLVTVLPTFVVGPTLSPELGPTASDVLGLFQGETGKFTTYGRMGYVHIDDVARCHMLAYEAAGARGRYICSAAVLDCGDLAALLARRFPAYPVPRSLPRAYGEQSYGFDTSKARALGLAEFKGVEEMFDDAVASFIGHGHLPAAEERRHA

SEQ ID NO: 33368 - protein, 236 aa, Zea mays subsp. mays
  misc_feature (23)..(23): Xaa can be any naturally occurring amino acid
MLDSAINGTMNVLRSCKKNPSLXRVVLTSSSSTVRIKDEADLPPNVLLDESSWSSIEFCESLQIWYAVAKILAEKAAWEFAGEHRIDLVTVLPTFVVGPTLSPELGPTASDVLGLFQGETGKFTTYGRMGYVHIDDVARCHMLAYEAAGARGRYICSAAVLDCGDLAALLARRFPAYPVPRSLPRAYGEQSYGFDTSKARALGLAEFKGVEEMFDDAVASFIGHGHLPAAEERRHA

SEQ ID NO: 33369 - DNA, 910 bp, Zea mays subsp. mays
aacttggacctgacggacacgagcacagcaacgaaccggtggcgctggttcaccggcaaattaaaatcgtggccgtccagcgttcacgcaccgatttcctgataagattctgcacctcgccagcttcttcatggtcccccggctccctcgccgcggaaccggggctgagcgcgacgtcaccagctcactcggcccgacgctgacagacagccacggctcacgtgcgcctgcaggtcttcgtcgcgatgcaggcggcgtacatcctgtgggccatcctcgccgagcagcggccccgcgcggccgtcgccgcgctcatgatgttcacttgccggggcgtgctgggctgcgccacccagctcccgctgccggaggagttcctgggctccgggatggacttccccgtgggcaacgtctccttcttcctcttcttctcgggccacgtcgcggggcgcggtgatcgcggcggccgacatgcggcgcgaggggcggctggcgccggcgcgcctcttcgactcgctcaacgtgctccaggtggtcaggctgctcgcgtgcaggggacactacaccatcgacctggctgttggcgtcggcgcgggcatcctcttcgacacgctctccggatggtacttcgacgccaagaacggcgacagcagcaacgcaccggagaagcagtgccggagctgccagtgccacaaggccctcctttcacactagtagtactattatattctctctgcaagtgccaaccatcaacggccaagtgagcattgatagctaattcgtgtcatttttttaagtttcttctcttttatggaatcattttggtgtaagataatgtatccaaatgctacttacggatatgtaactgtacaaattgttcgcccggtgcgagctgtaacatttttatctg

SEQ ID NO: 33370 - protein, 172 aa, Zea mays subsp. mays
MQAAYILWAILAEQRPRAAVAALMMFTCRGVLGCATQLPLPEEFLGSGMDFPVGNVSFFLFFSGHVAGRGDRGGRHAARGAAGAGAPLRLAQRAPGGQAARVQGTLHHRPGCWRRRGHPLRHALRMVLRRQERRQQQRTGEAVPELPVPQGPPFTLVVLLYSLCKCQPSTAK

SEQ ID NO: 33371 - protein, 149 aa, Zea mays subsp. mays
MMFTCRGVLGCATQLPLPEEFLGSGMDFPVGNVSFFLFFSGHVAGRGDRGGRHAARGAAGAGAPLRLAQRAPGGQAARVQGTLHHRPGCWRRRGHPLRHALRMVLRRQERRQQQRTGEAVPELPVPQGPPFTLVVLLYSLCKCQPSTAK

SEQ ID NO: 33372 - protein, 148 aa, Zea mays subsp. mays
MFTCRGVLGCATQLPLPEEFLGSGMDFPVGNVSFFLFFSGHVAGRGDRGGRHAARGAAGAGAPLRLAQRAPGGQAARVQGTLHHRPGCWRRRGHPLRHALRMVLRRQERRQQQRTGEAVPELPVPQGPPFTLVVLLYSLCKCQPSTAK

SEQ ID NO: 33373 - DNA, 1747 bp, Zea mays subsp. mays
taatcgaaaaacctccacccgccccgtcccgttttgacggccctttctcccctctcctccgcgagcgccgccgcagtagaacccggtggtaacccactgccgcaagcatcccaccgcgccgagctacgcgacggacgcggcgcgcggcccacaacccaaccgcagcggcaacaaccgctctataaagcaatccccccacctaccggctccgcggcctcgctcgcttcgctttcccccaaatccaccgcgggctcgagctcggaggagaggagacgagacgacccaagactttctcacccccctttgcttcctgcgcaattcctgcggcagcgcctttctctctttcaatggacagcgactacgttgctagcctgctcatgggcatgggctcatccgcccctgcgctcgacttcgccgcgctggacgccgggttcctcgaaacgctctgcggcggcggcggcggcctcttcggggtgtccggggtcgccgcgggggccgggtgtggcggcgtgtccccggaggggtcgtcggtgtccgacccggcgtgggcgcgcgccagggacgatgacaatgtcaggaagcgcaaggagccgcccacggggtccgccggcggcaaggaggcctgcccgggcaaggctgcggaggccaagggtccggacgggaagaggtgcagagtgggcggcagcgacagcccggtgaagccgaaggtagaggaggtggcggcgagcgacgcctcggttgaactcaaagcgcagaagaagggcaaggggaagaccgccaagccggcagtcgaaccgcccaaggactacgtccatgtccgggcgcggcgagggcaggcgactgacagccacagcctcgcagagagggttagaagagagaagatcagccagaggatgaagtttctgcaggacctagtgccaggatgcaacaaggtggttggcaaggcactcatgctcgatgagatcataaactacgtccagtcgctgcagcagcaagtcgagttcctgtccatgaagctcgccactgtgaacccacagcttgacttcagcaacctgtcgacactcctacacaaagacatgtaccaaccatgtggcccttcggcaaattcggtctttccactggaaagtgacggtgcagctttcccattctgcgaccaagcggatcttttccacagctttggttcgggttcggctgctatggaggatcagtgctctctaagcctgctagacacggctctgccccacgcggccaacccacagtttgcttttcaaaagcagcagagggacttctgggaggatggcctacagaacgcattgcctaccggtagtgagcaaagacaggaggaggatgggcttttagtacccaactttgatggccagttacatgctgaccagacaaaggttgagttctagtccctggtgctcctcccaaggttgatatttttgtatataggtggggtaccaagacctgtggcaagcaaagctctctctttctctctgtgtccgaagctgaccatcattagagtctaggcctgcgaactgatttcgttccgtgataatgctgcatgtatggcatctcgattcttcccacagagatcatgtgatgtgatcgacctcgagaaattaaaagtagattgtgtactagatatggcgcaaatattacatgcgccatcttctaaagttgtactgattggtatgtaagggcgctgggtggtgttggaacggataccgtgtactgtttgttgctt

SEQ ID NO: 33374 - protein, 354 aa, Zea mays subsp. mays
MDSDYVASLLMGMGSSAPALDFAALDAGFLETLCGGGGGLFGVSGVAAGAGCGGVSPEGSSVSDPAWARARDDDNVRKRKEPPTGSAGGKEACPGKAAEAKGPDGKRCRVGGSDSPVKPKVEEVAASDASVELKAQKKGKGKTAKPAVEPPKDYVHVRARRGQATDSHSLAERVRREKISQRMKFLQDLVPGCNKVVGKALMLDEIINYVQSLQQQVEFLSMKLATVNPQLDFSNLSTLLHKDMYQPCGPSANSVFPLESDGAAFPFCDQADLFHSFGSGSAAMEDQCSLSLLDTALPHAANPQFAFQKQQRDFWEDGLQNALPTGSEQRQEEDGLLVPNFDGQLHADQTKVEF

SEQ ID NO: 33375 - protein, 344 aa, Zea mays subsp. mays
MGMGSSAPALDFAALDAGFLETLCGGGGGLFGVSGVAAGAGCGGVSPEGSSVSDPAWARARDDDNVRKRKEPPTGSAGGKEACPGKAAEAKGPDGKRCRVGGSDSPVKPKVEEVAASDASVELKAQKKGKGKTAKPAVEPPKDYVHVRARRGQATDSHSLAERVRREKISQRMKFLQDLVPGCNKVVGKALMLDEIINYVQSLQQQVEFLSMKLATVNPQLDFSNLSTLLHKDMYQPCGPSANSVFPLESDGAAFPFCDQADLFHSFGSGSAAMEDQCSLSLLDTALPHAANPQFAFQKQQRDFWEDGLQNALPTGSEQRQEEDGLLVPNFDGQLHADQTKVEF

SEQ ID NO: 33376 - protein, 342 aa, Zea mays subsp. mays
MGSSAPALDFAALDAGFLETLCGGGGGLFGVSGVAAGAGCGGVSPEGSSVSDPAWARARDDDNVRKRKEPPTGSAGGKEACPGKAAEAKGPDGKRCRVGGSDSPVKPKVEEVAASDASVELKAQKKGKGKTAKPAVEPPKDYVHVRARRGQATDSHSLAERVRREKISQRMKFLQDLVPGCNKVVGKALMLDEIINYVQSLQQQVEFLSMKLATVNPQLDFSNLSTLLHKDMYQPCGPSANSVFPLESDGAAFPFCDQADLFHSFGSGSAAMEDQCSLSLLDTALPHAANPQFAFQKQQRDFWEDGLQNALPTGSEQRQEEDGLLVPNFDGQLHADQTKVEF

SEQ ID NO: 33377 - DNA, 677 bp, Zea mays subsp. mays
atagaaatcgaccgagcgaatcctcgcttcgcagtcgcagcctttcctgcatcacaccaccgcgaaaccccagcagccgcatcgatggcgcccaaggcggagaagaagcccgctgcgaagaagccagcggaggaggagcccgctgccgcgaaggccccggcggggaagaagcccaaggccgagaagcgcctcccggcggccaagtcgtccggcaaagaaggcggcgacaagaagggcaagaagaaggcgaagaagtcggtggagacctacaagatctacatcttcaaggtgctgaagcaggtccaccccgacatcggcatctcttccaaggccatgtccatcatgaactccttcatcaacgacatcttcgagaagctcgccggcgaggctgccaagcttgcgcgctacaacaagaagcccaccatcacctctcgggagattcaaacctctgttcgccttgtccttcccggcgagctcgccaagcacgctgtctctgagggcaccaaggccgtcactaagttcacatcatcttagatttgaggtagtagctattgggtggcgttggtagttgtgtctcaatttgtctgctactaatagtggtaggagtatccatgtgtagttgggttgcggtaagaattgtgttaaactggtaatatgtttgaaattgctttttgtgg

SEQ ID NO: 33378 - protein, 177 aa, Zea mays subsp. mays
IEIDRANPRFAVAAFPASHHRETPAAASMAPKAEKKPAAKKPAEEEPAAAKAPAGKKPKAEKRLPAAKSSGKEGGDKKGKKKAKKSVETYKIYIFKVLKQVHPDIGISSKAMSIMNSFINDIFEKLAGEAAKLARYNKKPTITSREIQTSVRLVLPGELAKHAVSEGTKAVTKFTSS

SEQ ID NO: 33379 - protein, 164 aa, Zea mays subsp. mays
RNRPSESSLRSRSLSCITPPRNPSSRIDGAQGGEEARCEEASGGGARCREGPGGEEAQGREAPPGGQVVRQRRRRQEGQEEGEEVGGDLQDLHLQGAEAGPPRHRHLFQGHVHHELLHQRHLREARRRGCQACALQQEAHHHLSGDSNLCSPCPSRRARQARCL

SEQ ID NO: 33380 - protein, 149 aa, Zea mays subsp. mays
MAPKAEKKPAAKKPAEEEPAAAKAPAGKKPKAEKRLPAAKSSGKEGGDKKGKKKAKKSVETYKIYIFKVLKQVHPDIGISSKAMSIMNSFINDIFEKLAGEAAKLARYNKKPTITSREIQTSVRLVLPGELAKHAVSEGTKAVTKFTSS

SEQ ID NO: 33381 - DNA, 1324 bp, Zea mays subsp. mays
gaacacctttcttttattactctcctgtccccctccctctctcatcaaccatcacctccgtcccgtccgcctcccattcgctcaaaccggaaggaggaggaggagggcgaattaaagcctcgcctcccgcccccgcccccgcccccgccccccaccgcgtcgccggcgccgatggccgacggcggggccggcgcgtaccgggagttcaaggcgctggcggaggcggcggaccgcaagttcgcgcgcgcgcgggacctgccgctctacggcggcggggaccaccacagccggaaggcgttcaaggcctacacgcggctctggcgcctgcagcaggagcgccgccgggagctcgtcgccgccggcctccgccgctgggagatcggcgaggtggcctcccggatcggccagctctactacgcgcgctacctccgcgccgccgagccgcgctcgctcgtcggcgcctacgtcttctacgaggccatatacagccgcggctacttcggcgcggccgcggcagcggtggggacggacggcggcggcggcggcgtcagccgccaccaggcgctcctgatccggtacaaggagcttcggttcatcgcgcggttcctcgtcgtggccatgctgatgcggcgggccgaggcggtggaccacctcgccgcacgcctacgtgcgctcgtcgaggagaccaaggctgcgtaccccgtcatacataattcagagaagggagaaccagctgctttattactttctcccaggacatcatcagccatgcctggagtagaatccacggctcacggaagccagtttacatacttcctcactgctccaatgcaagccttctgccaactagcgggaataacttctgacatagacactgatacatacgcaaatgcagagaacatacttttctctgctttggaagaatatgaaggaatactctgcacttctgttggattaaacaatgtctgggggcaaattttaccagacccatttctcagacggctgattctcaggtttattttctgccgggcagtgcttttctatttccactcagatgagcacgaatatctaccgacctgcttacctagtcttccagagtcagtctccccgcatgcagaggccataagaactcctatcctttcgcttgcagaaaaccttgtcgtcagcgaccggtttgacttccgagactccacacgcaacaagaaatgatgaccagcagcaataaccataactcatgccttctgtagatacctctgtggtaaatatagtccagcgatttgttgattgttttgcatttatacagccaacggagcaattagtcagc

SEQ ID NO: 33382 - protein, 402 aa, Zea mays subsp. mays
EHLSFITLLSPSLSHQPSPPSRPPPIRSNRKEEEEGELKPRLPPPPPPPPPTASPAPMADGGAGAYREFKALAEAADRKFARARDLPLYGGGDHHSRKAFKAYTRLWRLQQERRRELVAAGLRRWEIGEVASRIGQLYYARYLRAAEPRSLVGAYVFYEAIYSRGYFGAAAAAVGTDGGGGGVSRHQALLIRYKELRFIARFLVVAMLMRRAEAVDHLAARLRALVEETKAAYPVIHNSEKGEPAALLLSPRTSSAMPGVESTAHGSQFTYFLTAPMQAFCQLAGITSDIDTDTYANAENILFSALEEYEGILCTSVGLNNVWGQILPDPFLRRLILRFIFCRAVLFYFHSDEHEYLPTCLPSLPESVSPHAEAIRTPILSLAENLVVSDRFDFRDSTRNKK

SEQ ID NO: 33383 - protein, 345 aa, Zea mays subsp. mays
MADGGAGAYREFKALAEAADRKFARARDLPLYGGGDHHSRKAFKAYTRLWRLQQERRRELVAAGLRRWEIGEVASRIGQLYYARYLRAAEPRSLVGAYVFYEAIYSRGYFGAAAAAVGTDGGGGGVSRHQALLIRYKELRFIARFLVVAMLMRRAEAVDHLAARLRALVEETKAAYPVIHNSEKGEPAALLLSPRTSSAMPGVESTAHGSQFTYFLTAPMQAFCQLAGITSDIDTDTYANAENILFSALEEYEGILCTSVGLNNVWGQILPDPFLRRLILRFIFCRAVLFYFHSDEHEYLPTCLPSLPESVSPHAEAIRTPILSLAENLVVSDRFDFRDSTRNKK

SEQ ID NO: 33384 - protein, 236 aa, Zea mays subsp. mays
TPFFYYSPVPLPLSSTITSVPSASHSLKPEGGGGGRIKASPPAPAPAPAPHRVAGADGRRRGRRVPGVQGAGGGGGPQVRARAGPAALRRRGPPQPEGVQGLHAALAPAAGAPPGARRRRPPPLGDRRGGLPDRPALLRALPPRRRAALARRRLRLLRGHIQPRLLRRGRGSGGDGRRRRRRQPPPGAPDPVQGASVHRAVPRRGHADAAGRGGGPPRRTPTCARRGDQGCVPRHT

SEQ ID NO: 33385 - DNA, 1297 bp, Zea mays subsp. mays
  misc_feature (353)..(353): n is a, c, g, or t
  misc_feature (357)..(357): n is a, c, g, or t
  misc_feature (359)..(359): n is a, c, g, or t
  misc_feature (395)..(395): n is a, c, g, or t
acacaagcagcaacatcactgatcgccgtgcaggcctggtacgtaccacacacacacacacacatacagaagaagaacgtaccttgcgctacaaccccgtcgccgccgactacgccgatcgtgtccacgggaaccaagcaaagcaaagcaagcgacgcatcggaagaagccggagaccgaccgaccgaccgagctacctagctacagctcatcagcccatggtgaagacggcgacggcgacggcggcggcgaggcacggcggcgctcataagaggacgtacaagggcgtgcggatgcggagctggggctcctgggtgtcggaggtgcgggcgccgggccagaagacgaggatntggntnggctcccactccaccgccgaggccgcggcgcgcgcntacgacgccgcgctgctctgcctcaggggctcggcggccgcgccggacctcaacttcccgccccgccgcccgctcgccgacggcctccacccgctgccccccgccgccatgtcgcccaaggccatccagcgcgtggccgccgccgccgcggcctgctgcgctcctcagagtaacggcattggcagtgcctgctgcgccgcgccctgcgctcctccgagtaatggcattggcagcgcctgcggccacgccgagaccgccccggcgttgagcggcagcccgccctccagcgacagcgacgtctcctccccggaggcggggtccaccgccagcagcgacggcgagctggcccgctacggcgacggcgacggcgacggcggcgtcagcgtggactacggctcgctcgccgacatcgacgccttcttccagtcgcccaagtgcatggacgacgaccactactactacgcagcgctcatggacccctgcggcgccttcttcgcgccggcgccatcggttgcggcggacgacgacgcagcagccgccgccggatgctgggaggacggcgacggcattgcgctctggagcttcagcttccccgctctggactgctgagctgaagcggcgcagattccgctactactgacgattgacgactaatcgccggtcaagcgatggaaaccgctttatttgcttcatcgacggcacaggtttccgcatacatgataaatttacccaatttaattcgatgtatgtaaacattcttaataagctgattgttaagcgttgtagtggtggggagctctcatggctgaagctgcatgttttaaggtagctttttccatggagttaacctctttgctattgcttgtctatgagtaaacaaaaaaaaaaacagttttattgcc

SEQ ID NO: 33386 - protein, 333 aa, Zea mays subsp. mays
  misc_feature (117)..(117): Xaa can be any naturally occurring amino acid
  misc_feature (119)..(119): Xaa can be any naturally occurring amino acid
  misc_feature (131)..(131): Xaa can be any naturally occurring amino acid
TSSNITDRRAGLVRTTHTHTHTEEERTLRYNPVAADYADRVHGNQAKQSKRRIGRSRRPTDRPSYLATAHQPMVKTATATAAARHGGAHKRTYKGVRMRSWGSWVSEVRAPGQKTRXWXGSHSTAEAAARXYDAALLCLRGSAAAPDLNFPPRRPLADGLHPLPPAAMSPKAIQRVAAAAAACCAPQSNGIGSACCAAPCAPPSNGIGSACGHAETAPALSGSPPSSDSDVSSPEAGSTASSDGELARYGDGDGDGGVSVDYGSLADIDAFFQSPKCMDDDHYYYAALMDPCGAFFAPAPSVAADDDAAAAAGCWEDGDGIALWSFSFPALDC

SEQ ID NO: 33387 - protein, 261 aa, Zea mays subsp. mays
  misc_feature (45)..(45): Xaa can be any naturally occurring amino acid
  misc_feature (47)..(47): Xaa can be any naturally occurring amino acid
  misc_feature (59)..(59): Xaa can be any naturally occurring amino acid
MVKTATATAAARHGGAHKRTYKGVRMRSWGSWVSEVRAPGQKTRXWXGSHSTAEAAARXYDAALLCLRGSAAAPDLNFPPRRPLADGLHPLPPAAMSPKAIQRVAAAAAACCAPQSNGIGSACCAAPCAPPSNGIGSACGHAETAPALSGSPPSSDSDVSSPEAGSTASSDGELARYGDGDGDGGVSVDYGSLADIDAFFQSPKCMDDDHYYYAALMDPCGAFFAPAPSVAADDDAAAAAGCWEDGDGIALWSFSFPALDC

SEQ ID NO: 33388 - protein, 236 aa, Zea mays subsp. mays
  misc_feature (20)..(20): Xaa can be any naturally occurring amino acid
  misc_feature (22)..(22): Xaa can be any naturally occurring amino acid
  misc_feature (34)..(34): Xaa can be any naturally occurring amino acid
MRSWGSWVSEVRAPGQKTRXWXGSHSTAEAAARXYDAALLCLRGSAAAPDLNFPPRRPLADGLHPLPPAAMSPKAIQRVAAAAAACCAPQSNGIGSACCAAPCAPPSNGIGSACGHAETAPALSGSPPSSDSDVSSPEAGSTASSDGELARYGDGDGDGGVSVDYGSLADIDAFFQSPKCMDDDHYYYAALMDPCGAFFAPAPSVAADDDAAAAAGCWEDGDGIALWSFSFPALDC

SEQ ID NO: 33389 - DNA, 1427 bp, Zea mays subsp. mays
  misc_feature (1372)..(1372): n is a, c, g, or t
  misc_feature (1395)..(1398): n is a, c, g, or t
  misc_feature (1401)..(1401): n is a, c, g, or t
  misc_feature (1404)..(1406): n is a, c, g, or t
  misc_feature (1409)..(1410): n is a, c, g, or t
  misc_feature (1412)..(1414): n is a, c, g, or t
  misc_feature (1420)..(1420): n is a, c, g, or t
  misc_feature (1422)..(1423): n is a, c, g, or t
aggaagccaatcgccagccagccaggaagcgctcctgcacctgtcctgcatacgcccaacggcctaatatttgcgtagccgctacaacctacatgattctcgatccgtcacccatccgttccggatcttgattcttgccaaggcgtgcaagattcctgcttcgccgaggttaaattttagccgccggccgagcttctgcggagaaccggcaggtttgcttggtgccccctatttgcctgctactcgtggcgcgccgctcctaggcgaagggaaggatccgactcaacatggccgccgccgcttctaccatgtccctgctcccgatctcccagcccaggaagcagcagcagcaaggcgcgggcgccgtggtcgtgttccagcggcggccctgggacgcgcggcggaggcgatacgtcgtcccgacggcgaggctgttcgggccagcgatcttcgaggcgtccaagctgaaggtgctgttcctgggcgtggacgaggggagcagcaagcatctgcatgcgcaccacccggcgccggcgccggcgctgctgccgcggacgtacacgctgacgcacagcgacgtgacggccagcctgacgctcgccgtctcccacaccatcaaccgcgcgcagctgcagggctggtacaaccgcctgcagcgcgacgaggtggtggccgagtggaagaaggtgcgcggccggatgtcgctgcacgtgcactgccacatctccggcggacacttgctcctggacctcatcgccggcctccgctactacatcttccgcaaggagctccccgtggtgctcgaggcgttcgtgcacggcgacggcgacctgttcagccgtcacccggagctggaggaagccacggtgtgggtctacttccactccaacctggcccgcttcaaccgcgtcgagtgctggggtccgctccgcgacgccgccgcccccccgcccgccgaggacgactccaccgcgccggccgccgcctccatcgccatggagggccagatgcccgtgggcgagtggccgcaccggtgtccccagcagtgcgactgctgcttcccgccgcacagcctcataccctggccgaacgagcaagacatggccgccgccgccggccaggtccgacagcagtagtgaagctgcacggaggaggggcctttgcctcataccctggccaaacgtcctagatacactactagcgcgttgtttggtttgctattgctattgctagatgcaagcgtgtgcgtgcagtgcaggtgtggagtggcgtcaacaccttgcatgcacgggctattctttaattggtagcttagctcagctcagttcagttccacttgtacaccttcgtatttggaagcagcttggttgangttgggggatgaaaaaaaaaaannnnaantannnaannannnaaaggngnnattt

SEQ ID NO: 33390 - protein, 282 aa, Zea mays subsp. mays
MAAAASTMSLLPISQPRKQQQQGAGAVVVFQRRPWDARRRRYVVPTARLFGPAIFEASKLKVLFLGVDEGSSKHLHAHHPAPAPALLPRTYTLTHSDVTASLTLAVSHTINRAQLQGWYNRLQRDEVVAEWKKVRGRMSLHVHCHISGGHLLLDLIAGLRYYIFRKELPVVLEAFVHGDGDLFSRHPELEEATVWVYFHSNLARFNRVECWGPLRDAAAPPPAEDDSTAPAAASIAMEGQMPVGEWPHRCPQQCDCCFPPHSLIPWPNEQDMAAAAGQVRQQ

SEQ ID NO: 33391 - protein, 275 aa, Zea mays subsp. mays
MSLLPISQPRKQQQQGAGAVVVFQRRPWDARRRRYVVPTARLFGPAIFEASKLKVLFLGVDEGSSKHLHAHHPAPAPALLPRTYTLTHSDVTASLTLAVSHTINRAQLQGWYNRLQRDEVVAEWKKVRGRMSLHVHCHISGGHLLLDLIAGLRYYIFRKELPVVLEAFVHGDGDLFSRHPELEEATVWVYFHSNLARFNRVECWGPLRDAAAPPPAEDDSTAPAAASIAMEGQMPVGEWPHRCPQQCDCCFPPHSLIPWPNEQDMAAAAGQVRQQ

SEQ ID NO: 33392 - protein, 145 aa, Zea mays subsp. mays
MSLHVHCHISGGHLLLDLIAGLRYYIFRKELPVVLEAFVHGDGDLFSRHPELEEATVWVYFHSNLARFNRVECWGPLRDAAAPPPAEDDSTAPAAASIAMEGQMPVGEWPHRCPQQCDCCFPPHSLIPWPNEQDMAAAAGQVRQQ

SEQ ID NO: 33393 - DNA, 1414 bp, Zea mays subsp. mays
  misc_feature (253)..(254): n is a, c, g, or t
  misc_feature (264)..(265): n is a, c, g, or t
  misc_feature (267)..(268): n is a, c, g, or t
  misc_feature (479)..(479): n is a, c, g, or t
  misc_feature (482)..(482): n is a, c, g, or t
  misc_feature (505)..(505): n is a, c, g, or t
  misc_feature (538)..(538): n is a, c, g, or t
aagccaggcacggaggaggcgcgtgctctgctctgctctgcgtctgctccactccacctcccccccccccccctgcgccactcacgccgctcgttcgcgcagttttggtcttctggccagcagggcagggggggaacccgcgggagcgaggcgcgcgagcgagcgagcggagggaggaggaggatgatgcacaccaagtcggagtcggacgtgacgagcctggcagcgtcgtcgccgccgcggtcgccgaagnngggcgttgcnncnnccggcaccggcggcggcggcgggtactacgtgcagagcccgtcgcgggagtcgcacgacggcggcggcggcggcgggtacaagtcgtcgtcgatgcaggccacgccggtgtacaacaacagccccagcgagtcgccgtcgcacccctcctacggccgccactcccgctcctcctccgtcagccgcttctccggcggcctccgcggggccgncgncggcgggcgcaaggtgctcaacnacaagggctggcccgagtgcagcgtcatcgagnaggaagggccctacgagggcctcggcgccggggacagcggcctctcccgccgctgccagatcgtgctcggcttcctcaccttcgtcctcctcttcaccgtcttctgcctcgtcatctggggcgccgcccgcccgtacgagcccgaggtcgtcgtcaagagcttggtgatggacgacttctacgctggtgaaggcacagaccacagcggcgttccgaccaaattggtcacgacgaactgttcgctgcacgtatcggtgtacaaccctgccacaatgtttgggatccatgtcacctccggccccatccgtctgatctattcagagatctcaatagcagtcggtcaggtccgcaggtactaccagccgaggaagagccaacggacggtgacggcggtgatccacggcgagaaggtgccgctgtacggcgccgggggcggcctgacgctgtccacgagcgcgggcgggggcgcggtgcccctgacgctggacttcgacctcacctcccggggctacgtgatcggcaggctcgtgcgggtgacgcacagggcgcacgtgacgtgccccgtcgtcgtggacgccaggaggaccaagcctgtcaggttctccaagaaggcgtgcgccgtgtacaaggcctgagcttgagagctcgtgaaacctgtgatcgacggagcgttagcgatgcgtgttcttgaaaagatgtagctattgtgttgatggtgaagaacaataagcgcacacgtatggtcttgtcgatatatcgcgctgtaaggcctgttgttcttgtgtgtgtgtgtccctttttcagagcatgatcgtagagacggaagatgacttaccatgacaattttcctatacctttataacttcaatttttttt

SEQ ID NO: 33394 - protein, 390 aa, Zea mays subsp. mays
  misc_feature (85)..(85): Xaa can be any naturally occurring amino acid
  misc_feature (88)..(90): Xaa can be any naturally occurring amino acid
  misc_feature (160)..(161): Xaa can be any naturally occurring amino acid
  misc_feature (169)..(169): Xaa can be any naturally occurring amino acid
  misc_feature (180)..(180): Xaa can be any naturally occurring amino acid
KPGTEEARALLCSASAPLHLPPPPLRHSRRSFAQFWSSGQQGRGGTRGSEARERASGGRRRMMHTKSESDVTSLAASSPPRSPKXGVXXXGTGGGGGYYVQSPSRESHDGGGGGGYKSSSMQATPVYNNSPSESPSHPSYGRHSRSSSVSRFSGGLRGAXXGGRKVLNXKGWPECSVIEXEGPYEGLGAGDSGLSRRCQIVLGFLTFVLLFTVFCLVIWGAARPYEPEVVVKSLVMDDFYAGEGTDHSGVPTKLVTTNCSLHVSVYNPATMFGIHVTSGPIRLIYSEISIAVGQVRRYYQPRKSQRTVTAVIHGEKVPLYGAGGGLTLSTSAGGGAVPLTLDFDLTSRGYVIGRLVRVTHRAHVTCPVVVDARRTKPVRFSKKACAVYKA

SEQ ID NO: 33395 - protein, 329 aa, Zea mays subsp. mays
  misc_feature (24)..(24): Xaa can be any naturally occurring amino acid
  misc_feature (27)..(29): Xaa can be any naturally occurring amino acid
  misc_feature (99)..(100): Xaa can be any naturally occurring amino acid
  misc_feature (108)..(108): Xaa can be any naturally occurring amino acid
  misc_feature (119)..(119): Xaa can be any naturally occurring amino acid
MMHTKSESDVTSLAASSPPRSPKXGVXXXGTGGGGGYYVQSPSRESHDGGGGGGYKSSSMQATPVYNNSPSESPSHPSYGRHSRSSSVSRFSGGLRGAXXGGRKVLNXKGWPECSVIEXEGPYEGLGAGDSGLSRRCQIVLGFLTFVLLFTVFCLVIWGAARPYEPEVVVKSLVMDDFYAGEGTDHSGVPTKLVTTNCSLHVSVYNPATMFGIHVTSGPIRLIYSEISIAVGQVRRYYQPRKSQRTVTAVIHGEKVPLYGAGGGLTLSTSAGGGAVPLTLDFDLTSRGYVIGRLVRVTHRAHVTCPVVVDARRTKPVRFSKKACAVYKA

SEQ ID NO: 33396 - protein, 328 aa, Zea mays subsp. mays
  misc_feature (23)..(23): Xaa can be any naturally occurring amino acid
  misc_feature (26)..(28): Xaa can be any naturally occurring amino acid
  misc_feature (98)..(99): Xaa can be any naturally occurring amino acid
  misc_feature (107)..(107): Xaa can be any naturally occurring amino acid
  misc_feature (118)..(118): Xaa can be any naturally occurring amino acid
MHTKSESDVTSLAASSPPRSPKXGVXXXGTGGGGGYYVQSPSRESHDGGGGGGYKSSSMQATPVYNNSPSESPSHPSYGRHSRSSSVSRFSGGLRGAXXGGRKVLNXKGWPECSVIEXEGPYEGLGAGDSGLSRRCQIVLGFLTFVLLFTVFCLVIWGAARPYEPEVVVKSLVMDDFYAGEGTDHSGVPTKLVTTNCSLHVSVYNPATMFGIHVTSGPIRLIYSEISIAVGQVRRYYQPRKSQRTVTAVIHGEKVPLYGAGGGLTLSTSAGGGAVPLTLDFDLTSRGYVIGRLVRVTHRAHVTCPVVVDARRTKPVRFSKKACAVYKA

SEQ ID NO: 33397 - DNA, 1546 bp, Zea mays subsp. mays
aaaaagctctcggcgcttattaagtcttgacgatttatcattccattacatccacacctgcgatggagtacgagcgcggtggcggaggcggccgcggccgcgggcggggccgtggaggcggcggaggaggagggcgcggaggcggcggcggatacgggcagcagcacggaggcggcggcgacgcccgcggaggccgagacgagtacggcggcggaggaggagggtacgggtacgacgaaggagaaggctatggcgggggtcgtagaggcggcggcggagggtacgggtacgacgcccgcaagatcccgccgttgtcgtctccgtctcctccccctgcccacaactcgcaggatcccaccgtcaccgtctttctgggattcaattctgctctcaatttcttaatatgttcgggcatgttttgtttcacctgatgcctgtgcctagttgagcgagtgcatggacctagacatcacagtggaattctggtcccttcaggcgctgcgcagtttcttctcctcctaccagacatctagcactggacctaaactagacgagcacttcgtcatgagcaacaaccacgccgcgcgcgcacaatattttttccagcaaatggaagtaaattttttgtgttgattcagtcacccatttgttgtgttttctccaaatactctaagttggactgattgatttcagatctgtttgtttaaagttcatctattccagctttataacctagtttgtataaactcatctggtcaacaaaaagaccaagttataatccagtcgcaagcacctacgcccgcccacccgcaacgctcaatattcctatgcctgcaggctgcaaatgaagaacgattacgtgaagagtttgtgagggaaagcagaaagcttcctccaaagcagcaatcacaaacatgtgattcaaatgttattactccaaggactgaatttatggctgttttatcagttgctttggagtgttacatccatcttagattgaattatgatcatgaatggaaacaaaacaaagttattttatccgatgccaatgttcctggtgaacgggatctgtctggttttaacccaaatccattgcctgtatggcctggacgtatatctgatcatgctagctttgcagacacatgaagtacgcttctcaatactgagagaggtattttatacacctggacaacaggataaatgtttcttatgtatttaggtgggacatctagcagcaaaatgtgaaggaaaggtgaaaatgaaagctggggagttttgatgagaaggctgatgctattgttcccaataagccatatcaggttatttgtctattgtacaacatgtggtagtgtgtgtgtgtgttgggggggttcgcgccctcactcacgatcaatgacccgactctttccctctcttcccctcctctgccacgagccctaacccacttgaagcacaacatgatccatgtgagttgtgctttgggcctgcattagggatcagcaacttcgcacgcgacgaaatgaaccgccacgactgcgttgggatc

SEQ ID NO: 33398 - protein, 122 aa, Zea mays subsp. mays
MEYERGGGGGRGRGRGRGGGGGGGRGGGGGYGQQHGGGGDARGGRDEYGGGGGGYGYDEGEGYGGGRRGGGGGYGYDARKIPPLSSPSPPPAHNSQDPTVTVFLGFNSALNFLICSGMFCFT

SEQ ID NO: 33399 - protein, 87 aa, Zea mays subsp. mays
KSSRRLLSLDDLSFHYIHTCDGVRARWRRRPRPRAGPWRRRRRRARRRRRIRAAARRRRRRPRRPRRVRRRRRRVRVRRRRRLWRGS

SEQ ID NO: 33400 - protein, 71 aa, Zea mays subsp. mays
MIMNGNKTKLFYPMPMFLVNGICLVLTQIHCLYGLDVYLIMLALQTHEVRFSILREVFYTPGQQDKCFLCI

SEQ ID NO: 33401 - DNA, 1917 bp, Zea mays subsp. mays
tagaacatcctaatcaaaaacacataagaggcgacatcacatcgcgttccgccgcctcacacgctagttggagctgtagtattagccaaccagccagcctccgatctccatccatatggaggaggctgcgcccgcggcggtcatggagcgggagcgcctcacggccgagatggccttccgcggcgcggacgaagctcggcgggaaggcggcgacccggcgcccagcatcgtcatcaagatccgccgccggctcccggacttcgcccgcaacatcaagctcaagtacgtgaagctcgggatccgccacggcggcagccccacgtcgctgctgccggcgctctgcgtgccggcggtcgccgccgccgcctactcgttcgtccgcctcgacgtcatctactactccgtcgacctgctcacctgcgtcgcctggctcggcaccgcgctgctgctgctcaccgtctactacctcaagcggccccgccccgtgtacctcgtcgagttcgcgtgctacaagccggaggagcggctcaagatctccaagtcggccttcctcgagatgaccgagagcaccggctccttcaatgaggcggctctggacttccagaccaagatcaccagccgctccgcgctcggggacgagacgtacctgcccccgggcgtccaggcgcgcccgcccaggctaaacatggcggaggcgcggaaggaggccgaggcggtcatgttcgggtgcctggacgcgctgttcgagtccacggggatcgacccgcgccgcgacgtgcgcatcctcatcgtcaactgcagcctcttcaacccgacgccgtcgctggcgtccatggtcatcaaccactacaggatgagggaggacgtcaagtcgttcaacctcggcggcatggggtgcagcgccggcctcatcgccgtcgacctcgccaaggacatgctccaggcgaaccccggatcgtacgccgtggtgctcagcaccgagaacatcaccctcaactggtacttcggcaacgaccgctccatgctcctctccaactgcatcttccgcatgggcggggccgcggcgctgctgtccaacaggcgcgcggacgccgggcgcgccaagtaccggctgctccacacggtgcgcacccacaaggcgccaccgacgagtgcttcaactgcgtgtaccagcgcgaggacgaggccggcaaggcgggcgtctcgctggcgcgggagctcatggcggtggccggcgacgcgctcaagaccaacatcacgacgctggggcccctggtgctgcccctgagcgagcagctcaagttcctcaggtcgctgatgatgcgccgcgtgttccgcgtcaggggcgtgcgcccctacatcccggacttccggcgcgcgttcgagcacttctgcgtgcacgccggcgggcgcgcggtgctggaggaggtgcagcgcagcctgagcctgcgggacacggacatggagcccagcaagtgctccctccaccggttcggcaacaccagcagcagctcgctgtggtacgagctggcgtacgccgaggccaagggccgggtaaggcgcggccaccgcgtgtggcagatcggcttcggctcggggttcaagtgcaacagcgccgtgtggcgcgctctacgcgacgtgccgccgctgccgtcgtcgcccggcgccgcggcggggccgggggccaggaagggcgcgccgcagagctgctgcaatccctgggtggacgacgtggacaggtaccctcccaaggcgtacgtctgatgggccacgtcacgtggccacaacaattgcatgatcccaatcccattcggatttcctcacgacgaattaatgaagaagggcgtgtgagtgtgagggagaaagttatacttgtatgtattttttttttcagttttattttgtcgtttcgttttc

SEQ ID NO: 33402 - protein, 390 aa, Zea mays subsp. mays
MEEAAPAAVMERERLTAEMAFRGADEARREGGDPAPSIVIKIRRRLPDFARNIKLKYVKLGIRHGGSPTSLLPALCVPAVAAAAYSFVRLDVIYYSVDLLTCVAWLGTALLLLTVYYLKRPRPVYLVEFACYKPEERLKISKSAFLEMTESTGSFNEAALDFQTKITSRSALGDETYLPPGVQARPPRLNMAEARKEAEAVMFGCLDALFESTGIDPRRDVRILIVNCSLFNPTPSLASMVINHYRMREDVKSFNLGGMGCSAGLIAVDLAKDMLQANPGSYAVVLSTENITLNWYFGNDRSMLLSNCIFRMGGAAALLSNRRADAGRAKYRLLHTVRTHKAPPTSASTACTSARTRPARRASRWRGSSWRWPATRSRPTSRRWGPWCCP

SEQ ID NO: 33403 - protein, 381 aa, Zea mays subsp. mays
MERERLTAEMAFRGADEARREGGDPAPSIVIKIRRRLPDFARNIKLKYVKLGIRHGGSPTSLLPALCVPAVAAAAYSFVRLDVIYYSVDLLTCVAWLGTALLLLTVYYLKRPRPVYLVEFACYKPEERLKISKSAFLEMTESTGSFNEAALDFQTKITSRSALGDETYLPPGVQARPPRLNMAEARKEAEAVMFGCLDALFESTGIDPRRDVRILIVNCSLFNPTPSLASMVINHYRMREDVKSFNLGGMGCSAGLIAVDLAKDMLQANPGSYAVVLSTENITLNWYFGNDRSMLLSNCIFRMGGAAALLSNRRADAGRAKYRLLHTVRTHKAPPTSASTACTSARTRPARRASRWRGSSWRWPATRSRPTSRRWGPWCCP

SEQ ID NO: 33404 - protein, 372 aa, Zea mays subsp. mays
MAFRGADEARREGGDPAPSIVIKIRRRLPDFARNIKLKYVKLGIRHGGSPTSLLPALCVPAVAAAAYSFVRLDVIYYSVDLLTCVAWLGTALLLLTVYYLKRPRPVYLVEFACYKPEERLKISKSAFLEMTESTGSFNEAALDFQTKITSRSALGDETYLPPGVQARPPRLNMAEARKEAEAVMFGCLDALFESTGIDPRRDVRILIVNCSLFNPTPSLASMVINHYRMREDVKSFNLGGMGCSAGLIAVDLAKDMLQANPGSYAVVLSTENITLNWYFGNDRSMLLSNCIFRMGGAAALLSNRRADAGRAKYRLLHTVRTHKAPPTSASTACTSARTRPARRASRWRGSSWRWPATRSRPTSRRWGPWCCP

SEQ ID NO: 33405 - DNA, 2848 bp, Zea mays subsp. mays
gcacgagaccattacctagaacatcctaatcaaaaagatttctattttcttcgtatccattttccatccttttcccctctcgcgggctcgcggccacgaccccgcttccctaaattattaccacaaaaccctctgtcccggctatggccaactccgtctccccgccgcgccgccgccgccacagccaccacgatgacgtctccccgcgccgccgcaagcgccgcgcgtccccgtatccacctcgctcgccttccctcggcgtcgacgcggaccgccgtcgcagatctagggctttgccgcccgattccgacagccgcggccgcggccgagacgccaagccctctgaggagaaggagaacggccacgccaagcccggaagggatgaagacggcgacaaccgatctccccggcgcgacagggtttcagacggggaggaaggtggcgaacgccggaggatgcgcgatagggtttccgacgatgagaaggaggaaggccgtcgtcgcaggcgggctagggatccggatgatgagccggacgaccgccgtggcaagcgagaccgggagaaagacagacggcgccaccggcgccggagccctagctcggagtcagggtcctcgcccgacggccgtcgccatcgccgccggcgccgagacgagggttcgaggcggcgggacgaccgtaggcaagggaggacgagggagacgagcgccgtagaagccctgtgaaggagctgaccccgccactgcctcccccaccgcccctccttccggagatgatccctgggcgcacgggtgggatctacatcccgcctttccgcatggcgcagatgatgcgtgatatggaggacaagtcgagccctgagtatcagcgcctcacctgggatgctctcaagaagagcatcaatgggctggtgaataaggtgaatgcgaccaatatcaagaatatagtgccagagctctttgcagagaaccttgttcgtgggcgggggctcttctgtcagtcttgcatcaagtcacagatggcctcgcctgggtttactgatgtatttgctgcgctagttgcggttgtgaataccaagttccctgagattgggaagttgcttcttgttcgtgtcgtgctccagctcaagagggcatataagcgaaatgacaagccccaattgcttgcagcaaccaaattcattgcacacttggtaaatcaggtggtggcacatgaactcgtggcgctggagcttcttactgtactcctggaaaatccgactgacgatagcgtcgaggtggctgtgggttttgtcaaagagtgtggggcaatgctgcaggacttgtctcctcaagggcttcatgctatttttgaaagatttcgaggcattcttcatgaaggagaaatagacaagcgagtgcaatttttgattgaaggcctttttgcaattagaaaggctaaattccagggtttcccagccatccgtccagagttggatctagtggagcaggatgaccagtttacacatgagatatcccttgaagatcacctagaccctgagaccaatctaaatgttttccaggcaaaccccaattttgttgaagatgagaaggcatatgagaatctaaagagaagcatcctgggagcagagtcttctgaagatgaagaaggatcagatgctgcttctgatgatgatgatgaagaagaagaagaatctgatgaagaggatgaggaacaaatggagataagggatagaacagagacaaatcttgtgaatcttagaagaacaatatatttgactattatgtctagtgttgattttgaagaagctggacacaagcttatgaaaattaagcttgagcctggtcaagagatggagctgtgcattatgcttcttgagtgttgcagtcaggagagaacatatcttcgttattatgggctgctaggacagcgtttttgcatgatcaataaagtgtaccaagagaacttcgaaaaatgctttgtgcaacaatattcgatgattcatcgtcttgaaacaaacaagttgaggaatgttgccaagttctttgcacatttgttggggactgatgctctcccttggcatgttttggcttatatcaggttgacagaggaagacacaacatcatcttctcgtattttcataaaaatattgttccaagaattatcggagcacctgggcatacgcctactcaatgagaggctgaatgatcctaacatgcaaggttcctttgagtctatcttcccaaaggatcatccgaagaatacaaggttctcgatcaacttcttcacgtccattggtcttggtggtatcacggaaagcctgagggagtacttgaagaacatgccacgtctaataatgcagcagcagaagccagaatcatcagagtcagattcaagtggatcagaatctggttcggaaagctctagttcaggttccagttctgagtctgagtcagaatcaagccctgataagcgtgacagaaggcgaagtaataagaggaagaggacttgagagcacttccaactatgccttttggaattcatgtatttggttttgtttaaatgtgcttcttcagtatacatgtgcagtatgtgatctagctcttgatgtgttagtggtaatcagaaagccgtaacagtaagatactatccgaacttgtacgtggcaggttggtagtccagcaacaaagggccaacagagatcttctttatttttcataacttccaatgcagaacaagttctgtacgtgggtatttgtaccattgcgacatcacactgctagccatgttctgtatcctgtagtgtggtaactggtaagcatcaaatatggacatcggttttgatttt

SEQ ID NO: 33406 - protein, 579 aa, Zea mays subsp. mays
MIPGRTGGIYIPPFRMAQMMRDMEDKSSPEYQRLTWDALKKSINGLVNKVNATNIKNIVPELFAENLVRGRGLFCQSCIKSQMASPGFTDVFAALVAVVNTKFPEIGKLLLVRVVLQLKRAYKRNDKPQLLAATKFIAHLVNQVVAHELVALELLTVLLENPTDDSVEVAVGFVKECGAMLQDLSPQGLHAIFERFRGILHEGEIDKRVQFLIEGLFAIRKAKFQGFPAIRPELDLVEQDDQFTHEISLEDHLDPETNLNVFQANPNFVEDEKAYENLKRSILGAESSEDEEGSDAASDDDDEEEEESDEEDEEQMEIRDRTETNLVNLRRTIYLTIMSSVDFEEAGHKLMKIKLEPGQEMELCIMLLECCSQERTYLRYYGLLGQRFCMINKVYQENFEKCFVQQYSMIHRLETNKLRNVAKFFAHLLGTDALPWHVLAYIRLTEEDTTSSSRIFIKILFQELSEHLGIRLLNERLNDPNMQGSFESIFPKDHPKNTRFSINFFTSIGLGGITESLREYLKNMPRLIMQQQKPESSESDSSGSESGSESSSSGSSSESESESSPDKRDRRRSNKRKRT

SEQ ID NO: 33407 - protein, 564 aa, Zea mays subsp. mays
MAQMMRDMEDKSSPEYQRLTWDALKKSINGLVNKVNATNIKNIVPELFAENLVRGRGLFCQSCIKSQMASPGFTDVFAALVAVVNTKFPEIGKLLLVRVVLQLKRAYKRNDKPQLLAATKFIAHLVNQVVAHELVALELLTVLLENPTDDSVEVAVGFVKECGAMLQDLSPQGLHAIFERFRGILHEGEIDKRVQFLIEGLFAIRKAKFQGFPAIRPELDLVEQDDQFTHEISLEDHLDPETNLNVFQANPNFVEDEKAYENLKRSILGAESSEDEEGSDAASDDDDEEEEESDEEDEEQMEIRDRTETNLVNLRRTIYLTIMSSVDFEEAGHKLMKIKLEPGQEMELCIMLLECCSQERTYLRYYGLLGQRFCMINKVYQENFEKCFVQQYSMIHRLETNKLRNVAKFFAHLLGTDALPWHVLAYIRLTEEDTTSSSRIFIKILFQELSEHLGIRLLNERLNDPNMQGSFESIFPKDHPKNTRFSINFFTSIGLGGITESLREYLKNMPRLIMQQQKPESSESDSSGSESGSESSSSGSSSESESESSPDKRDRRRSNKRKRT

SEQ ID NO: 33408 - protein, 561 aa, Zea mays subsp. mays
MMRDMEDKSSPEYQRLTWDALKKSINGLVNKVNATNIKNIVPELFAENLVRGRGLFCQSCIKSQMASPGFTDVFAALVAVVNTKFPEIGKLLLVRVVLQLKRAYKRNDKPQLLAATKFIAHLVNQVVAHELVALELLTVLLENPTDDSVEVAVGFVKECGAMLQDLSPQGLHAIFERFRGILHEGEIDKRVQFLIEGLFAIRKAKFQGFPAIRPELDLVEQDDQFTHEISLEDHLDPETNLNVFQANPNFVEDEKAYENLKRSILGAESSEDEEGSDAASDDDDEEEEESDEEDEEQMEIRDRTETNLVNLRRTIYLTIMSSVDFEEAGHKLMKIKLEPGQEMELCIMLLECCSQERTYLRYYGLLGQRFCMINKVYQENFEKCFVQQYSMIHRLETNKLRNVAKFFAHLLGTDALPWHVLAYIRLTEEDTTSSSRIFIKILFQELSEHLGIRLLNERLNDPNMQGSFESIFPKDHPKNTRFSINFFTSIGLGGITESLREYLKNMPRLIMQQQKPESSESDSSGSESGSESSSSGSSSESESESSPDKRDRRRSNKRKRT

SEQ ID NO: 33409 - DNA, 1346 bp, Zea mays subsp. mays
gcacgagaccattacctagaacatcctaatcgaaaaatcccagcagcaggtagcagcagcgcatgactttgtatctgcaactcgtttcgactagcctgcacgccgggagccctcgtctcgcccttctccacctccgaaggtagggtacctgatacttccctgccccgcgcatcgcatccgcggttttagtttgctggcctcggttccgatcgattcctatcctccctccgggcgggcgtccaccgacttcatcatccactcgccggccgaaccgatttgtttcgtttgccgttcgatccgcagatcctgcgagttcaacccgcgagtgagcatgtcgtcctactccccgccgccgccgccgccgcgggaccagtccatggacaccgaggcacccaacgcgcccatcaccagggagcggaggctcaaccccgatctgcaggagcagctccccaagccatatctcgcgagagctctcgaggcggtggacccgagccacccgcaggggaccaaggggcgcgacccccgcggcatgagcgtgcttcagcagcacgccgccttcttcgaccgcaatggcgacggcgtcatctacccctgggagacgtttcaaggactgcgagcgataggatgtggactcactgtatcattcgcgttctccatactgatcaacctcttcctcagttatcccactcagccgggatggttaccttctcctttgctgtccatccgtatagacaacatccacaagggtaagcacgggagtgattctgaaacctacgacactgaagggaggtttgatccatcaaagttcgatgctatattcagtaagtacggtcgaacccatcctaatgctataacaagagacgagttaagctcaatgcttcaaggaaaccgcaatacgtacgatttccttggctggttggccgctgccggtgaatggctcttactctacagcttggcgaaagacaaggatggcctcttgcagcgcgaaactgtccgtggtctatttgatgggagcctatttgagcgactggaagacgacaacaacaagaagaaatcgtcatgaatgctgagcagccttgtacagctcagggaagtgctgtcagtacaaaactaccagatataccattggtcgtgttcaaataacaaatgcttcggctttgttcatccgtcattaactatgagtgctgggatttgtttgtatgtgtgtcgtgctaccagtttcttctcctgtcgtctcacacaggtactgaattacgcatgtgttttctagtgttcgtgcggaagctgtattataagctgaaaaatgtgcgtttgaaatttatgggcaaaactgtcttcttggtctt

SEQ ID NO: 33410 - protein, 243 aa, Zea mays subsp. mays
MSSYSPPPPPPRDQSMDTEAPNAPITRERRLNPDLQEQLPKPYLARALEAVDPSHPQGTKGRDPRGMSVLQQHAAFFDRNGDGVIYPWETFQGLRAIGCGLTVSFAFSILINLFLSYPTQPGWLPSPLLSIRIDNIHKGKHGSDSETYDTEGRFDPSKFDAIFSKYGRTHPNAITRDELSSMLQGNRNTYDFLGWLAAAGEWLLLYSLAKDKDGLLQRETVRGLFDGSLFERLEDDNNKKKSS

SEQ ID NO: 33411 - protein, 228 aa, Zea mays subsp. mays
MDTEAPNAPITRERRLNPDLQEQLPKPYLARALEAVDPSHPQGTKGRDPRGMSVLQQHAAFFDRNGDGVIYPWETFQGLRAIGCGLTVSFAFSILINLFLSYPTQPGWLPSPLLSIRIDNIHKGKHGSDSETYDTEGRFDPSKFDAIFSKYGRTHPNAITRDELSSMLQGNRNTYDFLGWLAAAGEWLLLYSLAKDKDGLLQRETVRGLFDGSLFERLEDDNNKKKSS

SEQ ID NO: 33412 - protein, 177 aa, Zea mays subsp. mays
MSVLQQHAAFFDRNGDGVIYPWETFQGLRAIGCGLTVSFAFSILINLFLSYPTQPGWLPSPLLSIRIDNIHKGKHGSDSETYDTEGRFDPSKFDAIFSKYGRTHPNAITRDELSSMLQGNRNTYDFLGWLAAAGEWLLLYSLAKDKDGLLQRETVRGLFDGSLFERLEDDNNKKKSS

SEQ ID NO: 33413 - DNA, 1127 bp, Zea mays subsp. mays
agaccattacctagaacatcctaatcgaaaaagccacaacacatcccacaaccattattcttgttccactgcatcaggtcgtccaactctccaagcggcaagcgccatgccttcttccgcgcaggttctgctctgcctcgccgccgtgctcgcggcggcggcggccaccaccgccgaggcgcactcgcagtgcctggacaacccgccagaccggtccatccacggccgccagctggccgaggccggcgaggtcgtccacgacctccccggtggcctcagggcctacgtcagcggcgccgcgagctcgagccgcgccgtcgtcctcgcctccgacgtcttcgggtacgaggcgccattgctcagacagatagcagacaaggtcgccaaggcagggtacttcgtcgtcgtgcccgatttcttgaagggagactacttagacgacaagaaaaactttacggaatggctcgaggctcactctccggtgaaagctgcggaagacgctaagccactgttcgccgctttgaagaaggaagggaagtccgtcgcggtgggaggctactgctggggagggaagctgagcgtggaggtggggaagaccagcgacgtcaaagctgtgtgcctttcgcacccgtacagcgtcactgccgacgacatgaaagaggtgaaatggccgatcgagatcctgggggcccagaacgacacgaccacgccgccgaaagaagtgtaccggttcgtgcatgtgctgcgtgaaagacacgaggttccctactacgccaagatcttccagggagtcgagcacgggttcgcctgcaggtacaacaccaccgaccctttcgccgtcaagaccgcagagacggccctcgcctacatggtcagctggttcaacaagcacctcaactgaatgaagcctgcactgcacgcaccagactgaattgaataaaccacagcagtgctgtgatattttgtttcgattcatggctccccagattgatttgtcatggctaagacctctactactgtaatttcccccatttttttgtctcttcaaactctctgtatttctttttttttgctttttttatgatcgcaataaagttcagtaggggtatacccctcctatttgcttc

SEQ ID NO: 33414 - protein, 299 aa, Zea mays subsp. mays
DHYLEHPNRKSHNTSHNHYSCSTASGRPTLQAASAMPSSAQVLLCLAAVLAAAAATTAEAHSQCLDNPPDRSIHGRQLAEAGEVVHDLPGGLRAYVSGAASSSRAVVLASDVFGYEAPLLRQIADKVAKAGYFVVVPDFLKGDYLDDKKNFTEWLEAHSPVKAAEDAKPLFAALKKEGKSVAVGGYCWGGKLSVEVGKTSDVKAVCLSHPYSVTADDMKEVKWPIEILGAQNDTTTPPKEVYRFVHVLRERHEVPYYAKIFQGVEHGFACRYNTTDPFAVKTAETALAYMVSWFNKHLN

SEQ ID NO: 33415 - protein, 264 aa, Zea mays subsp. mays
MPSSAQVLLCLAAVLAAAAATTAEAHSQCLDNPPDRSIHGRQLAEAGEVVHDLPGGLRAYVSGAASSSRAVVLASDVFGYEAPLLRQIADKVAKAGYFVVVPDFLKGDYLDDKKNFTEWLEAHSPVKAAEDAKPLFAALKKEGKSVAVGGYCWGGKLSVEVGKTSDVKAVCLSHPYSVTADDMKEVKWPIEILGAQNDTTTPPKEVYRFVHVLRERHEVPYYAKIFQGVEHGFACRYNTTDPFAVKTAETALAYMVSWFNKHLN

SEQ ID NO: 33416 - DNA, 1537 bp, Zea mays subsp. mays
ggggcggagaacgcgagtaagcactaccctcctcaactcctaccctccgccgtaaaccccgctgttctttgccggagcaccccctccccgtctccagccccagtctcggtccccccggacttcgatatcttcggagaccgcctgcatgctcaaatcgtagacactctgggtaggcgcagggtggagatccgtccgggctcggatcaatttcttcgttcgctggtactcaggctctaatatttttacaaaatcgatggaaagttctaaatctcctcagtcatcaaaaaacagtcggattgtggtgccttctgatagcaatcgctcccgatttgacaatgacggtttttcttcagaaactgcatcaaatcaaatggttgtgttcaactctgaagcagcagatgaactgggagaaaaccgtttgcagaagtcagtgataacaaaggggatatcaccatctattggagcattcactgtccaatgtgctaaatgttttaaatggaggcttattccaacaaaagagaaatacgaagaaattcgtgaacgtattatacaggaaccttttgtatgcaaaagagctcgtgaatggagacctgatataacatgcaatgacccagaagatatatctcaggacggtagcaggctttgggctattgacaaacccaatattgcacaaccccctcatggatgggaaaggcagattaggataagaggtgaagggggtaccaaatttgctgatgtatactatacctctcctactggaaggaaacttaggtctctggttgaagtcgataggttcctccaagagaatccagagcatgttgcacagggtgtaactttagctcagttttcgttccagatacctagacctttgcggcaggactatgtcaaaaagaaaccaaagttgataaatgcaagtgatgaagcaagtacaattacctctaagtcttctgaaccagaagaagtgaaccctatagcctgggcagttcctacaaaacatgagggtgatgccagtgaagaagcttctttcgccgatgagacacttgcatcagaagtagtgctaacccggaagaggaaaataggaagctctttgtcagtagagccaaaccatctctctgatgaacttgaaccaaagttggaggatgcttagaacggggagacttctaactgaaaagtaaaagtgggcagcgtcgtgatgccaacttacccccctgccatggttttattggtcctctgcttgtttctcgttttccttgggagtcagcttctctgttttatgtggtcgcacacggccttatttgtagtattacaccacagaagctggctgacccaaaaaccgacattttgggggcagctacttaacgaaatgtttgcacgagagtttagagccctatggaacttgtttggataaatatgtttattacgttgtagtacttagctaggaacctgcttatgtaagatgatctttctttatgtaagattaagaactgtcagcggcctagttctgctgcaccacggatctaatctcatgttctttgtt

SEQ ID NO: 33417 - protein, 297 aa, Zea mays subsp. mays
MESSKSPQSSKNSRIVVPSDSNRSRFDNDGFSSETASNQMVVFNSEAADELGENRLQKSVITKGISPSIGAFTVQCAKCFKWRLIPTKEKYEEIRERIIQEPFVCKRAREWRPDITCNDPEDISQDGSRLWAIDKPNIAQPPHGWERQIRIRGEGGTKFADVYYTSPTGRKLRSLVEVDRFLQENPEHVAQGVTLAQFSFQIPRPLRQDYVKKKPKLINASDEASTITSKSSEPEEVNPIAWAVPTKHEGDASEEASFADETLASEVVLTRKRKIGSSLSVEPNHLSDELEPKLEDA

SEQ ID NO: 33418 - protein, 258 aa, Zea mays subsp. mays
MVVFNSEAADELGENRLQKSVITKGISPSIGAFTVQCAKCFKWRLIPTKEKYEEIRERIIQEPFVCKRAREWRPDITCNDPEDISQDGSRLWAIDKPNIAQPPHGWERQIRIRGEGGTKFADVYYTSPTGRKLRSLVEVDRFLQENPEHVAQGVTLAQFSFQIPRPLRQDYVKKKPKLINASDEASTITSKSSEPEEVNPIAWAVPTKHEGDASEEASFADETLASEVVLTRKRKIGSSLSVEPNHLSDELEPKLEDA

SEQ ID NO: 33419 - DNA, 1865 bp, Zea mays subsp. mays
taatcgaaaaacacacgcgggcgcgctagctagtgagagtcggagatgtcgtcgccgcggccacacttcctcgtgctcaccttccctttccagggccacatcgccccggctctccgcctcgccaggcagctgctcgcggcggcgcccgacgcgctcgtgaccttctccaccaccgaggtcgcgcacaggcgcatgttcccggcaaagcccaacgacggcgccaaggactccgacgaagacggccgcctcgagttcctcccgttctccgacggcacggaggccgggtacgtccggagcgccgacctgggctcgttcaacgcctacatgacgtctttccacgccgcgggggcgcgcagcgccgcggagatcgtggacgcgctcgcggcgcggggccgccccgtgtcccgcgtcgtgtacacgctgctcctcccgtgggcggccgacgtcgcgcgggaccgcgggatcccgtccgcgctctactggatccagccggtctccgtgttcgccatctaccaccactacttccacggccacgccggcgtcgtcgccgaccaccttcacgacccgtcgttcgtcgtggagatgccgggcctggcgccacagccggtcggcgacctgccgtccttcctcaccgactccaccgacccttccaatatgttccacagcgtcttcaccacgatccgagacctgatcgaaacgcttgacaaggaaagccccaggtccactgtcctcgtcaacacgtgccgagagctcgaggtgggcgcgctcgccgccgtgggggcgcaccacgacgtgctccccgtcggcccggtgctcccatccggcggcgacgccggcatcttcaagcaggacgacgacgccaagtacatggagtggctcgacgccaaaccggcgaattccgtggtgtacgtctccttcggcagtctgaccacggtggcgagagaacatctcgaggagctgctccggggccttgaggagagcggcaggccgtacctctgcgtcatccggaaggacaacaaggctgcactcgcggatgccgagacgaaggtagacgaggagctcaagaacggcatcgtagtggagtggtgcgaccaggtgcgggtgctgtcgcacgcggcggtcgggtgcttcgtgacgcactgtggctggaactcggtgctggagagcctggcggcgggggtgcccatggtgtgcgtgccccggatgtcggaccagcgcaccaacgctcaacttgtcgtgcgcgagtggcgcgtcggcgtgcgcgcgcaggtggacgatggtggcgtgctgcgagcggcggaggtgcggcggtgcatcgacgaggcgatggggaatttggaggccgccgcggaggtgcgacgcatggcggcggagtggaagcaggtagtgacaaaggccatgggaaaaggagggtcgtcggatcgtaatctcatgacgttcgtggatggcgcgaggaacgccgtttgaagattggcatgtgtttctttctttcttcacgttcggttacaccaatccagaaaaagattagcttgttcggttacattaatccaaaagagaattgggggagaattggttacatcaatcaaccaatcctattatgaattggtgtaaccgaacaaaccataagtggtcaaaggcggatggcttccggccattgacgtacggggccagacaaccgctggctccacgcgttattgactggtccacaactacttttctagaagttacggtataggatccagttgtgttaactgtggacattatgttgtcagtagctgttaagcttttcaacgtctgcttgactggacgactgctcccgataaactaggttatcttatattcatacagaactaaatcttagacct

SEQ ID NO: 33420 - protein, 473 aa, Zea mays subsp. mays
MSSPRPHFLVLTFPFQGHIAPALRLARQLLAAAPDALVTFSTTEVAHRRMFPAKPNDGAKDSDEDGRLEFLPFSDGTEAGYVRSADLGSFNAYMTSFHAAGARSAAEIVDALAARGRPVSRVVYTLLLPWAADVARDRGIPSALYWIQPVSVFAIYHHYFHGHAGVVADHLHDPSFVVEMPGLAPQPVGDLPSFLTDSTDPSNMFHSVFTTIRDLIETLDKESPRSTVLVNTCRELEVGALAAVGAHHDVLPVGPVLPSGGDAGIFKQDDDAKYMEWLDAKPANSVVYVSFGSLTTVAREHLEELLRGLEESGRPYLCVIRKDNKAALADAETKVDEELKNGIVVEWCDQVRVLSHAAVGCFVTHCGWNSVLESLAAGVPMVCVPRMSDQRTNAQLVVREWRVGVRAQVDDGGVLRAAEVRRCIDEAMGNLEAAAEVRRMAAEWKQVVTKAMGKGGSSDRNLMTFVDGARNAV

SEQ ID NO: 33421 - protein, 424 aa, Zea mays subsp. mays
MFPAKPNDGAKDSDEDGRLEFLPFSDGTEAGYVRSADLGSFNAYMTSFHAAGARSAAEIVDALAARGRPVSRVVYTLLLPWAADVARDRGIPSALYWIQPVSVFAIYHHYFHGHAGVVADHLHDPSFVVEMPGLAPQPVGDLPSFLTDSTDPSNMFHSVFTTIRDLIETLDKESPRSTVLVNTCRELEVGALAAVGAHHDVLPVGPVLPSGGDAGIFKQDDDAKYMEWLDAKPANSVVYVSFGSLTTVAREHLEELLRGLEESGRPYLCVIRKDNKAALADAETKVDEELKNGIVVEWCDQVRVLSHAAVGCFVTHCGWNSVLESLAAGVPMVCVPRMSDQRTNAQLVVREWRVGVRAQVDDGGVLRAAEVRRCIDEAMGNLEAAAEVRRMAAEWKQVVTKAMGKGGSSDRNLMTFVDGARNAV

SEQ ID NO: 33422 - protein, 380 aa, Zea mays subsp. mays
MTSFHAAGARSAAEIVDALAARGRPVSRVVYTLLLPWAADVARDRGIPSALYWIQPVSVFAIYHHYFHGHAGVVADHLHDPSFVVEMPGLAPQPVGDLPSFLTDSTDPSNMFHSVFTTIRDLIETLDKESPRSTVLVNTCRELEVGALAAVGAHHDVLPVGPVLPSGGDAGIFKQDDDAKYMEWLDAKPANSVVYVSFGSLTTVAREHLEELLRGLEESGRPYLCVIRKDNKAALADAETKVDEELKNGIVVEWCDQVRVLSHAAVGCFVTHCGWNSVLESLAAGVPMVCVPRMSDQRTNAQLVVREWRVGVRAQVDDGGVLRAAEVRRCIDEAMGNLEAAAEVRRMAAEWKQVVTKAMGKGGSSDRNLMTFVDGARNAV

SEQ ID NO: 33423 - DNA, 932 bp, Zea mays subsp. mays
tagaacatcctaatcgaaaaaagtcaaacgtccccagcctcctaaaatttcccctttccccaactaacacgacacccccttcccttcctccgatccccccgcctcccccaaaatccgacgcgtaatcgccgccatggccgccgccggcaagctcctcctcctggtcgccgccgtcctggcggcttccctcgtcgccgacgcgcgcccgtgcggccacgcgcagacgctcctcgtctccttctcctccgtcctcaggccgaacccggaccccaccaacccgacgccgctcaccaccacagtcgtcaccgtcctccgcgtccgccgcctcggcccgcaccagatccgccgccccgtggcgctccccgccgtcgagtcggaggtcgccgcctcgtccgcccaggaccgcgccaaggacatcctcgtcgtcgtctccggcctcctcttcggcttcggctgcggcgccctcaccgccgcgtccatgtacctcgtatggtcgctcctcgcctccacctgcgcctccggatacgacgacgacgtctacagcgacgacgaggaccggctgtccgactccgagagccccaagaaggccggctacgtcatcatccacgacgctgacgagtacggcgccggtaagaactagggctggggatccgtcttcggtctcgccggggggtcagcagaaggattttcgtaataacatttgcatgattgcttggaattgtgcagtatactctatgcacctttttaatcatgtgtgtcgcgtctgtcggtatgtatgtcgtctgggggaaaggaaatttaagttatatgaaatgaatatgctgttgatgtgtcaaattcaaatgatgcttgccctgctaccgcaaaacaacaacatggatcttattggctgccacgatatacaaaaaaacaaaatcatggtgttcttcctg

SEQ ID NO: 33424 - protein, 168 aa, Zea mays subsp. mays
MAAAGKLLLLVAAVLAASLVADARPCGHAQTLLVSFSSVLRPNPDPTNPTPLTTTVVTVLRVRRLGPHQIRRPVALPAVESEVAASSAQDRAKDILVVVSGLLFGFGCGALTAASMYLVWSLLASTCASGYDDDVYSDDEDRLSDSESPKKAGYVIIHDADEYGAGKN

SEQ ID NO: 33425 - DNA, 862 bp, Zea mays subsp. mays
aactgctgccaaaacaactatgcgcgtccagcgtctgctgaggctgaggatggcgtcccgctcgtgctcccgctgcgctgccttggcgccgcacgctgcgctcccgctctcctctctcctcgccccctcgccctctgccgcgcgccctcgatccgcgcccctctcgtgcgcagctcggccgtgcaggggccacgcggcggcgtcagcgttgcacggcgcggcagggcggaggcccccgagcgtggcggcgatgtcgtcgtcgacgccgccgccgggatccgtgcagaagtcggaagaggagtgggaggccatcctcacgccggagcagttcaacatcctacgcctcaagggcaccgagtaccctggaacgggtgagtacgacaagttctttgaggagggcatttataaatgtgctggatgtggaactcccttatacaaatcatcgacaaagttcaactcagggtgtggctggccggcattctatgaaggacttcctggggccataaggcagacgtcggaccctgatgggaggcggacagagatcacatgtactgcttgtggaggacacttggggcacatattcaaaggggaggggtttaagacgcctaccaacgagcgacactgtgttaacagcatctcgcttaagttcaatccgtcccccgaggaagcctgacggcagatgaactcccaatctgtaactcaacaacagaataaatttggactttgtttgttgctttcacattgtgtagagagctatgagatcgagtttgtcattcctcggatcatttcgaatatgatgtaaaaaatccaatcacaagtgctggtctttgttgataaatcaatgtacctcagttttagatgg

SEQ ID NO: 33426 - protein, 223 aa, Zea mays subsp. mays
TAAKTTMRVQRLLRLRMASRSCSRCAALAPHAALPLSSLLAPSPSAARPRSAPLSCAARPCRGHAAASALHGAAGRRPPSVAAMSSSTPPPGSVQKSEEEWEAILTPEQFNILRLKGTEYPGTGEYDKFFEEGIYKCAGCGTPLYKSSTKFNSGCGWPAFYEGLPGAIRQTSDPDGRRTEITCTACGGHLGHIFKGEGFKTPTNERHCVNSISLKFNPSPEEA

SEQ ID NO: 33427 - protein, 217 aa, Zea mays subsp. mays
MRVQRLLRLRMASRSCSRCAALAPHAALPLSSLLAPSPSAARPRSAPLSCAARPCRGHAAASALHGAAGRRPPSVAAMSSSTPPPGSVQKSEEEWEAILTPEQFNILRLKGTEYPGTGEYDKFFEEGIYKCAGCGTPLYKSSTKFNSGCGWPAFYEGLPGAIRQTSDPDGRRTEITCTACGGHLGHIFKGEGFKTPTNERHCVNSISLKFNPSPEEA

SEQ ID NO: 33428 - protein, 207 aa, Zea mays subsp. mays
MASRSCSRCAALAPHAALPLSSLLAPSPSAARPRSAPLSCAARPCRGHAAASALHGAAGRRPPSVAAMSSSTPPPGSVQKSEEEWEAILTPEQFNILRLKGTEYPGTGEYDKFFEEGIYKCAGCGTPLYKSSTKFNSGCGWPAFYEGLPGAIRQTSDPDGRRTEITCTACGGHLGHIFKGEGFKTPTNERHCVNSISLKFNPSPEEA

SEQ ID NO: 33429 - DNA, 1314 bp, Zea mays subsp. mays
aaatcccctggccctctccttggcttttcctctcgctctcctcctctctcgcatcccaccgcatcacaaccacgacttcctcccgccgccggttggcttcgctgctcgtccacctccgcccggcccgtgggacgagtggggactggagagggtcgcctctgggcttcgcctctcggcggccgagtgtctgcgtcgtccacggagctgagactgagactgagactgagagcgaccggcggcggcgatggcgagggagaggcgggagataaagaggatagagagcgcggcagcgaggcaggtcacgttctccaagcgccgccgcggcctcttcaagaaggcccaggagctctccgtgctgtgcgatgccgacgtcgcgctcatcgtcttctcctccacggggaagctctcccagttcgccagctccagtatgaatgagataattgacaagtacaacacgcattctaaaaacctggggaaaacagaacagccttcgctggacttgaacttagagcatagcaaatatgcaaatttgaatgagcaacttgcggaagcaagccttcgactcaggcagatgagaggtgaagaacttgagggattgaatgttgaagaactccagcagttggagaagaacctggaatctggtctgcatagggtgcttcaaacaaaggattctcaattcttggaacagatcaatgacctcgagcgtaagagtacgcagctggcagaggagaacatgcaactgagaaatcaagtatcccagatacccccagctggcaagcaagcagttgctgatactgaaaatgttattgctgaagaagggcaatcctctgaatcagtgatgactgcgttgcactctgggagttcacaggataatgatggtggttcggatgtatctctaaagttagggctgccttgcgttgcatggaagtaaacaggaaatgaggctccttgtcgattctgggtgtggatgtgggtgtgggtggagctgcggcctcagcggataggcacttgtgtatggttttatggacgaccggcccccgactacgtactgcaataatcttgcattggaagcgagatcggttaacctgatttgtcatccttgtggcttcatgatgcgatgttccgcttgtaccgtttgctagcatgttaactgaatttttagaatcgcatatacttttgttcttatatatcactgtcgtactgctcgtaagatgtatctactttattctatccaatgttgtaacctatcacctaccaacttccctactgttttggcgcgccgcaagctttgctcaagcatgcttcatgtttgtt

SEQ ID NO: 33430 - protein, 228 aa, Zea mays subsp. mays
MARERREIKRIESAAARQVTFSKRRRGLFKKAQELSVLCDADVALIVFSSTGKLSQFASSSMNEIIDKYNTHSKNLGKTEQPSLDLNLEHSKYANLNEQLAEASLRLRQMRGEELEGLNVEELQQLEKNLESGLHRVLQTKDSQFLEQINDLERKSTQLAEENMQLRNQVSQIPPAGKQAVADTENVIAEEGQSSESVMTALHSGSSQDNDGGSDVSLKLGLPCVAWK

SEQ ID NO: 33431 - protein, 167 aa, Zea mays subsp. mays
MNEIIDKYNTHSKNLGKTEQPSLDLNLEHSKYANLNEQLAEASLRLRQMRGEELEGLNVEELQQLEKNLESGLHRVLQTKDSQFLEQINDLERKSTQLAEENMQLRNQVSQIPPAGKQAVADTENVIAEEGQSSESVMTALHSGSSQDNDGGSDVSLKLGLPCVAWK

SEQ ID NO: 33432 - protein, 144 aa, Zea mays subsp. mays
KSPGPLLGFSSRSPPLSHPTASQPRLPPAAGWLRCSSTSARPVGRVGTGEGRLWASPLGGRVSASSTELRLRLRLRATGGGDGEGEAGDKEDRERGSEAGHVLQAPPRPLQEGPGALRAVRCRRRAHRLLLHGEALPVRQLQYE

SEQ ID NO: 33433 - DNA, 1900 bp, Zea mays subsp. mays
aacttcacataacggctgtgtcctgttcctgtagctgctctcttttatggttgatggttacgacctgaacagatcgatcgtccttcctgtcgtttcgttttctcgccggcagggcactgggtacgccgccgccgcctcaacgccaccacgctgccgccgcgccagttcgtcaccgcgagacacaagacacgtgcctcgcttccctcgggccggttggccgtggccggccgtcgctgttctgttcctatttcttggcaactccgcccgtttcacctccggaggaccgacagcgacggcgccagtagatagatgcactactgacgccactggccacctcgagttcgagtgccaagggacgccacgagaccaaccgtgaggacaggacaacggtcgcctttgcccgcggatccgcggatttcgtcttcttgggtgccatggatccagtcgccggcacggcggagcatcggggcccgttggaagtgcgcgcccgcgcgcccggcaagatcatcctcgcgggcgagcacgccgtcgtccacggctccgccgccgtcgccgctgccatcgatctctacaccaactcctccctcctcctccgccccgcaggcccaggagatggtggcggcgctggctccggcgcggtggagctggacctcagggactcgggcctcaccttctcgtggccgtgctcgcgcctccgcggggcgctgggggaggagatcagcgccaaccccggggctccggcgccgtgctcccctgaccagctggccgccattgccaggctcttgcaggaccaggagatccctgaggccaagatctggctctccgccggcctctccgccttccttttcctctacgcctccattttgggatgcaggcctggcaaggcagtggtgtcctcggacctgcccatgggcgcagggctcggctcatcagcggcattttgtgtctccatgtcgggggcgctattgactgctgctggtgcagtaagtgttggagcatgcatgggtgctgagggttgggaggtgttggagaagggtgctcttgagctggtcaaccaatgggcgttccaaggggaaaagattattcatggcaagccttctggcattgacaattccgtcagcacttttgggaaaatgatcaaattcaagaagggggaactgacaaaccttgagtcctggaacccagtcaaaatgcttattactgatacaagagttggtaggaacacaaaggcattggttgctggtgtgtctgaaagggcgtctaggcatccagatgctatggcttctgtcttccatgcagtgaactctattagtgaagagctttcaagcattgtcgagttagcagccgaggatgagatagccatcacctctaaggaggataagctagcggagcttatggagatgaaccaaggtttgcttcagtgtatgggagtcagccattcttctatagaaactgtgttgcggaccactctgaaatatagcttggtctcaaagctaactggagctggtggtggaggctgtgtgttgactctaatacccgacgttatcggccaatactgttctggagaaagtcaccacagatctcgaatctcacggttatcgctgcttcaaagttgaggttggtgggcgaggtctccaagtattccgtgtataacactcatcctatttcaaggagatgttgtaccaaacttagatggcttacctgcactgaagctgtttagattctcttcttgagttattccaagatcatgataggatattcttctcctaagcctagcggctagcaggttctgtatccagtacttgagttgctccaggattaggacattcttatgctatccctagcgatcttgtatcaaataagctcatagatgcatgatcattgctggtgtgattgttgt

SEQ ID NO: 33434 - protein, 393 aa, Zea mays subsp. mays
MDPVAGTAEHRGPLEVRARAPGKIILAGEHAVVHGSAAVAAAIDLYTNSSLLLRPAGPGDGGGAGSGAVELDLRDSGLTFSWPCSRLRGALGEEISANPGAPAPCSPDQLAAIARLLQDQEIPEAKIWLSAGLSAFLFLYASILGCRPGKAVVSSDLPMGAGLGSSAAFCVSMSGALLTAAGAVSVGACMGAEGWEVLEKGALELVNQWAFQGEKIIHGKPSGIDNSVSTFGKMIKFKKGELTNLESWNPVKMLITDTRVGRNTKALVAGVSERASRHPDAMASVFHAVNSISEELSSIVELAAEDEIAITSKEDKLAELMEMNQGLLQCMGVSHSSIETVLRTTLKYSLVSKLTGAGGGGCVLTLIPDVIGQYCSGESHHRSRISRLSLLQS

SEQ ID NO: 33435 - protein, 235 aa, Zea mays subsp. mays
MGAGLGSSAAFCVSMSGALLTAAGAVSVGACMGAEGWEVLEKGALELVNQWAFQGEKIIHGKPSGIDNSVSTFGKMIKFKKGELTNLESWNPVKMLITDTRVGRNTKALVAGVSERASRHPDAMASVFHAVNSISEELSSIVELAAEDEIAITSKEDKLAELMEMNQGLLQCMGVSHSSIETVLRTTLKYSLVSKLTGAGGGGCVLTLIPDVIGQYCSGESHHRSRISRLSLLQS

SEQ ID NO: 33436 - protein, 221 aa, Zea mays subsp. mays
MSGALLTAAGAVSVGACMGAEGWEVLEKGALELVNQWAFQGEKIIHGKPSGIDNSVSTFGKMIKFKKGELTNLESWNPVKMLITDTRVGRNTKALVAGVSERASRHPDAMASVFHAVNSISEELSSIVELAAEDEIAITSKEDKLAELMEMNQGLLQCMGVSHSSIETVLRTTLKYSLVSKLTGAGGGGCVLTLIPDVIGQYCSGESHHRSRISRLSLLQS

SEQ ID NO: 33437 - DNA, 753 bp, Zea mays subsp. mays
tttccttgccgccagccagcccattaaccctcgttcctgtcgcgcagccacgacctccacttccacatctcccccggcgtcggtgcggtcaagttgaaccatggcggactccaaggccacctcggcggtcacttccgcacttggcaagttcatgaccaaccgcctgctggcccgcaaacaatttgtgcttgaggttatccaccccggccgcgccaacgtctccaaggcggagttgaaggagaggcttgccaagatgtacgaggtgaaggaccccaacaccatcttcgtcttcaagttccgcacccacttcggtggaggcaagtccactggcttcggcctcatctacgataacctcgagtctgccaagaagttcgagcccaaataccgcctcatcaggaatggtcttgctactaaggttgagaagtcccgcaagcaaatgaaagagcggaagaacagggccaagaagatccgtggtgtcaagaagaccaaggctggtgacgccaagaagaagtaaacagtcatttatatttctgtattactgtcctgaactctgggtggtcgtctagttgcaatgtcataattatggtcgtgttaggtttcgttccgcactcagcagtaagtgaagtttgtaatttcctggatgtgaacttacccggattggctgtagcatgttgtgagatgagaaggctattttgtcatgcagttgtgtcatttgcaagccaatccattttgtcatgcagttgtcatttgctc

SEQ ID NO: 33438 - protein, 137 aa, Zea mays subsp. mays
MADSKATSAVTSALGKFMTNRLLARKQFVLEVIHPGRANVSKAELKERLAKMYEVKDPNTIFVFKFRTHFGGGKSTGFGLIYDNLESAKKFEPKYRLIRNGLATKVEKSRKQMKERKNRAKKIRGVKKTKAGDAKKK

SEQ ID NO: 33439 - protein, 120 aa, Zea mays subsp. mays
MTNRLLARKQFVLEVIHPGRANVSKAELKERLAKMYEVKDPNTIFVFKFRTHFGGGKSTGFGLIYDNLESAKKFEPKYRLIRNGLATKVEKSRKQMKERKNRAKKIRGVKKTKAGDAKKK

SEQ ID NO: 33440 - protein, 86 aa, Zea mays subsp. mays
MYEVKDPNTIFVFKFRTHFGGGKSTGFGLIYDNLESAKKFEPKYRLIRNGLATKVEKSRKQMKERKNRAKKIRGVKKTKAGDAKKK

SEQ ID NO: 33441 - DNA, 1106 bp, Zea mays subsp. mays
aacggaggtgctttgagaaatattgagaaagagtatgaagatttcaacagaattttatcttctcagactatagacccattgagagcaatggctatgggtggacccctggaagatgctcgtggtcttgcacagcgctatagcaggatgagacatgaagctgagatcctctctactgaaattgctagaagaaaggcacgggtaagagaagctccaattgctgagcacactacaaagcttcagcaatcagaagctagaatgatagagcacaaagcaagcatggccgtgttagggaaggaagcagcagctgcacttgcagctgtcgagtctcaacagcaacgagtgacccttcagaggctggttggcacggcggaagcagaaaagttattccatctgagattagctgctatacttgatgacgttgaggcagagatgtcctctgagaagcaaaggagagaatctgcaccacctatcatatcttcacataagcgtgctgagaaagctcagtacttccttgctgaggtaatgcataatttcaatggaaccacggagaaggaactgagcttaattgttggcgattatgttgttgttcgtcagattgctcccaacggctgggcggaaggagaatgccgagggaaggctggctggtttccggctgcctatgttgagaggcgcgagaatatccccccgaataaagttttccctcaagtataagatcataagaggggtcatctgtttccactgataagcagtttggtttggcattgaggagctgcaaggctgtatctaacttctgattggtttgatgctccgtatggcgtatcttgtgcatcctatgttcttgtggtggtctagacttggaataagatatgtcggcacgtgctctgcgcctgtgcctgcgcgcacattgatgaagatgtcgctttgcatgtgtccgcagtgtgctactgcttgcggcagcgtaggtcatgttgaatgagctttcctttactgacagatttcgagtgtaaattggttcttgcacttttttttcgttagggtgtatcagtagttctgtacaatatgtttttaatgagaccattcggccatcagagctttgatctgtctcc

SEQ ID NO: 33442 - protein, 236 aa, Zea mays subsp. mays
NGGALRNIEKEYEDFNRILSSQTIDPLRAMAMGGPLEDARGLAQRYSRMRHEAEILSTEIARRKARVREAPIAEHTTKLQQSEARMIEHKASMAVLGKEAAAALAAVESQQQRVTLQRLVGTAEAEKLFHLRLAAILDDVEAEMSSEKQRRESAPPIISSHKRAEKAQYFLAEVMHNFNGTTEKELSLIVGDYVVVRQIAPNGWAEGECRGKAGWFPAAYVERRENIPPNKVFPQV

SEQ ID NO: 33443 - protein, 207 aa, Zea mays subsp. mays
MAMGGPLEDARGLAQRYSRMRHEAEILSTEIARRKARVREAPIAEHTTKLQQSEARMIEHKASMAVLGKEAAAALAAVESQQQRVTLQRLVGTAEAEKLFHLRLAAILDDVEAEMSSEKQRRESAPPIISSHKRAEKAQYFLAEVMHNFNGTTEKELSLIVGDYVVVRQIAPNGWAEGECRGKAGWFPAAYVERRENIPPNKVFPQV

SEQ ID NO: 33444 - protein, 205 aa, Zea mays subsp. mays
MGGPLEDARGLAQRYSRMRHEAEILSTEIARRKARVREAPIAEHTTKLQQSEARMIEHKASMAVLGKEAAAALAAVESQQQRVTLQRLVGTAEAEKLFHLRLAAILDDVEAEMSSEKQRRESAPPIISSHKRAEKAQYFLAEVMHNFNGTTEKELSLIVGDYVVVRQIAPNGWAEGECRGKAGWFPAAYVERRENIPPNKVFPQV

SEQ ID NO: 33445 - DNA, 2490 bp, Zea mays subsp. mays
gcacgagaccattacctagaacatcctaatcgaaaaaaccggagatggcgagctctggcggaatctccgaccagctcttcgtctccgtcaagttagagagcccgcacctcgcggagctcgacctcgccccccacctcttcggctcccaccctgtggctggctcgtgggacccctgcaaggccctgcctttggagcgggcggccaccgccgtgtgggagttcagctgcgtcgtgccttcgcagcacgaatcgctggatttcaagtttgttttgaagcgaaaaggtgataatcctcaatacattattgaggagggacctaaccgaccattgggttgccagagaaatgaatttgagatggggaatgcgttgtttaaactcaacgaagggaaggaggtacttgagtgcaaggttcaggttgagacagaaatgttatccccaattgacttggcggctagttggagagctcatcaggagtattttcagccttcaagggtgcgggggactcacgatgtcactatcaaccctgggttagaaggcagggccaagaatggcttcgcttctggtttggagcttgatttagacaagtatgtagttccaacaccaaacatgggctcaggtgttgtttatgcagctagtttgactgaaaatccacgctcattattgcaaactgggagttcctcaaacaatgataccacaaaggacattttgcacaactcaactaaaggcgattcatccttgaatcactatgttaacactatgaagagcacaattggagggcatgcatcgtcactggaagaacaaagggcaatgtttgttgatagaggggttggctcaccaaattttgcaagaccaacaatggaaaccttttcgatgagcaactttaagttggattctgaatcaaagggtatgccagcagcagaaggggctgttgcagcagctgctgtagctgatcagatgtatggaccaaaagaggaccgcaagttggccatcgtattggttggctaccagctcgaggtaagacctttacagcagctaaacttacaagatatctccgatggttaggtcatgaaacaaaacacttcaatgttggaaagtaccgccggctcaagcatggaactaatcagactgctgatttctttcgtggagataacagggagggtgtggaggcacgtaacgaggtggctgcattagcaatggaagatatgctatcttggatgcaggagggtggtcaggttggtattttcgatgccacaaacagcacaagaatacggaggaacatgctgatgaaaatggctgaaggaaaatgtaagatcatctttttggaaacattatgtaatgaccaagatgttcttgagagaaatatacgattgaaagttcaacaaagtcctgattatgcagagcaaacagattttgaagctggtgtacaagatttcaaagagcgattgacctattatgaaaaggtctatgaaccggtggaagaaggttcttacataaaaatgattgacatggttagtgggaaggggggccaactaaagattaatgacataagtggttacttgcctggacggatcgttttcttcttggttaactgtcatctgacacctcgtcctatcctgctaacaagacatggtgaaagtatggataatgtcagaggaagaatcggtggagactcttctttgagtgaggccggtgagctttattcaaggaagcttgcgagctttgtggagaagcgactgaaatccgagcggactgcctctatatggactagcacactccagagaacaatattaacagcacatccgatcattggttttccaaagatacaatggcgtgctcttgatgagatcaatgctggggtctgtgatgggatgacatacgatgaaataaagaaaagtaaacctgaagaatatgaatcacgaagaaaagacaagctgaggtatcgttatccgagaggagaatcctatcttgacgtcattcaaagactagaacctgtgataattgaacttgaacgacagcgtgctccagttgtagtcatagctcaccaggctgtgttgagagcactttatgcatactttgcggacaaaccgcttgaggaagtcccaaatattgagatacctctacatacaataattgagatacaaatgggtgttgctggtgttcaagagaaacggtacaaactcatggatgcaatccatcccacagcggggttgtaagaaataataaatggagctcgccttctaaaagcaatggtagcacaaataaattttgtgatgatatacgtatcacaacattaatcaattataagctatagttcgaggtggaatgtcacaccactaggtttagctcatagatgatttgccatttgacttacaagttttggctggttgtgtagtgtgtactcttaattcatgagttctgaacatgtttaattcagatccgagttctgagcaagtttattcaggccaaagctcgcgccaaagacagtttttcc

SEQ ID NO: 33446 - protein, 339 aa, Zea mays subsp. mays
MEDMLSWMQEGGQVGIFDATNSTRIRRNMLMKMAEGKCKIIFLETLCNDQDVLERNIRLKVQQSPDYAEQTDFEAGVQDFKERLTYYEKVYEPVEEGSYIKMIDMVSGKGGQLKINDISGYLPGRIVFFLVNCHLTPRPILLTRHGESMDNVRGRIGGDSSLSEAGELYSRKLASFVEKRLKSERTASIWTSTLQRTILTAHPIIGFPKIQWRALDEINAGVCDGMTYDEIKKSKPEEYESRRKDKLRYRYPRGESYLDVIQRLEPVIIELERQRAPVVVIAHQAVLRALYAYFADKPLEEVPNIEIPLHTIIEIQMGVAGVQEKRYKLMDAIHPTAGL

SEQ ID NO: 33447 - protein, 338 aa, Zea mays subsp. mays
MASSGGISDQLFVSVKLESPHLAELDLAPHLFGSHPVAGSWDPCKALPLERAATAVWEFSCVVPSQHESLDFKFVLKRKGDNPQYIIEEGPNRPLGCQRNEFEMGNALFKLNEGKEVLECKVQVETEMLSPIDLAASWRAHQEYFQPSRVRGTHDVTINPGLEGRAKNGFASGLELDLDKYVVPTPNMGSGVVYAASLTENPRSLLQTGSSSNNDTTKDILHNSTKGDSSLNHYVNTMKSTIGGHASSLEEQRAMFVDRGVGSPNFARPTMETFSMSNFKLDSESKGMPAAEGAVAAAAVADQMYGPKEDRKLAIVLVGYQLEVRPLQQLNLQDISDG

SEQ ID NO: 33448 - protein, 336 aa, Zea mays subsp. mays
MLSWMQEGGQVGIFDATNSTRIRRNMLMKMAEGKCKIIFLETLCNDQDVLERNIRLKVQQSPDYAEQTDFEAGVQDFKERLTYYEKVYEPVEEGSYIKMIDMVSGKGGQLKINDISGYLPGRIVFFLVNCHLTPRPILLTRHGESMDNVRGRIGGDSSLSEAGELYSRKLASFVEKRLKSERTASIWTSTLQRTILTAHPIIGFPKIQWRALDEINAGVCDGMTYDEIKKSKPEEYESRRKDKLRYRYPRGESYLDVIQRLEPVIIELERQRAPVVVIAHQAVLRALYAYFADKPLEEVPNIEIPLHTIIEIQMGVAGVQEKRYKLMDAIHPTAGL

SEQ ID NO: 33449 - DNA, 517 bp, Zea mays subsp. mays
  misc_feature (159)..(160): n is a, c, g, or t
aaacccaacaactccaaacccgaagcccccacggcgcaggcctaggtgtaggcggcgcggaccagggtcgggccgccggaggcgcgctacttggcggcggcgcaggggagatgtgcgaggggaggcggccagtggacgcgagccgggcggggtgggcgnnggcggcggagctgcggcggagagaggcggcggcgcgggcgcgcctggcggaggcgctggcggagctggagcgcgcgcgggcgcgcgccgccgagctgcagcggcgcatcgagcagacatacggcaagcgccggcgcctcctcgaggagacccgcggccggatccacgagatccacgcgcgcctccaccaggaccaggaccgggatcaggagcaggagcaggagccctccgccagcggcacttcctctccgtcctcgtcctcgtaggtgcgtgcggctctctatcgacaaactctgcctatcctgccgctttgctcagcacacgcttggaataggaatctggatgagcacttgctggc

SEQ ID NO: 33450 - protein, 163 aa, Zea mays subsp. mays
  misc_feature (53)..(53): Xaa can be any naturally occurring amino acid
NPTTPNPKPPRRRPRCRRRGPGSGRRRRATWRRRRGDVRGEAASGREPGGVGXGGGAAAERGGGAGAPGGGAGGAGARAGARRRAAAAHRADIRQAPAPPRGDPRPDPRDPRAPPPGPGPGSGAGAGALRQRHFLSVLVLVGACGSLSTNSAYPAALLSTRLE

SEQ ID NO: 33451 - protein, 140 aa, Zea mays subsp. mays
  misc_feature (53)..(53): Xaa can be any naturally occurring amino acid
TQQLQTRSPHGAGLGVGGADQGRAAGGALLGGGAGEMCEGRRPVDASRAGWAXAAELRRREAAARARLAEALAELERARARAAELQRRIEQTYGKRRRLLEETRGRIHEIHARLHQDQDRDQEQEQEPSASGTSSPSSSS

SEQ ID NO: 33452 - protein, 104 aa, Zea mays subsp. mays
  misc_feature (17)..(17): Xaa can be any naturally occurring amino acid
MCEGRRPVDASRAGWAXAAELRRREAAARARLAEALAELERARARAAELQRRIEQTYGKRRRLLEETRGRIHEIHARLHQDQDRDQEQEQEPSASGTSSPSSSS

SEQ ID NO: 33453 - DNA, 554 bp, Zea mays subsp. mays
acttcgattcgctcccacgcacacacacactcctgcggttgccactcgcgtagcagtagcaccagacagcagcgcgcacgcgacgtccgcaatggcggcgcgggcaaccgtcgtcctctgcgccgcgctcctcgtcctgctctccgccaccagctccctcgcgcagtcccccgcggccgcgccggctaaggcgccgcccaagtcctcctccaaggccacgccggccgccgcccccgcgcccaagtcctcctccaaggccagcccatcggcgccggccgccgcgccaaccaccccggcacccgcggcggcgccggccacgacaaagcccaaggcccccgcgcccgcgcccgccctgctcgcctagataagatccccggatgccaccatcacaggatttgatgaccttttcctgcttttactttttctttcggtattttgtggaaaaaaaggggttggctctgcctttcttctgcgtagtagagtagtagcagtagactagcagggcccatgtcacatcgattgattcacttgtgcggatgatttcttctgcttcc

SEQ ID NO: 33454 - protein, 120 aa, Zea mays subsp. mays
LRFAPTHTHTPAVATRVAVAPDSSAHATSAMAARATVVLCAALLVLLSATSSLAQSPAAAPAKAPPKSSSKATPAAAPAPKSSSKASPSAPAAAPTTPAPAAAPATTKPKAPAPAPALLA

SEQ ID NO: 33455 - protein, 90 aa, Zea mays subsp. mays
MAARATVVLCAALLVLLSATSSLAQSPAAAPAKAPPKSSSKATPAAAPAPKSSSKASPSAPAAAPTTPAPAAAPATTKPKAPAPAPALLA

SEQ ID NO: 33456 - protein, 62 aa, Zea mays subsp. mays
TSIRSHAHTHSCGCHSRSSSTRQQRARDVRNGGAGNRRPLRRAPRPALRHQLPRAVPRGRAG

SEQ ID NO: 33457 - DNA, 787 bp, Zea mays subsp. mays
tagaacatcctaatcgaaaacaacttactattgtggtccaagtggctctgaactggctccctctacatttgaagcttttgcaaaagttccaaatgttctgcgtccgcacacgcaaatcttttgcacaagtgaatgggttcttggcacaagagaagacctagtgaaggatatttgttgctgaattacggcctgatcttggtgaggagtggtggacatatgtttgcatgggtccttctgatccccaaccaaactggcaccttggggatgcgtggaacccagcaccgggcagtgatgtggagagtgtggaaggaaggtgggacaggatttctttattggggttccaactgctatgagaaggctatgatcccaagtgctgagatctgtttccgacgcggccttcctcctggcgacggtgtcctgttttaccctggtgaagtgttttcttcgtcacatgaaccagttgcttccacccggctagagcgcattctcagtggcatgcaggacatcgaatacctgaagctttattcttcacggtatgggagggaggaaggcctggcccttgtagagaagactggcatgtaccttggaccggatcgatatacgctggatcatggaccggtagatgtgatgaggggtgaggtgtaccgcacctgcaggtcttagtgtagcaatgcctgccagatgctgtccttccagactagggcctttgttgtattatatatggtggtatgtgatctatgtagcgaattaatctacccttggtgatcgatcagatcatcaaacctgg

SEQ ID NO: 33458 - protein, 176 aa, Zea mays subsp. mays
MGSWHKRRPSEGYLLLNYGLILVRSGGHMFAWVLLIPNQTGTLGMRGTQHRAVMWRVWKEGGTGFLYWGSNCYEKAMIPSAEICFRRGLPPGDGVLFYPGEVFSSSHEPVASTRLERILSGMQDIEYLKLYSSRYGREEGLALVEKTGMYLGPDRYTLDHGPVDVMRGEVYRTCRS

SEQ ID NO: 33459 - protein, 148 aa, Zea mays subsp. mays
MFAWVLLIPNQTGTLGMRGTQHRAVMWRVWKEGGTGFLYWGSNCYEKAMIPSAEICFRRGLPPGDGVLFYPGEVFSSSHEPVASTRLERILSGMQDIEYLKLYSSRYGREEGLALVEKTGMYLGPDRYTLDHGPVDVMRGEVYRTCRS

SEQ ID NO: 33460 - protein, 132 aa, Zea mays subsp. mays
MRGTQHRAVMWRVWKEGGTGFLYWGSNCYEKAMIPSAEICFRRGLPPGDGVLFYPGEVFSSSHEPVASTRLERILSGMQDIEYLKLYSSRYGREEGLALVEKTGMYLGPDRYTLDHGPVDVMRGEVYRTCRS

SEQ ID NO: 33461 - DNA, 2102 bp, Zea mays subsp. mays
taatcgaaaaataatcgacacacacctaacagagtaacagacaccaaacaacgcccatcactcgcgccgtacatcctgcctcctcccgcgcgcgcgcgtgcgtgcacgctagctagctgccggtcgcctcgccaccatggtgttcgacgcgagcggcagcaggtcggcggcggcggcgtcggggaaccctctccgcgtgatcctgacgcgcgggttcgcgcggcaggtgctcgtggggcggtggttgacggtgttcgcgagcctgctcatcatggcgtcctccggcgcgacgtacatcttcgggagctactccggcacgctcaagtcgtcgctcgggtacgaccagcgcacgctcaacaccgtgtccttcttcaaggacctcggcgccaacctgggcgtcttctcggggctcatcaacgaggtgaccccgccgtgggtggtgctggccatgggcgccgccatgaacctgtccgggtacctcatggtgtacctggccgtgtccgggcgcaccgcgccgccgccgctgtggctcgtctgcctctacttcttcgtgggcgccaactcgcagtcgttcgccaacaccggcgcgctggtgacctgcgtcaagaacttccccgacagccgcggggtggtgctcggcatcctcaagggcttcgtcggcctcagcggcgccgtgtacacgcagctgtacctggccctgtacggcggcgacgacgccgagtcgctgatcctcctcgtcgcctggctccccgcggcggtgtccgtcgtgttcgtccacaccatccggtacatgccgtacccgcgccgccgtgggcaggagacgagctccgactccgaccccttcttctgcttcctctacctctccatcgcgctggcgtgcttcctcctcgtcatgatcgtggtgcagaagcaggtgcccttctcccgcgccgcgtacggcgtggccgccacgccgctgctcatcctcctcctcatgcccctcggcgtcgtcgtcaagcaggagtacaagatctaccgggagcgccagctcgacgccgccgacccgccgccgccgaccatcgtctccgcgtcggcaacggacgccatcaagaaaacagagcagcagccggcgtcgtcgtcgttctgtgggtgcgtgaggaccatgttccgtccgccggctcgtggggaggactacacgatcctgcaggcgctggtgagcgtggacatgctggtgctgttcgtggcgacaatctgcggcgtgggcgggacgctgacggcgatcgacaacatggggcagatcggggagtcgctgggctacccagccaggagcgtcaacacgttcgtgtccctgatcagcatctggaactacgcggggcgcgtgacggcgggctacgcctcggaggcggcgctggcccggtaccgcgtgccgcggccgctgctgctgacgggggtgctggcgctggcgtgcgcggggcacgtgctgatcgcgctgggcgcgccgcggtccctgtacgcggcgtcggtggtcgtcgggttctgcttcggcgcgcagtggccgctggtgttcgccatcatctcggaggtgttcgggctcaagtactactccacgctctacaacttgggcggcatggccagccccgtgggctcctacatcctgaacgtgcgcgtggcggggcggctctacgacgcggcggccgcgcggcagcgcggccgcggcaggatctgcctcggggtggagtgctaccggcggtcgttcctgatcgtcacggcggaccacggtggtcggcgcgctggtgtcgctcgtgctggtgtggcggacgtggacgttctacaggggcgacatctacgcgaggttccgggacggagacgagggcccggggcgggacgggcgcctgccggtcgaccagaaacgggaggaggagcagagggagaaggcggcggccaacggcaggaaggcgtgaggtggtgagcgggagcgggaaggcatggtcagggacgacgacgagtggggtgtacttgtacatgtgaatatagtactttttttgttgcattcacccgtgatgaccgacccttgttacctttcaaatttaaatagcctaaaaaaagccttcttgtccgtttcc

SEQ ID NO: 33462 - protein, 603 aa, Zea mays subsp. mays
MVFDASGSRSAAAASGNPLRVILTRGFARQVLVGRWLTVFASLLIMASSGATYIFGSYSGTLKSSLGYDQRTLNTVSFFKDLGANLGVFSGLINEVTPPWVVLAMGAAMNLSGYLMVYLAVSGRTAPPPLWLVCLYFFVGANSQSFANTGALVTCVKNFPDSRGVVLGILKGFVGLSGAVYTQLYLALYGGDDAESLILLVAWLPAAVSVVFVHTIRYMPYPRRRGQETSSDSDPFFCFLYLSIALACFLLVMIVVQKQVPFSRAAYGVAATPLLILLLMPLGVVVKQEYKIYRERQLDAADPPPPTIVSASATDAIKKTEQQPASSSFCGCVRTMFRPPARGEDYTILQALVSVDMLVLFVATICGVGGTLTAIDNMGQIGESLGYPARSVNTFVSLISIWNYAGRVTAGYASEAALARYRVPRPLLLTGVLALACAGHVLIALGAPRSLYAASVVVGFCFGAQWPLVFAIISEVFGLKYYSTLYNLGGMASPVGSYILNVRVAGRLYDAAAARQRGRGRICLGVECYRRSFLIVTADHGGRRAGVARAGVADVDVLQGRHLREVPGRRRGPGAGRAPAGRPETGGGAEGEGGGQRQEGVRW

SEQ ID NO: 33463 - protein, 558 aa, Zea mays subsp. mays
MASSGATYIFGSYSGTLKSSLGYDQRTLNTVSFFKDLGANLGVFSGLINEVTPPWVVLAMGAAMNLSGYLMVYLAVSGRTAPPPLWLVCLYFFVGANSQSFANTGALVTCVKNFPDSRGVVLGILKGFVGLSGAVYTQLYLALYGGDDAESLILLVAWLPAAVSVVFVHTIRYMPYPRRRGQETSSDSDPFFCFLYLSIALACFLLVMIVVQKQVPFSRAAYGVAATPLLILLLMPLGVVVKQEYKIYRERQLDAADPPPPTIVSASATDAIKKTEQQPASSSFCGCVRTMFRPPARGEDYTILQALVSVDMLVLFVATICGVGGTLTAIDNMGQIGESLGYPARSVNTFVSLISIWNYAGRVTAGYASEAALARYRVPRPLLLTGVLALACAGHVLIALGAPRSLYAASVVVGFCFGAQWPLVFAIISEVFGLKYYSTLYNLGGMASPVGSYILNVRVAGRLYDAAAARQRGRGRICLGVECYRRSFLIVTADHGGRRAGVARAGVADVDVLQGRHLREVPGRRRGPGAGRAPAGRPETGGGAEGEGGGQRQEGVRW

SEQ ID NO: 33464 - protein, 499 aa, Zea mays subsp. mays
MGAAMNLSGYLMVYLAVSGRTAPPPLWLVCLYFFVGANSQSFANTGALVTCVKNFPDSRGVVLGILKGFVGLSGAVYTQLYLALYGGDDAESLILLVAWLPAAVSVVFVHTIRYMPYPRRRGQETSSDSDPFFCFLYLSIALACFLLVMIVVQKQVPFSRAAYGVAATPLLILLLMPLGVVVKQEYKIYRERQLDAADPPPPTIVSASATDAIKKTEQQPASSSFCGCVRTMFRPPARGEDYTILQALVSVDMLVLFVATICGVGGTLTAIDNMGQIGESLGYPARSVNTFVSLISIWNYAGRVTAGYASEAALARYRVPRPLLLTGVLALACAGHVLIALGAPRSLYAASVVVGFCFGAQWPLVFAIISEVFGLKYYSTLYNLGGMASPVGSYILNVRVAGRLYDAAAARQRGRGRICLGVECYRRSFLIVTADHGGRRAGVARAGVADVDVLQGRHLREVPGRRRGPGAGRAPAGRPETGGGAEGEGGGQRQEGVRW

SEQ ID NO: 33465 - DNA, 1320 bp, Zea mays subsp. mays
taacctttgcagggcattcagaggatgtgcttgatctcagctggtccaaatctcagtatttgctttcatcatcaatggataaaaccgtacggttgtggcacatgtcaagcacttattgtttgaaaaccttctcacacactgactatgtgacttgcatccagttcaatcctgttgatgatagatacttcattagtggttccctggatgagaaggttcgcatttggagtattccaaagcgtgaaatagttgattgggtcgaccttcatgaaatggttactgctgcctgctatactccagatggaaagggcgctctggttgggtcccacaagggcagctgccatctgtatgatacatctgatgacatgctttgctacaaaacacagatcgacctacaaaacaagagaagaaaatctagccagaagaaaataacaggatttcagtttgtcccaggggattcttcaatggtcataatcacatctgcagattcacgaatcagagttcttgatggttttgagctagttcataggtttaaaggattccggaacaccagcagccaaatctcagcttgtttagctggaaacggacggtatattatctcggcaagcgaggattcccgtgtatatatctggaggaacgatgatggttcgaaaccaagtaaaaagaagggcattgtttctgtcacaaatacccatgaacacttccactgcgagagtgtcacggttgctgttacctggccttttaccagcaccacaatgacttctttaatgaaccccaggaaacaagagcttgagcgtgggtctgagaatggctattcaccgcaagatctgcaaaccaaacttgctaaggcacaggagatgacagatgttgagtaccggaggacaaatatcacaagttacaactcgaagcataacagtgaccggacatctccggcttggcctgaagaacttgtcacaccaccaaatcaaagtctcagcgctactacctgccatgccaacgagggagaccaagctctgaatcggtcggcctggggcctagtaattgttacagcaggccgtggaggtcaaatcagaacatttcaaaacttcggttttcctgtaagagtatagcatgagtccgaatacataagatagtcactgccattcaggagtgcagtttgtgtatagataggagatagtgggtgagtttcacactattcagggattgggtttgattgttccttggtgcacctgctagagatcagaatcttcatctaacatacactgtcagtagtccaaaactttgtatgccaaatttattttaccctgaaggcccaagttgtgc

SEQ ID NO: 33466 - protein, 367 aa, Zea mays subsp. mays
TFAGHSEDVLDLSWSKSQYLLSSSMDKTVRLWHMSSTYCLKTFSHTDYVTCIQFNPVDDRYFISGSLDEKVRIWSIPKREIVDWVDLHEMVTAACYTPDGKGALVGSHKGSCHLYDTSDDMLCYKTQIDLQNKRRKSSQKKITGFQFVPGDSSMVIITSADSRIRVLDGFELVHRFKGFRNTSSQISACLAGNGRYIISASEDSRVYIWRNDDGSKPSKKKGIVSVTNTHEHFHCESVTVAVTWPFTSTTMTSLMNPRKQELERGSENGYSPQDLQTKLAKAQEMTDVEYRRTNITSYNSKHNSDRTSPAWPEELVTPPNQSLSATTCHANEGDQALNRSAWGLVIVTAGRGGQIRTFQNFGFPVRV

SEQ ID NO: 33467 - protein, 343 aa, Zea mays subsp. mays
MDKTVRLWHMSSTYCLKTFSHTDYVTCIQFNPVDDRYFISGSLDEKVRIWSIPKREIVDWVDLHEMVTAACYTPDGKGALVGSHKGSCHLYDTSDDMLCYKTQIDLQNKRRKSSQKKITGFQFVPGDSSMVIITSADSRIRVLDGFELVHRFKGFRNTSSQISACLAGNGRYIISASEDSRVYIWRNDDGSKPSKKKGIVSVTNTHEHFHCESVTVAVTWPFTSTTMTSLMNPRKQELERGSENGYSPQDLQTKLAKAQEMTDVEYRRTNITSYNSKHNSDRTSPAWPEELVTPPNQSLSATTCHANEGDQALNRSAWGLVIVTAGRGGQIRTFQNFGFPVRV

SEQ ID NO: 33468 - protein, 334 aa, Zea mays subsp. mays
MSSTYCLKTFSHTDYVTCIQFNPVDDRYFISGSLDEKVRIWSIPKREIVDWVDLHEMVTAACYTPDGKGALVGSHKGSCHLYDTSDDMLCYKTQIDLQNKRRKSSQKKITGFQFVPGDSSMVIITSADSRIRVLDGFELVHRFKGFRNTSSQISACLAGNGRYIISASEDSRVYIWRNDDGSKPSKKKGIVSVTNTHEHFHCESVTVAVTWPFTSTTMTSLMNPRKQELERGSENGYSPQDLQTKLAKAQEMTDVEYRRTNITSYNSKHNSDRTSPAWPEELVTPPNQSLSATTCHANEGDQALNRSAWGLVIVTAGRGGQIRTFQNFGFPVRV

SEQ ID NO: 33469 - DNA, 1575 bp, Zea mays subsp. mays
gcacgagaccattacctagaacatcctaatcgaaaacagtcaccaccacggccaccctcctcttgtatagtcaaaccggccctctccttgtaaccttgggcaagaggagcagaaaggtcccagctttccgtgttcttctgcttctttccccgcctcgccttcgttccccccgtcaccagatctcgaggcagcggagtccggggacgccgttctttccgttgtgcttcctttgcctcttgctgccggcggccggtgattttcccgaggtctgtttgggcggcaggtagaggctattttcttggcggctggtgggatggatagccacgccgccgggtcgagctccggcgggtccggggatggcggcgcgcagcccaggaggagctccaggaagcccaagtattccaagtttactcagcaggagcttccagcttgcaagccgattcttactccaaaatgggttatttcagtattcgttcttgttggcgtgatttttgtcccgattggtattgtttcgctgcaagcttcacgacaggttgtcgagatcgttgatcggtatgatgatgcatgtgtccctgctggtgtgactgacaagcttgcttacatccggaatgatagtataccaaaaagctgcacaaggaatctgacgattacaaaggatatgaagcagccgatttttgtgtattatcagctggatgacttttaccagaatcataggaggtatgtcaagagtcgtaatgatgcacagctaagagataaaagtaaagcgactgactttaccaattgtgatcctgaggccaaaacggtagatggaaaaccaattgtgccttgtggtcttattgcatggagcctgttcaatgatacatataaactcattcacaacaatgtaaccttgagagtggagaagaaggacatctcttggaagagtgacagagaccacaaatttgggagtgatgtcttcccaacgaactttcagaaaggacctcttaaaggtggaaaaacacttgatccaagtatcccgttgagtaagcaagaggacctcattgtttggatgcggactgcagcacttccgacattcagaaagctgtatggaaggatatatgttgatctcaaggaaaacgatacaatcacagtccagttggacaacaactacaacacctatagctttggtggcaagaagaagctggtgctttctaccgcaacctggctcgggggaaagaacgattttctgggccttgcgtacctcaccgtcggcggactctgcttcttcttggcattcgcgttcaccttgctatacttgataaagccaaggaaaatgggagataacagctacctgtcatggaacagacccccttcaggtcgctgatgatgtgctttggaagttaaatgcgatacacaggcagcaccaaacagattcagattatggtcggaatgtatcttgtaccacagagaaattttatccgtgctcgtcggtgtagaatatatacggcacccttgcacatattgtacattacatcgaaacacatagctttgttttctacaaaattgtatactcaaaattgtatactcaaaagtttc

SEQ ID NO: 33470 - protein, 349 aa, Zea mays subsp. mays
MDSHAAGSSSGGSGDGGAQPRRSSRKPKYSKFTQQELPACKPILTPKWVISVFVLVGVIFVPIGIVSLQASRQVVEIVDRYDDACVPAGVTDKLAYIRNDSIPKSCTRNLTITKDMKQPIFVYYQLDDFYQNHRRYVKSRNDAQLRDKSKATDFTNCDPEAKTVDGKPIVPCGLIAWSLFNDTYKLIHNNVTLRVEKKDISWKSDRDHKFGSDVFPTNFQKGPLKGGKTLDPSIPLSKQEDLIVWMRTAALPTFRKLYGRIYVDLKENDTITVQLDNNYNTYSFGGKKKLVLSTATWLGGKNDFLGLAYLTVGGLCFFLAFAFTLLYLIKPRKMGDNSYLSWNRPPSGR

SEQ ID NO: 33471 - protein, 234 aa, Zea mays subsp. mays
MKQPIFVYYQLDDFYQNHRRYVKSRNDAQLRDKSKATDFTNCDPEAKTVDGKPIVPCGLIAWSLFNDTYKLIHNNVTLRVEKKDISWKSDRDHKFGSDVFPTNFQKGPLKGGKTLDPSIPLSKQEDLIVWMRTAALPTFRKLYGRIYVDLKENDTITVQLDNNYNTYSFGGKKKLVLSTATWLGGKNDFLGLAYLTVGGLCFFLAFAFTLLYLIKPRKMGDNSYLSWNRPPSGR

SEQ ID NO: 33472 - DNA, 1314 bp, Zea mays subsp. mays
ctttctagcttctgctatcctgctgctgcccctctttcccccaatctgcaggctgcaggcgctgctcctttcgccctccgctagcgagcgaatcgctggctcgaccccgcggcgggaggtatcccgccttcgatctggttcactggccaattcgttgcttcgtggggctttggagtttggagccaatcttgccccttaaagtgtcggtggcagcgttttgtgatcatcatgagctttgtgttccgagggagcaggaccgacatcgaggccggtggcttcccagggttcgctcccgagcgccgcgccatgcgaattcatgcagggagcaggccggtgaatagcaattccttggcttttcttctaactgttcttgttttgttcatggtactgaactcgcaccagatctctcccaatcttctgctttggcttgtcttgggagtcttcctaatggccacgagcctcagaatgtatgccacgtgccagcagcttgctcatgctgcagctgccaacagttttctcggccacactgagctgcgtgtgcatgtaccgccgtccattacccttgctacgagaggccggttacagagccttagacttcaactggctcttcttgatcgtgaatttgacgatttagattatgacactctgagagcattggatgctgacaatagcccacatgctccatctatgagtgaagaagaaataaattctcttcctgtcttcaaatataaagttcaggcacaacagaggcatccccctgcccgaaaaagtgatgggccatctcagctatcggtttcttcaactgggtccggcaatgaggaaaagcaggatggtttaaaagcagatggaaccagcaaaccttcagaggatgaactaacatgtagtgtttgcttagagcaagtcacggtgggtgatctgttgagaagcctaccatgcttgcatcagtttcacgtaaactgcatcgacccatggctgcgccaacagggtacatgcccaatctgcaagcaccaggtgagcgatgggtggcatgctacaggcaacggtgaagaggatgcttcttacatggtgtgagtagctgactaggagtaggccatagctaactaccagtagctgctaactgaatccgtggaacatagttttcgaggtgacgggttggactgatctagggatgtgatctaatccctttctatcctaacaaaaccgcgtgtggaaacagttgtccagtacggttcttttacaggtaacgctcatttcaatcattctctgtaacggggcgtttggatcccttcattttaaaggaattggaattcactc

SEQ ID NO: 33473 - protein, 280 aa, Zea mays subsp. mays
MSFVFRGSRTDIEAGGFPGFAPERRAMRIHAGSRPVNSNSLAFLLTVLVLFMVLNSHQISPNLLLWLVLGVFLMATSLRMYATCQQLAHAAAANSFLGHTELRVHVPPSITLATRGRLQSLRLQLALLDREFDDLDYDTLRALDADNSPHAPSMSEEEINSLPVFKYKVQAQQRHPPARKSDGPSQLSVSSTGSGNEEKQDGLKADGTSKPSEDELTCSVCLEQVTVGDLLRSLPCLHQFHVNCIDPWLRQQGTCPICKHQVSDGWHATGNGEEDASYMV

SEQ ID NO: 33474 - protein, 254 aa, Zea mays subsp. mays
MRIHAGSRPVNSNSLAFLLTVLVLFMVLNSHQISPNLLLWLVLGVFLMATSLRMYATCQQLAHAAAANSFLGHTELRVHVPPSITLATRGRLQSLRLQLALLDREFDDLDYDTLRALDADNSPHAPSMSEEEINSLPVFKYKVQAQQRHPPARKSDGPSQLSVSSTGSGNEEKQDGLKADGTSKPSEDELTCSVCLEQVTVGDLLRSLPCLHQFHVNCIDPWLRQQGTCPICKHQVSDGWHATGNGEEDASYMV

SEQ ID NO: 33475 - protein, 229 aa, Zea mays subsp. mays
MVLNSHQISPNLLLWLVLGVFLMATSLRMYATCQQLAHAAAANSFLGHTELRVHVPPSITLATRGRLQSLRLQLALLDREFDDLDYDTLRALDADNSPHAPSMSEEEINSLPVFKYKVQAQQRHPPARKSDGPSQLSVSSTGSGNEEKQDGLKADGTSKPSEDELTCSVCLEQVTVGDLLRSLPCLHQFHVNCIDPWLRQQGTCPICKHQVSDGWHATGNGEEDASYMV

SEQ ID NO: 33476 - DNA, 1722 bp, Zea mays subsp. mays
ctatgcctcccagaaaaattcctcccaccgcgacggcgacgagcacggggaccctccaccgcctccgcctccgcctctccgcgtgcggcctccgcaccgccccgacgtcgacccctccgccctccccctcggccaccgatgcgccgccgcccgccctccgccgccgccgccgccgcggcgggctcggcctcctctggaagctcccctacggccgcgcgccgtcccgcccgatggacgcgccgccgcctcttcagcgcgccccgtcgccgccgccccagccccagccgcccgcgccgtccaggaggtacggcgtgcacttctcggcgtccagcttcatccaggcgccgctcaccacgctgctcgagtactccggcatcctccgccccgatccaggcggcggaacccagcaggatggggccggggccgggccgggcgaggtgtcgatccggattgtggcgcccggcgaggcggggacgtcgtctgagagggccgaggaggtgatcgtggaggaggaggaagaggatggacacgcaacgagaacgcgcccggaggacccgtcacctgcggctggtggcggggagggcggcagggagtcctcctcatcgtaccagcggtacgacatacagcaggtggccaggtgggtggagcagatactgcccttctcactgctgctgctcgtcgtcttcatccgacaacatttgcaaggtttctttgtgacaatttggattgctgcggtgatgttcaagtccaatgatatcctgcgtaagcagactgctctgaagagggagagaaaaattccagttcttgtcgggattacaatattatttgttgttcacgtatctgggttttattggtgttacaagaacggggaccttataagacctctcatgatgcttcctccaaaagaaataccaccattttggcacgcaatattcatcatcttggtgaatgatacaatggtgcgccaaactgctatggtcgtcaaatgtttgctgctgatgtactataagaacagcagaggccgtagctatcgtaggcagggtcagatgctgacgattgtggaatattttctacttttgtaccgcacattattgcctacacctgtgtggtaccgttttttcctgaacaaggagtatggaagcttattttcgtctctaaccactggcttgtatctcactttcaagttaacatcagtcgtagaaaaggttcaatcatttttgacggcactgagagcgttatctcataaagacttccattgtggctcatatgcaacaagcgagcaggtggctgctgctggagatttgtgcgcgatatgccaagagaagatgcacgttcccatccttttgcgctgcaaacatatcttctgtgaagattgtgtgtccgaatggttcgagagggagcggacttgcccgctgtgcagggcactggtgaagccagcagacctccggtcgttcggtgacggttcaacaagcctcttcttccagctattctaatctgagagagccaaaagagctgggcaagctggggcgctccactctgtgcagatgttaggtgtgtgtgtgtgtgtgtgtgtgagtgttgctgctggcaacgcgtgcgagcagtgcggccctgatgcggtgctgggagagtgtacaccgagctgaagctgaaggcgtacgtggttgtgtactgtgattgtgcatattttcatcccatgtataggcactcgcgggatgcttg

SEQ ID NO: 33477 - protein, 496 aa, Zea mays subsp. mays
MPPRKIPPTATATSTGTLHRLRLRLSACGLRTAPTSTPPPSPSATDAPPPALRRRRRRGGLGLLWKLPYGRAPSRPMDAPPPLQRAPSPPPQPQPPAPSRRYGVHFSASSFIQAPLTTLLEYSGILRPDPGGGTQQDGAGAGPGEVSIRIVAPGEAGTSSERAEEVIVEEEEEDGHATRTRPEDPSPAAGGGEGGRESSSSYQRYDIQQVARWVEQILPFSLLLLVVFIRQHLQGFFVTIWIAAVMFKSNDILRKQTALKRERKIPVLVGITILFVVHVSGFYWCYKNGDLIRPLMMLPPKEIPPFWHAIFIILVNDTMVRQTAMVVKCLLLMYYKNSRGRSYRRQGQMLTIVEYFLLLYRTLLPTPVWYRFFLNKEYGSLFSSLTTGLYLTFKLTSVVEKVQSFLTALRALSHKDFHCGSYATSEQVAAAGDLCAICQEKMHVPILLRCKHIFCEDCVSEWFERERTCPLCRALVKPADLRSFGDGSTSLFFQLF

SEQ ID NO: 33478 - protein, 420 aa, Zea mays subsp. mays
MDAPPPLQRAPSPPPQPQPPAPSRRYGVHFSASSFIQAPLTTLLEYSGILRPDPGGGTQQDGAGAGPGEVSIRIVAPGEAGTSSERAEEVIVEEEEEDGHATRTRPEDPSPAAGGGEGGRESSSSYQRYDIQQVARWVEQILPFSLLLLVVFIRQHLQGFFVTIWIAAVMFKSNDILRKQTALKRERKIPVLVGITILFVVHVSGFYWCYKNGDLIRPLMMLPPKEIPPFWHAIFIILVNDTMVRQTAMVVKCLLLMYYKNSRGRSYRRQGQMLTIVEYFLLLYRTLLPTPVWYRFFLNKEYGSLFSSLTTGLYLTFKLTSVVEKVQSFLTALRALSHKDFHCGSYATSEQVAAAGDLCAICQEKMHVPILLRCKHIFCEDCVSEWFERERTCPLCRALVKPADLRSFGDGSTSLFFQLF

SEQ ID NO: 33479 - protein, 251 aa, Zea mays subsp. mays
MFKSNDILRKQTALKRERKIPVLVGITILFVVHVSGFYWCYKNGDLIRPLMMLPPKEIPPFWHAIFIILVNDTMVRQTAMVVKCLLLMYYKNSRGRSYRRQGQMLTIVEYFLLLYRTLLPTPVWYRFFLNKEYGSLFSSLTTGLYLTFKLTSVVEKVQSFLTALRALSHKDFHCGSYATSEQVAAAGDLCAICQEKMHVPILLRCKHIFCEDCVSEWFERERTCPLCRALVKPADLRSFGDGSTSLFFQLF

SEQ ID NO: 33480 - DNA, 1630 bp, Zea mays subsp. mays
gcacgagaccattacctagaacatcctaatcgaaaaactcgggttggttagaagaacccaatgcaagtgtgagtgagctgacggcacggcggacgcgctcgcctctcctctcctctcctctcctctcctcttcttccggctctccctctccgcatgccattccaacgcattaccggtatttttagccgccggaggagacgggtagctgcgtagccactagcgagagagagagggaggggagaaaccatagctcctggccgttctgcctgcccatccaccgcggcgccggccgtccgtctcccgtccacatccctcctcctctcctgcaaggttcctgtgcggtatggtatgctagctcggctccctgtggattcccccctcatccggaatgtgatggcgcggtggatggtgttttgatctgtgttcgcttttggcggatctggtcgcgcgcagtagcgcagaggggtcggagtcggagtcggagtcggagaagatgatgggcgggttcctctccagggtcctcctgttggcttttggctatgcctatcctgcctacgaatgctacaagactgttgaactgaacaaaccagagattgcgcagctcatattttggtgtcagtattggattttagttgccctgttgacagttttggagagattcggagatttcacaatatcatggctaccgttctactcggaagcaaagctgatgttctttgtatacttgtggtaccctaagacaaagggaactacgtatgtttatggaactttctttaaaccatatatttctcagcatgagaatgaaatcgaccggaatctccttgagctgagagctcgagccaccgacacggttgtactttattttcagaaggctgcttcggcaggacaaagtactttctttgacgttttaaaatatgttgctgcccagtcaccttctcagaaatcaaggcaacgccttcatcaggattcacagcagccgccacaacaacaacaaccacaagtgcaggtgcagcaggcgcaaccacaaaaacaagcagcacctgttatgcgcagagcatcatctattgctgctcggcaagccagcaatggcacagcaatctcaggagactaaacccgtttcatcttcgcccaagatcaagcgtcaaacatcagcgagatctggttcagtggcatccacaaagcctccggtagctgcatccgcgctaaaacctggtggtagcccaaagaaaggcgaggtcaaacctgctgccgacccagttcaaactccaaccacaggtgccgattcaccgaaacccgagcctagcgccccatcactccctggagccgaaggggtggacaagatggccatcgacgaggccagtggtgacgccccagagggcgcagaagagcttgaccctgcgctcgaagaggagacgccgatggaggagacgatccgtgtgacgcgcgccaagctaaggaggcgcacggccaccgaagatcctgctgggaattagctgtaggccattgtttttcctttccctgcacattgtgttgatctttttttgggttttaggctgtcatgttgtttggtggaatggagatgtgttgttgaattggttctttgtgacacagttgattatcttgtttctgt

SEQ ID NO: 33481 - protein, 205 aa, Zea mays subsp. mays
MMGGFLSRVLLLAFGYAYPAYECYKTVELNKPEIAQLIFWCQYWILVALLTVLERFGDFTISWLPFYSEAKLMFFVYLWYPKTKGTTYVYGTFFKPYISQHENEIDRNLLELRARATDTVVLYFQKAASAGQSTFFDVLKYVAAQSPSQKSRQRLHQDSQQPPQQQQPQVQVQQAQPQKQAAPVMRRASSIAARQASNGTAISGD

SEQ ID NO: 33482 - protein, 204 aa, Zea mays subsp. mays
MGGFLSRVLLLAFGYAYPAYECYKTVELNKPEIAQLIFWCQYWILVALLTVLERFGDFTISWLPFYSEAKLMFFVYLWYPKTKGTTYVYGTFFKPYISQHENEIDRNLLELRARATDTVVLYFQKAASAGQSTFFDVLKYVAAQSPSQKSRQRLHQDSQQPPQQQQPQVQVQQAQPQKQAAPVMRRASSIAARQASNGTAISGD

SEQ ID NO: 33483 - protein, 192 aa, Zea mays subsp. mays
MLLPSHLLRNQGNAFIRIHSSRHNNNNHKCRCSRRNHKNKQHLLCAEHHLLLLGKPAMAQQSQETKPVSSSPKIKRQTSARSGSVASTKPPVAASALKPGGSPKKGEVKPAADPVQTPTTGADSPKPEPSAPSLPGAEGVDKMAIDEASGDAPEGAEELDPALEEETPMEETIRVTRAKLRRRTATEDPAGN

SEQ ID NO: 33484 - DNA, 917 bp, Zea mays subsp. mays
tcttcacccacattataaagatcctccacttcgcactttcgccgccgcctctctccttcccgagcaggaggcggacaaggtaagcagcaatcgcaggaaccctagcgccgccgcacccgcaggaatgggtatcgacctcgtcgccggtgggaggaataagaagaccaagcgcactgcgcccaagtctgacgatgtctacctcaagctcctcgtcaagctctaccgtttcttggtcaggaggaccaagagcaatttcaacgctgtcattctcaagaggcttttcatgagtaaaaccaaccgaccaccaatctccatgcgccgccttgtcaagtttatggaaggaaaggagaagaacattgctgtcattgttggcacagtcacagatgacaaaaggatccaggaggttccagcaatgaaggttactgccctgaggttcacggagacagcaagggccaggattgtcaatgctggtggcgagtgcctcacatttgaccagcttgctcttcgtgctccacttggcgagaacacggtcctcttgaggggccccaagaatgcccgtgaggcagtgaggcactttggcaaggctcctggagtgccgcacagccacaccaagccgtatgtgcgctccaagggaaggaagttcgagaaggctcgtggcaggaggaacagccgtggattcaaggtttaaaacaaattgtggccctccgtgttgccatcagcatagtgcaaccgttgtgtttgatcagtcgacagtaattagtcatcactctgtaccgagattagtagcacaatttgttgtcctggtttgaattttggaagatatttgatgtcgtctccttattatctactcgttactggttgagcacgaagattgttttgtgatactcctacatgatttaagacggttcccgacgttc

SEQ ID NO: 33485 - protein, 228 aa, Zea mays subsp. mays
LHPHYKDPPLRTFAAASLLPEQEADKVSSNRRNPSAAAPAGMGIDLVAGGRNKKTKRTAPKSDDVYLKLLVKLYRFLVRRTKSNFNAVILKRLFMSKTNRPPISMRRLVKFMEGKEKNIAVIVGTVTDDKRIQEVPAMKVTALRFTETARARIVNAGGECLTFDQLALRAPLGENTVLLRGPKNAREAVRHFGKAPGVPHSHTKPYVRSKGRKFEKARGRRNSRGFKV

SEQ ID NO: 33486 - protein, 187 aa, Zea mays subsp. mays
MGIDLVAGGRNKKTKRTAPKSDDVYLKLLVKLYRFLVRRTKSNFNAVILKRLFMSKTNRPPISMRRLVKFMEGKEKNIAVIVGTVTDDKRIQEVPAMKVTALRFTETARARIVNAGGECLTFDQLALRAPLGENTVLLRGPKNAREAVRHFGKAPGVPHSHTKPYVRSKGRKFEKARGRRNSRGFKV

SEQ ID NO: 33487 - protein, 134 aa, Zea mays subsp. mays
MSKTNRPPISMRRLVKFMEGKEKNIAVIVGTVTDDKRIQEVPAMKVTALRFTETARARIVNAGGECLTFDQLALRAPLGENTVLLRGPKNAREAVRHFGKAPGVPHSHTKPYVRSKGRKFEKARGRRNSRGFKV

SEQ ID NO: 33488 - DNA, 946 bp, Zea mays subsp. mays
aaggcccagatcaaaagaaaagagcagcggagcggagcatgctcttcctccggtgccagcctcgcgtctcgtccccgtccgcatccgcgtccgcgccgccttttcgtccccgcgtcggcgtcgcggctccactgggcgtacgcgtcaccggcggaaggcgagggcaggcggtggtcgcgatggcgtccgccgacgcgcgcttggcggggattgcctcctccatccgcgtcatccccgacttccccaagccagggatcatgttccaggacatcacgacactgctgctcgaccccaaggcgttgacaccatcgacgtcttcgttgagcggtacaaggaccaagggatcaccgtagttgctggtgtggaagctagagggttcatttttggtcctcctatcgctctagccatcagtgcgaaatttgtacctttgaggaagcctaagaagttgccaggcgaggtgatctccgaagaatattctctggaatacggaactgacaagatagagatgcatgttggagctgtacaggccaacgatcgggctcttgtagtcgatgatcttattgccaccggtggaacactctgtgcagctgtcaaacttattgaacgtgttggagcaaaggttgttgagtgtgcttgcgtcattgaattggcagaactgaagggccgagacaaacttggggacaggccagtttttgttcttgtcgaagcagatgcttgagcggaacttgggacttctcttctcagtgagttagagttggtgctgttgatgctacctctctgtcaacaacaaagtttcccatgttggctatattcttgctgacacgtaataaagtttcattccaaattgtgatcccctgaatgatttgtcaatgtagacatgattgctggtccttgtatactgtggcttattattcacatcaattaaggataatcctgattggagctc

SEQ ID NO: 33489 - protein, 238 aa, Zea mays subsp. mays
RPRSKEKSSGAEHALPPVPASRLVPVRIRVRAAFSSPRRRRGSTGRTRHRRKARAGGGRDGVRRRALGGDCLLHPRHPRLPQARDHVPGHHDTAARPQGVDTIDVFVERYKDQGITVVAGVEARGFIFGPPIALAISAKFVPLRKPKKLPGEVISEEYSLEYGTDKIEMHVGAVQANDRALVVDDLIATGGTLCAAVKLIERVGAKVVECACVIELAELKGRDKLGDRPVFVLVEADA

SEQ ID NO: 33490 - DNA, 788 bp, Zea mays subsp. mays
gaaaaaaaaatcaggtgtcaatccaaacaatcgccatgggtataagcactaaaaccttgctggtatgcctggtcccatggctcgtttaccagctccagcctcatcgattctctcctgtgtcggccgcgacaacaatggccggcaagatcgagatcttcaccgtgtaccagcacgacaggctgaacgagaccgggtacgtcgtcgtcaccggcgacgaaggcgccccctcgagcgacaccaccaggcccttcggcagcatctacgtcttccgcgacgacctgaccctgcacaacgacagcgactcccccgtggccggcgtgatggaggggacctccatcacgacgagcttcgacgggctccacaacctgctggcggccaagatcttcgctccgccaccgcggctacaggggctccgtgtccgtccttgggggctcccacaacaccaagccctcggtgtacccggtggtgggcggcaccggcgattttctgtacacggaggggtacgtccggtcgtcgccggtggactcggaccggccaagggtgatatacaagctggaaattcacttgtactggccaccgtacactaaatttgctccatttccatagtactagtctactaggagtgtaggacttctgcgtcgagccgccagatcatcttttgcagcttccaatttcaggtcttattgtatttttggattacaggaaagttgcaggagtacaatttgacagcggatgtgtgacactacacagcggcacattttttaagtgaaatacatttgcgattttcg

SEQ ID NO: 33491 - protein, 194 aa, Zea mays subsp. mays
KKNQVSIQTIAMGISTKTLLVCLVPWLVYQLQPHRFSPVSAATTMAGKIEIFTVYQHDRLNETGYVVVTGDEGAPSSDTTRPFGSIYVFRDDLTLHNDSDSPVAGVMEGTSITTSFDGLHNLLAAKIFAPPPRLQGLRVRPWGLPQHQALGVPGGGRHRRFSVHGGVRPVVAGGLGPAKGDIQAGNSLVLATVH

SEQ ID NO: 33492 - protein, 183 aa, Zea mays subsp. mays
MGISTKTLLVCLVPWLVYQLQPHRFSPVSAATTMAGKIEIFTVYQHDRLNETGYVVVTGDEGAPSSDTTRPFGSIYVFRDDLTLHNDSDSPVAGVMEGTSITTSFDGLHNLLAAKIFAPPPRLQGLRVRPWGLPQHQALGVPGGGRHRRFSVHGGVRPVVAGGLGPAKGDIQAGNSLVLATVH

SEQ ID NO: 33493 - protein, 159 aa, Zea mays subsp. mays
MPGPMARLPAPASSILSCVGRDNNGRQDRDLHRVPARQAERDRVRRRHRRRRRPLERHHQALRQHLRLPRRPDPAQRQRLPRGRRDGGDLHHDELRRAPQPAGGQDLRSATAATGAPCPSLGAPTTPSPRCTRWWAAPAIFCTRRGTSGRRRWTRTGQG

SEQ ID NO: 33494 - DNA, 885 bp, Zea mays subsp. mays
aaaagatcgggcgggagggacgccgagggcgagtgggaggttcggcccggcgggatgctggtgcagcgcagggacggtgaggcggccggccccgtcatcaggatcagggtctcccacggcgccaacttccgcgaggtcgtcgtgccggcgcaggctaccttcggtgagttgaagaggatccttgttcagactactggcttggagcctgagaggcagaggctcttcttccgtgggaaggagaagagtgacagagagttcctgcacacggcaggtgttaaggatggagcaaagctgcttctgctcgagaagcctgcccctgccaacatagagcagaaggttgagcctgtgattatggatgaaagcatgatgaaggcatgtgcggctgttgctcgtgttagagttgaagttgataagctgtctgctaaggtgtgtgacttggagaagaatgtactaggagggagaaaggttgaggataaagaatttgttgtcttgacggagctgcttatgatgcagctgctgaaactcgatggcattgaagctgaaggagaagcaagggcacagaggaaggctgaggtgcgccgagttcagtcccttgtggagaccttggataagctgaaagcaagaaatgcaaaccccttcagcgatcataataaggctgtttcagtaacaacgcagtgggagacgtttgagaacggcatgggcagcttgagtgctccacctccccgtgtttcttcaacgcaagctaacactgactgggagcagttcgactaggctcagatgaagctgttgatgtatcatgaaatctgtgagatcggtatggacattcctttccgaggcagcgaggtgttgtgtatatgcaccacgtttgataacttttggcgtccc

SEQ ID NO: 33495 - protein, 256 aa, Zea mays subsp. mays
KRSGGRDAEGEWEVRPGGMLVQRRDGEAAGPVIRIRVSHGANFREVVVPAQATFGELKRILVQTTGLEPERQRLFFRGKEKSDREFLHTAGVKDGAKLLLLEKPAPANIEQKVEPVIMDESMMKACAAVARVRVEVDKLSAKVCDLEKNVLGGRKVEDKEFVVLTELLMMQLLKLDGIEAEGEARAQRKAEVRRVQSLVETLDKLKARNANPFSDHNKAVSVTTQWETFENGMGSLSAPPPRVSSTQANTDWEQFD

SEQ ID NO: 33496 - protein, 238 aa, Zea mays subsp. mays
MLVQRRDGEAAGPVIRIRVSHGANFREVVVPAQATFGELKRILVQTTGLEPERQRLFFRGKEKSDREFLHTAGVKDGAKLLLLEKPAPANIEQKVEPVIMDESMMKACAAVARVRVEVDKLSAKVCDLEKNVLGGRKVEDKEFVVLTELLMMQLLKLDGIEAEGEARAQRKAEVRRVQSLVETLDKLKARNANPFSDHNKAVSVTTQWETFENGMGSLSAPPPRVSSTQANTDWEQFD

SEQ ID NO: 33497 - protein, 139 aa, Zea mays subsp. mays
MDESMMKACAAVARVRVEVDKLSAKVCDLEKNVLGGRKVEDKEFVVLTELLMMQLLKLDGIEAEGEARAQRKAEVRRVQSLVETLDKLKARNANPFSDHNKAVSVTTQWETFENGMGSLSAPPPRVSSTQANTDWEQFD

SEQ ID NO: 33498 - DNA, 1635 bp, Zea mays subsp. mays
  misc_feature (438)..(439): n is a, c, g, or t
actgcagcaatcacagacagacacgagcaagtgtgagtgaggaggtttgcctgcccatctccatcggccatcgctgcctccccagtccccacatccgcacacatttttacccctcgcggcggccccaccgaccgccggggcgcagcggcgtcgccgcgggcaacgccgtcacgtcacgtgcatcacgacaatctcctcctccgcctcgtcttcctgccaggccgcgggagcaccagcccagcggcagatcagtcgaggcgggcgattccagggtttagagaggagcggagatggtgaaggtcatccaggggcgcccggccgagatggggttccggatgccggcggagtgggagccgcacgagcagtgctggatgggatggcctgagcgtccagataactggagggagaatgctggtccagctcaagaggtatttgctnnaactgcaattgccatttcaaagtttgaacccgtcacgttatgtgcaagtgccaagcagtaccccaaagtccacgagctgatggaacatgaaaccaacatcagggtcgttgagatgagcatgaacgattcctggttccgcgacatgggccccacttttgtcactcataaaggggattcaggaattgcagaacaaacaatagcaggaattgattggcaattcaatgcctggggaggaatctatgacgactggagtcttgacagcgatgttgccaagaaaatagtcgagatcgagaggatccctaggtttccccaaaaaaattatccttgagggtggaagcattcatgtagatggagaaggtacatgcattacaacggaagaatgcttgctgaatcctaataggaaccccaacatgaccaaactagagatagagaatgagctgaaggattttcttggagtctcgaaggtcatctggatacctcgtggactttatggtgacgaggatacaaacggccacgttgacaacctgtgctgcttcatcaaacccggtgtgatcctgctgtcgtggaccgacgacgagaaggaccatcagtacgaacggtcggtcgaggcgctgtctgttctctcccagtccgtcgacgcgaaagggcggcagctccaagtggtgaagatccacgtccccgggcctctgtacatgacagaggaataggcacagggcgttgtttcatcggggcattctgtaccgaggccagcgggcacgaggttggccgcctcgtacgtcaacttctacatcgccaatggggggatcatagcgccttccttcggtgacaggtgggacgaggaggcgtatgcggttctccagaaggcgtttcctgatcacgaggtggtgatggtcgaaggcggacgggagatcgcgctgggaggtgggaacattcactgcatcacgcagcagcagcccgtgcgcccgtcctaggtgaaaccggcgtcgacgcgaagcgatgaagagtatgctgctcctgtgtttaagcaggtgggttggtcccctgtcgttattacgctcaccaatacgcgcgcgaaataagccgtaggtacaagttccttgacaaatactgtatgagtactattaggccttgttggtgggtcggaacgattcctaaccgaattgtttatctaatttatataaattttgattagctgg

SEQ ID NO: 33499 - protein, 158 aa, Zea mays subsp. mays
  misc_feature (50)..(50): Xaa can be any naturally occurring amino acid
MVKVIQGRPAEMGFRMPAEWEPHEQCWMGWPERPDNWRENAGPAQEVFAXTAIAISKFEPVTLCASAKQYPKVHELMEHETNIRVVEMSMNDSWFRDMGPTFVTHKGDSGIAEQTIAGIDWQFNAWGGIYDDWSLDSDVAKKIVEIERIPRFPQKNYP

SEQ ID NO: 33500 - protein, 147 aa, Zea mays subsp. mays
  misc_feature (39)..(39): Xaa can be any naturally occurring amino acid
MGFRMPAEWEPHEQCWMGWPERPDNWRENAGPAQEVFAXTAIAISKFEPVTLCASAKQYPKVHELMEHETNIRVVEMSMNDSWFRDMGPTFVTHKGDSGIAEQTIAGIDWQFNAWGGIYDDWSLDSDVAKKIVEIERIPRFPQKNYP

SEQ ID NO: 33501 - protein, 143 aa, Zea mays subsp. mays
  misc_feature (35)..(35): Xaa can be any naturally occurring amino acid
MPAEWEPHEQCWMGWPERPDNWRENAGPAQEVFAXTAIAISKFEPVTLCASAKQYPKVHELMEHETNIRVVEMSMNDSWFRDMGPTFVTHKGDSGIAEQTIAGIDWQFNAWGGIYDDWSLDSDVAKKIVEIERIPRFPQKNYP

SEQ ID NO: 33502 - DNA, 923 bp, Zea mays subsp. mays
taatcgaaaaaactaaaaaaaagaagcgcacactgtacacgccgtcctccacccgccgcagcacgcacaccagctccacggcgtcggccagggagagcgtgtcaaggcgctcccccatctcctggacccgcgcggcgatgccccgctccgccgcgacgcggtcctcgtcggcgaggcggacggcctcccagatgagcgcgttgggctgtgggcccgagggcgggggcggcggggcctggcggacggcgtccgcgacggacacgaaggcggcgagctcggcgaccaggtgcgggttggggagcgcggtgaggtactcagcgtcggcggaggcctccgggagcaggaggaggagctccaggagccgcgcggagaaccggacccacgacgcggcggcgaaggaggaccggccgagcgggaacgacgacagcgcgagcgggttgcgcccggaggccgggtgccgggcgagcgcggcgaggagctggtcgcggaggatgaacgcgccccgcgccaggaggaccctgagcgccacgaggcacttgagagccacggcggcgtcgccctgccccgaagccgcggcgcgcaggcggtccacgagcgccgcggcgagcgacgcggcggagaggcgcgagccccgtccgaaggccaggagcgcgtccatgtgctgcgcggacggcggcgccgtgctagggtggtgagccgtcgcgcgccacaccgagtggtgcgcgtcggccgcggagcccggggatgcggggcctggggagaggaaggtggatgccagccgccggagcttgagtccaccctacccgcctagtagctagcttgcctgctctataaatccggcgcgccggattgtaatggtcctcttagatttgatgtccctgttgtggaatatagttgtatctctccgcttgctatttttctcg

SEQ ID NO: 33503 - protein, 230 aa, Zea mays subsp. mays
IEKTKKKKRTLYTPSSTRRSTHTSSTASARESVSRRSPISWTRAAMPRSAATRSSSARRTASQMSALGCGPEGGGGGAWRTASATDTKAASSATRCGLGSAVRYSASAEASGSRRRSSRSRAENRTHDAAAKEDRPSGNDDSASGLRPEAGCRASAARSWSRRMNAPRARRTLSATRHLRATAASPCPEAAARRRSTSAAASDAAERREPRPKARSASMCCADGGAVLGW

SEQ ID NO: 33504 - protein, 185 aa, Zea mays subsp. mays
MPRSAATRSSSARRTASQMSALGCGPEGGGGGAWRTASATDTKAASSATRCGLGSAVRYSASAEASGSRRRSSRSRAENRTHDAAAKEDRPSGNDDSASGLRPEAGCRASAARSWSRRMNAPRARRTLSATRHLRATAASPCPEAAARRRSTSAAASDAAERREPRPKARSASMCCADGGAVLGW

SEQ ID NO: 33505 - protein, 167 aa, Zea mays subsp. mays
MSALGCGPEGGGGGAWRTASATDTKAASSATRCGLGSAVRYSASAEASGSRRRSSRSRAENRTHDAAAKEDRPSGNDDSASGLRPEAGCRASAARSWSRRMNAPRARRTLSATRHLRATAASPCPEAAARRRSTSAAASDAAERREPRPKARSASMCCADGGAVLGW

SEQ ID NO: 33506 - DNA, 1046 bp, Zea mays subsp. mays
taatcgaaaaatcgccgccgcatccacccacgggcccaccaaacgacctcgctgcgcccacccgtccgcccccatctagctcagcggtcccgcacaaccgaccactcggcagaatgccgccgcttcggcctccgccgccgcggctcctgctcaacaacgtctcgtgcatgcggaacgcgcagacggtgctccgcgacatcaacctcagcgtccacgacggcacagccctcgtcctgaccggtgcgaacggctccggcaagaccaccctcctccgcatgctggcgggcttttcgcgtccctcggcgggggagatcctctggaatggtcacgacatcacctccccgggcgttttccagcagtacaagctgcagctcaactggatgtcgctcaaggacgccgtcaaagagaagctcacggtgctcgagaacgtccagtggttcgagctcctcgaggggaaggacggcagcaggtcgggcccagccatcgagctcatgggcctcggcaggctcatgaacgagaaggccaggatgctctccatggggcagaggaagcggctgcagctcgccaggctgctcgctatcgaccgacccatctggctgctggacgagccctcagtcgcgctggacgcagagggtaccaggctgcttgaatacattatcgcagagcatcggaagaagggtggcatcgtgtttgtggccacacatctgcccattcagattgaggattctatgtcgcttcggcttccgcagaggtttccccggaggaagacgctggttgatcttgtccgctgatgtcaatgtgagattgtgagcacaggaatttagctgtatctctctaattcctctccagctatctgtctgattgctgttggagcaattactctggtgctgcatttgtcatcctatttttgacaacatggcaacacattgtcgatgttgataatctgtaggggtctttgtgatcaccgattcgatgcattggcccatgtatttggggacactagaaagcatttgccatggctgatatatgtatggctgttctttgtg

SEQ ID NO: 33507 - protein, 262 aa, Zea mays subsp. mays
IEKSPPHPPTGPPNDLAAPTRPPPSSSAVPHNRPLGRMPPLRPPPPRLLLNNVSCMRNAQTVLRDINLSVHDGTALVLTGANGSGKTTLLRMLAGFSRPSAGEILWNGHDITSPGVFQQYKLQLNWMSLKDAVKEKLTVLENVQWFELLEGKDGSRSGPAIELMGLGRLMNEKARMLSMGQRKRLQLARLLAIDRPIWLLDEPSVALDAEGTRLLEYIIAEHRKKGGIVFVATHLPIQIEDSMSLRLPQRFPRRKTLVDLVR

SEQ ID NO: 33508 - protein, 225 aa, Zea mays subsp. mays
MPPLRPPPPRLLLNNVSCMRNAQTVLRDINLSVHDGTALVLTGANGSGKTTLLRMLAGFSRPSAGEILWNGHDITSPGVFQQYKLQLNWMSLKDAVKEKLTVLENVQWFELLEGKDGSRSGPAIELMGLGRLMNEKARMLSMGQRKRLQLARLLAIDRPIWLLDEPSVALDAEGTRLLEYIIAEHRKKGGIVFVATHLPIQIEDSMSLRLPQRFPRRKTLVDLVR

SEQ ID NO: 33509 - protein, 207 aa, Zea mays subsp. mays
MRNAQTVLRDINLSVHDGTALVLTGANGSGKTTLLRMLAGFSRPSAGEILWNGHDITSPGVFQQYKLQLNWMSLKDAVKEKLTVLENVQWFELLEGKDGSRSGPAIELMGLGRLMNEKARMLSMGQRKRLQLARLLAIDRPIWLLDEPSVALDAEGTRLLEYIIAEHRKKGGIVFVATHLPIQIEDSMSLRLPQRFPRRKTLVDLVR

SEQ ID NO: 33510 - DNA, 442 bp, Zea mays subsp. mays
aagatttcccaactttttgttcctcgcgccgccgccgccgccgccgtgacggaaggaagaggaggagcaaggagcacgacgcgatgggccactccaacgtgtggaactcgcaccctaagaactacggccctggctcccgcgtctgccgggtctgcgcgaaccctcacggtctgatcaggaagtacgggctcatgtgctgcaggcagtgcttccgcagcaacgccaaggacattggtttcatcaagtaccgttgaagaggccactgtgctgctgtggagaacttcctacatcaaagaaatgggtccttcattagaaggcctaatttatgcgctttagctttttgttcagaacttgagactcatgtgttaaactcgacttgttaaagttttgatggctactttgtgcttgttggaccagctataatcagaagattgaaattttc

SEQ ID NO: 33511 - protein, 83 aa, Zea mays subsp. mays
DFPTFCSSRRRRRRRDGRKRRSKEHDAMGHSNVWNSHPKNYGPGSRVCRVCANPHGLIRKYGLMCCRQCFRSNAKDIGFIKYR

SEQ ID NO: 33512 - protein, 57 aa, Zea mays subsp. mays
KISQLFVPRAAAAAAVTEGRGGARSTTRWATPTCGTRTLRTTALAPASAGSARTLTV

SEQ ID NO: 33513 - protein, 56 aa, Zea mays subsp. mays
MGHSNVWNSHPKNYGPGSRVCRVCANPHGLIRKYGLMCCRQCFRSNAKDIGFIKYR

SEQ ID NO: 33514 - DNA, 1580 bp, Zea mays subsp. mays
  misc_feature (124)..(124): n is a, c, g, or t
  misc_feature (127)..(127): n is a, c, g, or t
  misc_feature (187)..(188): n is a, c, g, or t
  misc_feature (197)..(198): n is a, c, g, or t
  misc_feature (203)..(204): n is a, c, g, or t
  misc_feature (347)..(347): n is a, c, g, or t
agctccccactctctctccgctgctgcctccgcggacggattccatccccggccctataagtgtggcttcgggacggcgcttcccatccgacaccggcgccttcgcggactgggtcgcctcctncgncgccgcggcgcgcggggacgacctctccctcggcttcaatgccagcgcggcggccgccgnngccgcggcnncctcnngcgcctcgctgggcgcgggcctctggggcccggcgtcctccgcctccgccgccatgcgccaggcggccgccatgaactacgggatggccgacgtggggatggtcgtcgtcgcgcccgccgcctccttccaccacacgcaccancaccaccaccaccacgaggccgccgccgccgccgccgccgcggctgcggcggcctccggcgaccccatcttcccgctgctctccggcggcccctgcgtgcttgatccggacaagtcggcctccgccagcgccatccagttctggcagcagcagcctccgccgccgtcgtcgccggctgctgcagcgggcgctaaccctaaccctagcgccagccccttcgcctacctcaagaagcccctcccgatgctggacgccggcgccggctcctcaggctccggcgccaccacgtgccaggactgcggcaaccaagcgaagaaggactgcggccacaaccggtgccgcacctgctgcaagagccgcggcttcgactgctccacgcacgtcaagagcacctgggtccccgccgcccgccgccgcgagcgccagcagctcgccgcctccggctccgcctcctcctcccccgccaccgcatccgcggcggccgtcgccgcgtccgcgtccaagaagccccgcctcctctcgtcgcagaccaccacctcgcacacgtccacctccaacgccaccacgccccgaagcttcgacaccacgtccagccaccaagacgcgtcgttcagggacagcctcccgaggcaggtgcgcgcgccggcggtgttcaagtgcgtgcgcgtgacgtccatcgaggacggcgaggacgagtacgcgtaccaggcgacggtcaccatcaacggccacctgttcaaggggttcctgtacgaccagggccccgacgacgggcgccacgcggcccaccagcaacgacgactgcacggcccggcgggtgcccaacatctccgagctccatctcggagcggcgtctggttccggcgccggcaccggcacctcgatgtcgatggctcctcccacggggctgtacggtgggggtggcggaggacatcatccgcacattctcggcgggtcgtcgagctacggtaacaccatgaactgatggagtacgttcctcccttctacaccggaagagtcccggcccgttaatttccattccttgttgctcttcattttccacgctatagtagcagagttcaattttctcagccttgtcacccggcgccatagatagcggggcatcaatgcatggcgttattctgttctacctccttcattccatcgtcctactgtgttatttagccattcgttggtgtataataacatcgatgagttgttttttcttcttcc

SEQ ID NO: 33515 - protein, 438 aa, Zea mays subsp. mays
  misc_feature (41)..(42): Xaa can be any naturally occurring amino acid
  misc_feature (62)..(62): Xaa can be any naturally occurring amino acid
  misc_feature (65)..(68): Xaa can be any naturally occurring amino acid
  misc_feature (115)..(115): Xaa can be any naturally occurring amino acid
LPTLSPLLPPRTDSIPGPISVASGRRFPSDTGAFADWVASXXAAARGDDLSLGFNASAAAAXAAXXXXASLGAGLWGPASSASAAMRQAAAMNYGMADVGMVVVAPAASFHHTHXHHHHHEAAAAAAAAAAAASGDPIFPLLSGGPCVLDPDKSASASAIQFWQQQPPPPSSPAAAAGANPNPSASPFAYLKKPLPMLDAGAGSSGSGATTCQDCGNQAKKDCGHNRCRTCCKSRGFDCSTHVKSTWVPAARRRERQQLAASGSASSSPATASAAAVAASASKKPRLLSSQTTTSHTSTSNATTPRSFDTTSSHQDASFRDSLPRQVRAPAVFKCVRVTSIEDGEDEYAYQATVTINGHLFKGFLYDQGPDDGRHAAHQQRRLHGPAGAQHLRAPSRSGVWFRRRHRHLDVDGSSHGAVRWGWRRTSSAHSRRVVELR

SEQ ID NO: 33516 - protein, 353 aa, Zea mays subsp. mays
  misc_feature (30)..(30): Xaa can be any naturally occurring amino acid
MRQAAAMNYGMADVGMVVVAPAASFHHTHXHHHHHEAAAAAAAAAAAASGDPIFPLLSGGPCVLDPDKSASASAIQFWQQQPPPPSSPAAAAGANPNPSASPFAYLKKPLPMLDAGAGSSGSGATTCQDCGNQAKKDCGHNRCRTCCKSRGFDCSTHVKSTWVPAARRRERQQLAASGSASSSPATASAAAVAASASKKPRLLSSQTTTSHTSTSNATTPRSFDTTSSHQDASFRDSLPRQVRAPAVFKCVRVTSIEDGEDEYAYQATVTINGHLFKGFLYDQGPDDGRHAAHQQRRLHGPAGAQHLRAPSRSGVWFRRRHRHLDVDGSSHGAVRWGWRRTSSAHSRRVVELR

SEQ ID NO: 33517 - protein, 347 aa, Zea mays subsp. mays
  misc_feature (24)..(24): Xaa can be any naturally occurring amino acid
MNYGMADVGMVVVAPAASFHHTHXHHHHHEAAAAAAAAAAAASGDPIFPLLSGGPCVLDPDKSASASAIQFWQQQPPPPSSPAAAAGANPNPSASPFAYLKKPLPMLDAGAGSSGSGATTCQDCGNQAKKDCGHNRCRTCCKSRGFDCSTHVKSTWVPAARRRERQQLAASGSASSSPATASAAAVAASASKKPRLLSSQTTTSHTSTSNATTPRSFDTTSSHQDASFRDSLPRQVRAPAVFKCVRVTSIEDGEDEYAYQATVTINGHLFKGFLYDQGPDDGRHAAHQQRRLHGPAGAQHLRAPSRSGVWFRRRHRHLDVDGSSHGAVRWGWRRTSSAHSRRVVELR

SEQ ID NO: 33518 - DNA, 1431 bp, Zea mays subsp. mays
  misc_feature (853)..(853): n is a, c, g, or t
tccgaacgacgccgcgcctgccgctcctccgctgcgtcctcctcgtggcctcctgcatcccccccgccatgccgccggtcgccgacgagggcgagtgggcggcggtggagcgccggggcccgcacctgtgggcgtcggggcgacccttcgtcgtccacggcttcaacacctactggctcatgtacttcgcggccgaccccgcaacgcgcgccgccgtcacagccgccctcgcggacgccgcccgctcggggctcaacgtgtgccgcacctgggccttcaacgacggggggcaccgcgcgctgcagctcaagcccttctcctacgacgaggaggtcttccaggctttagatttcgtgatcagcgaggcaagaaaccacaggatgagactgatactggcactgtgtaataactgggaagattacggaggtaaggcacagtatgtaaggtggggaaatgaggctggcctggatcttacttccgatgacgacgctttcttctctcatgccacaatcaagagctactataaagcttttgttaaggctgttttgacaagaaaaaacacaatcacaaatgtcgcctacatggatgaccctacgattcttgcctgggagctgattaatgagccacgctgccattccgatccatcaggcgacacattgcaggcatggatagaagagatggcgtcttatgtgaaggatatagaccctgtgcaccttttagagatcggtgttgaagggttttatggtccgtcgactccagaacttctgcacgtgaacccagatgcttattctggaactattggaacagattttatcaggaaccatcatgcactgggaattgatttggcttctgntcatatttattctgacaattggttaactcactctgaagaggacagtcacctccattttgtgaaaacctggatgcaacagcatattgatgatgcagccaacttgcttgggatgccaattctgatcggggagtttggggtatcgcttaaggatggaaagtttgaccataagtttcgtgaagctttcatggatacagtgtacaacatttttttgcgctcttggaagactggggtgattggagaaggctgcattgtttggcagcttttccctgaaagcgctgatcacatggatgatggttatgcagttatttttgcaaaatcaccagcaaccacattaaaattacttgcagatcactcgagaagtctggaatcttgacaatctattgcctccctaattacacaagtatatgacagagtccatgctgtaaaggtttgaaaccaaaaacatgtcccagaaagttgaatgttcagtttgtaaattgcaaggcacgtgtgagtatgacacaataatatgtactggtctctggatctaaaaaataatgtgttttcatgcaaatgaaaggctagatacggaactttgg

SEQ ID NO: 33519 - protein, 407 aa, Zea mays subsp. mays
  misc_feature (284)..(284): Xaa can be any naturally occurring amino acid
RTTPRLPLLRCVLLVASCIPPAMPPVADEGEWAAVERRGPHLWASGRPFVVHGFNTYWLMYFAADPATRAAVTAALADAARSGLNVCRTWAFNDGGHRALQLKPFSYDEEVFQALDFVISEARNHRMRLILALCNNWEDYGGKAQYVRWGNEAGLDLTSDDDAFFSHATIKSYYKAFVKAVLTRKNTITNVAYMDDPTILAWELINEPRCHSDPSGDTLQAWIEEMASYVKDIDPVHLLEIGVEGFYGPSTPELLHVNPDAYSGTIGTDFIRNHHALGIDLASXHIYSDNWLTHSEEDSHLHFVKTWMQQHIDDAANLLGMPILIGEFGVSLKDGKFDHKFREAFMDTVYNIFLRSWKTGVIGEGCIVWQLFPESADHMDDGYAVIFAKSPATTLKLLADHSRSLES

SEQ ID NO: 33520 - protein, 385 aa, Zea mays subsp. mays
  misc_feature (262)..(262): Xaa can be any naturally occurring amino acid
MPPVADEGEWAAVERRGPHLWASGRPFVVHGFNTYWLMYFAADPATRAAVTAALADAARSGLNVCRTWAFNDGGHRALQLKPFSYDEEVFQALDFVISEARNHRMRLILALCNNWEDYGGKAQYVRWGNEAGLDLTSDDDAFFSHATIKSYYKAFVKAVLTRKNTITNVAYMDDPTILAWELINEPRCHSDPSGDTLQAWIEEMASYVKDIDPVHLLEIGVEGFYGPSTPELLHVNPDAYSGTIGTDFIRNHHALGIDLASXHIYSDNWLTHSEEDSHLHFVKTWMQQHIDDAANLLGMPILIGEFGVSLKDGKFDHKFREAFMDTVYNIFLRSWKTGVIGEGCIVWQLFPESADHMDDGYAVIFAKSPATTLKLLADHSRSLES

SEQ ID NO: 33521 - protein, 348 aa, Zea mays subsp. mays
  misc_feature (225)..(225): Xaa can be any naturally occurring amino acid
MYFAADPATRAAVTAALADAARSGLNVCRTWAFNDGGHRALQLKPFSYDEEVFQALDFVISEARNHRMRLILALCNNWEDYGGKAQYVRWGNEAGLDLTSDDDAFFSHATIKSYYKAFVKAVLTRKNTITNVAYMDDPTILAWELINEPRCHSDPSGDTLQAWIEEMASYVKDIDPVHLLEIGVEGFYGPSTPELLHVNPDAYSGTIGTDFIRNHHALGIDLASXHIYSDNWLTHSEEDSHLHFVKTWMQQHIDDAANLLGMPILIGEFGVSLKDGKFDHKFREAFMDTVYNIFLRSWKTGVIGEGCIVWQLFPESADHMDDGYAVIFAKSPATTLKLLADHSRSLES

SEQ ID NO: 33522 - DNA, 1358 bp, Zea mays subsp. mays
gcacgagaccattacctagaacatcctaatcaaaaaaaaatttgggttgtaaatcgccactcctcttcccacacagtcattgagttcgtctgcagtaaggcatcccatgttcctccgccgccgtctcctctccaccgctgccgctgcgaccgccgcccgcggcccaccgccgatccgcgtgtccctaacggagtccgcgggccgcggcgtcttcgctacccgcccagtatcttctggcgagctcctccactcagcgcagcccctcgtctcccacccctcccactctctgctccacgaggtttgctacaattgcctcagaaggaagcccggggaagggcgcgcttcaagcgggggtgactacttctgcagcgatgcttgcagggaccacgccaaggggttccatgacattgaaaagaatgtagattggtctttattcgattaccactgcagttcacgtgatctgaagtacccatacatggccaagcgccttgcttgcatggttatatcaggagctgctaatgcagattgccttaacatacttcagccagctctgttgcaccaggggacgctgattgagatgaaagaggaatttgagttgttggaatccacttttagaaaagctggatttcaggaagaaatcacaacctttttgaccatagattggtacatcaatgtattggcaagaatacgcataaatgcttttcgtattgaattggttgcaagttcatatgaggatctcttatcctcagcggcagcctctgtatcatgtgattcatcagttggcaatgcggtttatatgctcccatctttctacaaccatgactgcgatccgaatgctcacattgtttggctgcaaaacgcggacgcgaaattgaaggctctccgcgacattgaagaaggcgaggagctgtgcatctgctacatcgatgctagcatggatgccgacgctagacagaagattcttgctgatggatttggcttcgagtgccgttgccttcggtgcttgtctggagactagaaaccatgtctactttcttcctgagcatgagtttgtcttcgattgtagcggattgaagcggttggtgctgagtaccatcagaatcttaagttgcaatcttctgtacactagttacagccacgccaattgagttgtggttaagcattactttgccttttgcacttccctaccacgacatgctagaaatgttgtggtgtaaatgttgtagccgtttttgtttagcttcttgttcagtccttagtgtcagaaataaaatttcgataatactcggatcatttgaataccggaaaccttgtagctgtagttggggtagcattacatatattatactcttgactct

SEQ ID NO: 33523 - protein, 303 aa, Zea mays subsp. mays
MFLRRRLLSTAAAATAARGPPPIRVSLTESAGRGVFATRPVSSGELLHSAQPLVSHPSHSLLHEVCYNCLRRKPGEGRASSGGDYFCSDACRDHAKGFHDIEKNVDWSLFDYHCSSRDLKYPYMAKRLACMVISGAANADCLNILQPALLHQGTLIEMKEEFELLESTFRKAGFQEEITTFLTIDWYINVLARIRINAFRIELVASSYEDLLSSAAASVSCDSSVGNAVYMLPSFYNHDCDPNAHIVWLQNADAKLKALRDIEEGEELCICYIDASMDADARQKILADGFGFECRCLRCLSGD

SEQ ID NO: 33524 - protein, 180 aa, Zea mays subsp. mays
MAKRLACMVISGAANADCLNILQPALLHQGTLIEMKEEFELLESTFRKAGFQEEITTFLTIDWYINVLARIRINAFRIELVASSYEDLLSSAAASVSCDSSVGNAVYMLPSFYNHDCDPNAHIVWLQNADAKLKALRDIEEGEELCICYIDASMDADARQKILADGFGFECRCLRCLSGD

SEQ ID NO: 33525 - protein, 173 aa, Zea mays subsp. mays
MVISGAANADCLNILQPALLHQGTLIEMKEEFELLESTFRKAGFQEEITTFLTIDWYINVLARIRINAFRIELVASSYEDLLSSAAASVSCDSSVGNAVYMLPSFYNHDCDPNAHIVWLQNADAKLKALRDIEEGEELCICYIDASMDADARQKILADGFGFECRCLRCLSGD

SEQ ID NO: 33526 - DNA, 822 bp, Zea mays subsp. mays
gaaaaaactatctctctcccattcatcatcctctccgaatcgctgtcagtcgccaaaccctagctagctcctcctatcgggagagattcgatctcgcccttctcgccgtgggaccgtcggcgcatggcctccggcggcaaccccaacccaaccggcgctcccacccagccgcgcccaatgcatcagcagcagcagcagcctcaaacgggcggctcaccggcaacgcccatgacccaccttcgccctccctccctcgccggctcccccttccagggcctcttccacacgccgcccacccacaaccccgccttccagatccacatgggtgcctcgtcctcaccccagactccgctcatggccgccactgcaggatcggccaagcgccccccgcaaaagccccctgtccggcccctggcacccggctcaacctcgtcggccgcagcggcctcggcggctgccgcgtacaaggctgcggccgcggcggcggccgttgccaactctgggggcgtcgacctcacccccgccgcgcggcgcagcaagaagcgcaaactccccgagaagcagctccctgaccgcgtcgccgcgctctcccagagtccgccctctacacgcagctgctcgagttcgaggcccgcgtggacgccgcgcttgcgcggaagaaggtagacatccaggaggcgctcaagacgccgccctcgctccagcgcacactccgcatctacgtcttcaacaccttcgctaaccaggggcctcgcaccatcccaccacccaagaatgctgacccaccaacctggtcgctcaagatcattggtcgcgtgctgg

SEQ ID NO: 33527 - protein, 189 aa, Zea mays subsp. mays
KNYLSPIHHPLRIAVSRQTLASSSYRERFDLALLAVGPSAHGLRRQPQPNRRSHPAAPNASAAAAASNGRLTGNAHDPPSPSLPRRLPLPGPLPHAAHPQPRLPDPHGCLVLTPDSAHGRHCRIGQAPPAKAPCPAPGTRLNLVGRSGLGGCRVQGCGRGGGRCQLWGRRPHPRRAAQQEAQTPREAAP

SEQ ID NO: 33528 - protein, 180 aa, Zea mays subsp. mays
MASGGNPNPTGAPTQPRPMHQQQQQPQTGGSPATPMTHLRPPSLAGSPFQGLFHTPPTHNPAFQIHMGASSSPQTPLMAATAGSAKRPPQKPPVRPLAPGSTSSAAAASAAAAYKAAAAAAAVANSGGVDLTPAARRSKKRKLPEKQLPDRVAALSQSPPSTRSCSSSRPAWTPRLRGRR

SEQ ID NO: 33529 - protein, 162 aa, Zea mays subsp. mays
MHQQQQQPQTGGSPATPMTHLRPPSLAGSPFQGLFHTPPTHNPAFQIHMGASSSPQTPLMAATAGSAKRPPQKPPVRPLAPGSTSSAAAASAAAAYKAAAAAAAVANSGGVDLTPAARRSKKRKLPEKQLPDRVAALSQSPPSTRSCSSSRPAWTPRLRGRR

SEQ ID NO: 33530 - DNA, 1210 bp, Zea mays subsp. mays
atgattgggccgaatttggattgtcacgggtccgcgaccgcgaattgggctcggtttgatttagccgacatagtagtgaccgacccgagccggcggcgagccaaaccgagcggacgccgccatggatcgcgagtggggctccaagcccggcagcggcggcgccgcctccgcgcagaatgaggccatcgaccggcgggagcgcctccgccgcctggccctcgagaccatcgacctcgccaaggacccctatttcatgcgcaaccacctcggcagctacgagtgcaagctgtgcctgacgctgcacaacaatgaggggaactacctggcccacacgcaggggaagcggcaccagaccaacctcgccaagcgcgccgcccgcgaggccaaggacgcacccgcgcagcctcagcccaacaagcgcaagcttgccccccgcaagtctgttaagattggcagacctgggtataaagtaaccaaacaatatgatcctgagatgaagcaacactcgtttctttttgaaattggttacccggaaatcgaagataattgcaagccaaggcaccgtttcatgtcatcatatgaacagaaagtccaaagttgggataagggttatcagtacctactttttgctgcagagccctatgaaattattgcattcaagataccaagtacagagattgataaatcagcgaacaaattcttctcttactgggatcctgacaagaaggaatatctactgcaactgtacttcaagccaagaccgccagaagctaataaaccaccaccagctcctccggggactttgcctaatgggactggggttcctggtgctccaacaaggccaccggcgcaagcccctccacccctaccacaagttccaccgcccccgcctcatgcacctcctcctgcacccatgggaatgccccctaggattcctccaccccctatgggtggtgttcaacctccgccgcctcctccaccgccagttgcaaatggtccgcggccaatgattccaccgccacctaacttcactcctggagcacccccaccacgccctccaatgcatggttttcctgggcaacaacagcagtagttaagtgcttagcaatgttccagtaattgacagtcggcaaaagtttcacgcttgcttgtgttgccttatgttttccaactcaaaactttgaatgttatcataggcttacatggtcgc

SEQ ID NO: 33531 - protein, 323 aa, Zea mays subsp. mays
MDREWGSKPGSGGAASAQNEAIDRRERLRRLALETIDLAKDPYFMRNHLGSYECKLCLTLHNNEGNYLAHTQGKRHQTNLAKRAAREAKDAPAQPQPNKRKLAPRKSVKIGRPGYKVTKQYDPEMKQHSFLFEIGYPEIEDNCKPRHRFMSSYEQKVQSWDKGYQYLLFAAEPYEIIAFKIPSTEIDKSANKFFSYWDPDKKEYLLQLYFKPRPPEANKPPPAPPGTLPNGTGVPGAPTRPPAQAPPPLPQVPPPPPHAPPPAPMGMPPRIPPPPMGGVQPPPPPPPPVANGPRPMIPPPPNFTPGAPPPRPPMHGFPGQQQQ

SEQ ID NO: 33532 - protein, 279 aa, Zea mays subsp. mays
MRNHLGSYECKLCLTLHNNEGNYLAHTQGKRHQTNLAKRAAREAKDAPAQPQPNKRKLAPRKSVKIGRPGYKVTKQYDPEMKQHSFLFEIGYPEIEDNCKPRHRFMSSYEQKVQSWDKGYQYLLFAAEPYEIIAFKIPSTEIDKSANKFFSYWDPDKKEYLLQLYFKPRPPEANKPPPAPPGTLPNGTGVPGAPTRPPAQAPPPLPQVPPPPPHAPPPAPMGMPPRIPPPPMGGVQPPPPPPPPVANGPRPMIPPPPNFTPGAPPPRPPMHGFPGQQQQ

SEQ ID NO: 33533 - protein, 199 aa, Zea mays subsp. mays
MKQHSFLFEIGYPEIEDNCKPRHRFMSSYEQKVQSWDKGYQYLLFAAEPYEIIAFKIPSTEIDKSANKFFSYWDPDKKEYLLQLYFKPRPPEANKPPPAPPGTLPNGTGVPGAPTRPPAQAPPPLPQVPPPPPHAPPPAPMGMPPRIPPPPMGGVQPPPPPPPPVANGPRPMIPPPPNFTPGAPPPRPPMHGFPGQQQQ

SEQ ID NO: 33534 - DNA, 1552 bp, Zea mays subsp. mays
  misc_feature (1222)..(1222): n is a, c, g, or t
  misc_feature (1291)..(1291): n is a, c, g, or t
  misc_feature (1295)..(1295): n is a, c, g, or t
  misc_feature (1310)..(1310): n is a, c, g, or t
  misc_feature (1329)..(1329): n is a, c, g, or t
  misc_feature (1345)..(1345): n is a, c, g, or t
  misc_feature (1366)..(1366): n is a, c, g, or t
  misc_feature (1378)..(1378): n is a, c, g, or t
  misc_feature (1381)..(1381): n is a, c, g, or t
  misc_feature (1383)..(1383): n is a, c, g, or t
  misc_feature (1385)..(1385): n is a, c, g, or t
  misc_feature (1520)..(1520): n is a, c, g, or t
  misc_feature (1531)..(1532): n is a, c, g, or t
ctgccttttggtgttttttcttctcccgttcaagtcgcgtgctgctttcttctctcgttcacctcgcgtgcgcgaaccaactagggcgaccgctgccgccctacggcctacgcccagctgctcaggtcttattcgggcctttggcggcgagaaccgactgcgccaggataatggctcaccgtggacacttagatggactgactgcccaggctccagcactgatgcgccatggttccttcgctgcaggcagcctttctagccactcacctttggagtcttcatctacactggagatgctggagaacaagcttgccatgcaaactgcagaagtggaaaagcttatcatggagaatcagcggttagcatcaagccatgtggtcttgaggcaggacattgttgatacagagaaagagatgcaaataatccgcacccacctaggtgaagttcagacagagactgatttgcatattagagatttattggagagaattagattaatggaggcagacatacatagtggtgatgcggtgaagaaggagcttcatcaagtgcatatggaggcaaagagacttattactgaaaggcagatgctgacccttgagacagaggatgtgactaaagaattacagaaactctctgcctctggtgacagtaaaagccttcctgaattgctagctgagctagatgggctaaggaaagagcatcttaatttacgatctcaatttgaatttgagaaaaatacaaacatcaagcaagttgagcagatgcggacaatggaaatgaacttgatgaccatgactaaacaagctgagaagttacgaggtgatgtggcaaatgctgaaagacgggcacaggcagctgtggctaaagcaacagggcatgcagctggtgcacaggtgacagcttcacagcctgggacagctcaagctacagcggttccagcagcagctacagatccatatgcaggtgcatatgccagttacccccctgcatatcagcagggagcccaggctggggcgtaccaacagggagcccaggctgggacgtaccagcagggagcgggaacccaggctggggcgtaccagcagggagcccagtctggggcgtaccagcagggagcccaggctggggcgtaccaacagggagcccaaactggggcataccaacagggaacccaagctgggacatatcagcagggaacccaagctgggacatatcagcnaggaaaccaggctggagcatatccctatgcttatgatgctgccacggcttacacatatgcaggttattntggntatccagttgcaggntatgcgcaaagtgcagtgnccaattattcctatgntgcacctccacagccaataancagtggtgcagntangnangccgcaagcctgtatggtgccgttggtagcgccggatatcctactgcgcaagttcagccgagcagtggccctgcaaatgcagcgccaccacctccaccaccaccggcagcaccatatccaagcacatatgaccanaccagaggagnncagaggtgaaatctgggatg

SEQ ID NO: 33535 - protein, 512 aa, Zea mays subsp. mays
  misc_feature (407)..(407): Xaa can be any naturally occurring amino acid
  misc_feature (430)..(431): Xaa can be any naturally occurring amino acid
  misc_feature (436)..(436): Xaa can be any naturally occurring amino acid
  misc_feature (443)..(443): Xaa can be any naturally occurring amino acid
  misc_feature (448)..(448): Xaa can be any naturally occurring amino acid
  misc_feature (455)..(455): Xaa can be any naturally occurring amino acid
  misc_feature (459)..(461): Xaa can be any naturally occurring amino acid
  misc_feature (506)..(506): Xaa can be any naturally occurring amino acid
  misc_feature (510)..(510): Xaa can be any naturally occurring amino acid
AFWCFFFSRSSRVLLSSLVHLACANQLGRPLPPYGLRPAAQVLFGPLAARTDCARIMAHRGHLDGLTAQAPALMRHGSFAAGSLSSHSPLESSSTLEMLENKLAMQTAEVEKLIMENQRLASSHVVLRQDIVDTEKEMQIIRTHLGEVQTETDLHIRDLLERIRLMEADIHSGDAVKKELHQVHMEAKRLITERQMLTLETEDVTKELQKLSASGDSKSLPELLAELDGLRKEHLNLRSQFEFEKNTNIKQVEQMRTMEMNLMTMTKQAEKLRGDVANAERRAQAAVAKATGHAAGAQVTASQPGTAQATAVPAAATDPYAGAYASYPPAYQQGAQAGAYQQGAQAGTYQQGAGTQAGAYQQGAQSGAYQQGAQAGAYQQGAQTGAYQQGTQAGTYQQGTQAGTYQXGNQAGAYPYAYDAATAYTYAGYXXYPVAXYAQSAVXNYSYXAPPQPIXSGAXXXAASLYGAVGSAGYPTAQVQPSSGPANAAPPPPPPPAAPYPSTYDXTRGXQR

SEQ ID NO: 33536 - protein, 456 aa, Zea mays subsp. mays
  misc_feature (351)..(351): Xaa can be any naturally occurring amino acid
  misc_feature (374)..(375): Xaa can be any naturally occurring amino acid
  misc_feature (380)..(380): Xaa can be any naturally occurring amino acid
  misc_feature (387)..(387): Xaa can be any naturally occurring amino acid
  misc_feature (392)..(392): Xaa can be any naturally occurring amino acid
  misc_feature (399)..(399): Xaa can be any naturally occurring amino acid
  misc_feature (403)..(405): Xaa can be any naturally occurring amino acid
  misc_feature (450)..(450): Xaa can be any naturally occurring amino acid
  misc_feature (454)..(454): Xaa can be any naturally occurring amino acid
MAHRGHLDGLTAQAPALMRHGSFAAGSLSSHSPLESSSTLEMLENKLAMQTAEVEKLIMENQRLASSHVVLRQDIVDTEKEMQIIRTHLGEVQTETDLHIRDLLERIRLMEADIHSGDAVKKELHQVHMEAKRLITERQMLTLETEDVTKELQKLSASGDSKSLPELLAELDGLRKEHLNLRSQFEFEKNTNIKQVEQMRTMEMNLMTMTKQAEKLRGDVANAERRAQAAVAKATGHAAGAQVTASQPGTAQATAVPAAATDPYAGAYASYPPAYQQGAQAGAYQQGAQAGTYQQGAGTQAGAYQQGAQSGAYQQGAQAGAYQQGAQTGAYQQGTQAGTYQQGTQAGTYQXGNQAGAYPYAYDAATAYTYAGYXXYPVAXYAQSAVXNYSYXAPPQPIXSGAXXXAASLYGAVGSAGYPTAQVQPSSGPANAAPPPPPPPAAPYPSTYDXTRGXQR

SEQ ID NO: 33537 - protein, 439 aa, Zea mays subsp. mays
  misc_feature (334)..(334): Xaa can be any naturally occurring amino acid
  misc_feature (357)..(358): Xaa can be any naturally occurring amino acid
  misc_feature (363)..(363): Xaa can be any naturally occurring amino acid
  misc_feature (370)..(370): Xaa can be any naturally occurring amino acid
  misc_feature (375)..(375): Xaa can be any naturally occurring amino acid
  misc_feature (382)..(382): Xaa can be any naturally occurring amino acid
  misc_feature (386)..(388): Xaa can be any naturally occurring amino acid
  misc_feature (433)..(433): Xaa can be any naturally occurring amino acid
  misc_feature (437)..(437): Xaa can be any naturally occurring amino acid
MRHGSFAAGSLSSHSPLESSSTLEMLENKLAMQTAEVEKLIMENQRLASSHVVLRQDIVDTEKEMQIIRTHLGEVQTETDLHIRDLLERIRLMEADIHSGDAVKKELHQVHMEAKRLITERQMLTLETEDVTKELQKLSASGDSKSLPELLAELDGLRKEHLNLRSQFEFEKNTNIKQVEQMRTMEMNLMTMTKQAEKLRGDVANAERRAQAAVAKATGHAAGAQVTASQPGTAQATAVPAAATDPYAGAYASYPPAYQQGAQAGAYQQGAQAGTYQQGAGTQAGAYQQGAQSGAYQQGAQAGAYQQGAQTGAYQQGTQAGTYQQGTQAGTYQXGNQAGAYPYAYDAATAYTYAGYXXYPVAXYAQSAVXNYSYXAPPQPIXSGAXXXAASLYGAVGSAGYPTAQVQPSSGPANAAPPPPPPPAAPYPSTYDXTRGXQR

SEQ ID NO: 33538 - DNA, 1099 bp, Zea mays subsp. mays
aactgcagccgtcggatactcccacaggagcgttccgaagccctaatgctcgcccttcccataagtactctcctctgaccacgccgccgccatttccttcctcctcccacctcggcggccggcctcctcttctcttcacccacacgctggtcatagagatgtcggctgcagaggcgaaggcggcggcggtcccggagtctgtgctgcggaagcgcaagcgggaggagcaatgggcagcggacaagaaggagaaggcgctcgcggacaggaagaaggcgctcgagagccgcaagatcatcttcgcccgcgccaagcagtacgccgaggagtaccacgcccaggagaaggagcttgtgcagctcaagcgtgaggcccggttgaagggtgggttctatgtgagcccagaggccaagcttctgtttgtggttcgcatccgtggtatcaatgccatgcaccccaagacccgcaagatcttgcagctcctgcgattgaggcagatcttcaacggtgtcttcctcaaggttaacaaggcaaccattaacatgctgcgcagggtggagccatatgttgcgtacggataccccaacctgaagagcgttagggagttgatctacaagagaggttacgggaagctgaacaagcagaggattccacttagcaacaacagtgtcatcgaggagggcctcgggaagcacaatatcatctgcattgaggaccttgtccacgagatcatgacggtgggcccgcacttcaaggaggccaacaacttcctctggccgttcaagctgaaggcacccctcggcggcctcaagaagaagaggaaccactacgtggagggcggtgacgccggaaaccgtgagaactacatcaacgagctcatcaagaggatgaactaggttctctcttgtatcctgtgagaatgcttttctgtgtcagcgtggttgtttttgctctagtaagttgacggataatgatggatatgcaattttttttggtgttcattggctctaatacagccagacttcactaggaactgtgtcgctgtttatgttggcagtagcttctggaggtttttgtgtacttttgttatttttattct

SEQ ID NO: 33539 - protein, 297 aa, Zea mays subsp. mays
LQPSDTPTGAFRSPNARPSHKYSPLTTPPPFPSSSHLGGRPPLLFTHTLVIEMSAAEAKAAAVPESVLRKRKREEQWAADKKEKALADRKKALESRKIIFARAKQYAEEYHAQEKELVQLKREARLKGGFYVSPEAKLLFVVRIRGINAMHPKTRKILQLLRLRQIFNGVFLKVNKATINMLRRVEPYVAYGYPNLKSVRELIYKRGYGKLNKQRIPLSNNSVIEEGLGKHNIICIEDLVHEIMTVGPHFKEANNFLWPFKLKAPLGGLKKKRNHYVEGGDAGNRENYINELIKRMN

SEQ ID NO: 33540 - protein, 245 aa, Zea mays subsp. mays
MSAAEAKAAAVPESVLRKRKREEQWAADKKEKALADRKKALESRKIIFARAKQYAEEYHAQEKELVQLKREARLKGGFYVSPEAKLLFVVRIRGINAMHPKTRKILQLLRLRQIFNGVFLKVNKATINMLRRVEPYVAYGYPNLKSVRELIYKRGYGKLNKQRIPLSNNSVIEEGLGKHNIICIEDLVHEIMTVGPHFKEANNFLWPFKLKAPLGGLKKKRNHYVEGGDAGNRENYINELIKRMN

SEQ ID NO: 33541 - protein, 148 aa, Zea mays subsp. mays
MHPKTRKILQLLRLRQIFNGVFLKVNKATINMLRRVEPYVAYGYPNLKSVRELIYKRGYGKLNKQRIPLSNNSVIEEGLGKHNIICIEDLVHEIMTVGPHFKEANNFLWPFKLKAPLGGLKKKRNHYVEGGDAGNRENYINELIKRMN

SEQ ID NO: 33542 - DNA, 611 bp, Zea mays subsp. mays
atgcacaacacaacgcttataatacttacaacaaaagataagcccacgaatcagtagatcgaggtcccgcccagtccagcaaaagcacacacggagatgtcccagctgagctctgctggccacatggctgcgacgttcctcctcatcctcctcgcctccgcagcagcaacggtgtcagctgaccaacaagtctctgcctgccagaatgacatagacgcactgtggcgcagctgcaagcagttcgtccagaaggaggggcccaagatgcctccgtccgaggactgctgcaaaaccatcaaggccttagacgcgcacgcgtcctgcatctgcgactacgtcggctccccggacgccaggaataagctagacctggacaaggtgttcttcgttaccaaacagtgcggcgtcaccgtccccaagggctgcggatcaaagcaggactgaagagcggctgaatctgaatggagcaagttggctaacatacgcacggcagctacaaatacttataggaataaataaagttggtcaactgttggtttcatggtgttggagtacaacaactgtactgttcttatcctcatatatgatatatgaactctagttcatcacat

SEQ ID NO: 33543 - protein, 115 aa, Zea mays subsp. mays
MSQLSSAGHMAATFLLILLASAAATVSADQQVSACQNDIDALWRSCKQFVQKEGPKMPPSEDCCKTIKALDAHASCICDYVGSPDARNKLDLDKVFFVTKQCGVTVPKGCGSKQD

SEQ ID NO: 33544 - protein, 106 aa, Zea mays subsp. mays
MAATFLLILLASAAATVSADQQVSACQNDIDALWRSCKQFVQKEGPKMPPSEDCCKTIKALDAHASCICDYVGSPDARNKLDLDKVFFVTKQCGVTVPKGCGSKQD

SEQ ID NO: 33545 - protein, 59 aa, Zea mays subsp. mays; identical to SEQ ID NO: 17237

SEQ ID NO: 33546 - DNA, 1112 bp, Zea mays subsp. mays
gtcttctcgcgatggggagcaccggcgacacgacgatggccgaggcggaggcgccggcgccggtgggtgactacgagctgctggagcgcctgggggggcgtcccccgtacacgtccgtgtggcgagcggtctcccggtccaccggcacgcccgtggctgtgaagcaggtgcggctcaccggcctccccgcgcgcctccgcgacagcctcgactgcgaggtccgcttcctcgccgccgtcagccaccccaacatcatccgcctcatcgacgtcgtccagacccagagctgcctttacctcgtcctggagctctgcgagggcggggacctggcggccttcatccggcgcaatgggagcgtagacgagcgcgtggccagaaattttatgaaacagatcggagctggcttacaagtgctgcaccggcaccatgtcgtccaccgggacttgaaacctcagaatatcctgctctcttctccgagaagcagcgatgcgatcctcaagatatctgattttggtcttgcaaggtttcttggacccggggagtacgcagacacatcttgtggttcttgtttgtacatggccccagaagttgctgtttcaaaagtacaatgacaaggtagacatgtggagcatcggcgcgatcctatttgagctcttgaatggctacccgccattctatggcagaagcaacgtgcagctgcttcagtacatcaacagaagcacgtctctcccgttctcggaaccactggcgtctaccttaggccccgattgtgtcgatatatgcaccaggctactatgcactaatccagtgaagcgtctgtccttccaagagttcttggaccaccgcttcttcagagtatgagtgcccaagccatggggaccaccgggcagcgacatgatctgaagaacatcaagaagtttcttgtccttggagtgctgactgactctgttataaagcgttcagaaattgatgcccagtgctcgtcgtcttggttttctgttcgcgtccatttccttctccaaagagccatgtggccaacgtttcaatctgttgtgatctggtctgtactgtttcaatctgctaacagtaggagttttaaagatatttagtcc

SEQ ID NO: 33547 - protein, 202 aa, Zea mays subsp. mays
LLAMGSTGDTTMAEAEAPAPVGDYELLERLGGRPPYTSVWRAVSRSTGTPVAVKQVRLTGLPARLRDSLDCEVRFLAAVSHPNIIRLIDVVQTQSCLYLVLELCEGGDLAAFIRRNGSVDERVARNFMKQIGAGLQVLHRHHVVHRDLKPQNILLSSPRSSDAILKISDFGLARFLGPGEYADTSCGSCLYMAPEVAVSKVQ

SEQ ID NO: 33548 - protein, 199 aa, Zea mays subsp. mays
MGSTGDTTMAEAEAPAPVGDYELLERLGGRPPYTSVWRAVSRSTGTPVAVKQVRLTGLPARLRDSLDCEVRFLAAVSHPNIIRLIDVVQTQSCLYLVLELCEGGDLAAFIRRNGSVDERVARNFMKQIGAGLQVLHRHHVVHRDLKPQNILLSSPRSSDAILKISDFGLARFLGPGEYADTSCGSCLYMAPEVAVSKVQ

SEQ ID NO: 33549 - protein, 191 aa, Zea mays subsp. mays
MAEAEAPAPVGDYELLERLGGRPPYTSVWRAVSRSTGTPVAVKQVRLTGLPARLRDSLDCEVRFLAAVSHPNIIRLIDVVQTQSCLYLVLELCEGGDLAAFIRRNGSVDERVARNFMKQIGAGLQVLHRHHVVHRDLKPQNILLSSPRSSDAILKISDFGLARFLGPGEYADTSCGSCLYMAPEVAVSKVQ

SEQ ID NO: 33550 - DNA, 1707 bp, Zea mays subsp. mays
gaatcgagcggtgactggcgaggcaaaagcgcaaacgcgaccacagacagcgcgcgcttcaaggcctttttttttgagataacaaggaggagaggaggagatggcggtcacgatcacgtgggtgaaggcgaggcagatcttcgacagccgcggcaaccccaccgtcgaggtggacgtgggcctcagcgacggcagctacgcgaggggggccgtacccagcggcgcatccactggaatatatgaggccttggagttgagggatggaggatctgattatcttggcaagggtgttcttaaggctgtcagcaatgtaaacaacattattggaccagcgattgttggaaaggaccccactgagcaggttgagattgacaacttcatggtccaacagcttgacggaacctccaatgagtggggctggtgcaaacagaagcttggagcaaatgccatccttgcggtttcacttgctgtgtgcaaagctggagctatggtgaagaagattcctctttaccagcacatcgcaaatcttgctgggaacaaaactctggtgctccctgtacctgcctttaatgtgattaatggagggtcacatgctggaaacaagcttgccatgcaggagttcatgatcctcccaactggtgcctcctcgttcaaggaggccatgaagatgggagttgaggtgtaccacaacctgaagagcataatcaagaagaagtacggtcaggatgcgacaaatgttggggatgaaggtggttttgcacctaacattcaggaaaacaaagaaggccttgaactattgaaggcagccatagaaaaggctggctacactggaaaggtggtcattggaatggatgttgctgcttctgagttcttcggtgagaaagacaagacttatgatcttaatttcaaggaggagaacaacgatggctcaaacaaaatttcaggcgacagcctgaaagacctgtacaagtcctttgtttctgagtaccctatcgagtcgatcgaagatccatttgatcaggatgactggagcacttatgccaaactcactgatgagattggacagaaagtgcagattgtaggagatgatcttctcgttaccaaccccaccagggtcgccaaggccatcaatgagaagacctgcaatgctctcctcttgaaggtgaaccaaatcgggtctgtgaccgagagtatcgaagctgtcaggatgtccaagcgcgccggatggggagtgatggcaagccacaggagtggcgagacagaggacaccttcattgctgacctctcagttggcctgtctacgggccaaatcaagacgggagctccttgccggtctgagcgcctggccaaatacaaccagctgctcaggatcgaggaagagctcggtgatgccgcggtctacgccggagcaaagttcagggcaccagtggagccctactaagaaaggaagaggatgaggatgttttcttgtggagctatactagctcgctgctgccttttgttacaatgtttgtacggtcgcaataaatgtatggtcgtgtttgctcgagagctactcaggtgattttgtcgtgggagcaccaaaagcagaaaagaactgtttttttttcaatctctctagattctgacgagtggtggtctgcactcgtcgtaatgtcgtttgcctaaactgattttgatggaacaggaaatcttgctggtcttgcc

SEQ ID NO: 33551 - protein, 446 aa, Zea mays subsp. mays
MAVTITWVKARQIFDSRGNPTVEVDVGLSDGSYARGAVPSGASTGIYEALELRDGGSDYLGKGVLKAVSNVNNIIGPAIVGKDPTEQVEIDNFMVQQLDGTSNEWGWCKQKLGANAILAVSLAVCKAGAMVKKIPLYQHIANLAGNKTLVLPVPAFNVINGGSHAGNKLAMQEFMILPTGASSFKEAMKMGVEVYHNLKSIIKKKYGQDATNVGDEGGFAPNIQENKEGLELLKAAIEKAGYTGKVVIGMDVAASEFFGEKDKTYDLNFKEENNDGSNKISGDSLKDLYKSFVSEYPIESIEDPFDQDDWSTYAKLTDEIGQKVQIVGDDLLVTNPTRVAKAINEKTCNALLLKVNQIGSVTESIEAVRMSKRAGWGVMASHRSGETEDTFIADLSVGLSTGQIKTGAPCRSERLAKYNQLLRIEEELGDAAVYAGAKFRAPVEPY

SEQ ID NO: 33552 - protein, 353 aa, Zea mays subsp. mays
MVQQLDGTSNEWGWCKQKLGANAILAVSLAVCKAGAMVKKIPLYQHIANLAGNKTLVLPVPAFNVINGGSHAGNKLAMQEFMILPTGASSFKEAMKMGVEVYHNLKSIIKKKYGQDATNVGDEGGFAPNIQENKEGLELLKAAIEKAGYTGKVVIGMDVAASEFFGEKDKTYDLNFKEENNDGSNKISGDSLKDLYKSFVSEYPIESIEDPFDQDDWSTYAKLTDEIGQKVQIVGDDLLVTNPTRVAKAINEKTCNALLLKVNQIGSVTESIEAVRMSKRAGWGVMASHRSGETEDTFIADLSVGLSTGQIKTGAPCRSERLAKYNQLLRIEEELGDAAVYAGAKFRAPVEPY

SEQ ID NO: 33553 - protein, 317 aa, Zea mays subsp. mays
MVKKIPLYQHIANLAGNKTLVLPVPAFNVINGGSHAGNKLAMQEFMILPTGASSFKEAMKMGVEVYHNLKSIIKKKYGQDATNVGDEGGFAPNIQENKEGLELLKAAIEKAGYTGKVVIGMDVAASEFFGEKDKTYDLNFKEENNDGSNKISGDSLKDLYKSFVSEYPIESIEDPFDQDDWSTYAKLTDEIGQKVQIVGDDLLVTNPTRVAKAINEKTCNALLLKVNQIGSVTESIEAVRMSKRAGWGVMASHRSGETEDTFIADLSVGLSTGQIKTGAPCRSERLAKYNQLLRIEEELGDAAVYAGAKFRAPVEPY

SEQ ID NO: 33554 - DNA, 1352 bp, Zea mays subsp. mays
  misc_feature (77)..(77): n is a, c, g, or t
tcggcaaatatacactgcgcccgtccgcctccgcaatcgacaacgaaccactgggcaccggccgcggctcgcaagtngcctgcgttcctcttccacgctccgcccacccgtcccggggcccgccgcaacccgatccctccccgcgcccaacgatgccggccggccagccgcacgcgcacgaagccgctgccgccgcctgcgtcggcagcggcgcgaaccactccaaccaccgagtgccggcgcactcgccaccgccgctccccgcggaggtggtgccggcgtacccgcccccggagtcggaggacgacgagacctgggtgtggacgcagatcaaggcggaggcccgccgcgacgcggacgcggagccggcgctcgcctccttcctctacgccaccgtgttgtcccacccgtccctgccccgctccctctccttccacctcgccaacaagctctgctcctccacgctcctctccacgctcctctacgacctcttcctcgccacgctcaccgcgcacccctctctccgcgccgccgtcgtcgccgacctcctcgcggcccactcccgcgaccccgcctgcgtcggcttctcccactgcctcctcaactacaagggcttcctcgccatccaggcccaccgcgtcgcgcacgtgctctgggcgcagcagcgacggcccctcgcgctcgcgctccagtcccgcgtcgccgacgtcttcgccgttgacatccaccccgccgccgtcgtcgggaagggaatcctcctcgaccacgccaccggcgtcgtcatcggtgagacggccgtcgtcggcgacaacgtctccatcctccaccacgtcaccttgggcgggaccgggaaggcggtgggtgaccggcaccccaagattggggatggcgtgctgattggagcaggggccaccattcttggtaacgtgaaaattggtgccggggctaagattggagccggatccgtggtgctgatagatgtgccggcgaggagcacggcggttggaaccctgccaggctgatggtggaagaaggccgaggtgcgaatgaggaggacatgccaggggagtccatggatcacacgtccttcatacgtcaatggtcggactacaccatttgagagcggttatccaaggtctattgctcttcttttgtatcactagtaatggtgatgtaccaaataccgagtacttgctctttgttgtgtgtctatggtttgtgtattgtacttagaagcctagtggtgtttatgatcattgtcagctgagtgtgccatgcctgaatactggtaaatttcgattgatggatggacaaatctgtatgagagttggttggaatttgtcacattcctt

SEQ ID NO: 33555 - protein, 339 aa, Zea mays subsp. mays
  misc_feature (25)..(25): Xaa can be any naturally occurring amino acid
GKYTLRPSASAIDNEPLGTGRGSQXACVPLPRSAHPSRGPPQPDPSPRPTMPAGQPHAHEAAAAACVGSGANHSNHRVPAHSPPPLPAEVVPAYPPPESEDDETWVWTQIKAEARRDADAEPALASFLYATVLSHPSLPRSLSFHLANKLCSSTLLSTLLYDLFLATLTAHPSLRAAVVADLLAAHSRDPACVGFSHCLLNYKGFLAIQAHRVAHVLWAQQRRPLALALQSRVADVFAVDIHPAAVVGKGILLDHATGVVIGETAVVGDNVSILHHVTLGGTGKAVGDRHPKIGDGVLIGAGATILGNVKIGAGAKIGAGSVVLIDVPARSTAVGTLPG

SEQ ID NO: 33556 - protein, 298 aa, Zea mays subsp. mays
  misc_feature (26)..(26): Xaa can be any naturally occurring amino acid
SANIHCARPPPQSTTNHWAPAAARKXPAFLFHAPPTRPGARRNPIPPRAQRCRPASRTRTKPLPPPASAAARTTPTTECRRTRHRRSPRRWCRRTRPRSRRTTRPGCGRRSRRRPAATRTRSRRSPPSSTPPCCPTRPCPAPSPSTSPTSSAPPRSSPRSSTTSSSPRSPRTPLSAPPSSPTSSRPTPATPPASASPTASSTTRASSPSRPTASRTCSGRSSDGPSRSRSSPASPTSSPLTSTPPPSSGRESSSTTPPASSSVRRPSSATTSPSSTTSPWAGPGRRWVTGTPRLGMAC

SEQ ID NO: 33557 - protein, 289 aa, Zea mays subsp. mays
MPAGQPHAHEAAAAACVGSGANHSNHRVPAHSPPPLPAEVVPAYPPPESEDDETWVWTQIKAEARRDADAEPALASFLYATVLSHPSLPRSLSFHLANKLCSSTLLSTLLYDLFLATLTAHPSLRAAVVADLLAAHSRDPACVGFSHCLLNYKGFLAIQAHRVAHVLWAQQRRPLALALQSRVADVFAVDIHPAAVVGKGILLDHATGVVIGETAVVGDNVSILHHVTLGGTGKAVGDRHPKIGDGVLIGAGATILGNVKIGAGAKIGAGSVVLIDVPARSTAVGTLPG

SEQ ID NO: 33558 - DNA, 1569 bp, Zea mays subsp. mays
atcctaatcgaaaaatcaaaagaaaaaaaagatcgcagccgaaaggaaggggaaaaaaggaccaaataaacaatccactgtctcctacctccgcggaagcatcaaacaaatcaccctgccgatcgccatggacgaacagcaggcggaggagggcgaaagcgcgcgcgtcaagaggacgccggaggaggggtcgtcgccgctgtccgctctggcggatgacgtgctgctacagatcctgggacggctcgaggcggacccgcgggactgggcgcgggcctcctgcgcgtccccgcgcctcgccgctctgctccgggcggcctgcctcccgccgcgactgtcgcgggcgctccccgccgagctcctccccgcgccgtcaccggacggggcgcccgcggcctgggcggcgctccacaagctctccgtctgttgcccggggctcctccgcgccggggtgctcctcgagcccaccgacgatttcgggctcgatctcgacatcgggcctgacgtccccatctacgcccgcaccgacgcctcctccgccgaggggttcgaggccacggccacctcccgccacagcggaaccatcgtcgcggccgggagcgcgccccgcgccggcgaatctgccaacgtcgccgcgtggtcgctctacgacgacctgtacctggacgcggcatacgactgctcgtccgagctgcagatcccgcctgccgctgcggctgtggaacccgccccgcccgcgcccttggcggcgatccgcgacgtggaggaagcaacgaccacaaatgctgtctcatgcggcgtcgcccggcgcggcgtggtggccgggagccgactgcatccgcggcggtggctgggcaccgtcggcgcgcacctggcatcggggtcctggacgctgagccgtgagcaggggaacaagctccttgccagccgcttccgcggcgaccggctatacctctgcgactggcccgggtgcgtgcacaaggaggagcgacgcaagtacatggtcttccgcggcgtgttccacaacttcgcccggtctcaggtccggcgcgcgctcagggacacgcgccgccccaccgtcgccatcgagtgcgccttctgcggctgcaaagagacctgggacctctactcggctttctgcctccgcagtttctacggctaccacgacgacggcgagcctgtggtgcgcgcctacgtctgcgagaacggccacgtcgcgggcgcctggaccgaccgcccactctactcctgatcttggagtggacactccgactgacatggtattgcatcaaagactgcaccctgccattgccagatgctcgctcctaccacttgagctgtttctagacataattatgcgtgcctgcatatagcaatccggattttcgtcatgttctgatacacgtgggatgtgtattctttatttctttcttcttgctgttgctgttgtttgtgagaatggttgagtagaataaggatgccggttgatttgcagcataggatataaagagatttgcttaaaattgtaaacctgatgctacgagaaattggaaccgctgttttattgcc

SEQ ID NO: 33559 - protein, 374 aa, Zea mays subsp. mays
MDEQQAEEGESARVKRTPEEGSSPLSALADDVLLQILGRLEADPRDWARASCASPRLAALLRAACLPPRLSRALPAELLPAPSPDGAPAAWAALHKLSVCCPGLLRAGVLLEPTDDFGLDLDIGPDVPIYARTDASSAEGFEATATSRHSGTIVAAGSAPRAGESANVAAWSLYDDLYLDAAYDCSSELQIPPAAAAVEPAPPAPLAAIRDVEEATTTNAVSCGVARRGVVAGSRLHPRRWLGTVGAHLASGSWTLSREQGNKLLASRFRGDRLYLCDWPGCVHKEERRKYMVFRGVFHNFARSQVRRALRDTRRPTVAIECAFCGCKETWDLYSAFCLRSFYGYHDDGEPVVRAYVCENGHVAGAWTDRPLYS

SEQ ID NO: 33560 - protein, 297 aa, Zea mays subsp. mays
PNRKIKRKKRSQPKGRGKKDQINNPLSPTSAEASNKSPCRSPWTNSRRRRAKARASRGRRRRGRRRCPLWRMTCCYRSWDGSRRTRGTGRGPPARPRASPLCSGRPASRRDCRGRSPPSSSPRRHRTGRPRPGRRSTSSPSVARGSSAPGCSSSPPTISGSISTSGLTSPSTPAPTPPPPRGSRPRPPPATAEPSSRPGARPAPANLPTSPRGRSTTTCTWTRHTTARPSCRSRLPLRLWNPPRPRPWRRSATWRKQRPQMLSHAASPGAAWWPGADCIRGGGWAPSARTWHRGPGR

SEQ ID NO: 33561 - protein, 226 aa, Zea mays subsp. mays
MTCCYRSWDGSRRTRGTGRGPPARPRASPLCSGRPASRRDCRGRSPPSSSPRRHRTGRPRPGRRSTSSPSVARGSSAPGCSSSPPTISGSISTSGLTSPSTPAPTPPPPRGSRPRPPPATAEPSSRPGARPAPANLPTSPRGRSTTTCTWTRHTTARPSCRSRLPLRLWNPPRPRPWRRSATWRKQRPQMLSHAASPGAAWWPGADCIRGGGWAPSARTWHRGPGR

SEQ ID NO: 33562 - DNA, 1627 bp, Zea mays subsp. mays
ttttcttagatgggttgggtctcaaagtgatgtctagagcagcctatatctaagtgatcccgaattccaaaatccggtaacaaaacggtatcatcccgataaaaaacgggatcccggttaaacggtcgggaaaacaactctaccgttttcgtttaccgttttcgttccgttttcgttttttacatcagattcaaaatcaatcggaacaaaactaacaaaatcgattatgcgataacagtccttacgggacatcctactttcgtccctaaccctcacccacccaaccttcggcagtccccatcctctctcctgtgggcgctccctctcccccgcccccaaatcatcgcgcctccctcgccacgcctcacagggccggttgcgtaggagaaaggagaaaggaaggaggggaggcggtcgtcgggcgagatgagcgactccttctgccccgactgcaagaagcatacggaggtggcgttcgaccactcggcgggggacatggtgtgcaccgagtgcggcctcgtcctcgaggcgcactccgtcgacgagacctccgagtggcgcaccttcgcgaacgagtccaacgacaacgaccccgtccgtgtcggcggccccacaaacccgctcctcactgatggcggcctctccaccgtcatcgcccaagccccaacggcgcgcagggcgacttcctatcctcctccctcggcaggtggcagaaccgcggctccaaccccgaccgatccctcatcctcgccttccgcaccatcgccaacatggctgaccggctaggtcttgtggctactattaaggaccgagcaaatgaaatctacaagaaagttgaagatctcaaatctatcaggggaagaaatcaagatgccatattagctgcatgcctatatattgcttgtagacaagaagatcggcctagaactgtgaaagaaatatgttcagttgctaatggggccacaaagaagaaattggcagagcaaaagaatttatagtgaaacaactggaagttgagatggggcaatctatggagatgggaaccattcacgcttcagattttctgagacgtttctgctcaactcttgggatgaacaatcaagctgttagggcagcccaggatgcagttaagcactcggaggagcttgatataaggaggagcccaatctcaattgcagccgctgtcatttatatgataacccaactctcagaggacaagaagccacttaaagatatatccttggctactggtgtggcagaaggcaccatcagaaattcttacaaggatctgtatccttatgcctcaaggctcatcccgaatacctacgccaaggaagaagacctgaagaatctctgcacaccttaggaagcttaccttttccccctttctgttattacataaatcggaattagatttgtcaaagaggagtgagtgaagttgttcctcgttgtgactgtacggggcaaggtgtcgtccccgccgtgcttaactttatgatggaatttcttttcagagcacctaccacctgaagatttgtgggatacgtatactcacttcggaaagaatgtagatagcaagcagttggacaagcacaatattttaatttaaaacatgattttgttctcc

SEQ ID NO: 33563 - protein, 119 aa, Zea mays subsp. mays
MSDSFCPDCKKHTEVAFDHSAGDMVCTECGLVLEAHSVDETSEWRTFANESNDNDPVRVGGPTNPLLTDGGLSTVIAQAPTARRATSYPPPSAGGRTAAPTPTDPSSSPSAPSPTWLTG

SEQ ID NO: 33564 - protein, 115 aa, Zea mays subsp. mays
MGQSMEMGTIHASDFLRRFCSTLGMNNQAVRAAQDAVKHSEELDIRRSPISIAAAVIYMITQLSEDKKPLKDISLATGVAEGTIRNSYKDLYPYASRLIPNTYAKEEDLKNLCTP

SEQ ID NO: 33565 - protein, 111 aa, Zea mays subsp. mays
MEMGTIHASDFLRRFCSTLGMNNQAVRAAQDAVKHSEELDIRRSPISIAAAVIYMITQLSEDKKPLKDISLATGVAEGTIRNSYKDLYPYASRLIPNTYAKEEDLKNLCTP

SEQ ID NO: 33566 - DNA, 625 bp, Zea mays subsp. mays
  misc_feature (72)..(72): n is a, c, g, or t
gatctggctgcctcggtcgatttctaattctcctcgcgagcccaaaccctaaacctaaacctttcacccgcngccgccgccgccgccgtcgccgccaccacatccgtagcgcccagccgccggagaagaggagggagccagcaccagccaccatgggtcgcgtccgcaccaagaccgtgaagaagacctccaggcaggtgatcgagaagtactactcccgcatgaccctcgacttccacaccaacaagaaggtgctggaagaggtctcgatcctcccctcgaagcgcctccgcaacaaggttgccggcttcaccacccacctgatgcgccgcatccagcgggggccccgtcctcttctccggcggctgggcgctacggaggtggtggcggctacggcggcggcggcggcggctggagggactgatgtgtgggcccatcctggcttcggccgagttatcttatctatctatagtatcgtgttaccgttcgcttctgtcaccgtgttagtgtccgttctacctttggattaggtgttggtacccctgttgttccctttggttgctcccgctatgaaacgagacgagagaagaatgagcaaggtttttgttcgcagctatttttgtcc

SEQ ID NO: 33567 - protein, 175 aa, Zea mays subsp. mays
  misc_feature (24)..(24): Xaa can be any naturally occurring amino acid
SGCLGRFLILLASPNPKPKPFTRXRRRRRRRHHIRSAQPPEKRREPAPATMGRVRTKTVKKTSRQVIEKYYSRMTLDFHTNKKVLEEVSILPSKRLRNKVAGFTTHLMRRIQRGPRPLLRRLGATEVVAATAAAAAAGGTDVWAHPGFGRVILSIYSIVLPFASVTVLVSVLPLD

SEQ ID NO: 33568 - protein, 125 aa, Zea mays subsp. mays
MGRVRTKTVKKTSRQVIEKYYSRMTLDFHTNKKVLEEVSILPSKRLRNKVAGFTTHLMRRIQRGPRPLLRRLGATEVVAATAAAAAAGGTDVWAHPGFGRVILSIYSIVLPFASVTVLVSVLPLD

SEQ ID NO: 33569 - protein, 102 aa, Zea mays subsp. mays
MTLDFHTNKKVLEEVSILPSKRLRNKVAGFTTHLMRRIQRGPRPLLRRLGATEVVAATAAAAAAGGTDVWAHPGFGRVILSIYSIVLPFASVTVLVSVLPLD

SEQ ID NO: 33570 - DNA, 1670 bp, Zea mays subsp. mays
acctccagctttctactctactacctgcaggagtgcaggctgcaggcgcacacgcaactcgcagccgaccacgccccccgcaggccgcgatgccgccgccgccgcagcagcagcccccgcaccggcacgccaagacggactcggaggtgacgtccagcatggcggcgtcgtccccgccgcgtgcggcctactacgtgcagtcgccgagccacgacgacggcgagaacaagacggccgcgtcctccttccactcgtcccctgcggcatccccgccgcggtcggcgtccaggcactcctcctcctcctcccgcttctccgccagcgcaaagggcaccgcctccggcgccggcggcggccggcgacgcggcagcgcgtgggcgaaggaggcggccatcgaggaggagggcctgctcggcgtggacgacggcagcggcggcgatggagacggccgcggcgggatccccaggcgggcgcgctacttgctcggcttcgcgggcgccttcctcggcctgttcctcctcttcgcgctcgtcctctggggcgccagccgcaaccagcgccccgtcgtggccctgcgcgccgtcacgttccaccgcttcgtcgtccaggccggcaccgacgcgtcgctcgtgcccaccgagatggcctcgctcaacgccaccgtcagcctcaccttccgcaacgtcggtaccttcttcggcgtccacgtctccgccgaccccgtcacgctccactacgcgcagctccagctcgcgtcgggcaacatgaagtacttctaccagccccggaggagccagcggagcctggcggtggcggtggtcggcgacaaggtgcccctgtacggcggcggggcggggctgagcagcaccccgacgacgctgccgccgccgaggaagcgcgcgccgccggtggtggtgccgccgccgcccgtgccgctgcggctggccgtgcgggtgcggtcgcgcgcgttcgtgctggggagcctggtcaagcccaagttctacagcgaggcgcagtgcagcgtcaccatggaccaggccaggctcggtaagccagtctccctcaacaaggcatgcacctacacacactagcttggctaggctacatacatacgcctgctgccgtgggtcgtctcgtcgccaccatgcatggtcgtcgcgtcgtgaactttgcccttcttcttgaacaacacacactctctctcagtctctctctcccttcgcttttctgcgtgcgtgcgtttgttggtcgcttgtcttgtacatagaaatttttagtttctggtgtacgtaggagagttttgagtgagatggaataagaatcaggcattatttccctcatacggcgtttccgattgcgtgacatgccgtggagggcatgtaaaatgtcggtgaaattcaatgcgcctgtttggtgaaattcaatgcgctcgaagcagacgtaagattctggtgaaatacacctaaaaattcacggccgcgcatgtaatatagcttcttcaggtgaagtttggaccccggccgacagtcaccgaccgcaagtgctcatccggtgaggtttgtcagttagattcaaatccactaccgttcatataaatccgattcttttttttagatctgacaaatgtaacacggagccttcgcaatgaatgaatgaatgattgaataaac

SEQ ID NO: 33571 - protein, 362 aa, Zea mays subsp. mays
LQLSTLLPAGVQAAGAHATRSRPRPPQAAMPPPPQQQPPHRHAKTDSEVTSSMAASSPPRAAYYVQSPSHDDGENKTAASSFHSSPAASPPRSASRHSSSSSRFSASAKGTASGAGGGRRRGSAWAKEAAIEEEGLLGVDDGSGGDGDGRGGIPRRARYLLGFAGAFLGLFLLFALVLWGASRNQRPVVALRAVTFHRFVVQAGTDASLVPTEMASLNATVSLTFRNVGTFFGVHVSADPVTLHYAQLQLASGNMKYFYQPRRSQRSLAVAVVGDKVPLYGGGAGLSSTPTTLPPPRKRAPPVVVPPPPVPLRLAVRVRSRAFVLGSLVKPKFYSEAQCSVTMDQARLGKPVSLNKACTYTH

SEQ ID NO: 33572 - protein, 349 aa, Zea mays subsp. mays
PPAFYSTTCRSAGCRRTRNSQPTTPPAGRDAAAAAAAAPAPARQDGLGGDVQHGGVVPAACGLLRAVAEPRRRREQDGRVLLPLVPCGIPAAVGVQALLLLLPLLRQRKGHRLRRRRRPATRQRVGEGGGHRGGGPARRGRRQRRRWRRPRRDPQAGALLARLRGRLPRPVPPLRARPLGRQPQPAPRRGPARRHVPPLRRPGRHRRVARAHRDGLAQRHRQPHLPQRRYLLRRPRLRRPRHAPLRAAPARVGQHEVLLPAPEEPAEPGGGGGRRQGAPVRRRGGAEQHPDDAAAAEEARAAGGGAAAARAAAAGRAGAVARVRAGEPGQAQVLQRGAVQRHHGPGQAR

SEQ ID NO: 33573 - protein, 333 aa, Zea mays subsp. mays
MPPPPQQQPPHRHAKTDSEVTSSMAASSPPRAAYYVQSPSHDDGENKTAASSFHSSPAASPPRSASRHSSSSSRFSASAKGTASGAGGGRRRGSAWAKEAAIEEEGLLGVDDGSGGDGDGRGGIPRRARYLLGFAGAFLGLFLLFALVLWGASRNQRPVVALRAVTFHRFVVQAGTDASLVPTEMASLNATVSLTFRNVGTFFGVHVSADPVTLHYAQLQLASGNMKYFYQPRRSQRSLAVAVVGDKVPLYGGGAGLSSTPTTLPPPRKRAPPVVVPPPPVPLRLAVRVRSRAFVLGSLVKPKFYSEAQCSVTMDQARLGKPVSLNKACTYTH

SEQ ID NO: 33574 - DNA, 1840 bp, Zea mays subsp. mays
gcacgagaccattacctagaacatcctaatcgaaaaatccggccaccgagctagcacgacttgacgcccacactgccaaagtgccaagtgccactgccccttccaccagcccaccaccagacccgccaccttcgcgctccacggcagcggcatgtccgtcgcctcctcccaccgcctgcgaccgtcgccgtcgggcccggcgcggcgcccgggatccgcggcgccgcgcgtagcgttctggccagccggtgcctcgcccccgtatcgcggccgctgcaccgtcgtggcggcggcggctgccgctggcgccggcggcgaggcatcttcggcccccgtggctgtgtcggctgtcgcccccgcgggcgctgccagggacaaggtgcggcgccacacgatttcggtgttcgtcggggacgagagcggcatgatcaaccggatcgcaggggtgttcgccaggagaggctacaacatcgagtcgctcgccgtggggctcaacaaggacaaggccctcttcaccattgtcgtctccgggaccgacagggtgctcaaccaagtcatcgagcagctcaataagcttgtcaacgtcctgagtgtggaagatctatctaaagaacctcaggttgaaagagagctgatgcttataaaactaaatgttgaacctgatcagcgtcctgaggtcatggttttagttgatattttcagagcaaaagttgttgatatatctgagaaaacacttaccatggaggtagctggagatcctggcaaaattgctgcagtgcagaggaatctatggaaatttggaatcaaagaaatttgcaggacaggaaaaattgctttgagacgtgaaaggattggtgcaacagcccgtttctggcgattttctgctgcttcttacccagacctgatagatgcgttgccgaaaaatccacttacatctgtaaataggacagttaatggcagttttggtcaaccatccaatgctgggggtgatgtttatcctgtggaatcttacgagagcttatcagtgaaccatgtacttgatgctcattggggtgttctggatgatgacgatgcgactggacttcgctcgcatactctctccatccttgtgaatgactgtcctggtgtcctcaacattgtaacaggagtctttgctcgcaggggctacaatatacagagccttgctgttggcccagctgagaaggaaggcatttcgcggattacaacagttgttcctggtactgttgaatccattgagaagttagttcagcagctttacaagcttattgatgtgcacgaagttcatgacattacccactcaccttttgctgaaagggaacttatgcttattaaggtttctgtcaacactgctgctcggaaggaaatcctagatattgctgaaatcttccgagcaaaacctgttgatgtttctgaccacacagtaacgcttcagcttactggagatcttgacaagatggttgcactacaaaggttattggagccatatggcatctgtgaggtcgccagaactggacgagtagcactggtccgcgaatcgaaggtggactccaagtacctccgcggctactctcttccactgtaaccttgcagtcgtgatgatgatggcaccatgaagagctcggctggttgtttatagagcagaccatctcgcgctgggttgtgttgtgcgattacaggacttgtttctttcatgtcgtgaactcccccggcctgcgtgtccaataacgcgtgttgaggctgcatgtgtattccaacgactgtcagaataagatgcatatcgtatctgtttacttcagtgaagagatgcatggatcgttcg

SEQ ID NO: 33575 - protein, 483 aa, Zea mays subsp. mays
MSVASSHRLRPSPSGPARRPGSAAPRVAFWPAGASPPYRGRCTVVAAAAAAGAGGEASSAPVAVSAVAPAGAARDKVRRHTISVFVGDESGMINRIAGVFARRGYNIESLAVGLNKDKALFTIVVSGTDRVLNQVIEQLNKLVNVLSVEDLSKEPQVERELMLIKLNVEPDQRPEVMVLVDIFRAKVVDISEKTLTMEVAGDPGKIAAVQRNLWKFGIKEICRTGKIALRRERIGATARFWRFSAASYPDLIDALPKNPLTSVNRTVNGSFGQPSNAGGDVYPVESYESLSVNHVLDAHWGVLDDDDATGLRSHTLSILVNDCPGVLNIVTGVFARRGYNIQSLAVGPAEKEGISRITTVVPGTVESIEKLVQQLYKLIDVHEVHDITHSPFAERELMLIKVSVNTAARKEILDIAEIFRAKPVDVSDHTVTLQLTGDLDKMVALQRLLEPYGICEVARTGRVALVRESKVDSKYLRGYSLPL

SEQ ID NO: 33576 - protein, 392 aa, Zea mays subsp. mays
MINRIAGVFARRGYNIESLAVGLNKDKALFTIVVSGTDRVLNQVIEQLNKLVNVLSVEDLSKEPQVERELMLIKLNVEPDQRPEVMVLVDIFRAKVVDISEKTLTMEVAGDPGKIAAVQRNLWKFGIKEICRTGKIALRRERIGATARFWRFSAASYPDLIDALPKNPLTSVNRTVNGSFGQPSNAGGDVYPVESYESLSVNHVLDAHWGVLDDDDATGLRSHTLSILVNDCPGVLNIVTGVFARRGYNIQSLAVGPAEKEGISRITTVVPGTVESIEKLVQQLYKLIDVHEVHDITHSPFAERELMLIKVSVNTAARKEILDIAEIFRAKPVDVSDHTVTLQLTGDLDKMVALQRLLEPYGICEVARTGRVALVRESKVDSKYLRGYSLPL

SEQ ID NO: 33577 - protein, 322 aa, Zea mays subsp. mays
MLIKLNVEPDQRPEVMVLVDIFRAKVVDISEKTLTMEVAGDPGKIAAVQRNLWKFGIKEICRTGKIALRRERIGATARFWRFSAASYPDLIDALPKNPLTSVNRTVNGSFGQPSNAGGDVYPVESYESLSVNHVLDAHWGVLDDDDATGLRSHTLSILVNDCPGVLNIVTGVFARRGYNIQSLAVGPAEKEGISRITTVVPGTVESIEKLVQQLYKLIDVHEVHDITHSPFAERELMLIKVSVNTAARKEILDIAEIFRAKPVDVSDHTVTLQLTGDLDKMVALQRLLEPYGICEVARTGRVALVRESKVDSKYLRGYSLPL

SEQ ID NO: 33578 - DNA, 877 bp, Zea mays subsp. mays
aaaaaaaatttagcggccaccgacgaccggccggccgtgcacccttcgcactactactgcgcccgcggacggcgtcagaggagcagcacccagcagcatggcctgcaccaggaggcagttgtggtgggcatgcctgctggcggcgtggtgctgcgccggcgccgccgcggccgcccagccgccggcggcggacgcggacccgctgcagagcaggtgccagggggactttgggaagctgacggactgcatggactacgcgacggggcacgcggcgtcgccctcgtccacctgctgcggcgacgccggcggcacgcagaaggcgcgcccggagtgcctctgctacatcatccagcaggtgcacgcggggcgcgaccaggtgcagtcgctcggcctgcgcttcgaccgcctcctggcgctccccgccgcctgcagcctccccaacgccaacgtctcgctctgcatcaacctgctgaacctgaagccgggctcgccagactacgcgctgttcgccaacgcctccaagatcacgccatcagccggaggcagcccggcgagcgacaccgccgccggcagcgccgttatcaggctccaggctggggtccgaggcagcgtcgcgctcgccgtggtctctgcgatcgtctcgtcagtcttctgatccgaccgatctcctcagaggactagaggagaagcagcggttcttacactccgtgtggattcgtcgttctcatgttgcgttccactcgtcgatgtctattttgtatttgtaccccacataaaaaaaatagatccagatgatacttgtttcccccgtccctgtggctttaactgtaacctcggatgtttgaattagctaattatgtataactctcatcgcgtc

SEQ ID NO: 33579 - protein, 226 aa, Zea mays subsp. mays
KKNLAATDDRPAVHPSHYYCARGRRQRSSTQQHGLHQEAVVVGMPAGGVVLRRRRRGRPAAGGGRGPAAEQVPGGLWEADGLHGLRDGARGVALVHLLRRRRRHAEGAPGVPLLHHPAGARGARPGAVARPALRPPPGAPRRLQPPQRQRLALHQPAEPEAGLARLRAVRQRLQDHAISRRQPGERHRRRQRRYQAPGWGPRQRRARRGLCDRLVSLLIRPISSED

SEQ ID NO: 33580 - protein, 185 aa, Zea mays subsp. mays
MACTRRQLWWACLLAAWCCAGAAAAAQPPAADADPLQSRCQGDFGKLTDCMDYATGHAASPSSTCCGDAGGTQKARPECLCYIIQQVHAGRDQVQSLGLRFDRLLALPAACSLPNANVSLCINLLNLKPGSPDYALFANASKITPSAGGSPASDTAAGSAVIRLQAGVRGSVALAVVSAIVSSVF

SEQ ID NO: 33581 - protein, 183 aa, Zea mays subsp. mays
MPAGGVVLRRRRRGRPAAGGGRGPAAEQVPGGLWEADGLHGLRDGARGVALVHLLRRRRRHAEGAPGVPLLHHPAGARGARPGAVARPALRPPPGAPRRLQPPQRQRLALHQPAEPEAGLARLRAVRQRLQDHAISRRQPGERHRRRQRRYQAPGWGPRQRRARRGLCDRLVSLLIRPISSED

SEQ ID NO: 33582 - DNA, 1957 bp, Zea mays subsp. mays
aacgtgtcctcctacaattgccgacgtagccgtcgtcttcgccagagcagcgccagcgggcccagttcttgaaagggtgcagtgtatccaaggagacaaaggcatcggtctgcagtttcttggctacaaattcaaacagcactagggtgaaatcagtgggcttgagagtagcatcatccttcaaatgatggtggttatccagctgacggtttctctgggaatggcaacacgctattgccaaaaagcacatccgttcgtggcgaggaccatccggttgctgatcctgtactcccaatggattcaatgatgacgccagaaatcctctctgctaatttggcacttgttatggacaagttctcagatgatgacacagatactgaacttgatttggatagcccgacagagggcttcgcgtcgattgcagatgccattgaggacgtacggcaaggaaaacttgtgattgttgttgatgacgaatcaagggaaaatgaaggagatctgataatggctgcctccttggttaccccagaggcgatggcttttatagtaagacatggaacaggaattgtttgtgtcagcattaaagaagatgatctggaaagactatgccttcctttgatggttaccacaaaagaaaacgaggagaagctatgcactgcttttactgttacagtggatgcaaaagagggcacaactactggagtatctgccaaagacagggcaaaaacagttatgactcttgcatctcctgactctaggcctgaggacttcaaccgccctggtcatattttccctttgaaatacagagaagggggtgttctgaaacgagctggacacacagaggcatcggttgaccttgccatgctggctggattacctcctgttgctgtcctttgtgagattgtggatgatgcagatggttccatggctcgcctgccaaagttgcgtgtctttgctgaaagggaaaatttgaagattatatctattgctgacttgattaggtataggaggaaaagagacaggctagttgaacgtgcttctgttgcacgcttgccttctcaatggggcaatggccatgcatattgctacagatctgctattgatggcatcgagcatcttgccatggtgaaaggtgatattggtgatggccaagacattatggtgagggtgcactctgagtgcctcacaggcgacatttttagatcggcaagatgcgattgcggtgaccagcttgcaatggcaattgagatgattgagaaggccggaaggggcgtaatagtttatctccgtggacacgaaggacggggtatcggtctgggccacaagcttcgtgcttataacttgcaggatgatgggcgtgatactgtggaagctaatgaagaacttggtcttcctgtggactcacgagaatatgggattggcgcacagatactacgggacctaggagtccgttcgatgaagctgatgactaatagccctgcgaaatatagtggtctgaagggttatggactgagcattgcgggcagggtgcccttggttacgccaattaccagcgagaaccgtaagtacctcgagaccaaaagaacaaagatggggcatgtatatggattggctaatgcgcaggttaaccagccaagtggtagccagagcacagaagagaagcattgagcccaaaaaagtgatgcagtcttctttttgggagttcctgaaatcttctccctcgatatttccatatattctttttttctatatttccatatattctttctttcacatagaaggccgttttgttcttcaactgtagctgtaggtttcaagatggttaatgagcctaataaaagcaagtttaataatataagcaactgttcttgtaaggagctttacagtctgtcttatatagccgatatgtataatggttagctttcacaatgaatatatgatcaactgtttttctcac

SEQ ID NO: 33583 - protein, 457 aa, Zea mays subsp. mays
MDSMMTPEILSANLALVMDKFSDDDTDTELDLDSPTEGFASIADAIEDVRQGKLVIVVDDESRENEGDLIMAASLVTPEAMAFIVRHGTGIVCVSIKEDDLERLCLPLMVTTKENEEKLCTAFTVTVDAKEGTTTGVSAKDRAKTVMTLASPDSRPEDFNRPGHIFPLKYREGGVLKRAGHTEASVDLAMLAGLPPVAVLCEIVDDADGSMARLPKLRVFAERENLKIISIADLIRYRRKRDRLVERASVARLPSQWGNGHAYCYRSAIDGIEHLAMVKGDIGDGQDIMVRVHSECLTGDIFRSARCDCGDQLAMAIEMIEKAGRGVIVYLRGHEGRGIGLGHKLRAYNLQDDGRDTVEANEELGLPVDSREYGIGAQILRDLGVRSMKLMTNSPAKYSGLKGYGLSIAGRVPLVTPITSENRKYLETKRTKMGHVYGLANAQVNQPSGSQSTEEKH

SEQ ID NO: 33584 - protein, 454 aa, Zea mays subsp. mays
MMTPEILSANLALVMDKFSDDDTDTELDLDSPTEGFASIADAIEDVRQGKLVIVVDDESRENEGDLIMAASLVTPEAMAFIVRHGTGIVCVSIKEDDLERLCLPLMVTTKENEEKLCTAFTVTVDAKEGTTTGVSAKDRAKTVMTLASPDSRPEDFNRPGHIFPLKYREGGVLKRAGHTEASVDLAMLAGLPPVAVLCEIVDDADGSMARLPKLRVFAERENLKIISIADLIRYRRKRDRLVERASVARLPSQWGNGHAYCYRSAIDGIEHLAMVKGDIGDGQDIMVRVHSECLTGDIFRSARCDCGDQLAMAIEMIEKAGRGVIVYLRGHEGRGIGLGHKLRAYNLQDDGRDTVEANEELGLPVDSREYGIGAQILRDLGVRSMKLMTNSPAKYSGLKGYGLSIAGRVPLVTPITSENRKYLETKRTKMGHVYGLANAQVNQPSGSQSTEEKH

SEQ ID NO: 33585 - protein, 453 aa, Zea mays subsp. mays
MTPEILSANLALVMDKFSDDDTDTELDLDSPTEGFASIADAIEDVRQGKLVIVVDDESRENEGDLIMAASLVTPEAMAFIVRHGTGIVCVSIKEDDLERLCLPLMVTTKENEEKLCTAFTVTVDAKEGTTTGVSAKDRAKTVMTLASPDSRPEDFNRPGHIFPLKYREGGVLKRAGHTEASVDLAMLAGLPPVAVLCEIVDDADGSMARLPKLRVFAERENLKIISIADLIRYRRKRDRLVERASVARLPSQWGNGHAYCYRSAIDGIEHLAMVKGDIGDGQDIMVRVHSECLTGDIFRSARCDCGDQLAMAIEMIEKAGRGVIVYLRGHEGRGIGLGHKLRAYNLQDDGRDTVEANEELGLPVDSREYGIGAQILRDLGVRSMKLMTNSPAKYSGLKGYGLSIAGRVPLVTPITSENRKYLETKRTKMGHVYGLANAQVNQPSGSQSTEEKH

SEQ ID NO: 33586 - DNA, 1014 bp, Zea mays subsp. mays
acaagccgagcgggagttcagggtggaggtggaggccatcggccgcgtccggcacaagaatctggtccggctactgggctactgcgccgagggcgcccaacggatacttgtgtacgagtacgtggacaacggcaacctcgagcagtggctgcacggcgacgtcggggcagtgagcccgctcacctgggacgtccggatgaacatcgtgctcggcatggccaaagggatcacgtacctgcacgaggggctggaacccaaggtggtgcacagggacatcaagtcgagcaacatcctgctggcaggaggtggaacccgaaggtgtcggacttcggcctcgccaagctcctgggggcggacagcaactacgtcaccaccagagtgatgggaacgtttggctacgtggccccagagtacgctagcaccggcatgctgaacgagaggagcgacgtgtacagcttcgggatcctgatcatggagatcatctccggccgaagccccgtcgactacgccaggcctgccggagaggtaaaccttgtagagtggctcaagaacaaggtgaccaacagggactacgaggccatcgtggacccgaagctgccggagaagccgtcctccaaggcgctcaagaaggcgctcctggtcgcgctgaggtgcgtggatcccgactcgcagaaacggcccaagatggggcacgtaatccacatgctcgaagtcgacgacttcccgtatcgagaggatcgtcgaactcttcggccgggcaacggcagccccctggagaaggcgaggaatccggcggcggggtcatgcgacggcagcagctgctacgggggcgacacgaccaccgcgagcacgccgtccagactagtgcaggacatgtagtagtgatgtgtttgtagccagctgctgctggccttctgagctctgcctgcgggctgcggggcaacatggagatggacatgctgcaactctgctccgtcgttaattaaaggttcccttcctaggtgttgattttgg

SEQ ID NO: 33587 - protein, 292 aa, Zea mays subsp. mays
TSRAGVQGGGGGHRPRPAQESGPATGLLRRGRPTDTCVRVRGQRQPRAVAARRRRGSEPAHLGRPDEHRARHGQRDHVPARGAGTQGGAQGHQVEQHPAGRRWNPKVSDFGLAKLLGADSNYVTTRVMGTFGYVAPEYASTGMLNERSDVYSFGILIMEIISGRSPVDYARPAGEVNLVEWLKNKVTNRDYEAIVDPKLPEKPSSKALKKALLVALRCVDPDSQKRPKMGHVIHMLEVDDFPYREDRRTLRPGNGSPLEKARNPAAGSCDGSSCYGGDTTTASTPSRLVQDM

SEQ ID NO: 33588 - protein, 165 aa, Zea mays subsp. mays
MGTFGYVAPEYASTGMLNERSDVYSFGILIMEIISGRSPVDYARPAGEVNLVEWLKNKVTNRDYEAIVDPKLPEKPSSKALKKALLVALRCVDPDSQKRPKMGHVIHMLEVDDFPYREDRRTLRPGNGSPLEKARNPAAGSCDGSSCYGGDTTTASTPSRLVQDM

SEQ ID NO: 33589 - protein, 150 aa, Zea mays subsp. mays
MLNERSDVYSFGILIMEIISGRSPVDYARPAGEVNLVEWLKNKVTNRDYEAIVDPKLPEKPSSKALKKALLVALRCVDPDSQKRPKMGHVIHMLEVDDFPYREDRRTLRPGNGSPLEKARNPAAGSCDGSSCYGGDTTTASTPSRLVQDM

SEQ ID NO: 33590 - DNA, 1533 bp, Zea mays subsp. mays
acttttctttcttctttctcatctcagttgcagttcccctctctctcctctgccgtagcgaggcaggcaagccaccaagtccgagcctcggaggcatcgaccaacgccggcggcagcggcgccatgaggctgctcgtccccgacggcgcgcgccgccagcggttgctccagtgcgaggcgcccccgtcgccctcgccgccttccccgtccccgtacccgtcgtcgtccccgtccaggacggtcgtggtggggatcaggcgcgacgccgccagccgcgagctgctcacctgggcgctcgtcaaggtcgccaatgctggggaccgcgtcgtcgcactccacgtcgccaccgcggccgccgccgacggtttgctcgtgagactggatgagcgcagcagggccgcggactcgctcgcctccgtgctcgccgtctacgacggtttctgcaacctcaagcagattaatttggagctcaaggtctgtggagggtcatctatccggaaaactctggttaaagaagcagctgcttgtggcgcagcacatctcatccttggtgtcacgaacaattcccggtccttcggatcctccttgacatcagttgccaagtactgctcaaagagagttccagccagctgctcggttcttgcagtgaacaatggcaaagtcgtttatcataaagatgctggtcacgggttgcaacatgaactgtaccaaagcaataccacgatacctgagacaccaaggaggagctaccggaagctcttgtcgaccatgataggggataaactctgggatgagaatggaaaagacagaaggtgtgtgtctcgtgccgtcaccatgccaatgaggtctcccgcacggccaaaagaattttcactggcattagtcccggtgaagggttgccaacacgaatcgccagcggtagcaactggctggcccctacttaggaagaagttcttgccagaccggaaagcttctgcgcctgacaagtccaagatgtctgtggtgcagtgggcaatgcggctcccaagcaggtattcagcagtatcgccagtccattcagaatacagaaccacaaaaccggactccacgagcgccagccatatcctccgtgaccgtgtgattgttccctcaaggagcaattctggaaagtcttgtgtagtgattgaagaattggagaaggaaactccagaggaactgacgttgctcaaagagaaattctcatccatttattcttcattcagttacagtgaacttgcaaagatcacctctgacttctcaccagagtgtgtagttggacaaggaggcactagtcaagtttacagaggctgtttggcaaatggcaaggagctagcagtgaagatcctgaagtattctgatgaggtactgaaggagtttgtatcagagattgagattgtcagttctctcagccacaagaatgtgatatccctcgttggtttctgcttcaagaatgatgaccttctgttagtgtatgagtatttgcaacgaggcagcctggaagagatactgcatggt

SEQ ID NO: 33591 - protein, 511 aa, Zea mays subsp. mays
TFLSSFSSQLQFPSLSSAVARQASHQVRASEASTNAGGSGAMRLLVPDGARRQRLLQCEAPPSPSPPSPSPYPSSSPSRTVVVGIRRDAASRELLTWALVKVANAGDRVVALHVATAAAADGLLVRLDERSRAADSLASVLAVYDGFCNLKQINLELKVCGGSSIRKTLVKEAAACGAAHLILGVTNNSRSFGSSLTSVAKYCSKRVPASCSVLAVNNGKVVYHKDAGHGLQHELYQSNTTIPETPRRSYRKLLSTMIGDKLWDENGKDRRCVSRAVTMPMRSPARPKEFSLALVPVKGCQHESPAVATGWPLLRKKFLPDRKASAPDKSKMSVVQWAMRLPSRYSAVSPVHSEYRTTKPDSTSASHILRDRVIVPSRSNSGKSCVVIEELEKETPEELTLLKEKFSSIYSSFSYSELAKITSDFSPECVVGQGGTSQVYRGCLANGKELAVKILKYSDEVLKEFVSEIEIVSSLSHKNVISLVGFCFKNDDLLLVYEYLQRGSLEEILHG

SEQ ID NO: 33592 - protein, 470 aa, Zea mays subsp. mays
MRLLVPDGARRQRLLQCEAPPSPSPPSPSPYPSSSPSRTVVVGIRRDAASRELLTWALVKVANAGDRVVALHVATAAAADGLLVRLDERSRAADSLASVLAVYDGFCNLKQINLELKVCGGSSIRKTLVKEAAACGAAHLILGVTNNSRSFGSSLTSVAKYCSKRVPASCSVLAVNNGKVVYHKDAGHGLQHELYQSNTTIPETPRRSYRKLLSTMIGDKLWDENGKDRRCVSRAVTMPMRSPARPKEFSLALVPVKGCQHESPAVATGWPLLRKKFLPDRKASAPDKSKMSVVQWAMRLPSRYSAVSPVHSEYRTTKPDSTSASHILRDRVIVPSRSNSGKSCVVIEELEKETPEELTLLKEKFSSIYSSFSYSELAKITSDFSPECVVGQGGTSQVYRGCLANGKELAVKILKYSDEVLKEFVSEIEIVSSLSHKNVISLVGFCFKNDDLLLVYEYLQRGSLEEILHG

SEQ ID NO: 33593 - DNA, 758 bp, Zea mays subsp. mays
atcaaccctaaaccacccactatacccacccgcccggctagggttttgccaccatggccgccgccgcggccgccgcccggaggctcctctcccgccgcgcctcctcgaactcgctctccgcgttcctccgccgcggcgctgccccggagcagtcgctgctgcgcccggccgtcgtcgcggcggcctcccgcctcggcttcccgcgcgggatggcgcggcggcctggcggggacggctacggcgcgggccgggaccgcgcgcccacggagatggcgccgctgttccccggctgcgactacgagcactggctcatcgtgatggacaagcccggcggggagggcgccaccaagcagcagatgatcgactgctacatccagaccctcgccaaggtcctcggaagtgaggaggaggcgaagaagaagatctacaacgtctcgtgcgagcgctatttcgggttcgggtgcgagatcgatgaggagacatctaacaagctcgaggggctccctggtgttctctttgtgctaccggattcgtatgttgaccctgagtacaaggactacggagctgaactgcttgttaacggtgagattgttcagaggcctcctgagaggcagagaagggtcgagcccgtgccacagagggctgcagacaggcctaggtacaatgacaggacccgctacgcacgcaggagggagaaccagcgatgagatgaaaaaagtccacaataacaagttcaggtggtttgagctctgtaattc

SEQ ID NO: 33594 - protein, 217 aa, Zea mays subsp. mays
MAAAAAAARRLLSRRASSNSLSAFLRRGAAPEQSLLRPAVVAAASRLGFPRGMARRPGGDGYGAGRDRAPTEMAPLFPGCDYEHWLIVMDKPGGEGATKQQMIDCYIQTLAKVLGSEEEAKKKIYNVSCERYFGFGCEIDEETSNKLEGLPGVLFVLPDSYVDPEYKDYGAELLVNGEIVQRPPERQRRVEPVPQRAADRPRYNDRTRYARRRENQR

SEQ ID NO: 33595 - protein, 165 aa, Zea mays subsp. mays
MARRPGGDGYGAGRDRAPTEMAPLFPGCDYEHWLIVMDKPGGEGATKQQMIDCYIQTLAKVLGSEEEAKKKIYNVSCERYFGFGCEIDEETSNKLEGLPGVLFVLPDSYVDPEYKDYGAELLVNGEIVQRPPERQRRVEPVPQRAADRPRYNDRTRYARRRENQR

SEQ ID NO: 33596 - protein, 145 aa, Zea mays subsp. mays
MAPLFPGCDYEHWLIVMDKPGGEGATKQQMIDCYIQTLAKVLGSEEEAKKKIYNVSCERYFGFGCEIDEETSNKLEGLPGVLFVLPDSYVDPEYKDYGAELLVNGEIVQRPPERQRRVEPVPQRAADRPRYNDRTRYARRRENQR

SEQ ID NO: 33597 - DNA, 1483 bp, Zea mays subsp. mays
taatcgaaaaacaccccagcccacatcctctgattcataccacaaagctagaacctgaaagcagccagccacaccactccgctccactccacctttgccatctccaagaaagaacccagcctcttctgcttcaagaagccttttttgatcctgagttatcgccatccatcaccatgatccaagaactgctcggcggggccgccatggaccagctcaagagcgtgaatgagtccctgcccctgttgctgcactcggtcatctccaacccatcgcccacgtcgtcgtcgtcgacgtcgtcgcgctcgtctgcgcagcagcatcagcagcagcggtcgacgtcggcaacgtcgtcgccgcaagcagggcagcagcagcagcagcagggccaggggcaaggagcggagcagacgcctctgcggtgccccaggtgtaactcctccaacaccaagttctgctactacaacaactacaacctcacccaggccgcgccacttctgcaagacgtgccgccggtactggaccaagggcggcgcgctccgcaacgtgcccatcggcggcggctgccgcaagccgcgccccatgcccacgcccgtcacgaagccggcggtctcatgcaaggccgtgggcggcgcgcagtcgctgggcctcggcgtcggcttgggcatgggcgccggccccggaccctgggcgtcctcgcagcaggcggccgccgcgcagctcatggcgctgctcaacagcgccaggagcgtgcagggaggcggcggcggcaacatgcacaggctcctcggcctcgacgccgtggcccacctgcccctccatgtcctgccgggcgcgggcaataatgccggtggcacggcgccgtcgttctggccgcaggccgcgccgcgtgtcatccccgcaccgccgcacatggactcccagctcggcatggggccgctgggccagcacgacgtgctgtcgagcctcgggctaaagctgcccccgccatcgccgtcgcccgcggcaagctactacagcgaccagctgcacgcggtggtgagcagcgccgccggacgcggacacgagtacgaaacagccgcctgcgccacgtcactgccctgcaccacggcgctgacctccctcccgccggccgcgtcgagcgtgtccgctgcactggccagcgccgccacggtcgggctagacctcccgctggtctccctctccgcgccggagatgcagtactgggccgggccggcggcgatgtccgtggcgtggccggacttgcccacccccaacggcgcgttcccgtgagagacaaacatggacctcatctgctgtacggatgacgcagctgtttacccacccacatgacacactagctagtacgtaatcagtagctcgatcacttcagccttcagtgtagctttatcttgccgttaatttgactgtgttattatgagtgagaactccactcggggggaggttattaatcaatggtgtttct

SEQ ID NO: 33598 - protein, 354 aa, Zea mays subsp. mays
MSPCPCCCTRSSPTHRPRRRRRRRRARLRSSISSSGRRRQRRRRKQGSSSSSRARGKERSRRLCGAPGVTPPTPSSATTTTTTSPRPRHFCKTCRRYWTKGGALRNVPIGGGCRKPRPMPTPVTKPAVSCKAVGGAQSLGLGVGLGMGAGPGPWASSQQAAAAQLMALLNSARSVQGGGGGNMHRLLGLDAVAHLPLHVLPGAGNNAGGTAPSFWPQAAPRVIPAPPHMDSQLGMGPLGQHDVLSSLGLKLPPPSPSPAASYYSDQLHAVVSSAAGRGHEYETAACATSLPCTTALTSLPPAASSVSAALASAATVGLDLPLVSLSAPEMQYWAGPAAMSVAWPDLPTPNGAFP

SEQ ID NO: 33599 - protein, 279 aa, Zea mays subsp. mays
IEKHPSPHPLIHTTKLEPESSQPHHSAPLHLCHLQERTQPLLLQEAFFDPELSPSITMIQELLGGAAMDQLKSVNESLPLLLHSVISNPSPTSSSSTSSRSSAQQHQQQRSTSATSSPQAGQQQQQQGQGQGAEQTPLRCPRCNSSNTKFCYYNNYNLTQAAPLLQDVPPVLDQGRRAPQRAHRRRLPQAAPHAHARHEAGGLMQGRGRRAVAGPRRRLGHGRRPRTLGVLAAGGRRAAHGAAQQRQERAGRRRRQHAQAPRPRRRGPPAPPCPAGRGQ

SEQ ID NO: 33600 - protein, 236 aa, Zea mays subsp. mays
MPTPVTKPAVSCKAVGGAQSLGLGVGLGMGAGPGPWASSQQAAAAQLMALLNSARSVQGGGGGNMHRLLGLDAVAHLPLHVLPGAGNNAGGTAPSFWPQAAPRVIPAPPHMDSQLGMGPLGQHDVLSSLGLKLPPPSPSPAASYYSDQLHAVVSSAAGRGHEYETAACATSLPCTTALTSLPPAASSVSAALASAATVGLDLPLVSLSAPEMQYWAGPAAMSVAWPDLPTPNGAFP

SEQ ID NO: 33601 - DNA, 566 bp, Zea mays subsp. mays
  misc_feature (492)..(492): n is a, c, g, or t
  misc_feature (547)..(547): n is a, c, g, or t
attccggtggcttctgccaagtgctgaggatcggcatccggttcggttcgtcgtcctcgtccccactccccacctgcgcagctgcgctgcgccatctcgaatcctctccttccaccatctcgaacctctccttccatctcctccccggccgattcctccagtctccagccaccttcaactgccggccgcaagtggccccgcgtctcacccctaaccccagtgaagaatctaggcgtcgtctatccagccccgtcatcatcaccatggaggagcatgggctgtggtccagcggggccagcgacaagaacaagtccatggttgagcagctgcagaggtacggggtcatcaggtcgaccaaagtcgcggaggtgatggaggccatcgacagggggttgttcgtgccacctgggggctcgccataccacgatagccccatgccgattgggtacaatgccaccatatcagcaccacacatgcatgcggcttgcctgnagctactggagaagaatcttcagcctggaatgcgagctctcgatgttggggtcangcactggatacctaactgc

SEQ ID NO: 33602 - protein, 188 aa, Zea mays subsp. mays
  misc_feature (164)..(164): Xaa can be any naturally occurring amino acid
  misc_feature (182)..(182): Xaa can be any naturally occurring amino acid
SGGFCQVLRIGIRFGSSSSSPLPTCAAALRHLESSPSTISNLSFHLLPGRFLQSPATFNCRPQVAPRLTPNPSEESRRRLSSPVIITMEEHGLWSSGASDKNKSMVEQLQRYGVIRSTKVAEVMEAIDRGLFVPPGGSPYHDSPMPIGYNATISAPHMHAACLXLLEKNLQPGMRALDVGVXHWIPNC

SEQ ID NO: 33603 - protein, 101 aa, Zea mays subsp. mays
  misc_feature (77)..(77): Xaa can be any naturally occurring amino acid
  misc_feature (95)..(95): Xaa can be any naturally occurring amino acid
MEEHGLWSSGASDKNKSMVEQLQRYGVIRSTKVAEVMEAIDRGLFVPPGGSPYHDSPMPIGYNATISAPHMHAACLXLLEKNLQPGMRALDVGVXHWIPNC

SEQ ID NO: 33604 - DNA, 1541 bp, Zea mays subsp. mays
gcacgagaccattacctagaacatcctaatcgaaaaattggagtcactcttagtcaacggcttcctttcgttctccgttccctatcggcactctttggtgcgcccggcgcttctccgttcgttcgccggcgttcgtggcttcgcgacctccgtctgaccgtctgcacccatggccgctgaaggcgaggcgtcaatgtactacacgacggacgacgcgctctcgctcgtcggcttcggccgtttccagaccctcgtgctagcttactccggcctgggctggatcgcggaggcgttcgagatcatgctgctctccttcgttgggcctgccgtggaggcggattgggggatatcaggagcggagcagggcctcatcagcagcgccgtcttcgccgggatgctcatcgggttcatcgccggaggcctcatcgcggacagatacggcaggaggaccggtttccttttcactgcagtggtcactgccgtatttggtttgcttagcgccttctcgcccaactacgcatccttactcacccttcgctttgttgttggtctgggattgggtgctggccatgtgctatctacttggttcatagagtttgtccctgctgccaaaagaggtacctggatggttgttttccatgcttgttggactgtgggaacaatattggaggctcttcttgcgtgggctatcatgccagtacttggatggaggtggctgcttgcattgtcctcagcgccatgctttgttcttctcattttcttccctctaacacctgaatcaccaaggtatctttgctcgagaggtaggactatggatgctacagttatcttggaaagaatagcaaggatgaacaaagggactctccctcctggcgtactaattttcagaccagaaaagcatgttgacaacaaccttgggacttctgagacagcactgctaattgcagaagataatactggcattgaagaggacacaagttccaagtccagtggcattgtcgcatttcaggcactctggtcatatgatttgataagatcaacctttcttctatggttcatctatcttgcaaattattttacttattatggggtaatattgctaacttctgaactaagcaatgggaagaggaggtgtgcatctgtaagaacacatttgatgcaaccaaacagtggtaatctttatagagatgtgctggtgaccagtttggcagctctaccctgcaccgtctcggaacaccgggtgttgggatcacttcttctcttggtcggattggcagcatagtttcacctcttgttattgttggcttgttagagagctgccgtcgaaaagaagctgtgttcgtggttgacctggtgctcttccttgctggagtcacatgcgccctcttccctcgagagaccaagggatgccaaatccagtgagagtttggactccataattctgtatgtgtgtatgcttgcaaattacagtacatctaccattgcattttatcacgagcccttttgtggcctaatttaagattgatgtacaggtacttttt

SEQ ID NO: 33605 - protein, 370 aa, Zea mays subsp. mays
MAAEGEASMYYTTDDALSLVGFGRFQTLVLAYSGLGWIAEAFEIMLLSFVGPAVEADWGISGAEQGLISSAVFAGMLIGFIAGGLIADRYGRRTGFLFTAVVTAVFGLLSAFSPNYASLLTLRFVVGLGLGAGHVLSTWFIEFVPAAKRGTWMVVFHACWTVGTILEALLAWAIMPVLGWRWLLALSSAPCFVLLIFFPLTPESPRYLCSRGRTMDATVILERIARMNKGTLPPGVLIFRPEKHVDNNLGTSETALLIAEDNTGIEEDTSSKSSGIVAFQALWSYDLIRSTFLLWFIYLANYFTYYGVILLTSELSNGKRRCASVRTHLMQPNSGNLYRDVLVTSLAALPCTVSEHRVLGSLLLLVGLAA

SEQ ID NO: 33606 - protein, 362 aa, Zea mays subsp. mays
MYYTTDDALSLVGFGRFQTLVLAYSGLGWIAEAFEIMLLSFVGPAVEADWGISGAEQGLISSAVFAGMLIGFIAGGLIADRYGRRTGFLFTAVVTAVFGLLSAFSPNYASLLTLRFVVGLGLGAGHVLSTWFIEFVPAAKRGTWMVVFHACWTVGTILEALLAWAIMPVLGWRWLLALSSAPCFVLLIFFPLTPESPRYLCSRGRTMDATVILERIARMNKGTLPPGVLIFRPEKHVDNNLGTSETALLIAEDNTGIEEDTSSKSSGIVAFQALWSYDLIRSTFLLWFIYLANYFTYYGVILLTSELSNGKRRCASVRTHLMQPNSGNLYRDVLVTSLAALPCTVSEHRVLGSLLLLVGLAA

SEQ ID NO: 33607 - protein, 326 aa, Zea mays subsp. mays
MLLSFVGPAVEADWGISGAEQGLISSAVFAGMLIGFIAGGLIADRYGRRTGFLFTAVVTAVFGLLSAFSPNYASLLTLRFVVGLGLGAGHVLSTWFIEFVPAAKRGTWMVVFHACWTVGTILEALLAWAIMPVLGWRWLLALSSAPCFVLLIFFPLTPESPRYLCSRGRTMDATVILERIARMNKGTLPPGVLIFRPEKHVDNNLGTSETALLIAEDNTGIEEDTSSKSSGIVAFQALWSYDLIRSTFLLWFIYLANYFTYYGVILLTSELSNGKRRCASVRTHLMQPNSGNLYRDVLVTSLAALPCTVSEHRVLGSLLLLVGLAA

SEQ ID NO: 33608 - DNA, 1406 bp, Zea mays subsp. mays
ctctgccttttccacctcccccattcccacccgattcactcacctcgaggcctcacgcggtcgcgcctccagcctcccctactcccctcgcgcccagggaggggcccgagtcgcggcgagcgaagattccctccgattgctctcctcctagaacttccgatcggctcgtgatggccatgcagcagcacgcggcgtcggcgtcgagctccagctcggggctgcaccttctcgcctcgccctcgcccatcagggaggccacccacaccaaggttttcgtgggcgggctcgcctgggagaccagcagcgacaggctccggcgtttctacgagcgcttcggggacattctcgaggccgtcgtcatcaccgaccgccactctggccgctccaagggatacggattcgtgacattccgtgaagccgagtccgcgagcaaggcctgcgaggaccccacgccggtgatcgatggcaggcgcgccaattgtaacctggcatctttgggtcgagcccagcatcccgtgccccctgggcggccaagatcagctgggtcctatttgggtgtcccagttccaaaggccttctatttagggggttacagccaccaccgaccgtttccacttgggtactaccaaggatttcctgttccgcagtacagttacccttcatatgggaccgaatacatctatccacagggtacattaaactcatattccggtcagcaatatcttcctatttatggagtctcagctgcagcaaacacatccaaccaagcatttagccagctgagtccatccgtttctggtggtggcaatggttatttgtcggttcatagttacaacgtgcctggaaatcaatatgtgcagctcactggatccaacttcagcggtgcatcaccaaccgctcgaccttccattcagacttcttttttagtagcaacacccgttcctgcacatccacacctaataattccagccccctcacctcagtttacacaagctagtggttcagaccaaagtgcaagttgaactgtgcatccaaacatttgtaccttgaggtacccttagattgcagcaggactaaaaagagcagtgttgctgtattcacagcatttgttcttgcctggcaagcaatcatccttgcattcataaggttgtcgttatcatggtcaacagatgtacctggaaaccatgaagttgcccctatggatggggcaagtgatccaagagtaacagttgctcttgcagtttcgctcagtttaaatcgcaagcgtgatggagcatgaagccacagatgcagccttattggtcctgtatctgacaggctcatggaaatgtagcttatgctggaatggagttcagcatatgtaagatggattaatccaatggagatcagccttcaggtgattgtgc

SEQ ID NO: 33609 - protein, 339 aa, Zea mays subsp. mays
LPFPPPPFPPDSLTSRPHAVAPPASPTPLAPREGPESRRAKIPSDCSPPRTSDRLVMAMQQHAASASSSSSGLHLLASPSPIREATHTKVFVGGLAWETSSDRLRRFYERFGDILEAVVITDRHSGRSKGYGFVTFREAESASKACEDPTPVIDGRRANCNLASLGRAQHPVPPGRPRSAGSYLGVPVPKAFYLGGYSHHRPFPLGYYQGFPVPQYSYPSYGTEYIYPQGTLNSYSGQQYLPIYGVSAAANTSNQAFSQLSPSVSGGGNGYLSVHSYNVPGNQYVQLTGSNFSGASPTARPSIQTSFLVATPVPAHPHLIIPAPSPQFTQASGSDQSAS

SEQ ID NO: 33610 - protein, 283 aa, Zea mays subsp. mays
MAMQQHAASASSSSSGLHLLASPSPIREATHTKVFVGGLAWETSSDRLRRFYERFGDILEAVVITDRHSGRSKGYGFVTFREAESASKACEDPTPVIDGRRANCNLASLGRAQHPVPPGRPRSAGSYLGVPVPKAFYLGGYSHHRPFPLGYYQGFPVPQYSYPSYGTEYIYPQGTLNSYSGQQYLPIYGVSAAANTSNQAFSQLSPSVSGGGNGYLSVHSYNVPGNQYVQLTGSNFSGASPTARPSIQTSFLVATPVPAHPHLIIPAPSPQFTQASGSDQSAS

SEQ ID NO: 33611 - protein, 281 aa, Zea mays subsp. mays
MQQHAASASSSSSGLHLLASPSPIREATHTKVFVGGLAWETSSDRLRRFYERFGDILEAVVITDRHSGRSKGYGFVTFREAESASKACEDPTPVIDGRRANCNLASLGRAQHPVPPGRPRSAGSYLGVPVPKAFYLGGYSHHRPFPLGYYQGFPVPQYSYPSYGTEYIYPQGTLNSYSGQQYLPIYGVSAAANTSNQAFSQLSPSVSGGGNGYLSVHSYNVPGNQYVQLTGSNFSGASPTARPSIQTSFLVATPVPAHPHLIIPAPSPQFTQASGSDQSAS

SEQ ID NO: 33612 - DNA, 1935 bp, Zea mays subsp. mays
actgcctctgcgtgcgtgcgtcactgccggtctgccgtgccgctgcgcccgctcccgcaataaataaactcacctctctctgttctccgttctcacctccctcctcatccatccagggacgcgccttgacttctcacgtcgtgtcgtgtgtgagcgcagcggtgctgctgatctgcgattcctccacgccacaccctacctgaccacccgacagggaatcctactccctcttgcgcgccgcggcggcggcggcggcatcttcggtctccgtgcgggtgtttccgttcggcgtttactggccgggcgagcgcggcattggaggagtcgggaggagggagacaggaggcgtgatcgatggggaactgcgtggcgagcgggggcgcgacgacggtcacggcggcaggggaggacgggaggcggcgggggaggaggtggaaggcgccgcgggaggagcagctcggctcggtccccggccggatcttctccaacgacggccgcagccgcaccgccgccgtgttcacgcagcagggccggaagggggtcaatcaggacgccatgctcgtctgggatgggttcggcggggaggaggacgtcgtgctgtgtggggtgttcgacgggcacggcccgcatggccacctggtggcgcgcagggtccgcgacgcgctgccgctgaagctcatggccgcggtgcgcgagtccaagcctggcttggacatggccgccgccgcgtggaggaaggcctttgcgcgcgcctacaaggccatggacaaagatcttcgctcccacgccaccctagactgcttctgcagtggcagcaccgccgtcaccgtcctcaagctcggctcggatctctacatggccaacattggtgactcgcgcgccgtgctaggctcaagggacggcggcggcatggtggccgtgcaactgactgtcgacctcaaaccagatgttcccagcgaggcagaacggatcaagaagtgcaggggcagggtatttgctctgcaggacgaaccggaggtgcctcgggtctggctgccgttcgacgacgcgcctggcctggcgatggcccgggcgtttggggacttctgcctcaaggattatggtgtcatttcggttccagagttcttccactggtcgctcacggagaaggaccagttcatcatccttgcatcagatggggtgtgggatgtccttagcaaccaggaggccgttgacatcgtgtcgtcatccccaagccgatcaaaggccgcgagatccctggtcgaggccgccgctcgtgaatggaaagccaagtacccgacatcgaagaccgacgactgcgcggtggtctgcctatacttggacggcaagatggaccaggaacgcgactcgacggcgtccatggacaacatcagcctggactacgaaggctcagccgcggacccgaacgaagcgcaggagctgcaggagccggcgctgacccgcaacttcacggtcaggacggtggccggaagtgcccacgagaaggcgctgtcgggggcggcagacgcggccgtcgccgtcggcggcggcgcagcctgcgcccacgaccagagctggtcgggccttgacggggtgacgcgggtgaactcgctcgtccagctccctaggttctccgaggaaaaggcggcggttggctgatgagccgccggctgctgcatgcgattctttggttttggttgttgagttgtttgtttcctcgtttttttggaaatctagtttagtagttgccccgttgttgtttgggaggaagggacacggtagaaacagaaatatggtgttgtgatttgcatcggcgcgcgcgtaagctggtgtgtttgagccactgtggtggactggtggtggtggttagggtgtgagctgcgacatttagcacagcaagagatgtgctttctggaaagtacagagggttcaccc

SEQ ID NO: 33613 - protein, 434 aa, Zea mays subsp. mays
MGNCVASGGATTVTAAGEDGRRRGRRWKAPREEQLGSVPGRIFSNDGRSRTAAVFTQQGRKGVNQDAMLVWDGFGGEEDVVLCGVFDGHGPHGHLVARRVRDALPLKLMAAVRESKPGLDMAAAAWRKAFARAYKAMDKDLRSHATLDCFCSGSTAVTVLKLGSDLYMANIGDSRAVLGSRDGGGMVAVQLTVDLKPDVPSEAERIKKCRGRVFALQDEPEVPRVWLPFDDAPGLAMARAFGDFCLKDYGVISVPEFFHWSLTEKDQFIILASDGVWDVLSNQEAVDIVSSSPSRSKAARSLVEAAAREWKAKYPTSKTDDCAVVCLYLDGKMDQERDSTASMDNISLDYEGSAADPNEAQELQEPALTRNFTVRTVAGSAHEKALSGAADAAVAVGGGAACAHDQSWSGLDGVTRVNSLVQLPRFSEEKAAVG

SEQ ID NO: 33614 - protein, 367 aa, Zea mays subsp. mays
MLVWDGFGGEEDVVLCGVFDGHGPHGHLVARRVRDALPLKLMAAVRESKPGLDMAAAAWRKAFARAYKAMDKDLRSHATLDCFCSGSTAVTVLKLGSDLYMANIGDSRAVLGSRDGGGMVAVQLTVDLKPDVPSEAERIKKCRGRVFALQDEPEVPRVWLPFDDAPGLAMARAFGDFCLKDYGVISVPEFFHWSLTEKDQFIILASDGVWDVLSNQEAVDIVSSSPSRSKAARSLVEAAAREWKAKYPTSKTDDCAVVCLYLDGKMDQERDSTASMDNISLDYEGSAADPNEAQELQEPALTRNFTVRTVAGSAHEKALSGAADAAVAVGGGAACAHDQSWSGLDGVTRVNSLVQLPRFSEEKAAVG

SEQ ID NO: 33615 - protein, 326 aa, Zea mays subsp. mays
MAAVRESKPGLDMAAAAWRKAFARAYKAMDKDLRSHATLDCFCSGSTAVTVLKLGSDLYMANIGDSRAVLGSRDGGGMVAVQLTVDLKPDVPSEAERIKKCRGRVFALQDEPEVPRVWLPFDDAPGLAMARAFGDFCLKDYGVISVPEFFHWSLTEKDQFIILASDGVWDVLSNQEAVDIVSSSPSRSKAARSLVEAAAREWKAKYPTSKTDDCAVVCLYLDGKMDQERDSTASMDNISLDYEGSAADPNEAQELQEPALTRNFTVRTVAGSAHEKALSGAADAAVAVGGGAACAHDQSWSGLDGVTRVNSLVQLPRFSEEKAAVG

SEQ ID NO: 33616 - DNA, 1358 bp, Zea mays subsp. mays
aaaccaacccacgccatcatcatccgtcaatccatccatccatccgcttgtccctaccacctccaccaaccaaaacccccaaccgccgaggtcaccggcgactccgtcctcgccgcgccgcgccgtgaggatgtcgttccactaccacgaccacgggctgtccatggacgccgcggcagcggcggccgccgccgcgtcgtcgccgaaccctagcggcttctcccccggcatcggcggggaaagggagaaggcggccatcgcggcgcacccgctgtacgagcgcctcctggaggcgcacgtcgcctgcctacgcgtcgccacccccgtcgaccagctcccccgcatcgacgcgcagatcgccgcgcgccccccgccgctcgccgcggccgccggggccgcggccgcgggaggcccgtccggcggggaggagctcgacctcttcatgacgcactatgtattgctcctttgctcattcaaggagcagttgcagcagcatgtacgtgttcatgcaatggaagcagtgatgggttgctgggagcttgaacaatctttacaaagcctaacaggggcatctccgggtgaaggcactggaggaaccatgtctgacgatgaagataaccaggtggatagtgaagccaacatgttcgatggaaatgatggatcagacggtatgggctttggccccctaatactgacagagggtgaacggtccttagttgagcgtgtacggaaggagctgaagaacgagcttaagcagggttacaaggaaaagcttgtcgatatcagggaagagatcatgcgcaaacgcagggctgggaaacttcctggagataccgcatctgtactgaaagcttggtggcaagctcattcgaagtggccgtacccaactgaagacgacaaggccagactggtgcaggaaacggggttgcagctaaagcagatcaacaactggttcattaaccaacgcaaacggaactggcacagcaacccaacatcctcggctgaaaagaccaagaagaaaaggtgatgatggcccagagcaatcttggcaaaaagctagacatgtccactatactttattatggcgaagtacattctccctcacttcgtaggcaagagggaaaggtatcttgggtgacttgagtggccacctaatgcgcaagtttgaccacgtgtggggctggggttgggtagtgacctcagcagtatagcattcgctaacgtgatgtgggaatcacgtgttgcagtagaaccggcgagcgggaggggggtaatttatgttgtattgtaattactatatatgaaagacggacacaaacgtcgctcctcgtacgtccacgtcgtcacttttttcagcg

SEQ ID NO: 33617 - protein, 341 aa, Zea mays subsp. mays
NQPTPSSSVNPSIHPLVPTTSTNQNPQPPRSPATPSSPRRAVRMSFHYHDHGLSMDAAAAAAAAASSPNPSGFSPGIGGEREKAAIAAHPLYERLLEAHVACLRVATPVDQLPRIDAQIAARPPPLAAAAGAAAAGGPSGGEELDLFMTHYVLLLCSFKEQLQQHVRVHAMEAVMGCWELEQSLQSLTGASPGEGTGGTMSDDEDNQVDSEANMFDGNDGSDGMGFGPLILTEGERSLVERVRKELKNELKQGYKEKLVDIREEIMRKRRAGKLPGDTASVLKAWWQAHSKWPYPTEDDKARLVQETGLQLKQINNWFINQRKRNWHSNPTSSAEKTKKKR

SEQ ID NO: 33618 - protein, 298 aa, Zea mays subsp. mays
MSFHYHDHGLSMDAAAAAAAAASSPNPSGFSPGIGGEREKAAIAAHPLYERLLEAHVACLRVATPVDQLPRIDAQIAARPPPLAAAAGAAAAGGPSGGEELDLFMTHYVLLLCSFKEQLQQHVRVHAMEAVMGCWELEQSLQSLTGASPGEGTGGTMSDDEDNQVDSEANMFDGNDGSDGMGFGPLILTEGERSLVERVRKELKNELKQGYKEKLVDIREEIMRKRRAGKLPGDTASVLKAWWQAHSKWPYPTEDDKARLVQETGLQLKQINNWFINQRKRNWHSNPTSSAEKTKKKR

SEQ ID NO: 33619 - protein, 287 aa, Zea mays subsp. mays
MDAAAAAAAAASSPNPSGFSPGIGGEREKAAIAAHPLYERLLEAHVACLRVATPVDQLPRIDAQIAARPPPLAAAAGAAAAGGPSGGEELDLFMTHYVLLLCSFKEQLQQHVRVHAMEAVMGCWELEQSLQSLTGASPGEGTGGTMSDDEDNQVDSEANMFDGNDGSDGMGFGPLILTEGERSLVERVRKELKNELKQGYKEKLVDIREEIMRKRRAGKLPGDTASVLKAWWQAHSKWPYPTEDDKARLVQETGLQLKQINNWFINQRKRNWHSNPTSSAEKTKKKR

SEQ ID NO: 33620 - DNA, 1056 bp, Zea mays subsp. mays
ctagacgccacacacacacatcgcttctccacacgacctcgctgaaccggaagacccgcacacacacgccacttgtgcaccatggcgccccgggtggcggacaagtcgccattgccgctggccaccggcctgaagctgggcgtaggcggaggcatgggcctgggtccacactaccgaggcgtgaggaagcggccgtggggacgttacgccgcggagatccgcgacccagccaagaagagtcgcgtgtggctgggcacgtacgacacggccgaggaggccgccaaggcctacgacgtcgccgcccgcgagttccgtggcgccaaggccaagactaacttcccgttccccctcgccgtcgccgtcgccgtcgccggcggtgctggtagccccagcagcgacagcaccaccttggaatcgagctgtggcggcagcgggtgtggcgtcgaagcgcctgtgcaggcggccatgccgctgaccccggccctcgacctcgatctcttccaccgggcggccgccgtcagcgcggtcaccaccggcggcatgccctttccgttcaaggccttccccgtcgtgcgcccgaccccacatcagtacttcctctacaatcaggccgcggcggccgcggcagccgggtacaggatggtcaaggtcgcctcagctccagtcaccgtagccgccgtcgcgcagagcgactccgactcctcgtctgtggttgatcgcacctgttcgcctcccgcggtgacggcaaagaaggaggtcagcttcgaactggatctgaactggccgccgccggcagagaactagtcgcaccggagttttcagctgacgactttgcagtttcctttttcccttttggccttcatcaggaattgtagtgtagctctgggtgtttggtcttttttttttcttgcatgtagagtgtagactatgatatggtggagccttgtacatagtactgtagtgttttttttttccgccgagacggagtagatctgttcgtgtgtctggacagatcaaaccggcgttgatatgggctttaaaccatggagcatgttg

SEQ ID NO: 33621 - protein, 240 aa, Zea mays subsp. mays
MAPRVADKSPLPLATGLKLGVGGGMGLGPHYRGVRKRPWGRYAAEIRDPAKKSRVWLGTYDTAEEAAKAYDVAAREFRGAKAKTNFPFPLAVAVAVAGGAGSPSSDSTTLESSCGGSGCGVEAPVQAAMPLTPALDLDLFHRAAAVSAVTTGGMPFPFKAFPVVRPTPHQYFLYNQAAAAAAAGYRMVKVASAPVTVAAVAQSDSDSSSVVDRTCSPPAVTAKKEVSFELDLNWPPPAEN

SEQ ID NO: 33622 - protein, 216 aa, Zea mays subsp. mays
MGLGPHYRGVRKRPWGRYAAEIRDPAKKSRVWLGTYDTAEEAAKAYDVAAREFRGAKAKTNFPFPLAVAVAVAGGAGSPSSDSTTLESSCGGSGCGVEAPVQAAMPLTPALDLDLFHRAAAVSAVTTGGMPFPFKAFPVVRPTPHQYFLYNQAAAAAAAGYRMVKVASAPVTVAAVAQSDSDSSSVVDRTCSPPAVTAKKEVSFELDLNWPPPAEN

SEQ ID NO: 33623 - DNA, 851 bp, Zea mays subsp. mays
aaattccattccaaatccgcagtccgcagacgagagtggaagcggggcacagacaggaagagaagccaatggcgctgtccctctccctcgcgcgccccgcgcccctcgccgtttccgccggcgcaggagccaggaagctacccgcagccagcctcgcattcccggcgaaatccttcttcggcgcgccgctggccgccaccgcggcctccgtcgcgtcgccgctcccgcgcaagccggccacctccaccacctcgctcgaggtcgtcgcggcggggaagaagggctacaagatgaagacgcacaaggcgtcggcgaagcggttccgggtgacggggaggggcaagatcgtgcggcggtgcgccgggaagcagcacttgctcgccaagaagaacaccaagcgcaagaagaggctctcgaagatggtgcaagtcaacaagagtgactacgacaatgttacgggtgcactgccctacctcaaagtgaataggaaagcaaactgagagctacgtggtcttcaaaaaatcattaagtttcgttccaccaaattgtaattttgtgtatcttccactgtatttccttctcaaaaatactgaggcatcatttcaaagcaagcaaaaaacaactcctggtatcaacagtatagcgatatttcagaatgaggtgcactgcttgctatagttgttatttagtcgcaaatatgtgcaagtaagagtggcacttgagccattagctcctcttaggatatggccagcagatcgtgtatatggctgtgcaagacactgttttgcaccattttatatatagactgcattgtttacatgatgaagcttgaaataggatatgggatgagt

SEQ ID NO: 33624 - protein, 165 aa, Zea mays subsp. mays
IPFQIRSPQTRVEAGHRQEEKPMALSLSLARPAPLAVSAGAGARKLPAASLAFPAKSFFGAPLAATAASVASPLPRKPATSTTSLEVVAAGKKGYKMKTHKASAKRFRVTGRGKIVRRCAGKQHLLAKKNTKRKKRLSKMVQVNKSDYDNVTGALPYLKVNRKAN

SEQ ID NO: 33625 - protein, 146 aa, Zea mays subsp. mays
NSIPNPQSADESGSGAQTGREANGAVPLPRAPRAPRRFRRRRSQEATRSQPRIPGEILLRRAAGRHRGLRRVAAPAQAGHLHHLARGRRGGEEGLQDEDAQGVGEAVPGDGEGQDRAAVRREAALARQEEHQAQEEALEDGASQQE

SEQ ID NO: 33626 - protein, 143 aa, Zea mays subsp. mays
MALSLSLARPAPLAVSAGAGARKLPAASLAFPAKSFFGAPLAATAASVASPLPRKPATSTTSLEVVAAGKKGYKMKTHKASAKRFRVTGRGKIVRRCAGKQHLLAKKNTKRKKRLSKMVQVNKSDYDNVTGALPYLKVNRKAN

SEQ ID NO: 33627 - DNA, 1996 bp, Zea mays subsp. mays
gcacgagaccattacctagaacatcctaatcgaaaaacggtccaccgacgactcttcttcctcacctcctcccgctccagctccagctcgtctctctcctcgcctcgcgtagggtttcgcttcccgtctcgccgccgtcagcatgggggacaactacgatgacgaaggcgagccgatcgtgaacctcgacgaacgggaaccctcccctgagcatcagccgtacgaagacctcgatgacgacctcgacggcggcggcgattggacccgcgaccgctctccgacccccgtccacggcgacgacggcggggcagggtcctcctccaagccccgaaagcgccttctcaagaagggcggcggtggaggcatgcccggcgatgacgggctggatgactttgggttggaggacgaggacgcggacccttcggctgaggcgaggaagaggaagggctcgtcgtcgctgagggacctcgcgaggggcggggcgggcagggagaagaaggctaagaaaatgcggatggaggacgacgggagggggagggacactgggatggtgagggataggcggggatcaggaggaagggactcaggcggtagggatgaccaggatgatggggagagggagatccaggagctctgggataccattgctggtggtgagtcagaggatgaccaagaaggtgttagaaccgtagatgatgataatttcattgatgacactggagttgatccagctgatcgttatggcagcgataatgagcgacattcacctggacgttatgcacaggctgaggagggtgaggaggacgatgaaatcgaacaactcttcaagggtggtaagaagaagaagaagaagaatgatcgccctcgtgcagatattggccttatagtggaacaattcattgctgagtttgaagtagcagccgaagaagatgcaaacttgaataggcaatcaaaaccagccattaacaaacttatgaagcttcctctgctcatagatgttctctccaagaagaatcttcagcaggaatttcttgaccacggagttctcactcttctaaaaaattggcttgagccattacctgatggaagcatgccaaacatgaatattcgatctgctgtactgaaattattaactgattttccaattgacttggaacagtatgaccgaagagagcagcttaagaaaagtggtctgggaaaggtcattatgtttttgtccaaatctgacgaggagactactgcaaataggaaattggctaaggagctggttgataaatggagtcgaccaatattcaacaagagcacgagatttgaggacatgaagagatatgatgatgaaagagcaccttacaggcggccacaaatgaaggaaccttcatcgagtagctctggaatggaatccagagatgatgatcttgatgctgacttttcacaacgcaagtctgggcaaagtagttcaaggcagcacgcttctaggccggaagcctcgcctttggactttgtcattcgtccacagtccaaaattgaccctgagcagatacgggctcgtgctaagcaggctgtccaagaccagcgtcggctgaagatgaacaagaaattgcagcagctgaaagcgcccaagaagaaaaaccttcaggcgtcgaagctcagcgtggaaggccgtggcatgatcaagtacctgtagatcacccgctatggcatccgcagtcagcagtgcccagcacattatacaggacctgcatgggcccagggattgctggattactaagaagcatcctatcaccattccatggcaaacagcccggcatcaataattccttggatcttttttccaaatatttttcttgcctggtagggtgcagcatctgcgcttcagaaaccggttgatttgagcactatctatgagcatgtataaatatggtgcttttcaagcagagtggtgcctttatattgtataaaatatttgtcatgcttatgagttacagttaactctgtc

SEQ ID NO: 33628 - protein, 513 aa, Zea mays subsp. mays
MGDNYDDEGEPIVNLDEREPSPEHQPYEDLDDDLDGGGDWTRDRSPTPVHGDDGGAGSSSKPRKRLLKKGGGGGMPGDDGLDDFGLEDEDADPSAEARKRKGSSSLRDLARGGAGREKKAKKMRMEDDGRGRDTGMVRDRRGSGGRDSGGRDDQDDGEREIQELWDTIAGGESEDDQEGVRTVDDDNFIDDTGVDPADRYGSDNERHSPGRYAQAEEGEEDDEIEQLFKGGKKKKKKNDRPRADIGLIVEQFIAEFEVAAEEDANLNRQSKPAINKLMKLPLLIDVLSKKNLQQEFLDHGVLTLLKNWLEPLPDGSMPNMNIRSAVLKLLTDFPIDLEQYDRREQLKKSGLGKVIMFLSKSDEETTANRKLAKELVDKWSRPIFNKSTRFEDMKRYDDERAPYRRPQMKEPSSSSSGMESRDDDLDADFSQRKSGQSSSRQHASRPEASPLDFVIRPQSKIDPEQIRARAKQAVQDQRRLKMNKKLQQLKAPKKKNLQASKLSVEGRGMIKYL

SEQ ID NO: 33629 - protein, 439 aa, Zea mays subsp. mays
MPGDDGLDDFGLEDEDADPSAEARKRKGSSSLRDLARGGAGREKKAKKMRMEDDGRGRDTGMVRDRRGSGGRDSGGRDDQDDGEREIQELWDTIAGGESEDDQEGVRTVDDDNFIDDTGVDPADRYGSDNERHSPGRYAQAEEGEEDDEIEQLFKGGKKKKKKNDRPRADIGLIVEQFIAEFEVAAEEDANLNRQSKPAINKLMKLPLLIDVLSKKNLQQEFLDHGVLTLLKNWLEPLPDGSMPNMNIRSAVLKLLTDFPIDLEQYDRREQLKKSGLGKVIMFLSKSDEETTANRKLAKELVDKWSRPIFNKSTRFEDMKRYDDERAPYRRPQMKEPSSSSSGMESRDDDLDADFSQRKSGQSSSRQHASRPEASPLDFVIRPQSKIDPEQIRARAKQAVQDQRRLKMNKKLQQLKAPKKKNLQASKLSVEGRGMIKYL

SEQ ID NO: 33630 - protein, 391 aa, Zea mays subsp. mays
MRMEDDGRGRDTGMVRDRRGSGGRDSGGRDDQDDGEREIQELWDTIAGGESEDDQEGVRTVDDDNFIDDTGVDPADRYGSDNERHSPGRYAQAEEGEEDDEIEQLFKGGKKKKKKNDRPRADIGLIVEQFIAEFEVAAEEDANLNRQSKPAINKLMKLPLLIDVLSKKNLQQEFLDHGVLTLLKNWLEPLPDGSMPNMNIRSAVLKLLTDFPIDLEQYDRREQLKKSGLGKVIMFLSKSDEETTANRKLAKELVDKWSRPIFNKSTRFEDMKRYDDERAPYRRPQMKEPSSSSSGMESRDDDLDADFSQRKSGQSSSRQHASRPEASPLDFVIRPQSKIDPEQIRARAKQAVQDQRRLKMNKKLQQLKAPKKKNLQASKLSVEGRGMIKYL

SEQ ID NO: 33631 - DNA, 834 bp, Zea mays subsp. mays
gcacgagaccattacctagaacatcctaatcaaaattttgatgaaaacgtcgactcttttttgtcgaatgatgatgtagacggaagaggcatgtttgcagcacttgaaaaagggtcttcagagcacaatacagagtccttaaagggtctctctttgagtgaagttggtaacaaccgtacaagtaacaacaaagttgtttgctgtcacttctcttcagatgggaagttactcgctagtgccggccatgagaagaaggtcttcctctggaatatggacaattttaagatggataccaaaatagaagaccatacaaactttatcacagacataagattcagaactaattcaactcagttggctacatcatcttctgacggaactgttcgactttggaatgctgctgatgaaagtggcgctttacaaacttttcatgggcataggtctcatgtaacatcagtagattttcacccaagattgacagaggttctttgctcttgcgacgacaatggagaaattctcttctggacagttggtcagactacatctactcatgttttgcgggtgaagcagggtggaactggaagagtcaggtttgaacctcgaagtgggcagctcctcgctgtggcagctggaagcatggtgaacatttttgatgttgaaaagcaatccagcttaccctgcttcgtgattcagatgctgctttctttcaagtgatatgtcgatgtagtgtgcgagcaatgtatttggtttggctacagctgttctgtcgtctgtgcgtaaaacattagctatgtatctatccatatctgcatatttgaatgtatggtcgttttc

SEQ ID NO: 33632 - protein, 237 aa, Zea mays subsp. mays
ARDHYLEHPNQNFDENVDSFLSNDDVDGRGMFAALEKGSSEHNTESLKGLSLSEVGNNRTSNNKVVCCHFSSDGKLLASAGHEKKVFLWNMDNFKMDTKIEDHTNFITDIRFRTNSTQLATSSSDGTVRLWNAADESGALQTFHGHRSHVTSVDFHPRLTEVLCSCDDNGEILFWTVGQTTSTHVLRVKQGGTGRVRFEPRSGQLLAVAAGSMVNIFDVEKQSSLPCFVIQMLLSFK

SEQ ID NO: 33633 - protein, 207 aa, Zea mays subsp. mays
MFAALEKGSSEHNTESLKGLSLSEVGNNRTSNNKVVCCHFSSDGKLLASAGHEKKVFLWNMDNFKMDTKIEDHTNFITDIRFRTNSTQLATSSSDGTVRLWNAADESGALQTFHGHRSHVTSVDFHPRLTEVLCSCDDNGEILFWTVGQTTSTHVLRVKQGGTGRVRFEPRSGQLLAVAAGSMVNIFDVEKQSSLPCFVIQMLLSFK

SEQ ID NO: 33634 - protein, 147 aa, Zea mays subsp. mays
MDNFKMDTKIEDHTNFITDIRFRTNSTQLATSSSDGTVRLWNAADESGALQTFHGHRSHVTSVDFHPRLTEVLCSCDDNGEILFWTVGQTTSTHVLRVKQGGTGRVRFEPRSGQLLAVAAGSMVNIFDVEKQSSLPCFVIQMLLSFK

SEQ ID NO: 33635 - DNA, 1358 bp, Zea mays subsp. mays
gaaactgaactcctgacatggccaggccagcacgcaaagccctgataggcgcgccctccgccgcgcgctcgcgcggcctacggaggcacgcgtttccaagatctgctgtcgctctcttcctcgccctcctcgtcgcgctgtccttggcggtgctataccgtgccgccgtctcgcgctcgctggggacgtcctggtcctgggggtgggactcgctggcgctgccctcgttcgccacatcccaggaggaggagggcgcggaaggcgacgatctggacagtgaagatctcaaacttgagcgagtcctaaagaaggcttcaatgcgagacaatacagttatcttgactacacttaatgctgcatgggcttctcctgggtcattgatagaccttttcatcgatagcttccgttctggtgttagaacaaatttgctgttgaaacaccttgtaattgtagcatttgattggaaagcatatgaggaatgtgttaaaatccatccctattgctttgctctgggaaccgatggtgtggatttctctgaagagaagaggttcctgacttctggatatctcgagatgatgtggagaaggctagatttcctgcggctggttcttgagaaaggttacaacttcatattctcggatgcagacattatgtggtttcgcaatccattcccacatttctatcccgatgtagactttcagattgcatgtgatcactatgtcaggaatgcaaccgacttgagaaatattgctaatggaggcttcagctatgtgaaatcaaatgagcgtagcatagagttttacagtttctggtattcgtcaagattgaggtatcctggctaccatgatcaggatgtattcaatgctataaagcatgatccttacattgtacacattggattgacatttaagtttctgagtacaaagtactttggagggttctgtgaaccaagcagagatctgaacgaagtctgcactatgcatgctaactgttgcattgggctgcaaagcaagattcatgatctgaagattatgatggaggattggaggagttatttgtccttgcctccaaatttgaaaagattgcaaatatctacttggcgggtaccacaaaattgcagccttgcatggtcgcgccattaaggcaacaaagcatgctgaggatcatgaaaagcatgtgagatcactagttgaaagattgcacctccccccctcctctcccggccaaacttataactgacctaactgataggtttcatctgtaaacaaaagctgcttcatttctgtgtgttctggaacttggattctttgaggggaaaacgtgataaatcatcaaatgagttgtagtttcttgatgtt

SEQ ID NO: 33636 - protein, 374 aa, Zea mays subsp. mays
MARPARKALIGAPSAARSRGLRRHAFPRSAVALFLALLVALSLAVLYRAAVSRSLGTSWSWGWDSLALPSFATSQEEEGAEGDDLDSEDLKLERVLKKASMRDNTVILTTLNAAWASPGSLIDLFIDSFRSGVRTNLLLKHLVIVAFDWKAYEECVKIHPYCFALGTDGVDFSEEKRFLTSGYLEMMWRRLDFLRLVLEKGYNFIFSDADIMWFRNPFPHFYPDVDFQIACDHYVRNATDLRNIANGGFSYVKSNERSIEFYSFWYSSRLRYPGYHDQDVFNAIKHDPYIVHIGLTFKFLSTKYFGGFCEPSRDLNEVCTMHANCCIGLQSKIHDLKIMMEDWRSYLSLPPNLKRLQISTWRVPQNCSLAWSRH

SEQ ID NO: 33637 - protein, 274 aa, Zea mays subsp. mays
MRDNTVILTTLNAAWASPGSLIDLFIDSFRSGVRTNLLLKHLVIVAFDWKAYEECVKIHPYCFALGTDGVDFSEEKRFLTSGYLEMMWRRLDFLRLVLEKGYNFIFSDADIMWFRNPFPHFYPDVDFQIACDHYVRNATDLRNIANGGFSYVKSNERSIEFYSFWYSSRLRYPGYHDQDVFNAIKHDPYIVHIGLTFKFLSTKYFGGFCEPSRDLNEVCTMHANCCIGLQSKIHDLKIMMEDWRSYLSLPPNLKRLQISTWRVPQNCSLAWSRH

SEQ ID NO: 33638 - protein, 189 aa, Zea mays subsp. mays
MMWRRLDFLRLVLEKGYNFIFSDADIMWFRNPFPHFYPDVDFQIACDHYVRNATDLRNIANGGFSYVKSNERSIEFYSFWYSSRLRYPGYHDQDVFNAIKHDPYIVHIGLTFKFLSTKYFGGFCEPSRDLNEVCTMHANCCIGLQSKIHDLKIMMEDWRSYLSLPPNLKRLQISTWRVPQNCSLAWSRH

SEQ ID NO: 33639 - DNA, 1729 bp, Zea mays subsp. mays
atcatttcaccagaagctgcaaattgcaagctctcctccctaggtagcctctccagcagcccaaccacacagcctgcagctcgcgttggcacagcgccgcctgaacgcgtgctaatttaagctctgtatctcgtcgcggccgccgggctttcgccgacgacgtcaaaatggccggtggtagcagtgccgagcagcttctctccaggatcgcctccggcgatggccacggcgagaactcgtcctacttcgacgggtggaaggcctacgacatggaccctttcgacctgcgccacaaccgcgacggcgtcatccagatgggcctcgccgagaaccaactgtccctggacctgatcgagcaatggagcacggagcacccggaggcgtccatctgcacggcgcagggcgcgtcgcagttcaggaggatagccaacttccaggactaccacggcctgccggagttcagagaggcgatggccaagttcatgggccaggtgagggccgggaaggtgacgttcgaccccgaccgcgtcgtcatgtgcggaggcgccaccggcgcgcaggacactctcgccttctgcctcgctgacccgggcgacgcctacctcgtcccgacgccatactacccagctttcgaccgtgactgttgctggaggtcaggcgtgaagctgctgcccatcgaatgccacagctcaaacaacttcaccctcacacgggaggcgctcgtgtcggcctacgacggcgcgcggaggcagggcgtccgcgtcaagggcgtcctcatcaccaacccctccaacccgctgggcaccaccatggaccgcgccacgctggcgatgctcgccaggttcgccacggagcaccgtgtccacctcatctgcgacgagatctacgcgggctccgtcttcgccaagccggacttcgtgagcatcgccgaggtcatcgagcgcgacgtcccgggctgcaacagggacctcatccacatcgcgtacagcctctccaaggacttcggcctcccgggcttccgcgtcggcatcgtctactcgtacaacgacgacgtcgtggcctgcgcgcgcaagatgtccagcttcggcctcgtctcctcgcagacgcagcacttcctggcgaagatgctgtcggacgcggagttcatggcccgcttcctcgcggagagcgcgcggcggctggcggcgcgccacgaccgcttcgtcgcgggactccgcgaggtcggcatcgcgtgcctgcccggcaacgcggggctcttctcgtggatggacctgcggggcatgctccgggacaagacgcacgacgcggagctggagctgtggcgggtcatcgtacacaaggtgaagctcaacgtgtcgcccggcacgtcgttccactgcaacgagcccggctggttccgcgtctgccacgctaacatggacgacgagaccatggaggtcgcgctcgacaggatccgccgcttcgtgcgccagcaccagcacaaggccaaggccgagcgctgggcggcacgcggcccatgcgcctcagcttgccgcgccggggaggcgccaccgcttcgcacctccccatctccagccccttggcgttgctgtcgccgcagtccccgatggttcacgccagctagtcaccgagcatccggcaacactggctgtagggtgtgcccgtacatccgtacgcacaccttttttttcccattcacgtgactgcaatcaagtctatgggatggttg

SEQ ID NO: 33640 - protein, 511 aa, Zea mays subsp. mays
MAGGSSAEQLLSRIASGDGHGENSSYFDGWKAYDMDPFDLRHNRDGVIQMGLAENQLSLDLIEQWSTEHPEASICTAQGASQFRRIANFQDYHGLPEFREAMAKFMGQVRAGKVTFDPDRVVMCGGATGAQDTLAFCLADPGDAYLVPTPYYPAFDRDCCWRSGVKLLPIECHSSNNFTLTREALVSAYDGARRQGVRVKGVLITNPSNPLGTTMDRATLAMLARFATEHRVHLICDEIYAGSVFAKPDFVSIAEVIERDVPGCNRDLIHIAYSLSKDFGLPGFRVGIVYSYNDDVVACARKMSSFGLVSSQTQHFLAKMLSDAEFMARFLAESARRLAARHDRFVAGLREVGIACLPGNAGLFSWMDLRGMLRDKTHDAELELWRVIVHKVKLNVSPGTSFHCNEPGWFRVCHANMDDETMEVALDRIRRFVRQHQHKAKAERWAARGPCASACRAGEAPPLRTSPSPAPWRCCRRSPRWFTPASHRASGNTGCRVCPYIRTHTFFFPFT

SEQ ID NO: 33641 - protein, 477 aa, Zea mays subsp. mays
MDPFDLRHNRDGVIQMGLAENQLSLDLIEQWSTEHPEASICTAQGASQFRRIANFQDYHGLPEFREAMAKFMGQVRAGKVTFDPDRVVMCGGATGAQDTLAFCLADPGDAYLVPTPYYPAFDRDCCWRSGVKLLPIECHSSNNFTLTREALVSAYDGARRQGVRVKGVLITNPSNPLGTTMDRATLAMLARFATEHRVHLICDEIYAGSVFAKPDFVSIAEVIERDVPGCNRDLIHIAYSLSKDFGLPGFRVGIVYSYNDDVVACARKMSSFGLVSSQTQHFLAKMLSDAEFMARFLAESARRLAARHDRFVAGLREVGIACLPGNAGLFSWMDLRGMLRDKTHDAELELWRVIVHKVKLNVSPGTSFHCNEPGWFRVCHANMDDETMEVALDRIRRFVRQHQHKAKAERWAARGPCASACRAGEAPPLRTSPSPAPWRCCRRSPRWFTPASHRASGNTGCRVCPYIRTHTFFFPFT

SEQ ID NO: 33642 - protein, 462 aa, Zea mays subsp. mays
MGLAENQLSLDLIEQWSTEHPEASICTAQGASQFRRIANFQDYHGLPEFREAMAKFMGQVRAGKVTFDPDRVVMCGGATGAQDTLAFCLADPGDAYLVPTPYYPAFDRDCCWRSGVKLLPIECHSSNNFTLTREALVSAYDGARRQGVRVKGVLITNPSNPLGTTMDRATLAMLARFATEHRVHLICDEIYAGSVFAKPDFVSIAEVIERDVPGCNRDLIHIAYSLSKDFGLPGFRVGIVYSYNDDVVACARKMSSFGLVSSQTQHFLAKMLSDAEFMARFLAESARRLAARHDRFVAGLREVGIACLPGNAGLFSWMDLRGMLRDKTHDAELELWRVIVHKVKLNVSPGTSFHCNEPGWFRVCHANMDDETMEVALDRIRRFVRQHQHKAKAERWAARGPCASACRAGEAPPLRTSPSPAPWRCCRRSPRWFTPASHRASGNTGCRVCPYIRTHTFFFPFT

SEQ ID NO: 33643 - DNA, 784 bp, Zea mays subsp. mays
actccccaacacaaggcctctccccgcgctccgaacctacgccccagccgcctcgatccgttcccaacagcgccctcgtcgctccaccatacgcgcagccatcacccggggccggaaggaggagacggtgaccaccgtccgggagcaactggaggggtgctacctcctggcgggtatcaagtacgagggcctgacggtgaagcagctgcagggaatccgcgacgcgctccccgacacctgcaggctgctggtggcgaagaacacgctggtggggaaagccatcgagggtaccccttgggaggcgctcaagccgtgcatgaagggtatgaatgcctggctcttcgtccacactgaggaggtacccgcagcgctcaagccctaccgcgccttccagaaggaggagcgtgtcgaggagaccaacgacttcgtcggcgccgtctttgagggcaagttttacgggcccggcgacttcaaggcgctcgagactatgcccagccgcgcagaggtgtacgccacgctgctcggcgcgctgcagggacccgctacgtccctcgtcgccacgctgcaggcgccagccagagatgttgttgcggtgctctccgcctacgtgcgcaagctcgaggaggaggctggagccgcctagtggtgttgcgaaatggttgtcatttccctctcactccctatctgctgtttgtacaattctgtgtacctttactggcacccaatcacatttgaatgggtcaaatcacagctttccattttacaatgcctgcccttacctggg

SEQ ID NO: 33644 - protein, 213 aa, Zea mays subsp. mays
LPNTRPLPALRTYAPAASIRSQQRPRRSTIRAAITRGRKEETVTTVREQLEGCYLLAGIKYEGLTVKQLQGIRDALPDTCRLLVAKNTLVGKAIEGTPWEALKPCMKGMNAWLFVHTEEVPAALKPYRAFQKEERVEETNDFVGAVFEGKFYGPGDFKALETMPSRAEVYATLLGALQGPATSLVATLQAPARDVVAVLSAYVRKLEEEAGAA

SEQ ID NO: 33645 - protein, 151 aa, Zea mays subsp. mays
MPGSSSTLRRYPQRSSPTAPSRRRSVSRRPTTSSAPSLRASFTGPATSRRSRLCPAAQRCTPRCSARCRDPLRPSSPRCRRQPEMLLRCSPPTCASSRRRLEPPSGVAKWLSFPSHSLSAVCTILCTFTGTQSHLNGSNHSFPFYNACPYL

SEQ ID NO: 33646 - protein, 117 aa, Zea mays subsp. mays
TPQHKASPRAPNLRPSRLDPFPTAPSSLHHTRSHHPGPEGGDGDHRPGATGGVLPPGGYQVRGPDGEAAAGNPRRAPRHLQAAGGEEHAGGESHRGYPLGGAQAVHEGYECLALRPH

SEQ ID NO: 33647 - DNA, 1585 bp, Zea mays subsp. mays
caactggaatgtcccaaggagaccctatgctgcagcaagagtatttccttcctgatggccttctatattcacccacaccagggtatcatcaaccattcagctcatttgacagagcactgacacagccaaataatgctcctgggttgtttggtcaagggagtctaccactggcttctggaatgcatcatggatcgatgtatggtcctggatcctacaagggacgccagtatggtagcaaatttggtggcactactccaagttggagttctgctggccgcagatttggtactttcgacttgagtggcaatcaacaaagggggagcatgtcatttggtagtcataatggctctctggagtttatgaatgagcaaaaccgtgggccacgtgctacaaaaccaaagatacaagacacagagaactcaggagatgagaaaagcgagaaaactgttcctctaattgatagtgaactgtacaatcgctctgattttatcactgagtacaaggatgccaaattctttgtaataaagtcctacaccgaggaccatgtacataggagcattaaatataatgtttgggctagcacagccagcggaaacaggaagctggattctgcttaccgtgcggccagagagaaagaagagcattgccctattttcttgtttttctcggttaatggaagtgggccaattctttggcgtggctgagatgattggacctgtcgattttgacagaagtgttaattactggcagcaggataagtggagtggccagttcccagtgaagtggcacataattaaggatgtaccgaacaaccttctgcggcacatcattcttgagaacaatgacaataagcctgtcacaaatagcagggacacccaggaggtgaagctggaacagggcctccagatgctaacgatcttcaagagccatgaggctgagacaacaattgtggaagatttcgacttctatgagcagcgggagaaagccttgcaggagaacagacgtcaacagcatgctgccagcaccgatacccagaaactggtggataccaaggctcaagatgctgtggccgacatatcagatgcatttgccaaggccgtccagttgaagaatactgagaacagtgggacaacccccaaaactgagggtgcttcagctgaaaagggttccgctgccacagccaaggttgaaggaagtgcaaacctgaacacaggccctgtggaggaaagcagttgattcgtttcccttctatctgcaaatttggagcagcagatgaatagcatggtgcgatgtgaaggtcagaaaggggaaggtgtgttgaatatggtcgtgcccccgtcagttgtacaacatcataggctttcttttatggccatttaggttataaaatttcaatatcatagttccaaaattgttgttcccggttgtcttcgttcctgttctgttttgcttccgtcttccatgttcctgtgtcgtaccatgaatgatggttcaatttagtgggtttaggcataagaagctgcagaattatgccgcggtaaaagttgcattttctgcagctgaatgtgatactctgcactgtctc

SEQ ID NO: 33648 - protein, 233 aa, Zea mays subsp. mays
TGMSQGDPMLQQEYFLPDGLLYSPTPGYHQPFSSFDRALTQPNNAPGLFGQGSLPLASGMHHGSMYGPGSYKGRQYGSKFGGTTPSWSSAGRRFGTFDLSGNQQRGSMSFGSHNGSLEFMNEQNRGPRATKPKIQDTENSGDEKSEKTVPLIDSELYNRSDFITEYKDAKFFVIKSYTEDHVHRSIKYNVWASTASGNRKLDSAYRAAREKEEHCPIFLFFSVNGSGPILWRG

SEQ ID NO: 33649 - protein, 231 aa, Zea mays subsp. mays
MSQGDPMLQQEYFLPDGLLYSPTPGYHQPFSSFDRALTQPNNAPGLFGQGSLPLASGMHHGSMYGPGSYKGRQYGSKFGGTTPSWSSAGRRFGTFDLSGNQQRGSMSFGSHNGSLEFMNEQNRGPRATKPKIQDTENSGDEKSEKTVPLIDSELYNRSDFITEYKDAKFFVIKSYTEDHVHRSIKYNVWASTASGNRKLDSAYRAAREKEEHCPIFLFFSVNGSGPILWRG

SEQ ID NO: 33650 - protein, 230 aa, Zea mays subsp. mays
MYIGALNIMFGLAQPAETGSWILLTVRPERKKSIALFSCFSRLMEVGQFFGVAEMIGPVDFDRSVNYWQQDKWSGQFPVKWHIIKDVPNNLLRHIILENNDNKPVTNSRDTQEVKLEQGLQMLTIFKSHEAETTIVEDFDFYEQREKALQENRRQQHAASTDTQKLVDTKAQDAVADISDAFAKAVQLKNTENSGTTPKTEGASAEKGSAATAKVEGSANLNTGPVEESS

SEQ ID NO: 33651 - DNA, 1112 bp, Zea mays subsp. mays
cttccctagaacatcctaatcgaaaaaccagccactagctaggacgtcgctgcttgcttccacgcctccttacggtttatccaagcacagcgagagacctttgcgcgtgtgcgctctcgttcgagctagcagcggcggcatgctgacgaggcggcacggagggttccggctcggccggaagctgctcagcgtctggcgctgggcgctctgccgccgccggcgccgccgcgttcgcggccgcgggtacctccgcctgcagccgtgccaacgaggaggaggcaccaccaaatccccgtccccgtcccccatggcggcgcatgcagtggtaagcatcaagatgatgcagcagcagcagcagaagcacgacgactctgctggctcgccgcggatgctcacgtgggggcggtcgctggcgcggcgggtgaggctcctgcgccggcgcgggggaggaggagggaaggaccggctgctggaggacgccgccgcggatgccaccacgcccaaggggcaggtggccgtgtacgtggtcggcgggggcgagtcgatgcgctacgtggtccccgtggtgtacttcaaccacccgctcttcggggagctgctgcgcgaggccgaggaggagttcggcttccagcaccccggcgggatcaccatcccgtgcgcggcctcgcggttcgagcgcgccgccgccgtggccgccgcaggcggcggcgccgccgccgggaagaaggtgccttctgtctggtggtagcagcacgtggccacacggtggccggtgtacatacatacacacgtgcatgcccatcaggatcaggccgcagccggccctcaggaggatcccgatcgattcccatgggaaatggggactgacgatccttctatatattttttctctccttctcgtttgacttttcctttttgccctcttgcgccgtttgcttgtgtggattgagcatgtgcatgggatgcgaggaggatggatagttgtagtttgtttgagagatgaacaaggcttttttttaatttagggtcagcataaacatgttcccattccccccccaacttgcaaagtccatcatcatatatatccatttattagagagcatctaatatgc

SEQ ID NO: 33652 - protein, 202 aa, Zea mays subsp. mays
MLTRRHGGFRLGRKLLSVWRWALCRRRRRRVRGRGYLRLQPCQRGGGTTKSPSPSPMAAHAVVSIKMMQQQQQKHDDSAGSPRMLTWGRSLARRVRLLRRRGGGGGKDRLLEDAAADATTPKGQVAVYVVGGGESMRYVVPVVYFNHPLFGELLREAEEEFGFQHPGGITIPCAASRFERAAAVAAAGGGAAAGKKVPSVWW

SEQ ID NO: 33653 - protein, 146 aa, Zea mays subsp. mays
MAAHAVVSIKMMQQQQQKHDDSAGSPRMLTWGRSLARRVRLLRRRGGGGGKDRLLEDAAADATTPKGQVAVYVVGGGESMRYVVPVVYFNHPLFGELLREAEEEFGFQHPGGITIPCAASRFERAAAVAAAGGGAAAGKKVPSVWW

SEQ ID NO: 33654 - protein, 138 aa, Zea mays subsp. mays
MPPRPRGRWPCTWSAGASRCATWSPWCTSTTRSSGSCCARPRRSSASSTPAGSPSRARPRGSSAPPPWPPQAAAPPPGRRCLLSGGSSTWPHGGRCTYIHTCMPIRIRPQPALRRIPIDSHGKWGLTILLYIFSLLLV

SEQ ID NO: 33655 - DNA, 1401 bp, Zea mays subsp. mays
aatcgaaaaccaccacaggcacacacacctccctttttcattcgagttcgaggagaaggcggcggaggcggccatggagctcgacgagcaggccttcctggaggagatcctctccctgcgcagggacgcctgggactgcaatgtgtccatgggggacctcttcgccccggcggcggccgccgccattgactgctccttccacaaccagcaggcgcccaccgtcagcgtcctccccaccttcaccgcctcctgcgccgagccgccggccttcgactgcctcagcgaggtctacggcgccgccgccgcgttcggcgggcccaatgccggcgacgagatggcgttcctccacgtcgcggagcccaaggaggcgctgcagctggacgacaacgccggcctcggggtgtgcaaggtggagcccggcctggtggagagcgacggcggcggcgccgccgcgccgacgcccgcccctgcggcgtccaagaagaagaggaccgaggggatgccgtctaagaacctcatggccgagcgccgccgccgcaagcgcctcaacgaccgcctctccatgctgcgctccgtcgtgcccaagatcagcaagatggaccggacgtcgatcctgggcgacacgatcgactacatgaaggagctgctggagaggatcaagctgctgcaggaggagatcgagcagcagggggaggcgccggcgggcatgctcagcgtcttccgggagctcaaccccaacgagatggtggccaggaacacccccaagttggacgtggagcggaaggagggcggcgacacacgggtggagatctactgcggcgccaggccggggctgctgctgtccacggtgagcacgctggacgcgctagggctggacatccagcagtgcgtcgtcagctgcttcaacgacttcggcatgcacgcctcctgctccgagatgcagagggacatgatcagcgccgacgcgataaagcaggagctgttgaagaccgctggctatggcggaggctgcatgtagagggcatggcgcggctgtagcctggaggaaggagaagaagaggaggagcaggaggaggcggcaataaattcagctctattagacgacagcgctagtaacaaggagcagcagcagtatcggttcaggtccagtccagtagctgaaaaggcaggcagggcatgaggccagtgaagatatggcatgggggaactttttgcaatccaatctccccatcagaacccacttcgagttagcagtgtgtgtccgcctgaatctttctcctatatactgctgtatttaattagcaagagcaaagctctcactgcctttctaatgattgatcagaagtgcctttggcgaccccttgtctttctgggacatctatatataatgttcttcattct

SEQ ID NO: 33656 - protein, 338 aa, Zea mays subsp. mays
IENHHRHTHLPFSFEFEEKAAEAAMELDEQAFLEEILSLRRDAWDCNVSMGDLFAPAAAAAIDCSFHNQQAPTVSVLPTFTASCAEPPAFDCLSEVYGAAAAFGGPNAGDEMAFLHVAEPKEALQLDDNAGLGVCKVEPGLVESDGGGAAAPTPAPAASKKKRTEGMPSKNLMAERRRRKRLNDRLSMLRSVVPKISKMDRTSILGDTIDYMKELLERIKLLQEEIEQQGEAPAGMLSVFRELNPNEMVARNTPKLDVERKEGGDTRVEIYCGARPGLLLSTVSTLDALGLDIQQCVVSCFNDFGMHASCSEMQRDMISADAIKQELLKTAGYGGGCM

SEQ ID NO: 33657 - protein, 314 aa, Zea mays subsp. mays
MELDEQAFLEEILSLRRDAWDCNVSMGDLFAPAAAAAIDCSFHNQQAPTVSVLPTFTASCAEPPAFDCLSEVYGAAAAFGGPNAGDEMAFLHVAEPKEALQLDDNAGLGVCKVEPGLVESDGGGAAAPTPAPAASKKKRTEGMPSKNLMAERRRRKRLNDRLSMLRSVVPKISKMDRTSILGDTIDYMKELLERIKLLQEEIEQQGEAPAGMLSVFRELNPNEMVARNTPKLDVERKEGGDTRVEIYCGARPGLLLSTVSTLDALGLDIQQCVVSCFNDFGMHASCSEMQRDMISADAIKQELLKTAGYGGGCM

SEQ ID NO: 33658 - protein, 289 aa, Zea mays subsp. mays
MGDLFAPAAAAAIDCSFHNQQAPTVSVLPTFTASCAEPPAFDCLSEVYGAAAAFGGPNAGDEMAFLHVAEPKEALQLDDNAGLGVCKVEPGLVESDGGGAAAPTPAPAASKKKRTEGMPSKNLMAERRRRKRLNDRLSMLRSVVPKISKMDRTSILGDTIDYMKELLERIKLLQEEIEQQGEAPAGMLSVFRELNPNEMVARNTPKLDVERKEGGDTRVEIYCGARPGLLLSTVSTLDALGLDIQQCVVSCFNDFGMHASCSEMQRDMISADAIKQELLKTAGYGGGCM

SEQ ID NO: 33659 - DNA, 785 bp, Zea mays subsp. mays
ccattacctagaacatcctaatcaaaaaatgagccagactgctaccactttcgtccagcaggggaacgcgatgaacactaagatcgggtccttctcggtgccggcggcctccatgaactccgccgaggtgatcttcatgctcgtctgggttgtgttccaggacagcgtcgtcatcccgatagccaggaggtacacggggaacccgatggggctgacgctgctgcagcggatgggcgtcgggcggttgctggcgatcccatctctggcggccgccgcactggtggagacgtggaggctgcgcagcgtgaaggccgggcataacctgagcatcgggtggcagctcccgcagttcgtgatcctggcctgctccgacgtgttctgcggcatcgcgcagctggagttcttctacgcggaggcgcctgcgtccatgcgcagcctgtgctcggcattccagttcctggccatgtcgctggcgtactacgtgaacacgctggtggtcgcattggtggcgtccgtgaccacggcctggggcggcaagggctggctcccccgctgacctcaacgacggccacctggactactacttctggctgtggacggggatcagtgtggtgaactacgtcgtgtacacggcatttgcaaggcgttatacggtcaagaaggttgtcggtcagtaaggatccagactatctgtatgatcaattactgtatcttattgtattttgcagtgtacactactccggaaccgagacttttggtgttcatttgaatgcatggtcctctgt

SEQ ID NO: 33660 - protein, 184 aa, Zea mays subsp. mays
HYLEHPNQKMSQTATTFVQQGNAMNTKIGSFSVPAASMNSAEVIFMLVWVVFQDSVVIPIARRYTGNPMGLTLLQRMGVGRLLAIPSLAAAALVETWRLRSVKAGHNLSIGWQLPQFVILACSDVFCGIAQLEFFYAEAPASMRSLCSAFQFLAMSLAYYVNTLVVALVASVTTAWGGKGWLPR

SEQ ID NO: 33661 - protein, 175 aa, Zea mays subsp. mays
MSQTATTFVQQGNAMNTKIGSFSVPAASMNSAEVIFMLVWVVFQDSVVIPIARRYTGNPMGLTLLQRMGVGRLLAIPSLAAAALVETWRLRSVKAGHNLSIGWQLPQFVILACSDVFCGIAQLEFFYAEAPASMRSLCSAFQFLAMSLAYYVNTLVVALVASVTTAWGGKGWLPR

SEQ ID NO: 33662 - protein, 161 aa, Zea mays subsp. mays
MNTKIGSFSVPAASMNSAEVIFMLVWVVFQDSVVIPIARRYTGNPMGLTLLQRMGVGRLLAIPSLAAAALVETWRLRSVKAGHNLSIGWQLPQFVILACSDVFCGIAQLEFFYAEAPASMRSLCSAFQFLAMSLAYYVNTLVVALVASVTTAWGGKGWLPR

SEQ ID NO: 33663 - DNA, 1529 bp, Zea mays subsp. mays
gcacgagaccattacctagaacatcctaatcgaaaaagattctcctctcctgctccgatggctggggcagcggcgtcccccgtggcggcccacgtggtggaacggttccgctcgcggctgcgcgaggaagcgggcagcggggagccggggcgcctccgcggtcgtgcgcttgtacgcggaggcgctccgcgagcttaccttcaactgcaagccggtcatcaccgagctcaccatcgtcgcaggccagcacgccgcgctcgccgccgggggaatcgccggcgccgtctgcgcccgcgtcgccgaggtgccacctgatcagatattaccatctttgtatctgctagatagtattgtgaagaacataggtggggaatatgtagagcattttgcaattaggttgcaaagtgtatttgttgatgcatactacagagttcatccaaaccagtatgcttcaatgaggcgcctctttcgtacctggtggccagtgtttccttcttctgtgcttcacagcattgaggatgaccttcaattttcgccctcagagaataaccgtcccaccacatcgacaaatgtgcatcaaacagagtcgttatctcctagaccatctcatggcatacatgtaaatcctaaatacctagaagcacaacataagttcaagcgggtcaatgtggcgcaccagtcagcagctcaggacactaggcaaatgtctgatgtgcaggaggatctgataaatggactaacatcgaatagttcacaaggacggccttcagtgtttcagaaatcttctttacagtatgctgatgatcctggtcaacaagagatgtttcgacctcttgctggagcaataagggcaacatcgccacatctcttgagaacacatgcatctgatgtgaatctagatgggccattagccaattcaaggagaaacttgtccagatcaccacctcttgatgtgttccctaggaatgtttccccaaagagaccactagagaggctaccaccatctcattctgtattgggacctgatcccagaaaattgcctgatcgaaatggcaggttaaggtgggctttggacgatggtgcacagtggcctacaataagtatgcttgatgaagagtacaggaagcaaagtgcaagggaacttattgatgcatatggaaattgtcaaggacgagatgctgatgaacgacttcctaaagtacagcgcctggattcaaatggtatgactagcaaatctggtgcacgaaattggttaacttcagaggaagagtattcatgggaggatatgagtccaactttgactgatcgagtcagaagcagcatgccatcttttcctcctggaaccatgagaattggatttcctggggcaaatgcagggctactggaatctgatgttgggaggcacaatttcctaagccaagctactagatcatcagttgatgtttcaccatttaatattgaagataggatttcagctgcaagtgtatggttgtctgatctctctttaaataatagtgaatcataacatt

SEQ ID NO: 33664 - protein, 356 aa, Zea mays subsp. mays
MRRLFRTWWPVFPSSVLHSIEDDLQFSPSENNRPTTSTNVHQTESLSPRPSHGIHVNPKYLEAQHKFKRVNVAHQSAAQDTRQMSDVQEDLINGLTSNSSQGRPSVFQKSSLQYADDPGQQEMFRPLAGAIRATSPHLLRTHASDVNLDGPLANSRRNLSRSPPLDVFPRNVSPKRPLERLPPSHSVLGPDPRKLPDRNGRLRWALDDGAQWPTISMLDEEYRKQSARELIDAYGNCQGRDADERLPKVQRLDSNGMTSKSGARNWLTSEEEYSWEDMSPTLTDRVRSSMPSFPPGTMRIGFPGANAGLLESDVGRHNFLSQATRSSVDVSPFNIEDRISAASVWLSDLSLNNSES

SEQ ID NO: 33665 - protein, 273 aa, Zea mays subsp. mays
MSDVQEDLINGLTSNSSQGRPSVFQKSSLQYADDPGQQEMFRPLAGAIRATSPHLLRTHASDVNLDGPLANSRRNLSRSPPLDVFPRNVSPKRPLERLPPSHSVLGPDPRKLPDRNGRLRWALDDGAQWPTISMLDEEYRKQSARELIDAYGNCQGRDADERLPKVQRLDSNGMTSKSGARNWLTSEEEYSWEDMSPTLTDRVRSSMPSFPPGTMRIGFPGANAGLLESDVGRHNFLSQATRSSVDVSPFNIEDRISAASVWLSDLSLNNSES

SEQ ID NO: 33666 - protein, 234 aa, Zea mays subsp. mays
MFRPLAGAIRATSPHLLRTHASDVNLDGPLANSRRNLSRSPPLDVFPRNVSPKRPLERLPPSHSVLGPDPRKLPDRNGRLRWALDDGAQWPTISMLDEEYRKQSARELIDAYGNCQGRDADERLPKVQRLDSNGMTSKSGARNWLTSEEEYSWEDMSPTLTDRVRSSMPSFPPGTMRIGFPGANAGLLESDVGRHNFLSQATRSSVDVSPFNIEDRISAASVWLSDLSLNNSES

SEQ ID NO: 33667 - DNA, 1627 bp, Zea mays subsp. mays
tagaacatcctaatcgaaaagccacactgttcccgttttttttgttaagctctcgcttaacctaaacgccgggagcacaacacaagtgctcggcgaaatgacgagcgccggggcggcgacaggcgccgcgctaggcgcgcggacggcgcggtcctgcgacggctgcatgaggcggcgggcgcggtggcactgccccgccgacgacgccttcttgtgccagacctgcgacgtctccgtgcactcggcgaaccctctcgcgcgccgccaccaccgcgtccgcctcccctctgcgtcctgctcctccccaccgcgcgacccggacgcgccaacgtggctccacggcctcaagcgacggccacgcacgccacggtccaagccaggggggagcaagagcaacaagcatgaggcgactcccagctttatcgccgcggctgcgtcgtcggcagcggtccccgacctcgaggcggaggagtccggctccggtatcctgggcggtaacgacgaccaccacgggttcctgcaggatgacgacgaagaccttctgtaccgcgtgccggtgttcgaccctatgctcgccgagttctacaaccccgtggccgacgagggggagcagaagccggcctgcagcctgctgatgccgtctctcgcggaaacatcgccggagttcgcctccggcggctcggcggaggcggacgggctctccgtgtcgttccacgtcccggacatggagctcgctagcttcgccgcggacatggagagcctcctcatgggagtcgacgacgacgggtttgactgtttgggtttcttggacgaagagaaacctcaggtgaacgcggacttggacgccatagtagcgccggcgcctgaaccagaggacaagaaacggaagcggccggagatgatactcaagctcaactacgaaggcgtcatcgcctcatgggtccgtgacggcggctcgccgtggttccacggcgagcgtcctcacctcgactgtcacgagctatggtcggacgacttcacgacgggtagccgggaactcctcggcggagccgtgacaccggtgaccggtggcgagcgtgaggcgcgggtgtcgcgatacagggagaagcggcggacgcgactgttcgccaagaagatccggtacgaggtgcgcaagctcaacgccgagaagcggccgcggatgaagggtcggttcgtgaagcgcgccacgcttccgccgctgccaaggccgccgccgccgcagcagcagcagcagcagaagcagctgccacgcgcaccgccacacgtgggcatggtgctcccaccacctccggtatcgaacgggcgcttgtggttttgagaccatatgcatgcatggaagcatgcatgaagcaacgtatgtgcgtgatgcatcgatgcatctatctcgctcgtagcatgcgcatgttctttctactctacttttaattcgtgcgtgcgaattagggcaccccacaagataatgctccctgcttacgactgaaatatatttgtttgtacatgtgcagaatagttaagaaagtatatttatagcctaggtttgttgtttatcttttctagttgttgtaaagaaggatgcactaaatacaagggaagggtgtagattttg

SEQ ID NO: 33668 - protein, 413 aa, Zea mays subsp. mays
MTSAGAATGAALGARTARSCDGCMRRRARWHCPADDAFLCQTCDVSVHSANPLARRHHRVRLPSASCSSPPRDPDAPTWLHGLKRRPRTPRSKPGGSKSNKHEATPSFIAAAASSAAVPDLEAEESGSGILGGNDDHHGFLQDDDEDLLYRVPVFDPMLAEFYNPVADEGEQKPACSLLMPSLAETSPEFASGGSAEADGLSVSFHVPDMELASFAADMESLLMGVDDDGFDCLGFLDEEKPQVNADLDAIVAPAPEPEDKKRKRPEMILKLNYEGVIASWVRDGGSPWFHGERPHLDCHELWSDDFTTGSRELLGGAVTPVTGGEREARVSRYREKRRTRLFAKKIRYEVRKLNAEKRPRMKGRFVKRATLPPLPRPPPPQQQQQQKQLPRAPPHVGMVLPPPPVSNGRLWF

SEQ ID NO: 33669 - protein, 390 aa, Zea mays subsp. mays
MRRRARWHCPADDAFLCQTCDVSVHSANPLARRHHRVRLPSASCSSPPRDPDAPTWLHGLKRRPRTPRSKPGGSKSNKHEATPSFIAAAASSAAVPDLEAEESGSGILGGNDDHHGFLQDDDEDLLYRVPVFDPMLAEFYNPVADEGEQKPACSLLMPSLAETSPEFASGGSAEADGLSVSFHVPDMELASFAADMESLLMGVDDDGFDCLGFLDEEKPQVNADLDAIVAPAPEPEDKKRKRPEMILKLNYEGVIASWVRDGGSPWFHGERPHLDCHELWSDDFTTGSRELLGGAVTPVTGGEREARVSRYREKRRTRLFAKKIRYEVRKLNAEKRPRMKGRFVKRATLPPLPRPPPPQQQQQQKQLPRAPPHVGMVLPPPPVSNGRLWF

SEQ ID NO: 33670 - protein, 256 aa, Zea mays subsp. mays
MLAEFYNPVADEGEQKPACSLLMPSLAETSPEFASGGSAEADGLSVSFHVPDMELASFAADMESLLMGVDDDGFDCLGFLDEEKPQVNADLDAIVAPAPEPEDKKRKRPEMILKLNYEGVIASWVRDGGSPWFHGERPHLDCHELWSDDFTTGSRELLGGAVTPVTGGEREARVSRYREKRRTRLFAKKIRYEVRKLNAEKRPRMKGRFVKRATLPPLPRPPPPQQQQQQKQLPRAPPHVGMVLPPPPVSNGRLWF

SEQ ID NO: 33671 - DNA, 1259 bp, Zea mays subsp. mays
gcacgagaccattacctagaacatcctaatcaaaaaaggccgcagttgtaggtacagggacaaatccccggttctttctccaccctccgaccggccggcggccgctgcaagtttcaccgcagttggcaactggcaaccccgctctgacctaggaggatgtcgggtttcggcgatgggtacgtggggacggcgcaggacgcggtgaagatccggcggctggagaagcagcgcgaggcggagcgccgcaagatcgaggagctcaagaacaagtccgcggacgggcagcccggcctcctccagttcggctccagcacctccgagattcttgagactgcatttaagaaggaaacagttggtctcgtcaccagggagcagtatgtcgagaagagggttaacattcgaaccaagattgaggaggaagagaaagagaaacttcaaaagctgcaacaagaagaagaagaattgcaaatgcagaaaaggaaaaagaggagagtgaagagtgatccacgcttatctttctgtgatgacattgagaatggaagtgacgaagatgattttgagaatcaagaaaccaagaaaaatggccctgccaaacttgggaaggatccaactgtggagacaagttttctacctgatagagaaagggaggcagaggaacaagcagaacgagaacgactgaagaagcagtggtcgcatgagcaggaattgattaaaaatgaacctctttcaattacttacagttactgggatgggactgggcacagaagagcaatccaggtccgtaaaggtgacaccattggagaatttctaagggctgttcaacagcagcttgcccctgaattccgtgaagtacggacaacttcagttgagaatctactttatgtgaaggaagatcttatcatccctcatcaacacagcttttatgaattaattatcaacaaagcaaggggcaagagtggaccacttttccattttgacgttcatgaggatgttcgtaccattgccgacgcaacaaaagaaaaggatgagtcccacgcggggaaagttgtagagaggcattggtatgagaaaaataagcatatattcccagcctcaagatgggagatctatgacccaacgaagaagtgggaacgctacacaatccatggggattagcatggaacatcatacatagagagttaaattattttgtactttggatgtccgaaattaccagcactcaagaatatgagaatggcacaagtgacgatttgaatagc

SEQ ID NO: 33672 - protein, 332 aa, Zea mays subsp. mays
MSGFGDGYVGTAQDAVKIRRLEKQREAERRKIEELKNKSADGQPGLLQFGSSTSEILETAFKKETVGLVTREQYVEKRVNIRTKIEEEEKEKLQKLQQEEEELQMQKRKKRRVKSDPRLSFCDDIENGSDEDDFENQETKKNGPAKLGKDPTVETSFLPDREREAEEQAERERLKKQWSHEQELIKNEPLSITYSYWDGTGHRRAIQVRKGDTIGEFLRAVQQQLAPEFREVRTTSVENLLYVKEDLIIPHQHSFYELIINKARGKSGPLFHFDVHEDVRTIADATKEKDESHAGKVVERHWYEKNKHIFPASRWEIYDPTKKWERYTIHGD

SEQ ID NO: 33673 - protein, 228 aa, Zea mays subsp. mays
MQKRKKRRVKSDPRLSFCDDIENGSDEDDFENQETKKNGPAKLGKDPTVETSFLPDREREAEEQAERERLKKQWSHEQELIKNEPLSITYSYWDGTGHRRAIQVRKGDTIGEFLRAVQQQLAPEFREVRTTSVENLLYVKEDLIIPHQHSFYELIINKARGKSGPLFHFDVHEDVRTIADATKEKDESHAGKVVERHWYEKNKHIFPASRWEIYDPTKKWERYTIHGD

SEQ ID NO: 33674 - DNA, 1422 bp, Zea mays subsp. mays
agaccattacctagaacatcctaatcgaaaaagaatctctctttaagagggatacagagtaggaaagagacagagggggcaaagagcgatggacgccgcggtgcggaaggccgcgggcgccggcatcgcgcgcgcgccggcgctggtgctagcgctggtggcggcgggggcgttcctgatctcctacaacttcttcaccatgctgttccacggcggcggcggaataggcgcggcggccgaccgctgggacgagggaccctgtggtggccatgccagcgtggatgcgcgcggcggcggacaccgaggcgcggcggcggcccgttccatgtggcgctcacggccacggacgcgccctacagccggtggcagtgccgggtcatgtacttctggtacaagcggatgcaggcgcggccgggcggagaggccatgggcgggttcacgcgcgtgctgcactcggggaagcccgacgggctcatggacgagatccccaccttcgtcgtcgacccgctgcccgctggcaaggaccacggatatgtggtcctaaataggccgtgggcatttgtgcagtggcttcagaaagcaaagattgaagaagagtatatactaatggcagaaccagaccatatatttgtgaaacctctaccaaatttggcccatgacgatgatccggcagcatttcccttcttttacattacaccatcagaacatgaaaaaattatcaggaaatactatgctaaagaaagaggtcctgtcacagatatcgatccgattgggaattctcctgtgataattaagaagacaattcttgagaagattgcccccacatggatgaatgtgtcaattcaaatgaaagaggatgaagaaacagataaagtttttggatgggtgttggaaatgtatgcatacgctgttgctagcgcattgcatggagttcatcatatccttcgtaaagatttcatgatccagccaccttttgatacaaagctccagaatacatttataatccacttcacttatggatgtgactactcactaaagggtgaactgacctatggtaaagttggtgaatggcgatttgacaaaagatcattcccagataggccaccaccaagaaatcttacattgccccctcctggagtaccagaaagtgtggttactctagtgaaaatggtcaatgaagctagtgcaaaccttcctcggtgggatgatggaatataaactttggatgatatcaattatatcttaggttcctttgatctgcccttgtatatggggaatatcaaagtatcaggtgcagtcggttgtttggtttacatccaaaatagctgcttgcacttgcacaccatacctgatagaagaagatacataattttctcagtgtactttttatgaaaagaaaagaaatgaaagtaaaagttagct

SEQ ID NO: 33675 - protein, 279 aa, Zea mays subsp. mays
MYFWYKRMQARPGGEAMGGFTRVLHSGKPDGLMDEIPTFVVDPLPAGKDHGYVVLNRPWAFVQWLQKAKIEEEYILMAEPDHIFVKPLPNLAHDDDPAAFPFFYITPSEHEKIIRKYYAKERGPVTDIDPIGNSPVIIKKTILEKIAPTWMNVSIQMKEDEETDKVFGWVLEMYAYAVASALHGVHHILRKDFMIQPPFDTKLQNTFIIHFTYGCDYSLKGELTYGKVGEWRFDKRSFPDRPPPRNLTLPPPGVPESVVTLVKMVNEASANLPRWDDGI

SEQ ID NO: 33676 - protein, 272 aa, Zea mays subsp. mays
MQARPGGEAMGGFTRVLHSGKPDGLMDEIPTFVVDPLPAGKDHGYVVLNRPWAFVQWLQKAKIEEEYILMAEPDHIFVKPLPNLAHDDDPAAFPFFYITPSEHEKIIRKYYAKERGPVTDIDPIGNSPVIIKKTILEKIAPTWMNVSIQMKEDEETDKVFGWVLEMYAYAVASALHGVHHILRKDFMIQPPFDTKLQNTFIIHFTYGCDYSLKGELTYGKVGEWRFDKRSFPDRPPPRNLTLPPPGVPESVVTLVKMVNEASANLPRWDDGI

SEQ ID NO: 33677 - protein, 263 aa, Zea mays subsp. mays
MGGFTRVLHSGKPDGLMDEIPTFVVDPLPAGKDHGYVVLNRPWAFVQWLQKAKIEEEYILMAEPDHIFVKPLPNLAHDDDPAAFPFFYITPSEHEKIIRKYYAKERGPVTDIDPIGNSPVIIKKTILEKIAPTWMNVSIQMKEDEETDKVFGWVLEMYAYAVASALHGVHHILRKDFMIQPPFDTKLQNTFIIHFTYGCDYSLKGELTYGKVGEWRFDKRSFPDRPPPRNLTLPPPGVPESVVTLVKMVNEASANLPRWDDGI

SEQ ID NO: 33678 - DNA, 1386 bp, Zea mays subsp. mays
  misc_feature (546)..(546): n is a, c, g, or t
  misc_feature (548)..(548): n is a, c, g, or t
  misc_feature (551)..(551): n is a, c, g, or t
  misc_feature (554)..(554): n is a, c, g, or t
  misc_feature (559)..(559): n is a, c, g, or t
  misc_feature (575)..(575): n is a, c, g, or t
gaaggaaggaagccatgatgatgatgggcgaaggcgtgagcatgccgccgtggtcccaccacgtccctgtgagcggcgtcgacgaaggcgacgagatgacgccgtacctgctcgcggcgctgcgccagtacctgccgtgcaacgacgccggcgccgaggccgaggaggatgaggcggccgccgccatggcggcgggcgtggacggctacggctgcgacgagttccgcatgtacgagttcaaggtccggcggtgcgcgcgcgcgcgcagccacgactggaccgagtgccccttcgcgcacccgggggagaaggcgcggcgccgcgacccgcgcaagtaccactactccggcgccacctgcccggacttccgcaagggcgggtgcaagcgcggcgacggctgcgacatggcgcacggcgtcttcgagtgctggctccacccggcgcgctaccgcacccagccctgcaaggacggcacggcctgccgccgccgggtctgcttcttcgcgcacaccgcggaccagctgcgcgtgctcccgcccacgccgnancancantccanccccagggggcgccgnctgctcttcccccgctcgccgagtcctacgacggctccccgctccggcgccaggcgttcgagagctacctcaccaagagcatcatgtgctcgtcgccgaccagcaccctcctatcgccgcccaagtcgcccccgtcggagtccccgccattgtcgcccgacttccgccgtgggtgctggccgggcgccgggtcccccgtcaacgacgtgctcgcctcgctccgtcagctccgcctcagcagggccaactcgtccccgtcgggcggctggtgcagctaccctgcatccgcggtcgcgtacggatcgcctacggggggcgcgctctacggcctgtcctccaccccgagggccaccgccggctccggctacatggccaacctggaccctctcgacgtcaccttcggcggcgacgaggagcccgtggagagggtggagtccggccgcgcactccgcgcgaaggtgttcgagcggcttagcagggagggcgctgtttccggcgacgccggtggccccgacgtcgggtgggtctccgacctcatcaactgaggcggcggcgggtccctggcatggcaggtggcaatggcaatgggcatgggcatggagaaaggtgatggtgagccgtatcggagaaggatggcatccaaaaaaatatttccctgcatttgatttcgttcctcagttaattccgctaatccccgtgtacatatctatcaccctgtgaatattctcggttggtaagagggaggatgatgctaggcggtggatggatgggtggatttgttttggggttcttgaggtagcggaaaatatcc

SEQ ID NO: 33679 - protein, 430 aa, Zea mays subsp. mays
  misc_feature (182)..(184): Xaa can be any naturally occurring amino acid
  misc_feature (186)..(186): Xaa can be any naturally occurring amino acid
  misc_feature (191)..(191): Xaa can be any naturally occurring amino acid
RKEAMMMMGEGVSMPPWSHHVPVSGVDEGDEMTPYLLAALRQYLPCNDAGAEAEEDEAAAAMAAGVDGYGCDEFRMYEFKVRRCARARSHDWTECPFAHPGEKARRRDPRKYHYSGATCPDFRKGGCKRGDGCDMAHGVFECWLHPARYRTQPCKDGTACRRRVCFFAHTADQLRVLPPTPXXXSXPRGRXLLFPRSPSPTTAPRSGARRSRATSPRASCARRRPAPSYRRPSRPRRSPRHCRPTSAVGAGRAPGPPSTTCSPRSVSSASAGPTRPRRAAGAATLHPRSRTDRLRGARSTACPPPRGPPPAPATWPTWTLSTSPSAATRSPWRGWSPAAHSARRCSSGLAGRALFPATPVAPTSGGSPTSSTEAAAGPWHGRWQWQWAWAWRKVMVSRIGEGWHPKKYFPAFDFVPQLIPLIPVYISITL

SEQ ID NO: 33680 - protein, 426 aa, Zea mays subsp. mays
  misc_feature (178)..(180): Xaa can be any naturally occurring amino acid
  misc_feature (182)..(182): Xaa can be any naturally occurring amino acid
  misc_feature (187)..(187): Xaa can be any naturally occurring amino acid
MMMMGEGVSMPPWSHHVPVSGVDEGDEMTPYLLAALRQYLPCNDAGAEAEEDEAAAAMAAGVDGYGCDEFRMYEFKVRRCARARSHDWTECPFAHPGEKARRRDPRKYHYSGATCPDFRKGGCKRGDGCDMAHGVFECWLHPARYRTQPCKDGTACRRRVCFFAHTADQLRVLPPTPXXXSXPRGRXLLFPRSPSPTTAPRSGARRSRATSPRASCARRRPAPSYRRPSRPRRSPRHCRPTSAVGAGRAPGPPSTTCSPRSVSSASAGPTRPRRAAGAATLHPRSRTDRLRGARSTACPPPRGPPPAPATWPTWTLSTSPSAATRSPWRGWSPAAHSARRCSSGLAGRALFPATPVAPTSGGSPTSSTEAAAGPWHGRWQWQWAWAWRKVMVSRIGEGWHPKKYFPAFDFVPQLIPLIPVYISITL

SEQ ID NO: 33681 - protein, 425 aa, Zea mays subsp. mays
  misc_feature (177)..(179): Xaa can be any naturally occurring amino acid
  misc_feature (181)..(181): Xaa can be any naturally occurring amino acid
  misc_feature (186)..(186): Xaa can be any naturally occurring amino acid
MMMGEGVSMPPWSHHVPVSGVDEGDEMTPYLLAALRQYLPCNDAGAEAEEDEAAAAMAAGVDGYGCDEFRMYEFKVRRCARARSHDWTECPFAHPGEKARRRDPRKYHYSGATCPDFRKGGCKRGDGCDMAHGVFECWLHPARYRTQPCKDGTACRRRVCFFAHTADQLRVLPPTPXXXSXPRGRXLLFPRSPSPTTAPRSGARRSRATSPRASCARRRPAPSYRRPSRPRRSPRHCRPTSAVGAGRAPGPPSTTCSPRSVSSASAGPTRPRRAAGAATLHPRSRTDRLRGARSTACPPPRGPPPAPATWPTWTLSTSPSAATRSPWRGWSPAAHSARRCSSGLAGRALFPATPVAPTSGGSPTSSTEAAAGPWHGRWQWQWAWAWRKVMVSRIGEGWHPKKYFPAFDFVPQLIPLIPVYISITL

SEQ ID NO: 33682 - DNA, 717 bp, Zea mays subsp. mays
taatcgaaaagcacacactactacactaggctacacactgtacgtacacttctctccctcccctccccctttcccggagcctttgcttcactcgcgtcgccgagctggctagcgacaagcgcgacaccgtcggcggcggcgacgccggcccgcgcctcgatgacggcgaggactcgtccgccgtgagcagcaaggcggtggtcgaggagctgtaccgcgcgctggagcgcggcgacgtggacgccgtgcgccgcctgctgaacccggacgtggactggtggttccacggcccgcgcgcgcaccagcacctggtgctcatgcgcctgctcaccggcaccggcgccggcgccggcctcccgttcaagatccggtccctggacgccttcgggccgacggtgctggccgagggcgccgacgcgacgggcgcgctctactgggtgcacgcgtggaccgtgggccccggcggccgcgtcaccggggtgcgcgagtactgcaacaccgcgctcgtcgtcgccgtcgaagcaggtgtggcagagccggctgcccgaccgggctcgcaggaacctccctggcctcgtgcttgcgatctgaccggatcggatgcgaatcatgcgacatataggttgttgcccagccaactggcggtgtggcttattatgcttgtgcatgtctgcaatgtggttacaattggacatgaatgaatcaaatgcgccacac

SEQ ID NO: 33683 - protein, 127 aa, Zea mays subsp. mays
MRLLTGTGAGAGLPFKIRSLDAFGPTVLAEGADATGALYWVHAWTVGPGGRVTGVREYCNTALVVAVEAGVAEPAARPGSQEPPWPRACDLTGSDANHATYRLLPSQLAVWLIMLVHVCNVVTIGHE

SEQ ID NO: 33684 - DNA, 1481 bp, Zea mays subsp. mays
aaaatcgcccctgggcgagggggaagccggaggacgctgagggcgggcgaggccgccgtccccagatctcacttccgccgcccgcccgccccgcttttgttactactcttcttttgttcggattgagggaggaaggaaaggaggtgcttcaatatgaaggcgctcattcttgtcgggggttttggaacccgccttcggcctttgactcttagcttcccgaagccccttgtggattttgcaaacaagcccatgattctgcatcagatcgaagctttgaaagaagttggggtcacagaggtggttttggccatcaactaccgcccagaggtaatgattaatttcttgaaggactttgaggataaacttggcatcacaattacatgctcccaagagactgagcccttaggaactgctggccctcttgctctagcaagggacaagcttgcggatggatctggcgagccattctttgtcctcaacagcgatgtcataagcgaatacccatttgctgaactcatcaaatttcacaagtctcatggtggtgaggcaacaattatggtcactaaggtggatgaaccatctaaatatggtgttgtggttatggaggaggcaactggcagggtggaaaggtttgttgagaagccaaaaatatttgtgggcaacaagatcaatgctgggatttacttgcttaacccatctgtccttgaccgcattgaactgagaccaacatcaattgagaaagaggtcttccctcaaattgcagctgatcaacagctctatgcaatggtccttcctggtttttggatggatgttggtcagccaagagactacattactggattgcgtctttatctagactcgcttaggaagaaatcggctgccaggctagctgctggggcacatgttgttggcaacgtgctggtgcatgagagcgccaagattggagaaggttgcctgatcggtcctgatgtcgcaattggacctggatgtgtcgtggaggatggcgtgaggctttcccgctgcactgtcatgcgtggtgtgcgtatcaagaagcatgcctgcatctcgaacagcattatcgggtggcactcaactgttggacaatgggcacggatagagaatatgaccatcctgggcgaggatgttcatgtgtgtgacgaggtatacagcaatggcggtgttgttctcccacataaagagatcaagtcaagcattttgaagcctgagatcgtcatgtgagagttctccagttttaactacagtacattcttaagttcttcgactaagtgaggattgcagatccccttttataagtgatatctattggtatctttggcctaattcaaacagcttcagacatgttcgcttgctaaactgttgacaatgtatccttgttctttgttgaaaagttttgtacttgtagtgtcaatcatatttcacaagtggttgtcatataatactgagggaggttttggaccccc

SEQ ID NO: 33685 - protein, 361 aa, Zea mays subsp. mays
MKALILVGGFGTRLRPLTLSFPKPLVDFANKPMILHQIEALKEVGVTEVVLAINYRPEVMINFLKDFEDKLGITITCSQETEPLGTAGPLALARDKLADGSGEPFFVLNSDVISEYPFAELIKFHKSHGGEATIMVTKVDEPSKYGVVVMEEATGRVERFVEKPKIFVGNKINAGIYLLNPSVLDRIELRPTSIEKEVFPQIAADQQLYAMVLPGFWMDVGQPRDYITGLRLYLDSLRKKSAARLAAGAHVVGNVLVHESAKIGEGCLIGPDVAIGPGCVVEDGVRLSRCTVMRGVRIKKHACISNSIIGWHSTVGQWARIENMTILGEDVHVCDEVYSNGGVVLPHKEIKSSILKPEIVM

SEQ ID NO: 33686 - protein, 329 aa, Zea mays subsp. mays
MILHQIEALKEVGVTEVVLAINYRPEVMINFLKDFEDKLGITITCSQETEPLGTAGPLALARDKLADGSGEPFFVLNSDVISEYPFAELIKFHKSHGGEATIMVTKVDEPSKYGVVVMEEATGRVERFVEKPKIFVGNKINAGIYLLNPSVLDRIELRPTSIEKEVFPQIAADQQLYAMVLPGFWMDVGQPRDYITGLRLYLDSLRKKSAARLAAGAHVVGNVLVHESAKIGEGCLIGPDVAIGPGCVVEDGVRLSRCTVMRGVRIKKHACISNSIIGWHSTVGQWARIENMTILGEDVHVCDEVYSNGGVVLPHKEIKSSILKPEIVM

SEQ ID NO: 33687 - protein, 302 aa, Zea mays subsp. mays
MINFLKDFEDKLGITITCSQETEPLGTAGPLALARDKLADGSGEPFFVLNSDVISEYPFAELIKFHKSHGGEATIMVTKVDEPSKYGVVVMEEATGRVERFVEKPKIFVGNKINAGIYLLNPSVLDRIELRPTSIEKEVFPQIAADQQLYAMVLPGFWMDVGQPRDYITGLRLYLDSLRKKSAARLAAGAHVVGNVLVHESAKIGEGCLIGPDVAIGPGCVVEDGVRLSRCTVMRGVRIKKHACISNSIIGWHSTVGQWARIENMTILGEDVHVCDEVYSNGGVVLPHKEIKSSILKPEIVM

SEQ ID NO: 33688 - DNA, 1824 bp, Zea mays subsp. mays
tagaacatcctaatcgaaaaacgatccatatatcccttcctcgtatatcctttcctgagtaggagagagagttgagttaggagttttgtgctgatcatctcggtcgaccgagagatggaccaccacttcactgagatagaggggaagatggcgcacgagccactggcacacagctccaccttctccgatgagacgaaagacaaaatggagcacgattcactggtgtatagtccacgcagcatcgcgagggccacaaccaccggcatccctgtcggcgatcaaggcgtggccgtgctacgtgggccgcttatcgtgggtgcagggccggcgggtctggcatgcgcggcgttgctcaccatgttatacattccctacgtgctcctagagcgcgacgtgtgcgtagcctcaatgtggcaccgccgcacgtaccgcaggttgtgtctgcacctacccaagcgctactgtgagctcccgctcatgcacttcccacgcacctaccccacatatccaacccggcagcagttccttgtctacctcaatgagtacatgcgcgcatttggcatccgcccatttttcagcctcgaggttgtcgctgccgagtacaacggtgaatactggtgtgtccgcaccaaagatgtcatccccactggcactctcaacggccaaagcggcgaggagtctatccgagagtaccgctccaaatggctgatcgttgccacaggagagaacgccgagcctgttgtgcctgacatgccgggaatccataacttcaagggtcaagtaatgcactcatgtgactaccgtagcggcgagtccttccaaggcaagaaggtgctagtcgttggctgcggtaactctggcatggaggtgtctctcgacctcgctaaccacaacgtgcacacatcgatggctgttcgtcgttcggggcacgtacttccaagagaggtcatggggatctcaacttttagtttgtctgtgtggctcctcaagtttctacgtgtccaaatagtggaccggattcttcttctactcgcttggttcattttaggagacactgcacaaattggtattcctcggcctagcatgggtccaatggagctcaaacaagtgtctggtaagacaccggtgcttgacgtggggacgatagcacagattaagtccggcaacattaaagtatttcctgcaattcgaagtttccaagaatatggtgtagagtttacaaatggtaggattgaatcatttgatgttgtgattcttgccacaggttataagagtaatgttccttattggttgaaggagaatgaatttttttcacagcaaagtggatttccaaacaaaccaaatgaatggaaaggaaaggatggactctatgctgctgggttctcaaggcgtggtctacttggtgtgtctatggatgccaccaaaattgcagaggatattgcgcagtcttataataatatatataagctacaaagatcataagaacaaatgatatttaactatttatcaataatttagctatcatcatttgagagttttgtaaatatatgtactagtctatttgcataaattataagagatggatatgttagataacaaatactaggctagcttatctatcaacgcactcattatataattgacataggctagtacatgtcacattttagaggtccaacaaaatagttgataggattgagttattgcatgcttttatttctttttaatttggcaaatattgtaagtcatttttgttattatcaatcaattgtaatgggtaatgtatggacgttttcattcttatggctatattatttgtttatt

SEQ ID NO: 33689 - protein, 455 aa, Zea mays subsp. mays
MDHHFTEIEGKMAHEPLAHSSTFSDETKDKMEHDSLVYSPRSIARATTTGIPVGDQGVAVLRGPLIVGAGPAGLACAALLTMLYIPYVLLERDVCVASMWHRRTYRRLCLHLPKRYCELPLMHFPRTYPTYPTRQQFLVYLNEYMRAFGIRPFFSLEVVAAEYNGEYWCVRTKDVIPTGTLNGQSGEESIREYRSKWLIVATGENAEPVVPDMPGIHNFKGQVMHSCDYRSGESFQGKKVLVVGCGNSGMEVSLDLANHNVHTSMAVRRSGHVLPREVMGISTFSLSVWLLKFLRVQIVDRILLLLAWFILGDTAQIGIPRPSMGPMELKQVSGKTPVLDVGTIAQIKSGNIKVFPAIRSFQEYGVEFTNGRIESFDVVILATGYKSNVPYWLKENEFFSQQSGFPNKPNEWKGKDGLYAAGFSRRGLLGVSMDATKIAEDIAQSYNNIYKLQRS

SEQ ID NO: 33690 - protein, 444 aa, Zea mays subsp. mays
MAHEPLAHSSTFSDETKDKMEHDSLVYSPRSIARATTTGIPVGDQGVAVLRGPLIVGAGPAGLACAALLTMLYIPYVLLERDVCVASMWHRRTYRRLCLHLPKRYCELPLMHFPRTYPTYPTRQQFLVYLNEYMRAFGIRPFFSLEVVAAEYNGEYWCVRTKDVIPTGTLNGQSGEESIREYRSKWLIVATGENAEPVVPDMPGIHNFKGQVMHSCDYRSGESFQGKKVLVVGCGNSGMEVSLDLANHNVHTSMAVRRSGHVLPREVMGISTFSLSVWLLKFLRVQIVDRILLLLAWFILGDTAQIGIPRPSMGPMELKQVSGKTPVLDVGTIAQIKSGNIKVFPAIRSFQEYGVEFTNGRIESFDVVILATGYKSNVPYWLKENEFFSQQSGFPNKPNEWKGKDGLYAAGFSRRGLLGVSMDATKIAEDIAQSYNNIYKLQRS

SEQ ID NO: 33691 - protein, 425 aa, Zea mays subsp. mays
MEHDSLVYSPRSIARATTTGIPVGDQGVAVLRGPLIVGAGPAGLACAALLTMLYIPYVLLERDVCVASMWHRRTYRRLCLHLPKRYCELPLMHFPRTYPTYPTRQQFLVYLNEYMRAFGIRPFFSLEVVAAEYNGEYWCVRTKDVIPTGTLNGQSGEESIREYRSKWLIVATGENAEPVVPDMPGIHNFKGQVMHSCDYRSGESFQGKKVLVVGCGNSGMEVSLDLANHNVHTSMAVRRSGHVLPREVMGISTFSLSVWLLKFLRVQIVDRILLLLAWFILGDTAQIGIPRPSMGPMELKQVSGKTPVLDVGTIAQIKSGNIKVFPAIRSFQEYGVEFTNGRIESFDVVILATGYKSNVPYWLKENEFFSQQSGFPNKPNEWKGKDGLYAAGFSRRGLLGVSMDATKIAEDIAQSYNNIYKLQRS

SEQ ID NO: 33692 - DNA, 1618 bp, Zea mays subsp. mays
gaaaagaatataataaaataaaaacccagcagcatttctccgccgcccatacgacgacgacggccactcggcgcagtgatttgggcgccccgcaaagcggtggctccaccggccagcgcatcaaaggccctgtggaatatggcgccgcgccgcttgccggggccgggccctcctctttatatatggcgtggcgagcaaacccaaaaccctcgcaggcagaaggcaaacgcggctgcgagcgcggcgccccctcccactatccagccgccgccagcccgcacacccctccctcgcgcgctcagggtttcggaatggaggccgatgcggcggccaagaggacgcgggagagcggggaggacgccaccgcggcggggatctccgccgtcatcccgggatggttctccgagatcagccccatgtggcccggtgaggcgcactctttgaaggtggagaaggtgctgttccaagggaagtcagactaccaaaacgttatggtctttcagtcctctacgtacgggaaggtgctcgtccttgatggagttattcaggttacggagagggatgagtgtgcgtaccaagagatgatcactcacctgcccctttgctccatcaaagatcccaagaaggtgttggttattggagggggtgatggtggtgttctgcgtgaggtttcacggcattcctctgtggaacaaattgacatctgtgaaattgacaagatggtggtagatgtatccaaacaatttttccctcatttagctgttggatttgaagaccctcgtgtgtcattacacattggagatggggttgcctttttgaaaaatgctccagaaggtacttatgacgcagtaattgtggactcatctgatccgataggtcctgctcaagagctttttgagaagcctttcttccagttggtggccagagctttgcgtccaggtggagttgtatgcacccaagcagagagcatatggctacatatacacattattgaagatattgttgtcaattgtcgacaagttttcaaaggctcggttaactatgcttggacaacggtgcctacataccctagcggagttattgggttcatgctttgctccaccgaagggcctgctgttgatttccagcaccctgttttcaacatcgaggaggatgaacatcctatgaaatcaaaaggaccccttaagttctacaactcggagatccacacggcatcattctgtttgccttcttttgcaaagagggtaatcgagtcaaaagcgaactagacgtgaaggtatctccaagggctaagtaccttaggtgcgcaacacagaatttgttgtagtgtgaaaagcggatgcctccctcccttttctccccctttgatgaatagtataagcacaggagatgagatgcaacagttatcggagttatcagtctacatggtcctgaccagtcgtatgtctcggctgcctggtgcagctatgaaaacgttttgcaatagcttttttcggcagtcctcacatcatcacggttgtgtttccgcttccacatcagaatggaatatatatacgtatgaaataaaactgtgtaatggctgctgccatcggatcctttttaaaacaggttcagctct

SEQ ID NO: 33693 - protein, 421 aa, Zea mays subsp. mays
KEYNKIKTQQHFSAAHTTTTATRRSDLGAPQSGGSTGQRIKGPVEYGAAPLAGAGPSSLYMAWRANPKPSQAEGKRGCERGAPSHYPAAASPHTPPSRAQGFGMEADAAAKRTRESGEDATAAGISAVIPGWFSEISPMWPGEAHSLKVEKVLFQGKSDYQNVMVFQSSTYGKVLVLDGVIQVTERDECAYQEMITHLPLCSIKDPKKVLVIGGGDGGVLREVSRHSSVEQIDICEIDKMVVDVSKQFFPHLAVGFEDPRVSLHIGDGVAFLKNAPEGTYDAVIVDSSDPIGPAQELFEKPFFQLVARALRPGGVVCTQAESIWLHIHIIEDIVVNCRQVFKGSVNYAWTTVPTYPSGVIGFMLCSTEGPAVDFQHPVFNIEEDEHPMKSKGPLKFYNSEIHTASFCLPSFAKRVIESKAN

SEQ ID NO: 33694 - protein, 361 aa, Zea mays subsp. mays
MAWRANPKPSQAEGKRGCERGAPSHYPAAASPHTPPSRAQGFGMEADAAAKRTRESGEDATAAGISAVIPGWFSEISPMWPGEAHSLKVEKVLFQGKSDYQNVMVFQSSTYGKVLVLDGVIQVTERDECAYQEMITHLPLCSIKDPKKVLVIGGGDGGVLREVSRHSSVEQIDICEIDKMVVDVSKQFFPHLAVGFEDPRVSLHIGDGVAFLKNAPEGTYDAVIVDSSDPIGPAQELFEKPFFQLVARALRPGGVVCTQAESIWLHIHIIEDIVVNCRQVFKGSVNYAWTTVPTYPSGVIGFMLCSTEGPAVDFQHPVFNIEEDEHPMKSKGPLKFYNSEIHTASFCLPSFAKRVIESKAN

SEQ ID NO: 33695 - protein, 318 aa, Zea mays subsp. mays
MEADAAAKRTRESGEDATAAGISAVIPGWFSEISPMWPGEAHSLKVEKVLFQGKSDYQNVMVFQSSTYGKVLVLDGVIQVTERDECAYQEMITHLPLCSIKDPKKVLVIGGGDGGVLREVSRHSSVEQIDICEIDKMVVDVSKQFFPHLAVGFEDPRVSLHIGDGVAFLKNAPEGTYDAVIVDSSDPIGPAQELFEKPFFQLVARALRPGGVVCTQAESIWLHIHIIEDIVVNCRQVFKGSVNYAWTTVPTYPSGVIGFMLCSTEGPAVDFQHPVFNIEEDEHPMKSKGPLKFYNSEIHTASFCLPSFAKRVIESKAN

SEQ ID NO: 33696 - DNA, 1402 bp, Zea mays subsp. mays
aaaaaattctagggaacccccactacgcctgcacgcgcccactagctagccaccttagatcggtcgatacagctagctatacccgctagctgcacctctcgctgccgccgcccggccgggccgcgcgagaccgctcaaaattcgcgcgcaccgccacgcggcgcggacatgctgcgggcggcggggagcagctagcaggtagccgagcacggcagggcgacccggcgcgcgatccgccgctgcccgcgtgggcggccgcctatggatctggccgcatggcgggcttccctctaggcggaggaggccacggccgcggcgaccaccaccaccctcacgtgaacccttcctccggctccggctccgactccgcggccgccgcctacctctacacggccgccgccgcgccgcgcggcggcttccagctatggccgcctcacccggcgcaggagcaccaccaccacttctacgcccccaacatcatccgcttcgccgatgaccccgccgcgggctcctcgcgcggcggcaggggctccgccagcggcgccggcgcgggcaccatcagctgccaggactgcggcaaccaggccaagaaggactgcgtccacatgcgctgccgcacctgctgcaagagccggggcttcgactgccccacccatgtcaagtccacctgggtgcccgccgccaagcgccgggagcgccagcagcagcaggccaccggcgccgccgagccctccaagcgccaccgtgacgccgctaccggtgcccagccctcctctaccaccgccacaaccacttcctcgggtgagcagcagcagatggcggtggtggcggagcggttcccgcgggaagtgagctcggaggcgctgttccgctgcgtccgcctgggcccggtcgacgagcccgacgccgaggtggcgtaccagaccagcgtcagcatcgccggccacgtcttcaagggcatcctgcacgacgtcggcccggagccgtcgacggtcgctgcgggcggcggcttccgccacgccaccgaggggtcctcccctagcacggccgcggcgggcgaaggcagcgtcgtggggcccgtctcgtcatcggctgtggtcatggacccgtacccgacgcccggcccgtacggcgccgctcatttcttccacggccatccgaggtgatgatcaaacggccaccatgattgacacggctagctagcctagctgaatctgatgggtttcgttccctttggacatgccatgcatctttccatccactgcttcaatatttgctttactagagggattatcgatcgtcacaaaattgttactagtagcttttatttgtctccgtcctccatccctgttctcgacgatcgatgcataaactgatgagcaccattcatcactgtttcttt

SEQ ID NO: 33697 - protein, 296 aa, Zea mays subsp. mays
MAGFPLGGGGHGRGDHHHPHVNPSSGSGSDSAAAAYLYTAAAAPRGGFQLWPPHPAQEHHHHFYAPNIIRFADDPAAGSSRGGRGSASGAGAGTISCQDCGNQAKKDCVHMRCRTCCKSRGFDCPTHVKSTWVPAAKRRERQQQQATGAAEPSKRHRDAATGAQPSSTTATTTSSGEQQQMAVVAERFPREVSSEALFRCVRLGPVDEPDAEVAYQTSVSIAGHVFKGILHDVGPEPSTVAAGGGFRHATEGSSPSTAAAGEGSVVGPVSSSAVVMDPYPTPGPYGAAHFFHGHPR

SEQ ID NO: 33698 - protein, 186 aa, Zea mays subsp. mays
MRCRTCCKSRGFDCPTHVKSTWVPAAKRRERQQQQATGAAEPSKRHRDAATGAQPSSTTATTTSSGEQQQMAVVAERFPREVSSEALFRCVRLGPVDEPDAEVAYQTSVSIAGHVFKGILHDVGPEPSTVAAGGGFRHATEGSSPSTAAAGEGSVVGPVSSSAVVMDPYPTPGPYGAAHFFHGHPR

SEQ ID NO: 33699 - DNA, 955 bp, Zea mays subsp. mays
ctggcttctctctgccttctccaagctgccgccctgtgctctctccctcctctcccttattctctctctctccccttgctctctctcctgcgctcgccagcagcagccagggagccggaccggcgccctgcgcgcccctgtcctaccgtgatgaccgcgcgcctcggccccgcgcagcaaccccacggccccacgcgaccggtgccccgcgcgctcaggccgccccgacggccgagccgcccaaccagctgtggtcgagcagcgcgcgccagagccccgccgacctccagcgacccgacccgaccgaccccaagtcgcgcgtccctagccaagtcgcccgcgtccaggcgccttgcgcccatccccgccgcgatcgaccgaacagccgtgacccgatgcccgacccgcgccaggagcagcgccatgaacggccgcgcgccccgactcgacgccaagcagccgcgacgcgccaggagcagtcccgcgtgaccgttattctccgtgtgttatggaattcaatgcgttcgtttcttcccccactcctctccattgaagccatgagaagaaaccgccgcggttaatccgtgtaatggagccgccgaccgttctcctctccccctcggcgacctctcttctcccctccctctcaataaatatgtcgagctctctctcccttcctcccctacccgagctcactctcatttcctcgcactctctcgctcgccgttcgaccgccgaagtcgtcataccgctattcgccgaccacgccgccgtttgctggagctgcgccgcgccaccatgctgtgctcagccgccgtccgctgtcgaacccgcccggcctccctagctcaacgtcgccctgcccagagaaaccgagaggaagagaaggtagaaaacaagcatattgtattctatcccctgcagcgatttgttgttttaaatttgtaaatttcag

SEQ ID NO: 33700 - protein, 192 aa, Zea mays subsp. mays
GFSLPSPSCRPVLSPSSPLFSLSPLALSPALASSSQGAGPAPCAPLSYRDDRAPRPRAATPRPHATGAPRAQAAPTAEPPNQLWSSSARQSPADLQRPDPTDPKSRVPSQVARVQAPCAHPRRDRPNSRDPMPDPRQEQRHERPRAPTRRQAAATRQEQSRVTVILRVLWNSMRSFLPPLLSIEAMRRNRRG

SEQ ID NO: 33701 - protein, 162 aa, Zea mays subsp. mays
LASLCLLQAAALCSLPPLPYSLSLPLLSLLRSPAAAREPDRRPARPCPTVMTARLGPAQQPHGPTRPVPRALRPPRRPSRPTSCGRAARARAPPTSSDPTRPTPSRASLAKSPASRRLAPIPAAIDRTAVTRCPTRARSSAMNGRAPRLDAKQPRRARSSPA

SEQ ID NO: 33702 - protein, 112 aa, Zea mays subsp. mays
MTARLGPAQQPHGPTRPVPRALRPPRRPSRPTSCGRAARARAPPTSSDPTRPTPSRASLAKSPASRRLAPIPAAIDRTAVTRCPTRARSSAMNGRAPRLDAKQPRRARSSPA

SEQ ID NO: 33703 - DNA, 1056 bp, Zea mays subsp. mays
ctcttattctcattcgattacacacacacacggagagatcaaattgatacactgcgatctcgatcaaacaaatcaaaaaaaaaaaaaaatcttgcgagacattactgaccgatgaagttcggcaagcgcctcaagaagcagatcgaggagagcctgccggagtggcggagccagttcctcaactacaaggagctgaagcggcgcgtgaatgccgtgtcctcccgcgggtcggcggcggatccgtcgtcgtccagcgccgcggaggccgacttcctgacgctcctggacgccgagatcgacaagttcaacgccttcttcctggagcgggaggaggagttcgtgatccggcagagggagctccaggagcgcatcgggcgtgcgggcgggcccgaggccacgctggcgcgcgtccggcgcgaggtggtggacttgcacggcgagatggtgctgctgctcaactacagcagcgtcaactacacgggcctcgccaagatcctcaagaagttcgacaagcgcaccggcggcgtgctccgcctccccgtcatcgcgcgggtgctgcggcagcccttcttcaccaccgacctcatctccgagctggtcagggactgcgaggccgcgatggaggccgtcttcccgcccgccgccagcagggacctccacgggcgccaggcgctggccgtcgccgggcagggcatcttccgcaacaccgtcgccgctctgctcaccatgcaggaggtgcgcagcgggagctccaccgtcggccatttctcgctgccgcccatgcagccgctgccggagtcggactggctcgtccagtccgttgacagcacgccgacggcgtcgcccctcatccccacccagtgactgacgacaccatggtccacttccagttccatggcactacagtgctacaccacagcggcgtattatatagtatgcaatatatataatctacatactgtagtagtggtgctcggtatgcggctgatgtgtacagtagtagtatttttttctctccttttgttgatgagacttgagaggtgtcctttttgctct

SEQ ID NO: 33704 - protein, 250 aa, Zea mays subsp. mays
MKFGKRLKKQIEESLPEWRSQFLNYKELKRRVNAVSSRGSAADPSSSSAAEADFLTLLDAEIDKFNAFFLEREEEFVIRQRELQERIGRAGGPEATLARVRREVVDLHGEMVLLLNYSSVNYTGLAKILKKFDKRTGGVLRLPVIARVLRQPFFTTDLISELVRDCEAAMEAVFPPAASRDLHGRQALAVAGQGIFRNTVAALLTMQEVRSGSSTVGHFSLPPMQPLPESDWLVQSVDSTPTASPLIPTQ

SEQ ID NO: 33705 - protein, 140 aa, Zea mays subsp. mays
MVLLLNYSSVNYTGLAKILKKFDKRTGGVLRLPVIARVLRQPFFTTDLISELVRDCEAAMEAVFPPAASRDLHGRQALAVAGQGIFRNTVAALLTMQEVRSGSSTVGHFSLPPMQPLPESDWLVQSVDSTPTASPLIPTQ

SEQ ID NO: 33706 - DNA, 1141 bp, Zea mays subsp. mays
agctaaccgcacgcgcgaattgcaggggagaagcagaagctggcgttcgcggaggaagaggccccgccggcgcggaaggtggagcccgacgacgaggccgagatggacgaggacgaggacgagctgggcccgggcctgggcggcgggcgcgcggcgcggtcgccgtgcgggctcggggagaagaagcggcgcctggcagctggagcaggtgcgcgcgctggagcgctgcttcgagacggacaacaagctggacccggaccgcaaggcccgcatcgcgcgcgacctcgcgctgcagccccgccaggtcgccgtctggttccagaaccgccgcgcccgctggaagaccaagacgctcgagcgcgacttcgcggcgctgcgcgcgcgccacgacgcgctccgcgccgactgcgacgcgctccgccgcgacaaggacgccctcgccgccgagataagggagttgaggcagaagctgctgcccaagccggaagccacggtgaagctggaggcgacgacgggcaatgacacggcggaggagcgccgccaggcgacggccggcgcgccgcccgcgggggcctgcaaggacggctcctcggacagcgactccagcgtggtcttcagcgacgtcgaggcgtcgccgtactccggcggcgcggggttcgagccgccggccttggccgggctcggcgcgccgttcctggacacgtcggtggcgccgacgggctgctcgtctccccccgttttcgtcgagaccaagtggcagcacgggccgacacagtacccgttcccattcgactcgtacaaggcctgcgccggctatggcttcacggaggaatggcccgcgagctcggacctcatcggcagcgacggcggcgcggcggggttcttctccgaggatcacgcctccagcctcaacttcaactggtgcccgagtggcatccagggctgggagtgaagaggggtttttgatctgcacggctagtgtaaaaaaaccgatgttacggtggcatttgtacatgcatggaactggagtctagtgacctggcctggcgagtgtggtgtggccaaagctagaggacatccagcgcaaaaggcgggaacaggagcagtagtagcctgtaacaataacggaataacttgagcc

SEQ ID NO: 33707 - protein, 316 aa, Zea mays subsp. mays
ANRTRELQGRSRSWRSRRKRPRRRGRWSPTTRPRWTRTRTSWARAWAAGARRGRRAGSGRRSGAWQLEQVRALERCFETDNKLDPDRKARIARDLALQPRQVAVWFQNRRARWKTKTLERDFAALRARHDALRADCDALRRDKDALAAEIRELRQKLLPKPEATVKLEATTGNDTAEERRQATAGAPPAGACKDGSSDSDSSVVFSDVEASPYSGGAGFEPPALAGLGAPFLDTSVAPTGCSSPPVFVETKWQHGPTQYPFPFDSYKACAGYGFTEEWPASSDLIGSDGGAAGFFSEDHASSLNFNWCPSGIQGWE

SEQ ID NO: 33708 - protein, 171 aa, Zea mays subsp. mays
MTRRRSAARRRPARRPRGPARTAPRTATPAWSSATSRRRRTPAARGSSRRPWPGSARRSWTRRWRRRAARLPPFSSRPSGSTGRHSTRSHSTRTRPAPAMASRRNGPRARTSSAATAARRGSSPRITPPASTSTGARVASRAGSEEGFLICTASVKKPMLRWHLYMHGTGV

SEQ ID NO: 33709 - DNA, 1498 bp, Zea mays subsp. mays
ctttccgcctcggcacctccccacccctctcgccttcgcttcgtcgccacggcgagccccacgccgccgatcggggcgccgccagcggcggcggcgcccgatccgatggaagcggaggtggggccgccgaatccgccgcggccggagccagccggatcggagcccgacgacgcgcgcctctccccgcctcctcctgctcctgctccgccgcctccgcccccgcctcctcccgccgccgaggctgccgccgcgcccaccgcctccgcggccttctcgctgcaggctccagctccggcgccggcggaggcgaacggcagctccgacaggaagaggaggaggaaggcggaggacggggacgggtgcaagacctgcagctgcaagaagtccaggtgcctcaagctttactgtgtgtgctttgcttctgggttacattgtactgaatcatgtggatgtgaaccttgtcataacaagccacaattgcaaggtactctgcggatggcaacagttttacctctgaaacctgtccaaacattcgaagctggccaagatatagtggaacaagtcataaggtctcctatggatcttattagaagaaaatgcacatgcaagaagtcaggctgccttaagaagtactgcgactgctaccagggaggggcaggatgctccatcaactgtaaatgcgatgattgtagaaacccatttgggagaaaagtcggcgttattttggacggtaaaagcagtcttactgcacctatactgcacgaaagaaacgggactgaagttgactcaagcgacgaggaagacgacttctacatgaatcgacagctctccccaatacctccgtctccggtgtctagggagtcttcgttccaacaggagactctagtcggcgtcgaggtccagaccatgaacgggcacctgtaccccaaaccactgacccaggtgcgccccgagccgtcgtcctggcagctctcccggaggcccatcgaggaaccgcgcggggagatatggcgcttctcgaggaggccgagcgaggacgggacctctgatgccatggaagtgcacgccgtcgccccgagagagagcaagaaggcggcagaggtccgcggggacaggttcggcatcccgcggtgcatcgaggtgatgagcgccatggcggagctgtcgccggtggagaagtcgctggcgcccgacgtcttcttggacgcgagcaaccgggagatcttcctctcgctgagtgtagatattaggccaatctggctgaggcgcaagatgaagagccttgtctagctagacgctacaacagagatagcctgaggaattttcgtcgtcggcgtatacctaataaacccgtgctgtactgtagatatataatatatgtgccttagattcagagttgagttctggaccgatgggtgtaatataccttagtgctaatttatggtgcatgctgttatattggagttcttcctatggtaagttcgttatgatttcagcc

SEQ ID NO: 33710 - protein, 429 aa, Zea mays subsp. mays
LSASAPPHPSRLRFVATASPTPPIGAPPAAAAPDPMEAEVGPPNPPRPEPAGSEPDDARLSPPPPAPAPPPPPPPPPAAEAAAAPTASAAFSLQAPAPAPAEANGSSDRKRRRKAEDGDGCKTCSCKKSRCLKLYCVCFASGLHCTESCGCEPCHNKPQLQGTLRMATVLPLKPVQTFEAGQDIVEQVIRSPMDLIRRKCTCKKSGCLKKYCDCYQGGAGCSINCKCDDCRNPFGRKVGVILDGKSSLTAPILHERNGTEVDSSDEEDDFYMNRQLSPIPPSPVSRESSFQQETLVGVEVQTMNGHLYPKPLTQVRPEPSSWQLSRRPIEEPRGEIWRFSRRPSEDGTSDAMEVHAVAPRESKKAAEVRGDRFGIPRCIEVMSAMAELSPVEKSLAPDVFLDASNREIFLSLSVDIRPIWLRRKMKSLV

SEQ ID NO: 33711 - protein, 394 aa, Zea mays subsp. mays
MEAEVGPPNPPRPEPAGSEPDDARLSPPPPAPAPPPPPPPPPAAEAAAAPTASAAFSLQAPAPAPAEANGSSDRKRRRKAEDGDGCKTCSCKKSRCLKLYCVCFASGLHCTESCGCEPCHNKPQLQGTLRMATVLPLKPVQTFEAGQDIVEQVIRSPMDLIRRKCTCKKSGCLKKYCDCYQGGAGCSINCKCDDCRNPFGRKVGVILDGKSSLTAPILHERNGTEVDSSDEEDDFYMNRQLSPIPPSPVSRESSFQQETLVGVEVQTMNGHLYPKPLTQVRPEPSSWQLSRRPIEEPRGEIWRFSRRPSEDGTSDAMEVHAVAPRESKKAAEVRGDRFGIPRCIEVMSAMAELSPVEKSLAPDVFLDASNREIFLSLSVDIRPIWLRRKMKSLV

SEQ ID NO: 33712 - protein, 264 aa, Zea mays subsp. mays
MATVLPLKPVQTFEAGQDIVEQVIRSPMDLIRRKCTCKKSGCLKKYCDCYQGGAGCSINCKCDDCRNPFGRKVGVILDGKSSLTAPILHERNGTEVDSSDEEDDFYMNRQLSPIPPSPVSRESSFQQETLVGVEVQTMNGHLYPKPLTQVRPEPSSWQLSRRPIEEPRGEIWRFSRRPSEDGTSDAMEVHAVAPRESKKAAEVRGDRFGIPRCIEVMSAMAELSPVEKSLAPDVFLDASNREIFLSLSVDIRPIWLRRKMKSLV

SEQ ID NO: 33713 - DNA, 1284 bp, Zea mays subsp. mays
  misc_feature (736)..(736): n is a, c, g, or t
gtcacttcattcccttgtcactagctagatcgactgactggagaggagctatcgtctactacctctgggcgagctgcgtgtcctgtcgtccttctcgctcctgtggtcgccgcgcgcggcggtgcgatggggcggtcgccgtgctgcgagaaggaggccgggctgaagaaggggccgtggacgtccgaggaggaccagaaactgctggccttcatcgagcagcacggacacggctgctggcgctcgctgccggctaaggccggtctgcggcggtgcggcaagagctgccggctccggtggaccaactacctgcggccggacatcaagcggggcaagttcacgctgcaggaggagcagaccatcatccagctccacgctctcctcggcaacaggtggtcgtcgatcgcgacgcacctgcccaagcgcacggacaacgagatcaagaactactggaacacgcacctcaagaagcggctcgccaagatgggcatcgaccccgtcacgcacaaggcccgcgccgacgtggggggctcctctggcgcaggcaacaactctggagcgcgctacagggcagccgcgcacctcagccacacggcgcagtgggagagcgcgcgcctcgaggccgaggcgcgtctggcgcgcgaggccaggctgcgtgcccttgcctcgccgccgccgccgccagggccagggccgggacccgcgtttagcgggctcgagtcgccgacatcgactntgagcttctccgagagcgtgctgttcgccagtgcggcgcacgacacccacgccctgacgtcacgcgcttacgcagaggcgttcggggcggagcagcaacagcgcttcgctgacactgccgccgccgccgacgccgcgccaggcttccttgcaggcgtccttctcggctgctccgtcgccggcgcggagaaggggttcgcggcctcgtcgacggacgccagcgtctgtgagcagcagcaggaggaagaggacaagggctactggagcagcatactgaacatggtcaactcctccatgtcgtcgtccacgtcctcgctgacttctgatgctgtcacggaccccgccgccgcgtacttgccgccggcgacggcggcggccgagttctgagtgattgtcgtccaataataacgaacctgtgctaatgttaccttgtcatgtgtgttgcttactagtaggtgcgttttggtgctagttagtttatttacgtgctaatgggctgtcgcccacgtgtgcttgtgctttatgatgtgcaataataaacatgtacgt

SEQ ID NO: 33714 - protein, 331 aa, Zea mays subsp. mays
  misc_feature (204)..(204): Xaa can be any naturally occurring amino acid
MGRSPCCEKEAGLKKGPWTSEEDQKLLAFIEQHGHGCWRSLPAKAGLRRCGKSCRLRWTNYLRPDIKRGKFTLQEEQTIIQLHALLGNRWSSIATHLPKRTDNEIKNYWNTHLKKRLAKMGIDPVTHKARADVGGSSGAGNNSGARYRAAAHLSHTAQWESARLEAEARLAREARLRALASPPPPPGPGPGPAFSGLESPTSTXSFSESVLFASAAHDTHALTSRAYAEAFGAEQQQRFADTAAAADAAPGFLAGVLLGCSVAGAEKGFAASSTDASVCEQQQEEEDKGYWSSILNMVNSSMSSSTSSLTSDAVTDPAAAYLPPATAAAEF

SEQ ID NO: 33715 - protein, 212 aa, Zea mays subsp. mays
  misc_feature (85)..(85): Xaa can be any naturally occurring amino acid
MGIDPVTHKARADVGGSSGAGNNSGARYRAAAHLSHTAQWESARLEAEARLAREARLRALASPPPPPGPGPGPAFSGLESPTSTXSFSESVLFASAAHDTHALTSRAYAEAFGAEQQQRFADTAAAADAAPGFLAGVLLGCSVAGAEKGFAASSTDASVCEQQQEEEDKGYWSSILNMVNSSMSSSTSSLTSDAVTDPAAAYLPPATAAAEF

SEQ ID NO: 33716 - DNA, 1378 bp, Zea mays subsp. mays
  misc_feature (500)..(500): n is a, c, g, or t
gcacgagaccattacctagaaacatcctaatcgaaaaatgacaacttttcctttattcttggtgctcagattgcatcctttaatcatcaccattcaccatagacaagttaacaagtcaagctgatcgagacgctcgcaccagaggcttcttccaaagcaggggagaagaggagagaagagcgagcgagctatggggttcggcatggctgtccctcctcgacggtttcttccggcgcgcgctcacgtccgccggcctccgcgcaggctccgccgccgtggacgccgacaccaccatccacttctgggcgcacccctccctcctccaggcccaggcccagccctcctccgcggctccgcggccggtggtggtgctgatccacgggttcgggccggacccgacgtggcagtgggcggcgcaggcgggcccgctgtcgcgccacttcgacctgctggtgccggcagctgctcttcttcggcgcgtccgccacgcgcgcccccgngcggtccgacgcgttccaggccgccgcgctcgccgcgctgctcgcgggcggcggccacgtcccgggcctcggcggccggaccgtgcacctcgtgggcgccaactacggcggcctggtggcgtaccacctcgcccgggagctggagcagcgaggcgtccgcgtcgggaaggtggcgctgtgcgacgcggacgcgtgctggggcggcgaggacggccgcgcgctggcggcccggagcggcgcggcggacgtggtggacctgctggcgcctggcgacaccgccgcggtgcggcggaggtggatgatgagcgcctaccgccccttcaaacacatccccaagtgcttcctccgcgacctctttcagaaacacttcgcggacaacagggaggagaaggtggcgctagtcaaagggatcactgccaaagaaggcttcgagctgactcctctacctcaggaggtgctcatcatctggggtgagttcgaccagatctacccggtcgagaaagcacacaagatgggagagaagctcggggagaaggcgacggtgaaggtgatcccgggcacgggacacctgccgcagcaacaggacatcaagctcttcaaccgcgtcctcctcgacttcctgctgcagcctgctgctgcttccacctccaatggcagcgctgccgccaagtagctcgggttcttttcttggttctccacttgtattgtctcccgcgtggcacgagcttgctgttgtgttattgtgtatataaaattctctgcagctgggttttattccgcctcttcgttttctatccagctggtttggaaatagaggcaatgcacattgttgtgtttagcaagatgtgaaataaatgacgaggcattgttttttcttc

SEQ ID NO: 33717 - protein, 203 aa, Zea mays subsp. mays
  misc_feature (104)..(104): Xaa can be any naturally occurring amino acid
MGFGMAVPPRRFLPARAHVRRPPRRLRRRGRRHHHPLLGAPLPPPGPGPALLRGSAAGGGADPRVRAGPDVAVGGAGGPAVAPLRPAGAGSCSSSARPPRAPPXGPTRSRPPRSPRCSRAAATSRASAAGPCTSWAPTTAAWWRTTSPGSWSSEASASGRWRCATRTRAGAARTAARWRPGAARRTWWTCWRLATPPRCGGGG

SEQ ID NO: 33718 - protein, 199 aa, Zea mays subsp. mays
  misc_feature (100)..(100): Xaa can be any naturally occurring amino acid
MAVPPRRFLPARAHVRRPPRRLRRRGRRHHHPLLGAPLPPPGPGPALLRGSAAGGGADPRVRAGPDVAVGGAGGPAVAPLRPAGAGSCSSSARPPRAPPXGPTRSRPPRSPRCSRAAATSRASAAGPCTSWAPTTAAWWRTTSPGSWSSEASASGRWRCATRTRAGAARTAARWRPGAARRTWWTCWRLATPPRCGGGG

SEQ ID NO: 33719 - protein, 124 aa, Zea mays subsp. mays
MMSAYRPFKHIPKCFLRDLFQKHFADNREEKVALVKGITAKEGFELTPLPQEVLIIWGEFDQIYPVEKAHKMGEKLGEKATVKVIPGTGHLPQQQDIKLFNRVLLDFLLQPAAASTSNGSAAAK

SEQ ID NO: 33720 - DNA, 1762 bp, Zea mays subsp. mays
tagaacatcctaatcgaaaaaagcccaagaccaagtgaaacatcaacacttccacgttccacccatggctaattctcatcaccggtgcaccagcgtcgcctccgagctggaaggcacgctgctcatctccggcagcctcttcccatacttcttcctcgtcgccctcgaggccggcggccctctcagggccctgctcttgctcgccgtgtaccctcttcgcgctgctcggcgccgccttctcgtgggacgacctacccctgctcgccatgaccttcctgtccaccgccggcctcgacgtcggcgacgtgaccgcggcggcgcgggccacgctgcccaggttcttcctggccgacctgcggggcagcgcgttccgggccttgtcgcgccacgccggcggcggcgagaggtacgtcgtcacgcacctgcccaggctcgtcgcggagccgttcgtgagggagtacctcggcgccgacgtccgcgtcgtcggcacggagctgcgggtggtcgcgggtaagaggttctcaggcacggtggtggtggcctctcccggcgtcgcggcggcagcggctggcgccgaccgcagcctgggtgctctggtggccgtccttgggagcgaccgggtcgtcggcgtggggctctactgccccggcgccggcggggaccagcagccggcgtttctgcaggcttgccaggagcgccgcatggtgtccgcgccggagaaggcggcggcggtgcccctgccgaggagcgagtacccgcggccgctggtgttccacgacggccgcctcgtgcgccggcccgacccgcttgtgtgcctggccatcttgctgtggctcccgctcggcgtgctcctgtccgtgacgcgcctcctcttcggcttcctcccgcacggcgccgggctcctgctgtccgcggccacgggcttccggatgcgcggcagcctcgggggagcggcggcggcgggcccgcggcgaggcacattgttcgcgtgcaaccaccagacgctgatggacccggtgatcctcgcgacggtgctgcgccggaaggtgaccgccgtgacgtacagcctgtccagcttctcggagctgatcgcgccgatcccgaccgtccggctgacgcgcgaccgcggcagggacagccggatcatgcagcgcgagctcgcgcgcggcgacctggtggtctgcccggagggcaccacctgccgcgagccctacctgctgcgcttcagcccgctgttcgcggagatcgccgacgaggtcacgccgacggccgtgcgggccggcggcgccatgttccacggctccaccgtgcggggccacaagtggctcgactccgtcttcttcctcatgaacccggcgccgtggtacgagatccggatcctggccacctgcagtggcagtggcggcgcgtccagcctcgacgtggcgaacggcgtccagcgcatgatcggcgatgagcttgggttcgagtgcaccggggctcacgcgcagggacaagtaccggatgatcgccggccacgacggcgtcgacgcgaggtcgtcgccgtcgtcatagctgaagagcaaatgtgccagcgtacgcttgtggggactcatgcacagaaatgcaaaacgttcaactggttctccttctccatcaccgccctgctcttaaacacagacattcagtgttgcagcgactaggctccattcttcaggaaatgaccggtttagacggttttggaacaagcccaaccaaattttagtgattttttatgttcctt

SEQ ID NO: 33721 - protein, 471 aa, Zea mays subsp. mays
MTFLSTAGLDVGDVTAAARATLPRFFLADLRGSAFRALSRHAGGGERYVVTHLPRLVAEPFVREYLGADVRVVGTELRVVAGKRFSGTVVVASPGVAAAAAGADRSLGALVAVLGSDRVVGVGLYCPGAGGDQQPAFLQACQERRMVSAPEKAAAVPLPRSEYPRPLVFHDGRLVRRPDPLVCLAILLWLPLGVLLSVTRLLFGFLPHGAGLLLSAATGFRMRGSLGGAAAAGPRRGTLFACNHQTLMDPVILATVLRRKVTAVTYSLSSFSELIAPIPTVRLTRDRGRDSRIMQRELARGDLVVCPEGTTCREPYLLRFSPLFAEIADEVTPTAVRAGGAMFHGSTVRGHKWLDSVFFLMNPAPWYEIRILATCSGSGGASSLDVANGVQRMIGDELGFECTGAHAQGQVPDDRRPRRRRREVVAVVIAEEQMCQRTLVGTHAQKCKTFNWFSFSITALLLNTDIQCCSD

SEQ ID NO: 33722 - protein, 326 aa, Zea mays subsp. mays
MVSAPEKAAAVPLPRSEYPRPLVFHDGRLVRRPDPLVCLAILLWLPLGVLLSVTRLLFGFLPHGAGLLLSAATGFRMRGSLGGAAAAGPRRGTLFACNHQTLMDPVILATVLRRKVTAVTYSLSSFSELIAPIPTVRLTRDRGRDSRIMQRELARGDLVVCPEGTTCREPYLLRFSPLFAEIADEVTPTAVRAGGAMFHGSTVRGHKWLDSVFFLMNPAPWYEIRILATCSGSGGASSLDVANGVQRMIGDELGFECTGAHAQGQVPDDRRPRRRRREVVAVVIAEEQMCQRTLVGTHAQKCKTFNWFSFSITALLLNTDIQCCSD

SEQ ID NO: 33723 - protein, 250 aa, Zea mays subsp. mays
MRGSLGGAAAAGPRRGTLFACNHQTLMDPVILATVLRRKVTAVTYSLSSFSELIAPIPTVRLTRDRGRDSRIMQRELARGDLVVCPEGTTCREPYLLRFSPLFAEIADEVTPTAVRAGGAMFHGSTVRGHKWLDSVFFLMNPAPWYEIRILATCSGSGGASSLDVANGVQRMIGDELGFECTGAHAQGQVPDDRRPRRRRREVVAVVIAEEQMCQRTLVGTHAQKCKTFNWFSFSITALLLNTDIQCCSD

SEQ ID NO: 33724 - DNA, 1658 bp, Zea mays subsp. mays
gcacgagaccattacctagaacatcctaatcaaaaagcaaccagcaggccattctctcgccgtctcatcacaactagcgccactctagtagtaagtactaagtagtagtaggaggtggcagcagcagccaatcttgccacgatgacactctgcaccgtcttgctccagatcctccttccaacgctgctcttggtttctgccatcacaggcgcggacgctagcggcatcggcgtcaactacggcacgcggggcacgacgctcccggcgccggccgacgtggcgcggttcctggcccgggacaccatcttcgaccgcgtgaggctgttggacgccgacccggtcctgctgcgggccttcgcaggcacgggcctcgccgtggacgtgacggtgcccaacggcgtcgtcccgcgcctgttgaatctgaccttcgcgcggcgctgggtgcgcgacaacgtgacgccctacgcgggcgccaccaacatctcgcgcctcctggtcggcgacgaggtgaccaccgaggccaaccggacgctgctgctggcgctggtgccggccatgcagaacctgcacaccgcgctggtcgccgcgtccctgcacggccgggtgaaggtctccaccacgcactcgctcggggtgctcaccaccacggagcagccgtcggcggcgcggttccgcgacggctacgacgcggccatcgtgaggccgctgctcaggttcctccgcgcgaccggcgcgccgttcatggtgaacgcgtacccgttctacgcgctcgccaacgacagcagcctcgacttcgcgctgttccgggtgaacgacggcgtcatggaccagggcaccgggctggtgtacggcaacatgctggacgcgcagctcgacgccgtgcactcggccgtcaggcggatgggcttcggggacgtcgacatcgccgtgtcggagaccgggtggccatcggccggggaggactgggaggtcggcgtcggcgcggacctcgcccgggactacaacatcaacgccatccgccacctcggctccggcgtcggcacgccgctcatgcccaaccgcaccttcgaggtctccatcttctccctcttcgacgagaacctcaagccagggccggtgtcggagaggaatttcggcttgttccgcggcgacatgacgccggtctacgacgtcggcatcttcactgatccggagacccttgagccggtgagagcgaaggtgacgagccggaaatggtgcgtgccggagccggcggcggacgagatggtgctgcaggaaaacatcgacttcgcgtgcggccaaaagggcgtcgactgtaccgcgatccggccgggcggcgtctgctacgagccggacacggtgcaggcccacgcggcgtacgccatgaacctctacttccaggccaatggccagcatgcctttgactgcgattttggacagacaggcattgttaccacagctgatcccagttatggaggctgcaaattcatgtgaacaaggcataggggatgtttgttttgaggaatcactctattgaaatttagatggtacatcatgagtccatttctcaaatttgttgggatgattatattacttatattaatactaactaactatgaaaaatgagatagtgatagataaactcattttatttcatc

SEQ ID NO: 33725 - protein, 450 aa, Zea mays subsp. mays
MTLCTVLLQILLPTLLLVSAITGADASGIGVNYGTRGTTLPAPADVARFLARDTIFDRVRLLDADPVLLRAFAGTGLAVDVTVPNGVVPRLLNLTFARRWVRDNVTPYAGATNISRLLVGDEVTTEANRTLLLALVPAMQNLHTALVAASLHGRVKVSTTHSLGVLTTTEQPSAARFRDGYDAAIVRPLLRFLRATGAPFMVNAYPFYALANDSSLDFALFRVNDGVMDQGTGLVYGNMLDAQLDAVHSAVRRMGFGDVDIAVSETGWPSAGEDWEVGVGADLARDYNINAIRHLGSGVGTPLMPNRTFEVSIFSLFDENLKPGPVSERNFGLFRGDMTPVYDVGIFTDPETLEPVRAKVTSRKWCVPEPAADEMVLQENIDFACGQKGVDCTAIRPGGVCYEPDTVQAHAAYAMNLYFQANGQHAFDCDFGQTGIVTTADPSYGGCKFM

SEQ ID NO: 33726 - protein, 312 aa, Zea mays subsp. mays
MQNLHTALVAASLHGRVKVSTTHSLGVLTTTEQPSAARFRDGYDAAIVRPLLRFLRATGAPFMVNAYPFYALANDSSLDFALFRVNDGVMDQGTGLVYGNMLDAQLDAVHSAVRRMGFGDVDIAVSETGWPSAGEDWEVGVGADLARDYNINAIRHLGSGVGTPLMPNRTFEVSIFSLFDENLKPGPVSERNFGLFRGDMTPVYDVGIFTDPETLEPVRAKVTSRKWCVPEPAADEMVLQENIDFACGQKGVDCTAIRPGGVCYEPDTVQAHAAYAMNLYFQANGQHAFDCDFGQTGIVTTADPSYGGCKFM

SEQ ID NO: 33727 - protein, 250 aa, Zea mays subsp. mays
MVNAYPFYALANDSSLDFALFRVNDGVMDQGTGLVYGNMLDAQLDAVHSAVRRMGFGDVDIAVSETGWPSAGEDWEVGVGADLARDYNINAIRHLGSGVGTPLMPNRTFEVSIFSLFDENLKPGPVSERNFGLFRGDMTPVYDVGIFTDPETLEPVRAKVTSRKWCVPEPAADEMVLQENIDFACGQKGVDCTAIRPGGVCYEPDTVQAHAAYAMNLYFQANGQHAFDCDFGQTGIVTTADPSYGGCKFM

SEQ ID NO: 33728 - DNA, 1311 bp, Zea mays subsp. mays
  misc_feature (525)..(525): n is a, c, g, or t
aactaggcaccaaaccatcacttcactcccacctctctgcgccctgcacctgcacataggtactacgatcaccacacgcgcaccaagcccaagaaccgtgcgcgcgccatggccgagaagccgcctctgtcggccaagcctcccctgccgtccaagccgaggcctaaggcggcgtcggcggcaaggccgacaacgacgacgccggcccccggcagcaggccggccgcgtcgcccttcaagaagcccacgctcgcgccgccgcaggtgctcccgctcaagccgccgccggcgcaccagtaccgccagcagcagcagcagcagcacccggcgcccccgggcggtgcccggaagccgcgggcgtaccgccagcagcagccgcacccgcaccgccgcggccgcgggtgctcgtgccgccgcgcgtgctgcctggccacgggcctcgcgctgctcgcgctctgcctggcgctggccgccgcctgcctggcctacctctactaccggccgcgcgcgccgtcgttccacctncagccgctggcccccgtgcgcctccgcctcggcagcaacgcctcctccgtggacgccaccgtcggcgcccgcgtcgtgtcgtggaaccccaacgagcgggtcgagttccggtacggcgacggcgagggccgcgtcgcgctggccgaccccgacggcgacgtcgcgctcgggtgggcccccctgcggggcttcgcccacgcgccgcgccgcgtcgccgccgtcgcgttcgtggccaccgccaggggcgtcgtgctcgacgacgccgtcgcggcgcgcgtgcgcgacaggtaccggcggcggcggcaggggttcagggtggtcgtggacgctcacgtcggcgtccgcgtcggggcgctgcgcacggggatggtgccgctcaggctgctgtgcgatgacggcgtgatggcgccgcgcgccgtggggtcgtccgatggggccgtggtggggcccatgaccaagtgccaggtgctcctgttcagagtaagatggtttagcctgaactgagggaaaatctggagcaaggcagctatagctgaccatcgagctgataccagaggcgccggagcttgtttgattatctgcatgtgtttgccgacaagatgaaggtgattgatttgccacgagctttttgattggtgatggatgcatggtctgaagactccgaagcacacgtagaaaacaaagtttgtaactgtatattacactccaggtcccaattcttttgattgtgtggtgtatacattaatacatagcaggaatggaaagaacgatgggtgtgttcctgcc

SEQ ID NO: 33729 - protein, 308 aa, Zea mays subsp. mays
  misc_feature (175)..(175): Xaa can be any naturally occurring amino acid
TRHQTITSLPPLCALHLHIGTTITTRAPSPRTVRAPWPRSRLCRPSLPCRPSRGLRRRRRQGRQRRRRPPAAGRPRRPSRSPRSRRRRCSRSSRRRRTSTASSSSSSTRRPRAVPGSRGRTASSSRTRTAAAAGARAAARAAWPRASRCSRSAWRWPPPAWPTSTTGRARRRSTXSRWPPCASASAATPPPWTPPSAPASCRGTPTSGSSSGTATARAASRWPTPTATSRSGGPPCGASPTRRAASPPSRSWPPPGASCSTTPSRRACATGTGGGGRGSGWSWTLTSASASGRCARGWCRSGCCAMTA

SEQ ID NO: 33730 - protein, 306 aa, Zea mays subsp. mays
  misc_feature (139)..(139): Xaa can be any naturally occurring amino acid
MAEKPPLSAKPPLPSKPRPKAASAARPTTTTPAPGSRPAASPFKKPTLAPPQVLPLKPPPAHQYRQQQQQQHPAPPGGARKPRAYRQQQPHPHRRGRGCSCRRACCLATGLALLALCLALAAACLAYLYYRPRAPSFHXQPLAPVRLRLGSNASSVDATVGARVVSWNPNERVEFRYGDGEGRVALADPDGDVALGWAPLRGFAHAPRRVAAVAFVATARGVVLDDAVAARVRDRYRRRRQGFRVVVDAHVGVRVGALRTGMVPLRLLCDDGVMAPRAVGSSDGAVVGPMTKCQVLLFRVRWFSLN

SEQ ID NO: 33731 - DNA, 998 bp, Zea mays subsp. mays
  misc_feature (540)..(540): n is a, c, g, or t
  misc_feature (583)..(583): n is a, c, g, or t
ataaaggggcattggcttgggatcacctctgcatcttacctgggatctgctagcttgatctctcctagtcctagcccattcgcttctcctgttcgtcgctcttaatttgcttgctcgatccctggcagtggcagctgctgcaatggcttccggtggcgcgtcgtcactggccttggccttggccgcgctgctcctcgtgagctgcgcctcggcggcggtggcgaccaagtacaccgtcggggacgcgtccggctggacgaccaccggcgactacgccacctgggccagcggcaagaagttcaaagtcggcgacagtctcgagttcaaatacgccggcggggcgcacacggtggacgaggtgagcgcggcggactacgccgcctgctcctccagcaacgcgctcagcaccgacagcgccggcgccacgaccgtgaccctcaagacggccggcaagcactacttcatctgcggcgtggcgggccattgcagcagcggcatgaagctcgtggtggacgtggccaaggcggtgaccgccccggngccggccccagccgcggccccggccccggccgcggacaccgcnccagacgcccccgacaccacgccgtcgaccccgacgtccccctcgagctccggcggccgcacgcccaagagcccagacacgacggtcctctcgccgccggacaagaagtccacctcctctggcgccaccgggctcagcgccgcagtgtgggccggcttgggccttgccgggctcgtggccgtgcacctcggcgcgttctaggccagcccgctggcctggccagggaggagacagtgccgtgtgttgttgttaggctgcacgtcatgaattggattggtgtattggttgagggacttgactgcttaccagagagagatctctttttggttcagggaacttattgacgatgctttggctgtgctgtagacatgtagttggataccttggatgttatgctatcagttttgctgttgct

SEQ ID NO: 33732 - protein, 213 aa, Zea mays subsp. mays
  misc_feature (133)..(133): Xaa can be any naturally occurring amino acid
  misc_feature (147)..(147): Xaa can be any naturally occurring amino acid
MASGGASSLALALAALLLVSCASAAVATKYTVGDASGWTTTGDYATWASGKKFKVGDSLEFKYAGGAHTVDEVSAADYAACSSSNALSTDSAGATTVTLKTAGKHYFICGVAGHCSSGMKLVVDVAKAVTAPXPAPAAAPAPAADTXPDAPDTTPSTPTSPSSSGGRTPKSPDTTVLSPPDKKSTSSGATGLSAAVWAGLGLAGLVAVHLGAF

SEQ ID NO: 33733 - DNA, 706 bp, Zea mays subsp. mays
tcgaaaaaagacatcagaaaccaagtaccagcaccactgaccaccaagccaccaatcatggccgccactttgcatctccacctcctcgtgacccttcttttcgtcgccactctcaccgtggcctctgttgccgacgactcgccgccggcacccacaccaccggcaccgccgcagccgaccgcgtaccagatgctggagcggtacaacttcacgcagggcatcctgccgcagggcgtgacggggtacgtcctcaacgccgacggctccttcgaggtgtacctcccggcggactgcagcttccgcgccggcagcatgcgggtccagtacagcagccgcgtcgccggccacattcagccgctgtccatcacatccctggagggagtgaaggtgaaggtgctgttctcgtgggtcgggcgtcaagcaggtcgaccgcgacggcgaccagctccgtttctccgccggccctatgtcgaaatcgttccccatcgacacatttgccaacagcccccaatgcagctgaggccctttggtcgattgcggaagaaaagcctgttagtttcatttttcttgtgtgcctttagtttgtaatgtcattttgcaaggatggatcggttacacagagagtgctaggaatccctaggacgtggttcgagatcattcttacttgtaaccaatttgattgtttttgctttgatgcccattcacc

SEQ ID NO: 33734 - protein, 195 aa, Zea mays subsp. mays
SKKDIRNQVPAPLTTKPPIMAATLHLHLLVTLLFVATLTVASVADDSPPAPTPPAPPQPTAYQMLERYNFTQGILPQGVTGYVLNADGSFEVYLPADCSFRAGSMRVQYSSRVAGHIQPLSITSLEGVKVKVLFSWVGRQAGRPRRRPAPFLRRPYVEIVPHRHICQQPPMQLRPFGRLRKKSLLVSFFLCAFSL

SEQ ID NO: 33735 - protein, 192 aa, Zea mays subsp. mays
EKRHQKPSTSTTDHQATNHGRHFASPPPRDPSFRRHSHRGLCCRRLAAGTHTTGTAAADRVPDAGAVQLHAGHPAAGRDGVRPQRRRLLRGVPPGGLQLPRRQHAGPVQQPRRRPHSAAVHHIPGGSEGEGAVLVGRASSRSTATATSSVSPPALCRNRSPSTHLPTAPNAAEALWSIAEEKPVSFIFLVCL

SEQ ID NO: 33736 - protein, 176 aa, Zea mays subsp. mays
MAATLHLHLLVTLLFVATLTVASVADDSPPAPTPPAPPQPTAYQMLERYNFTQGILPQGVTGYVLNADGSFEVYLPADCSFRAGSMRVQYSSRVAGHIQPLSITSLEGVKVKVLFSWVGRQAGRPRRRPAPFLRRPYVEIVPHRHICQQPPMQLRPFGRLRKKSLLVSFFLCAFSL

SEQ ID NO: 33737 - DNA, 736 bp, Zea mays subsp. mays
acactcgccgtcccccgcttcccaccacccatttcatccccccagcaaatccaaccccacccctctcactctcgtctcctgttcgccagagccacctcgctccagaagctttcctcccctagatctccctcccgtgcctggtcgcgctgccgacccggccatggcgaccaaggggaagctcggggagctagtgtgggagcaccgggtgcaggcggccgcagcggtggctttcgtggccgcggccgccgtctcgatctccgccgtcgggcccaggctcggcgccgtggtgtcattcttctggccgctgctcgtctccacgggcctcttcctggtggcggtcagccgtgctgctccggatctcgccgccgcccgcgggcgacgacgacgagtccggcaaggagctcatcgacttcgtcgccgggtgccgcccggagcacctcgtcccggatgcggcgccgccggcggccgtagcccccgtggaggctccgcccgagctgcagatctaacgggctgccggaggaggaggctgacagcagcgtagctgtgctgctgtgcgtggcatggcgtgctccgtccccgggtgaacttcctccagtggcacgggtgggggcaaccgttgcgggcccacctgtaagtgtcaggccggcgcgccgccgtggctcggtagcctaggacttctccatgtcttgctctgctccggtgtaagataccgtggattttaataatgaatcatggc

SEQ ID NO: 33738 - protein, 179 aa, Zea mays subsp. mays
HSPSPASHHPFHPPSKSNPTPLTLVSCSPEPPRSRSFPPLDLPPVPGRAADPAMATKGKLGELVWEHRVQAAAAVAFVAAAAVSISAVGPRLGAVVSFFWPLLVSTGLFLVAVSRAAPDLAAARGRRRRVRQGAHRLRRRVPPGAPRPGCGAAGGRSPRGGSARAADLTGCRRRRLTAA

SEQ ID NO: 33739 - protein, 156 aa, Zea mays subsp. mays
TLAVPRFPPPISSPQQIQPHPSHSRLLFARATSLQKLSSPRSPSRAWSRCRPGHGDQGEARGASVGAPGAGGRSGGFRGRGRRLDLRRRAQARRRGVILLAAARLHGPLPGGGQPCCSGSRRRPRATTTSPARSSSTSSPGAARSTSSRMRRRRRP

SEQ ID NO: 33740 - protein, 126 aa, Zea mays subsp. mays
MATKGKLGELVWEHRVQAAAAVAFVAAAAVSISAVGPRLGAVVSFFWPLLVSTGLFLVAVSRAAPDLAAARGRRRRVRQGAHRLRRRVPPGAPRPGCGAAGGRSPRGGSARAADLTGCRRRRLTAA

SEQ ID NO: 33741 - DNA, 1064 bp, Zea mays subsp. mays
  misc_feature (892)..(892): n is a, c, g, or t
gaacctcctccactccagcacgtacaagagctctcgccaaagcctaaatttagctacgacccgcgtagcttctcacgtactcaccacccatggcgaagccaagtagctacggtcttgcgcttcttgcttgcgccgccgtcgccgctgcggtcgccggcggaacgcagttcacggtcggcggcgcccaatggctggagcgtgcccgccgccggcgcggagcccttcaatgcttgggcggagaggacgaggtttcagatcggagacgccctagtgttcgtgtaccccaaggaccaagacgcggtgctgctggtggagccggcgggctacaacgcgtgcaacacgtcgtcgtacgtgaggaagttcgacgacggcgacaccgtggtcgcgctcgacagcgccggcccgctcttcttcatcagtggcgtcgaggccaactgccgcgccgacgagaagctcatcgtcatggtcctcgccgcccgcagcaacggcaccggcgcgccggctccgagcacggcgcccccgcctccggctcccgccagctccgcgccgcccacgccggcgtcgcccgctcctaagggcgcccccccgaccacggcggcgtcgcctccgccgccctcggcctctgctcccgcaacgacaccggccacgccgccgcccgccgcgtcggcggcgccccctgctccgagggcgtcgtcaaccccgccgcctccatctgccccggccggtgccccgccggcgcccgcggcaagctctccggctccgagcgcacatggggcgacggataactccacgggcacgccgtcgtcgcctcccgccggctcctccaaggacaagaacggcgccgccttcacggtggccacaggtttggccagctcgttcggaacctgcatcncttgtacgccatgcttgctctctgaagtgaagtgggccgccgtggaagactccagtaaatatgtgtgtgtttacgtgtaatttaattgagacatgcgatttgtgcatgttattgctagatcttgcattcgttttccgccggatgaataagaaatcaaccattcgttattcct

SEQ ID NO: 33742 - protein, 323 aa, Zea mays subsp. mays
  misc_feature (298)..(298): Xaa can be any naturally occurring amino acid
EPPPLQHVQELSPKPKFSYDPRSFSRTHHPWRSQVATVLRFLLAPPSPLRSPAERSSRSAAPNGWSVPAAGAEPFNAWAERTRFQIGDALVFVYPKDQDAVLLVEPAGYNACNTSSYVRKFDDGDTVVALDSAGPLFFISGVEANCRADEKLIVMVLAARSNGTGAPAPSTAPPPPAPASSAPPTPASPAPKGAPPTTAASPPPPSASAPATTPATPPPAASAAPPAPRASSTPPPPSAPAGAPPAPAASSPAPSAHGATDNSTGTPSSPPAGSSKDKNGAAFTVATGLASSFGTCIXCTPCLLSEVKWAAVEDSSKYVCVYV

SEQ ID NO: 33743 - protein, 169 aa, Zea mays subsp. mays
  misc_feature (144)..(144): Xaa can be any naturally occurring amino acid
MVLAARSNGTGAPAPSTAPPPPAPASSAPPTPASPAPKGAPPTTAASPPPPSASAPATTPATPPPAASAAPPAPRASSTPPPPSAPAGAPPAPAASSPAPSAHGATDNSTGTPSSPPAGSSKDKNGAAFTVATGLASSFGTCIXCTPCLLSEVKWAAVEDSSKYVCVYV

SEQ ID NO: 33744 - protein, 161 aa, Zea mays subsp. mays
MAKPSSYGLALLACAAVAAAVAGGTQFTVGGAQWLERARRRRGALQCLGGEDEVSDRRRPSVRVPQGPRRGAAGGAGGLQRVQHVVVREEVRRRRHRGRARQRRPALLHQWRRGQLPRRREAHRHGPRRPQQRHRRAGSEHGAPASGSRQLRAAHAGVARS

SEQ ID NO: 33745 - DNA, 1907 bp, Zea mays subsp. mays
ctaatcgacaaatggtcggtcgcaccgaacagcacgaccagaccagttgcccggctcaccaaatccaggcgtggccgtgcgaccatccctcccctcatggcgtcatcggcggcgcgatccctcgcgctcgtcgcgtctgcctcggcatcgctcggcgtcgggcagcggtcgtgggctcgcttggctgtctcttcctcttcggctgggtcggccctccccaagctccgcgggctccgctcgttcgccgcctccgcagggggcgccgtgatggggaagccaagccccggggtcgttgacgccgacgccgggatggacgccgtccagcggcggctcatgtttgaggacgagtgcattttagtggatgaacaagacaatgtcatcggccacgagtccaagtataactgccatctcatggagaagatagaagctggaaatgccctgcacagagctttcagtgttttccttttcaactccaaatatgagttgctactgcagcaaaggtctgcaacaaaagtgacatttccacttgtctggacaaacacctgctgtagccatcctctctaccgcgagtcagagttgattgaggaaaattgtgcaggggtgagaaatgcagcccagcgcaaactatttgatgagctgggaatagtggctgacgaattacctgtcgaccagttcattccgcttgggaggatgctttacaaggctccttcagatggaaaatggggcgaacacgagttggattacctcttgttcatggttcgtgacgtgaagctcgacccgaatcctgaagaggtggccgatgtcaagtacatgaaccggcatcagctgaaggagctgctcaggaaagccgatgccggggaagatggcgttaagctctccccttggttcaggctggtggtggacaactttctcatgggctggtgggatcatgtcgagcaagggactctgcagggggcagcagacatgaaaaccatccataaattgtaaatcttctagatcgcttaagcacgagtcttgccctgttgaggaataagcgcttgtcctgctgtttggtgctggaggaataatcgataaaattataacagagtgatcttaattctggaacgtaactatgcaaaaaaaaaaaaaaaaaacggcacgagaagcttttttttttttttttttcttttttttttttttttttttttttttttttttttttttttagaaccgagggctttccattgataatagcagtgaaaatattacaccaaatgggctagaaactggaacacctcgaaacgaagatacagaacaaactacagtagaccggccaactagacacacaaccgaccacggccgtcacatcaaagcatcagaaggggaggtggcctagccgccgaagccgtagagcgtgcggccctggcgcttgagcgcgtagacgacatccatggcggtgacggtcttgcggcgggcgtgctcggtgtaggtgacggcgtcgcggatgacgttctcgaggaagatcttgagcacgccgcgggtctcctcgtagatgagcccagaaatgcgcttgacgccgcccctcctggccagcctacggatcgccggcttcgtgatgccctggatgttgtcgcgcagcaccttgcggtggcgcttggcgccgcccttgcccagccccttgccgcccttgccgcgccccgacatcgccgaaaccgagaggtacgcggacggaggaggagaatcgtgccgttgtgcggttgaacttggattccgttgtccgaaatttctaatccgaaagatggatttcattgtcttcttcttcttagcattatgtcactatctcacgtcgtcctgtctcaatacagtctaaggttcatgtgatgttatccccatttgtccacgcacaagtgaatgcagtcactatttcg

SEQ ID NO: 33746 - protein, 328 aa, Zea mays subsp. mays
LIDKWSVAPNSTTRPVARLTKSRRGRATIPPLMASSAARSLALVASASASLGVGQRSWARLAVSSSSAGSALPKLRGLRSFAASAGGAVMGKPSPGVVDADAGMDAVQRRLMFEDECILVDEQDNVIGHESKYNCHLMEKIEAGNALHRAFSVFLFNSKYELLLQQRSATKVTFPLVWTNTCCSHPLYRESELIEENCAGVRNAAQRKLFDELGIVADELPVDQFIPLGRMLYKAPSDGKWGEHELDYLLFMVRDVKLDPNPEEVADVKYMNRHQLKELLRKADAGEDGVKLSPWFRLVVDNFLMGWWDHVEQGTLQGAADMKTIHKL

SEQ ID NO: 33747 - protein, 296 aa, Zea mays subsp. mays
MASSAARSLALVASASASLGVGQRSWARLAVSSSSAGSALPKLRGLRSFAASAGGAVMGKPSPGVVDADAGMDAVQRRLMFEDECILVDEQDNVIGHESKYNCHLMEKIEAGNALHRAFSVFLFNSKYELLLQQRSATKVTFPLVWTNTCCSHPLYRESELIEENCAGVRNAAQRKLFDELGIVADELPVDQFIPLGRMLYKAPSDGKWGEHELDYLLFMVRDVKLDPNPEEVADVKYMNRHQLKELLRKADAGEDGVKLSPWFRLVVDNFLMGWWDHVEQGTLQGAADMKTIHKL

SEQ ID NO: 33748 - protein, 239 aa, Zea mays subsp. mays
MGKPSPGVVDADAGMDAVQRRLMFEDECILVDEQDNVIGHESKYNCHLMEKIEAGNALHRAFSVFLFNSKYELLLQQRSATKVTFPLVWTNTCCSHPLYRESELIEENCAGVRNAAQRKLFDELGIVADELPVDQFIPLGRMLYKAPSDGKWGEHELDYLLFMVRDVKLDPNPEEVADVKYMNRHQLKELLRKADAGEDGVKLSPWFRLVVDNFLMGWWDHVEQGTLQGAADMKTIHKL

SEQ ID NO: 33749 - DNA, 1345 bp, Zea mays subsp. mays
agaacatcctaatcgaaaaaccccactgctcggtgttcactccggtcgggccatggcgcgcgccggcgtctctaccgcgccgctctcccgcactcacctcctcccaccacgtccttccctcctccacaacacgcagcaccactccctcctcctccggccccagcgcaaggcgcccgccaccaccgcggcggcgctgccgccggccgcggacctcccggcgctgtccctcccggccgcggccgccgcggctgccgcgctggcggcggcggtgtcactttccgaccccgagcggcggcggcgctcgcaggccgaggcggccggcggaggtgacaaggaggccgtccgcgcctacttcaactccacggggttcgagcggtggcgcaagatctacgggtcggcgacggagggcgtgaaccgcgtgcagcttgacatccgcgagggccacgcgcagacggtggcggcggcgctggccatgctccgcgactccccgctggagctgtcgggcgccaccgtgtgcgacgccggctgcgggacggggtcgctggccatcccgctcgcggcggcgggcgccgacgtcctggcctccgacatctcggcggccatggtgtcggaggcgcagcggcaggcggcggcgcagtcgtcgtcgtcgtcgttccggatgccgcggttcgaggtccgcgacctggagagcctggaggggcggtacgacgtggtggtgtgcctggacgtgctcatccactacccgcgggaggaggcgcgcgccatgatccgccacctcgcgtcgctggcggacaagcggctgctcatcagcttcgcgcccaggacgctctacttcgacttcctcaagcgcgtgggcgagctgttcccgggcccgtcaaaggccacgcgcgcctacctgcacgccgaggccgacatcgaggacgcgctccgccaggccggctggcgcgtcgccaaccgcggcttcatctccacgcagttctacttcgccaagctcttcgacgccgtgcccgtcggctcctcgacgtagccgtgtaggccgcccgccgtgtgcttgtgtgtttgtttgcctcacgcgactgtttatagagctccagacggtcgccgcagcgcgcgcggcggcgtagcctgtttgtacttgcaagctcactcagttccattccgtagcttgatgccttgattgattcccacgtagacttccatcgacaaacacaattgcagggttttgagtttttgacccaaacgacacgacaaagagttcttatcatccaggggcctcgaccaccgtgctcgttttacaaaagctgtaattaaagactactttgcaagattatcgtgattttcattc

SEQ ID NO: 33750 - protein, 341 aa, Zea mays subsp. mays
EHPNRKTPLLGVHSGRAMARAGVSTAPLSRTHLLPPRPSLLHNTQHHSLLLRPQRKAPATTAAALPPAADLPALSLPAAAAAAAALAAAVSLSDPERRRRSQAEAAGGGDKEAVRAYFNSTGFERWRKIYGSATEGVNRVQLDIREGHAQTVAAALAMLRDSPLELSGATVCDAGCGTGSLAIPLAAAGADVLASDISAAMVSEAQRQAAAQSSSSSFRMPRFEVRDLESLEGRYDVVVCLDVLIHYPREEARAMIRHLASLADKRLLISFAPRTLYFDFLKRVGELFPGPSKATRAYLHAEADIEDALRQAGWRVANRGFISTQFYFAKLFDAVPVGSST

SEQ ID NO: 33751 - protein, 324 aa, Zea mays subsp. mays
MARAGVSTAPLSRTHLLPPRPSLLHNTQHHSLLLRPQRKAPATTAAALPPAADLPALSLPAAAAAAAALAAAVSLSDPERRRRSQAEAAGGGDKEAVRAYFNSTGFERWRKIYGSATEGVNRVQLDIREGHAQTVAAALAMLRDSPLELSGATVCDAGCGTGSLAIPLAAAGADVLASDISAAMVSEAQRQAAAQSSSSSFRMPRFEVRDLESLEGRYDVVVCLDVLIHYPREEARAMIRHLASLADKRLLISFAPRTLYFDFLKRVGELFPGPSKATRAYLHAEADIEDALRQAGWRVANRGFISTQFYFAKLFDAVPVGSST

SEQ ID NO: 33752 - protein, 184 aa, Zea mays subsp. mays
MLRDSPLELSGATVCDAGCGTGSLAIPLAAAGADVLASDISAAMVSEAQRQAAAQSSSSSFRMPRFEVRDLESLEGRYDVVVCLDVLIHYPREEARAMIRHLASLADKRLLISFAPRTLYFDFLKRVGELFPGPSKATRAYLHAEADIEDALRQAGWRVANRGFISTQFYFAKLFDAVPVGSST

SEQ ID NO: 33753 - DNA, 1405 bp, Zea mays subsp. mays
  misc_feature (1034)..(1034): n is a, c, g, or t
  misc_feature (1119)..(1119): n is a, c, g, or t
  misc_feature (1128)..(1128): n is a, c, g, or t
  misc_feature (1153)..(1153): n is a, c, g, or t
  misc_feature (1279)..(1279): n is a, c, g, or t
  misc_feature (1301)..(1301): n is a, c, g, or t
  misc_feature (1334)..(1334): n is a, c, g, or t
  misc_feature (1355)..(1355): n is a, c, g, or t
  misc_feature (1390)..(1390): n is a, c, g, or t
  misc_feature (1401)..(1401): n is a, c, g, or t
gcacgagaccattacctagaacatcctaatcgaaaacttttccaccgaaaaccagcccggccgcccggcagcgaggaggaatccccattccccccctcctcacgcacgctcctcgccatctttagcctggaccccacctcccgtgcctcggccattaaagcgggggaggccgacccgggcgctccctgcctcctcgtcccgtcccgtccctcccagcgccccgttccattccaccgccgaccagatccacccccaacacgtccagccatgccggcgccgccgcatccaacgccgctgctgccaccagcgggggagccgttccgcgtgttcgtggggtacgacccgcgggagcacgaggcgtacgaggtgtgccgccgcagcctgctccggcgctcatcgatcccgcttgacgtgcgcccgatccggcaggcggagctgcgcgccgcggggctgtacacccgggcgcgcggccccacggagagcaccgagttctccttcacgcgcttcctcaccccgtacctggcggggtaccgcggctgggcgctcttcgtcgactgcgacttcctctacctggcggacctggccgacctcctcgccgccgcggccgccgccgaccgcgcggccggcgccggccgcattgccgtagcctgcgtgaagcacgagtaccagcccgccgaggccaccaagatggacggcgccatccagacggtgtacccgcgcgagaactggtcctccatggtgctctacaactgcggccaccccaagaacgtggccgcgctcactccggaggccgtcagcacccagacgggtgccttcctccaccgcttcgcctggctcgacgacgacgagatcggggaggtgcccttcgcctggaacttcctcgtgggccacaaccgggtcgacccggccgacccggacacgcgccccagggccatccactacacctccggcgggccgtggttcgagcgctacagggactgcgagttcgccgacctctggctcaaggaggccgaggagctgagggccgacaaggncaaggaaaaggacaagctcaagctcctcaaggaaatggacgacgccaacggcaagcaggaggtggaggaaaaggcggcgcagganaaggagganaagggcaagtgatggtgatattcanccatggatcggtgatgctgcattgtgtggaagtggattggttccttctgtgctttgctgctatagaggtttcattctttcatctgtcttcgacaccaatgtagcgttccattccatcccatcgatntgttactgctgatgactggganattaggatgattggtaggcctgtatggagtaanaaggaataatttgtagctgcnatcggatcatcatcatcctttaataaggaatgccnaccctatgtgnttcc

SEQ ID NO: 33754 - protein, 379 aa, Zea mays subsp. mays
  misc_feature (345)..(345): Xaa can be any naturally occurring amino acid
  misc_feature (373)..(373): Xaa can be any naturally occurring amino acid
  misc_feature (376)..(376): Xaa can be any naturally occurring amino acid
ARDHYLEHPNRKLFHRKPARPPGSEEESPFPPSSRTLLAIFSLDPTSRASAIKAGEADPGAPCLLVPSRPSQRPVPFHRRPDPPPTRPAMPAPPHPTPLLPPAGEPFRVFVGYDPREHEAYEVCRRSLLRRSSIPLDVRPIRQAELRAAGLYTRARGPTESTEFSFTRFLTPYLAGYRGWALFVDCDFLYLADLADLLAAAAAADRAAGAGRIAVACVKHEYQPAEATKMDGAIQTVYPRENWSSMVLYNCGHPKNVAALTPEAVSTQTGAFLHRFAWLDDDEIGEVPFAWNFLVGHNRVDPADPDTRPRAIHYTSGGPWFERYRDCEFADLWLKEAEELRADKXKEKDKLKLLKEMDDANGKQEVEEKAAQXKEXKGK

SEQ ID NO: 33755 - protein, 290 aa, Zea mays subsp. mays
  misc_feature (256)..(256): Xaa can be any naturally occurring amino acid
  misc_feature (284)..(284): Xaa can be any naturally occurring amino acid
  misc_feature (287)..(287): Xaa can be any naturally occurring amino acid
MPAPPHPTPLLPPAGEPFRVFVGYDPREHEAYEVCRRSLLRRSSIPLDVRPIRQAELRAAGLYTRARGPTESTEFSFTRFLTPYLAGYRGWALFVDCDFLYLADLADLLAAAAAADRAAGAGRIAVACVKHEYQPAEATKMDGAIQTVYPRENWSSMVLYNCGHPKNVAALTPEAVSTQTGAFLHRFAWLDDDEIGEVPFAWNFLVGHNRVDPADPDTRPRAIHYTSGGPWFERYRDCEFADLWLKEAEELRADKXKEKDKLKLLKEMDDANGKQEVEEKAAQXKEXKGK

SEQ ID NO: 33756 - DNA, 2161 bp, Zea mays subsp. mays
  misc_feature (1786)..(1786): n is a, c, g, or t
  misc_feature (1873)..(1873): n is a, c, g, or t
  misc_feature (1914)..(1914): n is a, c, g, or t
  misc_feature (1981)..(1981): n is a, c, g, or t
agaagaggcctccccgctccgcgttccccagcgccagcggtaacccaacccaactcctctgagctgtgacacagctgtcctcctccccccactccaggcgctcacacaccctccacttccctccacaggaatccgccgccataatctcctccgctccgctccactccgcattgcaggattgcgccgagcacgagcaccctcctccccgaagcctcttctttgctctgctttcggtggtatggtgggatgatgagcagggcggcagtgctgctgtgtctcctctgctgcctcgccgccgtcggcgaggcggcgtcagtggtgggcgagggcgaggcggcggagctggccgtgtcggtggacccgtcgtggcggttccctagccagcggctgcgggacgcgtacgtcgcgctgcagacctggaagcagcaggccatcttctccgaccccaggggtttcaccgccgactgggtgggcccgggggtatgcaactacaccggggtcttctgcgcgccgctgccgcgcggggtgccgggcgccggggagctcgccgtcgcgggcctcgacctcaaccacggcgacatcgcgggctacctcccgccggagctcggcctgctcgctgacctctcgctgctccacctcaactccaaccgcttctgcggcctcgtccccgccactctgcgccgcctccagcttctcgtcgagctcgacctcagcaacaaccgcctcgtcggggcattcccggccgtcgtgctggagctcccggcgctcaagttcctcgacctccgcttcaacgacttcgagggcgccatcccgccggagctcttcgaccgcccgctcgacgccatcttcctcaaccacaaccgcctccgctccccgctccccgacaacttcggcaactccccggcctccgttatcgtactcgccgacaacagcttcggcggatgcctcccggccagcctcggcaacatgtccggcacactcaacgagatcctcctcatcaacaacggcctcgactcctgcgtcccgccggaggtcggcttgctccgggaggtgaccgtcttcgacgtcagcttcaactcgctcgtcggcccgctgccgcagcaggtggccgggatgcgcaaggtggagcagctggacgtcgcgcacaaccgcctgtccggggccgtcccggaggccatctgcgccctcccgcggctcaagaacctgaccatctcctacaacttcttcaccggcgagccgccgtcctgcgcgcgcgtcgtgccttcggacggtgacaggaggaactgcctgcccaaccgccccacacagcgcacgccgcagcagtgcgccgcgttctactcgcagccgcccgtcgactgcgccgcgttccagtgcaagccgtttgtccctgttccgccgccgccgccgccatcataccccggcccgttgccaccggtataccctatgccgtacgcatcgcctccgccacctgcgcagtaccgatgattcgtcgaggagggagaagcactatcactttcaccttaattcaccaccaccgctgctgcgctggatgaagacagcaaagtttcaccgtcacaattgtacgtggtcagtcattgttgtgcttagattagtagtgttcttgattgatagctaccggcatatagaagattatattattataaggtgcatatatcgctcttgcttttgcattggtcgttctctgtttttcgcgttgatcggggtttgcgtcacggtgatggtgaaatagatggtcagatggaggtgaaaaggattggaaggaacnatttgagtttggattgattgctaattggctgactgcttgagagagagatcaggatgacgaggaggattggttggtgacttggcgccnccttgggcctcggatgtatagggggaattaagcttaagttnttcagttaagctactgctttcagttgggagcccggagataagttttcagaccaaggaatgtaccccncttaactattctttttgcatttttatgtcacagctacttactgttaatcgattgttatgatatatctgttttgattcttagaaggttttggtcctttgcttgctactcaatgttgtttagttcacatatttgtaacgcaatattcgtttaagtctaaccgtaatcagataccttaccgtg

SEQ ID NO: 33757 - protein, 412 aa, Zea mays subsp. mays
MMSRAAVLLCLLCCLAAVGEAASVVGEGEAAELAVSVDPSWRFPSQRLRDAYVALQTWKQQAIFSDPRGFTADWVGPGVCNYTGVFCAPLPRGVPGAGELAVAGLDLNHGDIAGYLPPELGLLADLSLLHLNSNRFCGLVPATLRRLQLLVELDLSNNRLVGAFPAVVLELPALKFLDLRFNDFEGAIPPELFDRPLDAIFLNHNRLRSPLPDNFGNSPASVIVLADNSFGGCLPASLGNMSGTLNEILLINNGLDSCVPPEVGLLREVTVFDVSFNSLVGPLPQQVAGMRKVEQLDVAHNRLSGAVPEAICALPRLKNLTISYNFFTGEPPSCARVVPSDGDRRNCLPNRPTQRTPQQCAAFYSQPPVDCAAFQCKPFVPVPPPPPPSYPGPLPPVYPMPYASPPPPAQYR

SEQ ID NO: 33758 - protein, 411 aa, Zea mays subsp. mays
MSRAAVLLCLLCCLAAVGEAASVVGEGEAAELAVSVDPSWRFPSQRLRDAYVALQTWKQQAIFSDPRGFTADWVGPGVCNYTGVFCAPLPRGVPGAGELAVAGLDLNHGDIAGYLPPELGLLADLSLLHLNSNRFCGLVPATLRRLQLLVELDLSNNRLVGAFPAVVLELPALKFLDLRFNDFEGAIPPELFDRPLDAIFLNHNRLRSPLPDNFGNSPASVIVLADNSFGGCLPASLGNMSGTLNEILLINNGLDSCVPPEVGLLREVTVFDVSFNSLVGPLPQQVAGMRKVEQLDVAHNRLSGAVPEAICALPRLKNLTISYNFFTGEPPSCARVVPSDGDRRNCLPNRPTQRTPQQCAAFYSQPPVDCAAFQCKPFVPVPPPPPPSYPGPLPPVYPMPYASPPPPAQYR

SEQ ID NO: 33759 - DNA, 1784 bp, Zea mays subsp. mays
gcacgagaccattacctagaacatcctaatcaaaaggaggcccagaagcgtccggaaagacagcgcacgaagcaatctttccctttccccaagatgggattcggcttcgttcgtctcgccgcccgcgccgcggtttctcgccggggcatgacgccagcaacctccgcccgccgcgcgctcgccccacccgccgtgccggcggagccccgctgcgggccccactggctcgtggccgcccgcggccacgtgggccactcgcaccaccgcggcggggaggacgagggcgagacatccgagaggatctttcgtctgggactcgccgctgacgtcgtactcaccgcggggaaggccgtcacaggctatctctccggcagcaccgccatcgccgccgatgccgcccactccctctcggacataggcatggaaagtttgaaagtttaggagctcttggaatttcaagtatgctgttggttacttcagggagttatgtcttctgctcctgatataattggcaatacattgcatgcacaccatgaccatggtagcagtgggcatcatcatggaatagatttggaacatccagttcttgcattgagcatgacaactttagcaatatctatcaaagaagggctatactggataacaaaaagagctggggaaaaggaaggcagtggtctgatgaaagctaatgcatggcaccatcgtgcagatgctatttcatctgtcgttgccctagtaggggtaggtggttccattcttgggttgcctcttcttgatccactagctggacttgttgtctctggcatgattctgaaagctggtattaagactggatatgagagtgttctggaattagttgatgctgctgtggatccttcacttttagaaccaatcaaggaaactattttgagggttcacggtgtgaagggatgtcatcgattgaggggaagaaaagctgggacatcattatatcttgatgtgcatatagaggtatatccttttctgagtgttagtgcagcacatgatatcggtgaaactgttcgtcatcaaattcaaaaggagcacaatcaagttgctgaagttttcatacacatagatccctcgtacttagtaggcccgaccatggacctaaaaaggatcctgaaggactctgatggaacaaattcagaagctatcccacggcaacaaagtgcagaagccatcgtgtctaatattatttcatctcatttttcggagaaaatggcgctcgaacatctaatgctgcattacgtgcaaggaagagtgttgctccaggtccaagtttcaatgtctccagaaattttgattcgggatgcaatggaagtcgcgaagcaagccgaagaggagatactcagggctgatgccagcataagccaaatcagcttgcagctaagattgggccaacaaatcaagcaacttcagctagcatcgcaagaacgtcgctgatctacatgcaggagatcactgatccatttgctggctgcttcatgagtctactcgggagtatttccttttgctaatttttctgacatacatgagcttggtctgctgatgaggcagtaggctataggattctaggaaccgactgtgtacattgtaatcagagtgttcggagacgtgaagctgagtttgtaataatacacaagcagccttgctcagaaatgtactgggcaacaaattgtctgccacatactgtcaatgtaaaatgtatgaacaagttcctcactggccccgctataataacaacgaaccatggctactgatgc

SEQ ID NO: 33760 - protein, 325 aa, Zea mays subsp. mays
MSSAPDIIGNTLHAHHDHGSSGHHHGIDLEHPVLALSMTTLAISIKEGLYWITKRAGEKEGSGLMKANAWHHRADAISSVVALVGVGGSILGLPLLDPLAGLVVSGMILKAGIKTGYESVLELVDAAVDPSLLEPIKETILRVHGVKGCHRLRGRKAGTSLYLDVHIEVYPFLSVSAAHDIGETVRHQIQKEHNQVAEVFIHIDPSYLVGPTMDLKRILKDSDGTNSEAIPRQQSAEAIVSNIISSHFSEKMALEHLMLHYVQGRVLLQVQVSMSPEILIRDAMEVAKQAEEEILRADASISQISLQLRLGQQIKQLQLASQERR

SEQ ID NO: 33761 - protein, 288 aa, Zea mays subsp. mays
MTTLAISIKEGLYWITKRAGEKEGSGLMKANAWHHRADAISSVVALVGVGGSILGLPLLDPLAGLVVSGMILKAGIKTGYESVLELVDAAVDPSLLEPIKETILRVHGVKGCHRLRGRKAGTSLYLDVHIEVYPFLSVSAAHDIGETVRHQIQKEHNQVAEVFIHIDPSYLVGPTMDLKRILKDSDGTNSEAIPRQQSAEAIVSNIISSHFSEKMALEHLMLHYVQGRVLLQVQVSMSPEILIRDAMEVAKQAEEEILRADASISQISLQLRLGQQIKQLQLASQERR

SEQ ID NO: 33762 - protein, 261 aa, Zea mays subsp. mays
MKANAWHHRADAISSVVALVGVGGSILGLPLLDPLAGLVVSGMILKAGIKTGYESVLELVDAAVDPSLLEPIKETILRVHGVKGCHRLRGRKAGTSLYLDVHIEVYPFLSVSAAHDIGETVRHQIQKEHNQVAEVFIHIDPSYLVGPTMDLKRILKDSDGTNSEAIPRQQSAEAIVSNIISSHFSEKMALEHLMLHYVQGRVLLQVQVSMSPEILIRDAMEVAKQAEEEILRADASISQISLQLRLGQQIKQLQLASQERR

SEQ ID NO: 33763 - DNA, 992 bp, Zea mays subsp. mays
gcacgagaccattacctagaacatcctaatcgaaaactccccgcgtgctctctatctctcccctctttctctccctctgcccgacgactaggccgccgccgccacggccccgccgccgccgccgtgcccaggtctttgtcggtccttgtccggcaacgagcaccctacagatggctgggaggcacaccattattctgatgcagccatctcaaaatagggcttctagaacatttatggattacaattcgattaatcatgcattggatggaatctgtgggctttatgaaaggaaaattagggatatcaacccaatgatcccaaacataacttatgacatcagcgacctctataacttcattgatggcctagccgacattagtgcgctggtttatgatcactcgattcaggcattcctgccatatgatcgacagtggataaagcaaaagttatgtttgggatcattgggttgatatccccagttttccttccaagacgaggagtttgccctcacttaaaagattcctttgttgcatccagattttacctactgtgaattgtaaatccgtgtacagtaagtggtgtcaagatgagccatcgaagtttgttcacatgcccccttctgcaaaatagggcgcaacacacctttcgggtacatttttcaccttggcaccatttccatcagaaaatgagaagattggtgttgcaaaagctgatgcctgcttattgataattcttgggatggaagaccgccatggtggccggcaaggctctgggttgcaaaaccctccatacttttggttttagttaggatagatataggtgcagcattgaatgctctgaatgctaggtttctggctaggggtttaccatgttctttttacttctttattacatttgctgtaaggaaatcgtacatatagcggtagtttttttttcaaacaagcactgtttgttttttgtcaaacaatatacgttcaatgtattgtattgct

SEQ ID NO: 33764 - protein, 99 aa, Zea mays subsp. mays
MAGRHTIILMQPSQNRASRTFMDYNSINHALDGICGLYERKIRDINPMIPNITYDISDLYNFIDGLADISALVYDHSIQAFLPYDRQWIKQKLCLGSLG

SEQ ID NO: 33765 - protein, 90 aa, Zea mays subsp. mays
MQPSQNRASRTFMDYNSINHALDGICGLYERKIRDINPMIPNITYDISDLYNFIDGLADISALVYDHSIQAFLPYDRQWIKQKLCLGSLG

SEQ ID NO: 33766 - protein, 78 aa, Zea mays subsp. mays
MDYNSINHALDGICGLYERKIRDINPMIPNITYDISDLYNFIDGLADISALVYDHSIQAFLPYDRQWIKQKLCLGSLG

SEQ ID NO: 33767 - DNA, 1256 bp, Zea mays subsp. mays
gtccagactgacctctcaaatcaaatcggcaccgggcggcctcctccctccctcccgaccccgaccccgaccccgaccccgactgccaaaccctaatacacggcggtgaccttgcggcctccgttccgctgcgctccgtctgagttgctgatctgggataatcttgttctctttgagtgaaccaagatgtccgggaatgatgataagccacatgctgctgcggacagaataaaggcagccacattatcagtggccaagggtttgagcagggctcaagctgaacgagctgcggctgctgctgcccgcaatgtcaatgcctatgggcaaaaggaagagggaccaagccgctggcaggagaggaaggaagccaagagacagatgtatttgatgagtacagagaaggctgcgaagctgggcactgtgaagctaaaagcttcagaaactagttccgttggcgcgtatacccaatgccagaagtgtttccagcatggtcactggacgtatgagtgcaaaaatgagcgggtgtacatatcacggccctcaagaacgcagcagcttaagaaccctaagctgaagaaaagcgtaccggtttcttatcaattcgagaatcctgatattataagggagagggaagaggagctgaagttgatgaaagaaaaacagaagaaggagaaggccgaaagaaaaaagggaaagagtaagaggaagcatcgatcgccgagtgattcagatagcaacagtagtggtgcttcggtgttcgactctgaatcatcagtgacaggctctgaatactcttctggaagcagttcaagttatagttcatcagactcggaggacaagaagcggcaacacagaaggaagcagaagaagagaaggcacaggagggacagcacatcatcatcatcatcttcttctgaatctgagtctgcgtcagacacagacagtgattctgatgacaagggcagacggaggaagagtaaaagacgggctggtaggcgctgaatttaatgatctggacaaagcagtgtggaagttgaatatcattatatacttccgttctattcatgaatgacctttcatcatcatctgaacatgtgccggccttctcggatccaagaaacagatttagcatttgctttcctgaacggtagcactgataattttcactgtatgttcctatgatctttgtgtgaaccattgaatcctgtatcaatattcacctatggatttttcaagtttggtgtggttcatcgtcc

SEQ ID NO: 33768 - protein, 271 aa, Zea mays subsp. mays
MSGNDDKPHAAADRIKAATLSVAKGLSRAQAERAAAAAARNVNAYGQKEEGPSRWQERKEAKRQMYLMSTEKAAKLGTVKLKASETSSVGAYTQCQKCFQHGHWTYECKNERVYISRPSRTQQLKNPKLKKSVPVSYQFENPDIIREREEELKLMKEKQKKEKAERKKGKSKRKHRSPSDSDSNSSGASVFDSESSVTGSEYSSGSSSSYSSSDSEDKKRQHRRKQKKRRHRRDSTSSSSSSSESESASDTDSDSDDKGRRRKSKRRAGRR

SEQ ID NO: 33769 - protein, 207 aa, Zea mays subsp. mays
MYLMSTEKAAKLGTVKLKASETSSVGAYTQCQKCFQHGHWTYECKNERVYISRPSRTQQLKNPKLKKSVPVSYQFENPDIIREREEELKLMKEKQKKEKAERKKGKSKRKHRSPSDSDSNSSGASVFDSESSVTGSEYSSGSSSSYSSSDSEDKKRQHRRKQKKRRHRRDSTSSSSSSSESESASDTDSDSDDKGRRRKSKRRAGRR

SEQ ID NO: 33770 - protein, 204 aa, Zea mays subsp. mays
MSTEKAAKLGTVKLKASETSSVGAYTQCQKCFQHGHWTYECKNERVYISRPSRTQQLKNPKLKKSVPVSYQFENPDIIREREEELKLMKEKQKKEKAERKKGKSKRKHRSPSDSDSNSSGASVFDSESSVTGSEYSSGSSSSYSSSDSEDKKRQHRRKQKKRRHRRDSTSSSSSSSESESASDTDSDSDDKGRRRKSKRRAGRR

SEQ ID NO: 33771 - DNA, 1201 bp, Zea mays subsp. mays
gcacgagaccattacctagaacatcctaatcgaaaagaaaaagaaaattagaaaaccgcagccaatccagccgaggctgcaaaaaatcttggaagccgcgggagcgagagccatggaggacatcggcgagggccccgccgagaaccttccggagcccctgtctccagccgtggaggccgaggacgaggacggcgacgagttcagcttccccgttcctccggtcgccgccgacgcgtgcatcgtgcccgtgtacccgatcttcggccggcccccgtccccgcctcggggggaggaggaggagccggagacggccaccgtgcgggtgccgctgggccggctcctgctggaggagcgggagttccgcgcgcgggagccggacgggcgatcggcgagtgcgcaggcgtggcaggacgaggacgaggacgacgcctcgggcggcgccggggacgaggatctgcagggtgtgccggcggagagctactgcctgtgggcgcccggcgggcagtcgccggcgcccgcgtccccgcgccggtgccggaagagcggctccacgggctccgtcctccgctggcgccgcatcagcgaccgcctcgtcggccgcagccacagcgacggcaaggagaagttcgtgttcctcaccgccgttccggatccgcttcgtcctagtaggagtaacaaggaagtggatgaaggaggcggcgacggcgaggcaggcagcgtggcgcatcagctgagatattacggtagaggccgcggcggcggcggcggcagccggaggcgttcgtacctgccgtacaagcaagagctcgtcgggctgttcgccaacgtcagtgggctgcgccggagctaccacccgttctaaaacgcgatctgtccatgccttccgacctccgtcagtgggccaaaaagtaaaaaaaaaagatgatatcttgctcgtttttctgtggataatactgcctatagtactgtgcactgtttttttacagtacggcggaagcagtagatctgcgtattttctctctaagttatcggcttggataaaatagggttttagtttttaattaaaaaaatagcagaacctcagcaaggggaaaagaggtaacgtagcgtgtgtactgctgctactcatttgttcacatacttgacttcacttgagaaaaataacctgaggtttccttaatatacatacgccatgcagtgc

SEQ ID NO: 33772 - protein, 249 aa, Zea mays subsp. mays
MEDIGEGPAENLPEPLSPAVEAEDEDGDEFSFPVPPVAADACIVPVYPIFGRPPSPPRGEEEEPETATVRVPLGRLLLEEREFRAREPDGRSASAQAWQDEDEDDASGGAGDEDLQGVPAESYCLWAPGGQSPAPASPRRCRKSGSTGSVLRWRRISDRLVGRSHSDGKEKFVFLTAVPDPLRPSRSNKEVDEGGGDGEAGSVAHQLRYYGRGRGGGGGSRRRSYLPYKQELVGLFANVSGLRRSYHPF

SEQ ID NO: 33773 - DNA, 1486 bp, Zea mays subsp. mays
agaaataggcgcgcgtgccgcctcggccgctcgctcctctggttaatcccccctcgccacgactcgcagccatcccttcacattatccgcgcgcgcgcgagcgagcggacgtagcgtgtgggtagcgtcgccgtgcggacggtctcttggtgccggtgcgggccgcgtgacggtgcgtgtgccgcccgcggggaggaggtcgttcggttggttggccctcggcgacgatggcggtccacggcggagaggcggtctccgtcgcgctcctcttctccctcgctttcttctgcgctcgcctcctgctcgaccgcctcgtctacaagccattagcagtctaccttttcaacaccaaagcttctaagttgatgaataatgaggccaggcaagcaaagattgtcaagttctcagagtccatttggaaacttacctactatgcttctgttcaagcatgggtcctcatgataataaagcaggaaccatggtcattggatatgatgcaatactttgatggctggccgaaccaacccatcgtgtcttcattgatgcttttctatatgtgccagtgtggattttatatctatagcatcggtgctcttgttgcttgggaaacccgcagaaaagattttgctgtaatgatgtctcatcatgtaataacatctactctaattggagtttcatatctgactggatttttccgaattgggaccatcattctcgctcttcatgatgcaagtgatgtgtttcttgagactgccaaattgtgcaaatacacagaaaaagagctgggtgctagcttgttttttggtctcttcgctatctcctggcttctattgcgtctgatttacttcccattttggataatcaaagcctctagctatcattccatcacattcttgaggaagctggatgaattcccaacaactttgtactacatcttgaacacaatgcttctcacattgcttgtattccatatgtactggtggaaactcatatgtttgatgataatgagacagctgaataataaaggacaagttacagacgatgtccgatctgattctgaggatgaggagtgatgggagattcattctttgacatctgcaacgtggcatttcctcgtcaatacttttctatgcctgcttccagaattgattgcttttaatcttggcaagtctcgggaacgtataggaaagtttaatctctgtatattgccttatgatatcaaacatggctagaccgggaatggatctatacatgatgacgggcatagctagcaagcttacttcaaggttccttaaaaaattttggttcacctttatttgatatggggaaagacatgagagggtgtacagctttttcctgaagcttgcagaacccccctctgtaccatgatcaatatacttcacttgtgagtagatttagttctaattgatgataataaattgattcttttgattgggaatgaatctcacctgaaccttgatgatct

SEQ ID NO: 33774 - protein, 281 aa, Zea mays subsp. mays
MAVHGGEAVSVALLFSLAFFCARLLLDRLVYKPLAVYLFNTKASKLMNNEARQAKIVKFSESIWKLTYYASVQAWVLMIIKQEPWSLDMMQYFDGWPNQPIVSSLMLFYMCQCGFYIYSIGALVAWETRRKDFAVMMSHHVITSTLIGVSYLTGFFRIGTIILALHDASDVFLETAKLCKYTEKELGASLFFGLFAISWLLLRLIYFPFWIIKASSYHSITFLRKLDEFPTTLYYILNTMLLTLLVFHMYWWKLICLMIMRQLNNKGQVTDDVRSDSEDEE

SEQ ID NO: 33775 - protein, 235 aa, Zea mays subsp. mays
MNNEARQAKIVKFSESIWKLTYYASVQAWVLMIIKQEPWSLDMMQYFDGWPNQPIVSSLMLFYMCQCGFYIYSIGALVAWETRRKDFAVMMSHHVITSTLIGVSYLTGFFRIGTIILALHDASDVFLETAKLCKYTEKELGASLFFGLFAISWLLLRLIYFPFWIIKASSYHSITFLRKLDEFPTTLYYILNTMLLTLLVFHMYWWKLICLMIMRQLNNKGQVTDDVRSDSEDEE

SEQ ID NO: 33776 - protein, 204 aa, Zea mays subsp. mays
MIIKQEPWSLDMMQYFDGWPNQPIVSSLMLFYMCQCGFYIYSIGALVAWETRRKDFAVMMSHHVITSTLIGVSYLTGFFRIGTIILALHDASDVFLETAKLCKYTEKELGASLFFGLFAISWLLLRLIYFPFWIIKASSYHSITFLRKLDEFPTTLYYILNTMLLTLLVFHMYWWKLICLMIMRQLNNKGQVTDDVRSDSEDEE

SEQ ID NO: 33777 - DNA, 1378 bp, Zea mays subsp. mays
aaaacacccacttcacctccgaccacttcacctccgatcccgccaccactacccaccctttcctttgacgtcccgatggcacctgtagatctaacccccaagcagcccaggaaggcctacggcggcgacggcggcgcctactacgagtggagccccgccgacctgcccatgctcggcgtcgcctccatcggcgcagccaagctctcgctcgccgccggcgggctcgcgctccccagctactccgactcagccaaggtcgcctacgtcctccaaggcacgggcacctgcggcatcgtcctcccagaggcgacgaaggagaaggtggtggccgtgaaggagggcgacgcgctggcgctgcccttcggcgtggtgacgtggtggcacaacggccccgccgcgccgaccccgctcacggtgctcttcctcggcgacacctccaagggccacaggccggggcaattcaccaacttccagctgacgggcgcgaccggcatcttcacgggcttctccaccgagttcgtgtcgcgcgcgtgggaccttccggaggcggacgcggcggcgctggtgtcgagccagccggcctcgggcatcgtccgggcgtcctcgtccccgctgccggcgccgtcgccgcgggaccgcgagggggtggcgctcaactgcctggaggcgccgctggacgtggacatcccgggcgggggccgcgtcgtggtgctcaacacggccaacctgccgctggtcaaggaggtcgggctgggcgccgacctggtccgcatcgacgcccactccatgtgctccccgggcttctcgtgcgactcggcgtaccaggtcacctacatcgtccgcggcagcggccgcgtccaggtggtcgggcccgacggggtgcgcgtcctggagacgcgcgtcgagggcggcttcctcttcatcgtgccccgcttccacgtcgtctccaagatcgccgacgcgtccggcatggagtggttctccatcatcaccacccccaacccgatcttcagccacctggccgggaagacgtcggtgtggaaggccatctcggcggaggtgctgcaggcgtcgttcaacaccacgccggagatggagaagctgttccggtccaagaggctcgactcggagatcttcttcgctcccccatccaactgagaaaataggccggaagccccacggtggagtcctctcgttaggtcgtcgtgcttagattaggttagctagcttgcctttaataaaaagagagtggtggtcgtcggcgtcggcttcggcggtctgcttcttcttcattcagtgcgtcggtcggtttagagtctgtcacgtgtcccgtcattgaactgcagtttttgttaataaagtattgttattattaggt

SEQ ID NO: 33778 - protein, 385 aa, Zea mays subsp. mays
KTPTSPPTTSPPIPPPLPTLSFDVPMAPVDLTPKQPRKAYGGDGGAYYEWSPADLPMLGVASIGAAKLSLAAGGLALPSYSDSAKVAYVLQGTGTCGIVLPEATKEKVVAVKEGDALALPFGVVTWWHNGPAAPTPLTVLFLGDTSKGHRPGQFTNFQLTGATGIFTGFSTEFVSRAWDLPEADAAALVSSQPASGIVRASSSPLPAPSPRDREGVALNCLEAPLDVDIPGGGRVVVLNTANLPLVKEVGLGADLVRIDAHSMCSPGFSCDSAYQVTYIVRGSGRVQVVGPDGVRVLETRVEGGFLFIVPRFHVVSKIADASGMEWFSIITTPNPIFSHLAGKTSVWKAISAEVLQASFNTTPEMEKLFRSKRLDSEIFFAPPSN

SEQ ID NO: 33779 - protein, 360 aa, Zea mays subsp. mays
MAPVDLTPKQPRKAYGGDGGAYYEWSPADLPMLGVASIGAAKLSLAAGGLALPSYSDSAKVAYVLQGTGTCGIVLPEATKEKVVAVKEGDALALPFGVVTWWHNGPAAPTPLTVLFLGDTSKGHRPGQFTNFQLTGATGIFTGFSTEFVSRAWDLPEADAAALVSSQPASGIVRASSSPLPAPSPRDREGVALNCLEAPLDVDIPGGGRVVVLNTANLPLVKEVGLGADLVRIDAHSMCSPGFSCDSAYQVTYIVRGSGRVQVVGPDGVRVLETRVEGGFLFIVPRFHVVSKIADASGMEWFSIITTPNPIFSHLAGKTSVWKAISAEVLQASFNTTPEMEKLFRSKRLDSEIFFAPPSN

SEQ ID NO: 33780 - protein, 329 aa, Zea mays subsp. mays
MLGVASIGAAKLSLAAGGLALPSYSDSAKVAYVLQGTGTCGIVLPEATKEKVVAVKEGDALALPFGVVTWWHNGPAAPTPLTVLFLGDTSKGHRPGQFTNFQLTGATGIFTGFSTEFVSRAWDLPEADAAALVSSQPASGIVRASSSPLPAPSPRDREGVALNCLEAPLDVDIPGGGRVVVLNTANLPLVKEVGLGADLVRIDAHSMCSPGFSCDSAYQVTYIVRGSGRVQVVGPDGVRVLETRVEGGFLFIVPRFHVVSKIADASGMEWFSIITTPNPIFSHLAGKTSVWKAISAEVLQASFNTTPEMEKLFRSKRLDSEIFFAPPSN

SEQ ID NO: 33781 - DNA, 1658 bp, Zea mays subsp. mays
atcaaacgcccacgcagcgccggggatggagcgcggccggcaccagatgagagctgcctcccacacatggcatcgtggccagcagcgtcaaggaggcggtccagcggcggcatgaaaagcgccgagctttcgggctccggtgcttcttacggctatggccggacgtcctcctcccctgatgcctgcggctacggccggcagctctcggcctacagcgcccgctcctcccaggtcagcaggagtggctccttcagtgcggcggcgcagcgggtcgccggcgccttcaccggctgcttcgtgccgcgccggcaggtcaaagccggggaagaggaggaggaggaggagaagaagagcaagcgctccatggattcaggatcctatcatggatggaatgaagcaaacttgagtgcagcagcaggatcatggcaggaaggcagggctctcaccatcgctgacgtgtcgaaggcaacatcaaacttcagcgaaaagaacgtgataaggcagggacgctcaagcaccatgtacagaggaaagctcagggatggttctcagatcgccgtcaaatgtgtcacgaagctgaacgaccagagtccgacggctgaactctggagggagcttgagaagatccagcacaggaatctggcgaggctctttggattcttcgaacgcgcagctgatagtctcgtcgtagtcgagtatgtcggcaatggttccttgagggaacatttggatgaatcatgtggaaatggtttagagctcgcgcaacggctcaacatcgcgatcgacgttgctcaggccatcacctacctgcacgagtacaaagagcgtccgatcatccatggcggcatccggtcgtcgggcgtgctactgaccgacgcgctgacggcgaaggtggccggctttgggctggccgggactgcggcctcggggtcgggctcaggctccgacgcaacgccggcgaggagcgccgccgggtacgtggacccggagtacctgagcacgtaccagctgaccgacaagagcgacgtgtacgccttcggcgtcctcctcgtcgagctagccaccggccggccgcccgtcgagcgcacccgcggcggcgaggcccggctcaccaccaaatgggcgttgcagaggtgcagagcaggggaagccgtggtggccatggaccccaggatgcggcggagcccggcgtcggtggccgccgtggagagggcgctggcgctggcagcgcagagcgtcgcggcggccagggatgagcggccgtccatgcggcggtgcagcgagctgctgtggaccatccggagagactaccaccgccaggaggagccgcgctgcggcgccgtcgctgaggaacgtagcgacgagtgggtcatcaggtagcttagcttgccagttgaatggatatgattctgctttggattgatcggcatggaactgtaactagcctgtaagtggatgcgaagttctaggaagctgcagattttttttagcacgtacaacttctgtgattactatcaaatgatgtagtcattgcagccaatacctgcgaatttctagaaaacagtagacgttgtaaacaatcagacgactttgctgaagtagccacttgatccctcaatcaaatataaataaccatcgaaggatgaggatgttgatgc

SEQ ID NO: 33782 - protein, 459 aa, Zea mays subsp. mays
IKRPRSAGDGARPAPDESCLPHMASWPAASRRRSSGGMKSAELSGSGASYGYGRTSSSPDACGYGRQLSAYSARSSQVSRSGSFSAAAQRVAGAFTGCFVPRRQVKAGEEEEEEEKKSKRSMDSGSYHGWNEANLSAAAGSWQEGRALTIADVSKATSNFSEKNVIRQGRSSTMYRGKLRDGSQIAVKCVTKLNDQSPTAELWRELEKIQHRNLARLFGFFERAADSLVVVEYVGNGSLREHLDESCGNGLELAQRLNIAIDVAQAITYLHEYKERPIIHGGIRSSGVLLTDALTAKVAGFGLAGTAASGSGSGSDATPARSAAGYVDPEYLSTYQLTDKSDVYAFGVLLVELATGRPPVERTRGGEARLTTKWALQRCRAGEAVVAMDPRMRRSPASVAAVERALALAAQSVAAARDERPSMRRCSELLWTIRRDYHRQEEPRCGAVAEERSDEWVIR

SEQ ID NO: 33783 - protein, 437 aa, Zea mays subsp. mays
MASWPAASRRRSSGGMKSAELSGSGASYGYGRTSSSPDACGYGRQLSAYSARSSQVSRSGSFSAAAQRVAGAFTGCFVPRRQVKAGEEEEEEEKKSKRSMDSGSYHGWNEANLSAAAGSWQEGRALTIADVSKATSNFSEKNVIRQGRSSTMYRGKLRDGSQIAVKCVTKLNDQSPTAELWRELEKIQHRNLARLFGFFERAADSLVVVEYVGNGSLREHLDESCGNGLELAQRLNIAIDVAQAITYLHEYKERPIIHGGIRSSGVLLTDALTAKVAGFGLAGTAASGSGSGSDATPARSAAGYVDPEYLSTYQLTDKSDVYAFGVLLVELATGRPPVERTRGGEARLTTKWALQRCRAGEAVVAMDPRMRRSPASVAAVERALALAAQSVAAARDERPSMRRCSELLWTIRRDYHRQEEPRCGAVAEERSDEWVIR

SEQ ID NO: 33784 - protein, 422 aa, Zea mays subsp. mays
MKSAELSGSGASYGYGRTSSSPDACGYGRQLSAYSARSSQVSRSGSFSAAAQRVAGAFTGCFVPRRQVKAGEEEEEEEKKSKRSMDSGSYHGWNEANLSAAAGSWQEGRALTIADVSKATSNFSEKNVIRQGRSSTMYRGKLRDGSQIAVKCVTKLNDQSPTAELWRELEKIQHRNLARLFGFFERAADSLVVVEYVGNGSLREHLDESCGNGLELAQRLNIAIDVAQAITYLHEYKERPIIHGGIRSSGVLLTDALTAKVAGFGLAGTAASGSGSGSDATPARSAAGYVDPEYLSTYQLTDKSDVYAFGVLLVELATGRPPVERTRGGEARLTTKWALQRCRAGEAVVAMDPRMRRSPASVAAVERALALAAQSVAAARDERPSMRRCSELLWTIRRDYHRQEEPRCGAVAEERSDEWVIR

SEQ ID NO: 33785 - DNA, 1097 bp, Zea mays subsp. mays
gcacgagaccattacctagaacatcctaatcgaaaaacagcgagtaccgagtaggagcaaccgcttgcgtcagacgcacactgacggagagtgatcactgatttctggtcatggcaaccgtaactgaggaagttgctccggtcgtcaccgtctccgaggagccggcgccggaagcggcgaaggaggtggtggagaagccggaggaggggaagaagcccgacgaggagggtgacgagaggaagaaggccgaccccgccgccgagaaggagaagaaggcgaggaagccgcggagcaggaagcccaagtccgccgggctgcaccacccgccctatttcgagatgatcaaggaggcgatcctgtcgcaggacggcgggaaggtcggggcgagcccgtacgcgatcgccaagcacatgggggagaagcaccgggacgtgctcccgcccaattaccgcaaggtgctggcagtgcagctgcgcggcttcgccgccaagggccgcctcgtcaaggtcaaggcttccttcaagctcgccgccgccgaggagaggaagccctccgcggccgcgaaggcgaagaagaaggcgtcggcgggaatggccaagcgcaagagggccgccgcgccggccaagaagaagccggcggccgctgcctcggcgccgtcgagggaggcacgtaaggtgcgcgcgaagcgagcgaggaaggtggccccggcgcccgcgcagcccaagcccaagccagcccgcgccgccgcttccggtgccggcaagaaggtcaacaaggccagcgcctgattagcggcggccgtcctggtccccccgcgcgcgcctccgtgtattatactagccggtagtagcagtaggagttgcaagtactagcagcgtggtagtcgtgatgatgttgtggtcgtcgtctccgccggcccgatcgatcgggcgctctgttccgccgtgtggcagagttttgtaaataactagtctggtgtgatgcgctcatggcaataaagcgcgcgcttctagcttccttgatgaaacatccatgatccattatcagtgcagtcttgtggttatcgtgttggttagttcgatcactggaactggctc

SEQ ID NO: 33786 - protein, 225 aa, Zea mays subsp. mays
MATVTEEVAPVVTVSEEPAPEAAKEVVEKPEEGKKPDEEGDERKKADPAAEKEKKARKPRSRKPKSAGLHHPPYFEMIKEAILSQDGGKVGASPYAIAKHMGEKHRDVLPPNYRKVLAVQLRGFAAKGRLVKVKASFKLAAAEERKPSAAAKAKKKASAGMAKRKRAAAPAKKKPAAAASAPSREARKVRAKRARKVAPAPAQPKPKPARAAASGAGKKVNKASA

SEQ ID NO: 33787 - protein, 149 aa, Zea mays subsp. mays
MIKEAILSQDGGKVGASPYAIAKHMGEKHRDVLPPNYRKVLAVQLRGFAAKGRLVKVKASFKLAAAEERKPSAAAKAKKKASAGMAKRKRAAAPAKKKPAAAASAPSREARKVRAKRARKVAPAPAQPKPKPARAAASGAGKKVNKASA

SEQ ID NO: 33788 - protein, 125 aa, Zea mays subsp. mays
MGEKHRDVLPPNYRKVLAVQLRGFAAKGRLVKVKASFKLAAAEERKPSAAAKAKKKASAGMAKRKRAAAPAKKKPAAAASAPSREARKVRAKRARKVAPAPAQPKPKPARAAASGAGKKVNKASA

SEQ ID NO: 33789 - DNA, 1406 bp, Zea mays subsp. mays
aaaccaaactctccgcgcgcgcaggcggccgccctcggattgggctcccctcccctcccctcccgctcactcgccactcgccaccgctcgccgcccacgcgcatggcgtcctcgctcgtctcgcgcccgcacctcacccagcgcccggtccgcgccgccacgctcgcctccgctacccgcccccgcctcgcggccggggcccttagcgggcgctgccaggcgcaggcggcgggggacttggacgacgctcactacatgcggcggtgcgtggagctggcgcgcaaggcggccgggccacaccagccccaaccctatggtgggctgcgtcatcgtccgcgacggccgcgtcgtcggagaaggattccaccccaaggccggccaacctcatgccgaggtatttgcactaagagatgcaggtaatctagctgaaaatgcgacggcctatgttagcttggagccctgcaaccactacgggagaacccctccgtgtactgaagcgctcataaatgcaaaagtgaaggaagttgtcgtggggatgactgacccaaatcctatcgtggcatccaaagggattgagaagctccaaggtgctgggataagtgtgagggtgggtgtggaggaagcgttatgccgcaaactaaacgaggcttatatccatcgtatgctcaccgggaaggcttttgcaactctgagagctacactctcaatgaatggaatcatcacgaaccagattgggaagggagctgatcagtcaggtgggtactactcgcagctgatgaaagaatacgacggagtcataatttcaagcgacctggccaagatgtcggccttacctttgtcgcgtgaagccggcacaaaccaacctctctgtatcatcatagcacagggtgaaagctcccggctacacatcccatctctcagccaagagcatgcatccagggccatagtccttgccgatagtccggtcactgtggagccagcaggagtggaagttgcagtttttcgtcagatagacctggagtctattctccagcttcttgcgcagcgagggctctgcagcgtgctggtggacttcagagaggccggcgaaagcttcgcgtcgcttctgaacgacttccaggaggacaagctggtgcagaaggtcgtcgttgaggtcctgcccttttggctcgcgagcgacgggctcagcaacctggcatttggtggcagccaatcgttcccgttgaagaacttggagctcagggatgtgaatgggagtgtgctgctggaaggctatgtgtaatagcctctcttctgtcggagattggcattgtttgttttccctcgtgtaaacagatagccctgtaatatacttgcagagccgcccacgagccatgtggggttttgcttttttatatatatagttg

SEQ ID NO: 33790 - protein, 426 aa, Zea mays subsp. mays
NQTLRARRRPPSDWAPLPSPPAHSPLATARRPRAWRPRSSRARTSPSARSAPPRSPPLPAPASRPGPLAGAARRRRRGTWTTLTTCGGAWSWRARRPGHTSPNPMVGCVIVRDGRVVGEGFHPKAGQPHAEVFALRDAGNLAENATAYVSLEPCNHYGRTPPCTEALINAKVKEVVVGMTDPNPIVASKGIEKLQGAGISVRVGVEEALCRKLNEAYIHRMLTGKAFATLRATLSMNGIITNQIGKGADQSGGYYSQLMKEYDGVIISSDLAKMSALPLSREAGTNQPLCIIIAQGESSRLHIPSLSQEHASRAIVLADSPVTVEPAGVEVAVFRQIDLESILQLLAQRGLCSVLVDFREAGESFASLLNDFQEDKLVQKVVVEVLPFWLASDGLSNLAFGGSQSFPLKNLELRDVNGSVLLEGYV

SEQ ID NO: 33791 - protein, 322 aa, Zea mays subsp. mays
MVGCVIVRDGRVVGEGFHPKAGQPHAEVFALRDAGNLAENATAYVSLEPCNHYGRTPPCTEALINAKVKEVVVGMTDPNPIVASKGIEKLQGAGISVRVGVEEALCRKLNEAYIHRMLTGKAFATLRATLSMNGIITNQIGKGADQSGGYYSQLMKEYDGVIISSDLAKMSALPLSREAGTNQPLCIIIAQGESSRLHIPSLSQEHASRAIVLADSPVTVEPAGVEVAVFRQIDLESILQLLAQRGLCSVLVDFREAGESFASLLNDFQEDKLVQKVVVEVLPFWLASDGLSNLAFGGSQSFPLKNLELRDVNGSVLLEGYV

SEQ ID NO: 33792 - protein, 248 aa, Zea mays subsp. mays
MTDPNPIVASKGIEKLQGAGISVRVGVEEALCRKLNEAYIHRMLTGKAFATLRATLSMNGIITNQIGKGADQSGGYYSQLMKEYDGVIISSDLAKMSALPLSREAGTNQPLCIIIAQGESSRLHIPSLSQEHASRAIVLADSPVTVEPAGVEVAVFRQIDLESILQLLAQRGLCSVLVDFREAGESFASLLNDFQEDKLVQKVVVEVLPFWLASDGLSNLAFGGSQSFPLKNLELRDVNGSVLLEGYV

SEQ ID NO: 33793 - DNA, 1302 bp, Zea mays subsp. mays
aacacctgcctgccttttgtcctctatcccgcgctgcgcagaagcagctggagagcatggtgaaggaggcgtcggtggacgacgtgatgaaggtgctgatggcgtcgcgcaagttcgagatgcaggagctgtgggccacctgctcccacctggtggcgcgctcgggcctctccgccgacctgctcgccaagcacctccccatcgacgtggtggccaagatctaggagatccgcgccaagtcccccgtccccgccggcgcgccgcgctcgccgttcctcacccaccactacctccccatcaacgcggcgtcgtcggccgccgaccgcgaccacaagatccggcgcatgcggcgcgcgctcgacgccgccgacatcgagctcgtcaagctcatggttgggcgaggggctggacctcgacgacgcgctcgccgtgcactacgccgtccagcactgcggccgcgacgtcgtcaaggcgctgctggagctcggcgccgccgacgtcaactcccgcgccggccccacggggaagaccgcgctgcacctggccgccgagatggtctcccccgatatggtgtccgtgctgcttgaccaccacgccgaccccagcgccaggacgctcgacggcgtcaccccgctcgacgtgctccgaggcctcacatcagagttcctgttcaagggcgccgtgccggggctcacgcacatcgagcccaacaagctcaggctctgccttgagctcgtgcagtccgcggtgatggtgaccacgcgcgacgtcgacgccgccggcgacgacgccgggggaagcgacggcggcggcggcggcaacttccccaggagcgacgccgacgacagcttggtgagcctgacgatgaactccacgctcatgtaccagggccaggagatggcggctgccgcggtggccgccggtgaggcgaggaaagggaacggcggcggccgagggagcccgtccaacttgtacttccccaatggcggcttcccataagtattatattgtgcccttcccttctataatccatcgtcaagatgatctttcttcttcttcttctgttggattggatctttgtgagaccatggtgtagctagctactagtactatttattttgagtaggagacatgcatgcgcgagagcaagaatttcatggtatttgatgtggattgttcgatcgacgactgtgggagacaaagcaactgttgctttgttcaaatgcttcactgtgatgaatctttgtaatgtggcttcaacaatagtagtccaataacactaccaatttagagctagcttgc

SEQ ID NO: 33794 - protein, 249 aa, Zea mays subsp. mays
TPACLLSSIPRCAEAAGEHGEGGVGGRRDEGADGVAQVRDAGAVGHLLPPGGALGPLRRPARQAPPHRRGGQDLGDPRQVPRPRRRAALAVPHPPLPPHQRGVVGRRPRPQDPAHAARARRRRHRARQAHGWARGWTSTTRSPCTTPSSTAAATSSRRCWSSAPPTSTPAPAPRGRPRCTWPPRWSPPIWCPCCLTTTPTPAPGRSTASPRSTCSEASHQSSCSRAPCRGSRTSSPTSSGSALSSCSPR

SEQ ID NO: 33795 - protein, 148 aa, Zea mays subsp. mays
MVSPDMVSVLLDHHADPSARTLDGVTPLDVLRGLTSEFLFKGAVPGLTHIEPNKLRLCLELVQSAVMVTTRDVDAAGDDAGGSDGGGGGNFPRSDADDSLVSLTMNSTLMYQGQEMAAAAVAAGEARKGNGGGRGSPSNLYFPNGGFP

SEQ ID NO: 33796 - protein, 143 aa, Zea mays subsp. mays
MVSVLLDHHADPSARTLDGVTPLDVLRGLTSEFLFKGAVPGLTHIEPNKLRLCLELVQSAVMVTTRDVDAAGDDAGGSDGGGGGNFPRSDADDSLVSLTMNSTLMYQGQEMAAAAVAAGEARKGNGGGRGSPSNLYFPNGGFP

SEQ ID NO: 33797 - DNA, 1620 bp, Zea mays subsp. mays
gtgatactccctcagattcttaccaaaacagaggagcccgtcggccgccgcaaaaaaacaaaacaagaccaccgcaccatggaatcgctgacgcttcgcgcttcgaaggccgcctcgccgctgcagcgacgccggctgctccccgggcggcagcgcgcgacgtacgtccgcgccacggcctccgccggcgagccggacctctccgtgcgcgtgaacgggctgcagatgcccaacccgttcgtgatcgggtcggggccaccgggcaccaactacaccgtcatgaagcgcgccttcgacgagggctggggcgccgtcatcgccaagactgtgtcattggatgctgaaaaagttatcaacgttactcctcgttatgcaaagcttcgggcagaaccaaatggggctgccatggggcgcatcattggctggcagaacattgaactcatcagtgacaggcctctggagaccatgctgaatgagttcaagcagttgaagaaagagtatcctgacaggatacttatcggttcaattatggaggagtacaacaaagctgcatggcatgagcttattgaacgtgttgaagagtctggagtggatgctcttgaaattaatttctcatgtccacatggcatgccagagagaaaaatgggtgccgctgtggggcaagattgtgatttgctagaggaagtttgtggttggattaatgagaaggccactgttcctgtttgggcaaagatgactcctaacattacagacattacacagcctgcaagaatatctcttaagtctggatgtgaaggagtttctgcaattaacacaattatgagtgtaatggggattaatctcaaaacactgcgtccggaaccttgtgttgaagggtattctacacctgggggttattctgcaagagctgtgcaccctatagcacttgctaaagtcatgcagatagcaaggatgatgaaagaagagtttgctgatggacagtctctctctgccattggtggtgtggagactggcaatgatgctgctgagttattcttcttggtgctgatacagtacaggtatgtaccggtgtgatgattcatggttatccccttgtgaagaagctttgcgcagagttacaggatttcatgagagagcacaacttttcatcaattgaagagtttcgaggggcctcgcttccgtatttcacgacgcacacagatctggttcaccggcaacaagaggcggtcaggcagaggaaggccatcaagaagggccttcaatcagacaaggaatggacgggtgatgggttcgtcaaggagaccgaaagcatggtatccaactgatgcatctctgccaccccccaccgggccattccttacaccatgctccaacttcatctttttaataaacgcgcaccagaaatgccacacaccaagcatctagtcctcatctgtacatggttctgaaccttgggccttcagtctatagaacaggccatgaatccacacaaagtcgtgacaacgggtgacattgagcgatatatttgtcatgtgaacattaatttgtagcactgagctgagggcttgaccttgtaaaatcttggagacttcaatctcgcacaggttttctcaggagttt

SEQ ID NO: 33798 - protein, 357 aa, Zea mays subsp. mays
VILPQILTKTEEPVGRRKKTKQDHRTMESLTLRASKAASPLQRRRLLPGRQRATYVRATASAGEPDLSVRVNGLQMPNPFVIGSGPPGTNYTVMKRAFDEGWGAVIAKTVSLDAEKVINVTPRYAKLRAEPNGAAMGRIIGWQNIELISDRPLETMLNEFKQLKKEYPDRILIGSIMEEYNKAAWHELIERVEESGVDALEINFSCPHGMPERKMGAAVGQDCDLLEEVCGWINEKATVPVWAKMTPNITDITQPARISLKSGCEGVSAINTIMSVMGINLKTLRPEPCVEGYSTPGGYSARAVHPIALAKVMQIARMMKEEFADGQSLSAIGGVETGNDAAELFFLVLIQYRYVPV

SEQ ID NO: 33799 - protein, 331 aa, Zea mays subsp. mays
MESLTLRASKAASPLQRRRLLPGRQRATYVRATASAGEPDLSVRVNGLQMPNPFVIGSGPPGTNYTVMKRAFDEGWGAVIAKTVSLDAEKVINVTPRYAKLRAEPNGAAMGRIIGWQNIELISDRPLETMLNEFKQLKKEYPDRILIGSIMEEYNKAAWHELIERVEESGVDALEINFSCPHGMPERKMGAAVGQDCDLLEEVCGWINEKATVPVWAKMTPNITDITQPARISLKSGCEGVSAINTIMSVMGINLKTLRPEPCVEGYSTPGGYSARAVHPIALAKVMQIARMMKEEFADGQSLSAIGGVETGNDAAELFFLVLIQYRYVPV

SEQ ID NO: 33800 - protein, 282 aa, Zea mays subsp. mays
MPNPFVIGSGPPGTNYTVMKRAFDEGWGAVIAKTVSLDAEKVINVTPRYAKLRAEPNGAAMGRIIGWQNIELISDRPLETMLNEFKQLKKEYPDRILIGSIMEEYNKAAWHELIERVEESGVDALEINFSCPHGMPERKMGAAVGQDCDLLEEVCGWINEKATVPVWAKMTPNITDITQPARISLKSGCEGVSAINTIMSVMGINLKTLRPEPCVEGYSTPGGYSARAVHPIALAKVMQIARMMKEEFADGQSLSAIGGVETGNDAAELFFLVLIQYRYVPV

SEQ ID NO: 33801 - DNA, 530 bp, Zea mays subsp. mays
ccacgggccgcggcggcgtgatcgtggactcgggcacctccgtgacccgcctcgcccgcgcgtcctactccgcgctccgcgacgcgttccgcgccgccgcggcgggggggctccggctctcccccggcggcttctcgctgttcgacacgtgctacgacctgggcgggcgcagggtggtgaaggtgccgaccgtgtcgatgcacttcgcgggcggcgccgaggccgcactgccccccgagaactacctcatccccgtggactccaggggcaccttctgcttcgcgttcgcgggcaccgacggcggcgtgtccatcatcggcaacatccagcagcaggggttccgcgtggtgttcgacggcgacggccagcgcgtggggttcgcgcccaaaggctgctgagcccccaggccggagtggtgaacccgtcctctctcgagcgaggagagagagaattaattagcgagtgattagctggtaatcaagtgagccgccttgttagtcataattaatggatgcggtggcttgtgggtc

SEQ ID NO: 33802 - protein, 154 aa, Zea mays subsp. mays
HGPRRRDRGLGHLRDPPRPRVLLRAPRRVPRRRGGGAPALPRRLLAVRHVLRPGRAQGGEGADRVDALRGRRRGRTAPRELPHPRGLQGHLLLRVRGHRRRRVHHRQHPAAGVPRGVRRRRPARGVRAQRLLSPQAGVVNPSSLERGERELISE

SEQ ID NO: 33803 - protein, 131 aa, Zea mays subsp. mays
TGRGGVIVDSGTSVTRLARASYSALRDAFRAAAAGGLRLSPGGFSLFDTCYDLGGRRVVKVPTVSMHFAGGAEAALPPENYLIPVDSRGTFCFAFAGTDGGVSIIGNIQQQGFRVVFDGDGQRVGFAPKGC

SEQ ID NO: 33804 - DNA, 1231 bp, Zea mays subsp. mays
ctcacatcctctttcagttccctctctggatctcttcctgaagagaggcactactgccacaccaccacgccacccatgctcaacatgatgaccgatctgagctgcgggccgtcgtccaaggcggcgaaaggagggcagccggcagcgacgacgggctccggcggcgacaggcaggggaggggcaagatcgagatcaagcgcatcgagaacacgacgaaccggcaggtcaccttctgcaagcgccgcaacggcctgctcaagaaggcgtacgagctctcggtgctctgcgacgccgaggtcgcgctcgtcgtcttctccagccgcggccgcctctacgagtacgccaacaacagtgtgaagtccaccattgagaggtacaagaaggccaacagtgacacctccaactctggcacagttgcagaagtcaatgctcagcactaccagcaggagtcctccaagctgcgccaggcgatcgatagcttgcaaaacgcaaacaggaccatagtgggagattcaatccacaccatgggcctcagggagcttaagcagatggagggcaagctggagaaggccataaacaagattagagctagaaagaatgagctcttgtatgctgaagttgaatatatgcaaaaaagggagatggatctgcagactgacaacatgtacctgaggagcaagatcgccgagaataatgaaacggggcagccaccgatgaacatgattggattgccgtcgacgagcgagtacgatcacatggccccgtttgttgactcgagaaactttcttcaggtgaacatgcagcagcagcctcagcactactcccatctatcagctgcaaccaacgaccctccaactcggatgatgaaattaagaatcttcggccaacaatccatgcacgcaagcacgcagtaaatcatgtgtccaattcagataaaaaaatctactctagcgtttgtataattattaataatcgtgactagtaaactgttatatatatagccatgtgtgtgtggcgcctacatatatgtcatgtggctgtacggcgagtttttctttttcacaagcgtttgcagcagcatttggtgttgctcatcgatcaattaatcgcaagaaattaaacttgtcaccactgtgtgtgcattatttgtacgtgttaatgcagttgttgtatctgttaattgtaccctccatcagataaacgcgggtgcgcgtatgcatatttatgtgt

SEQ ID NO: 33805 - protein, 304 aa, Zea mays subsp. mays
LTSSFSSLSGSLPEERHYCHTTTPPMLNMMTDLSCGPSSKAAKGGQPAATTGSGGDRQGRGKIEIKRIENTTNRQVTFCKRRNGLLKKAYELSVLCDAEVALVVFSSRGRLYEYANNSVKSTIERYKKANSDTSNSGTVAEVNAQHYQQESSKLRQAIDSLQNANRTIVGDSIHTMGLRELKQMEGKLEKAINKIRARKNELLYAEVEYMQKREMDLQTDNMYLRSKIAENNETGQPPMNMIGLPSTSEYDHMAPFVDSRNFLQVNMQQQPQHYSHLSAATNDPPTRMMKLRIFGQQSMHASTQ

SEQ ID NO: 33806 - protein, 279 aa, Zea mays subsp. mays
MLNMMTDLSCGPSSKAAKGGQPAATTGSGGDRQGRGKIEIKRIENTTNRQVTFCKRRNGLLKKAYELSVLCDAEVALVVFSSRGRLYEYANNSVKSTIERYKKANSDTSNSGTVAEVNAQHYQQESSKLRQAIDSLQNANRTIVGDSIHTMGLRELKQMEGKLEKAINKIRARKNELLYAEVEYMQKREMDLQTDNMYLRSKIAENNETGQPPMNMIGLPSTSEYDHMAPFVDSRNFLQVNMQQQPQHYSHLSAATNDPPTRMMKLRIFGQQSMHASTQ

SEQ ID NO: 33807 - protein, 276 aa, Zea mays subsp. mays
MMTDLSCGPSSKAAKGGQPAATTGSGGDRQGRGKIEIKRIENTTNRQVTFCKRRNGLLKKAYELSVLCDAEVALVVFSSRGRLYEYANNSVKSTIERYKKANSDTSNSGTVAEVNAQHYQQESSKLRQAIDSLQNANRTIVGDSIHTMGLRELKQMEGKLEKAINKIRARKNELLYAEVEYMQKREMDLQTDNMYLRSKIAENNETGQPPMNMIGLPSTSEYDHMAPFVDSRNFLQVNMQQQPQHYSHLSAATNDPPTRMMKLRIFGQQSMHASTQ

SEQ ID NO: 33808 - DNA, 1431 bp, Zea mays subsp. mays
aaccttctttccgctcacgacctgagtcccctctcccaggcccaggcagccgccgcccgtctctctctctcctccgagtcccttctcccaccgccgcaagcgctcgcccgagccacctccctctctccctgtggcctgaccgtgatttgggcgtggcatcctaaggcggtcaagattcgagaggctggaggaaccaagcgtagggcctccgccaccacgtcgtcgtccgcgcgcgccgcccgccggcgcaaggaggcgccacagcctccgacgcctagggagatgggggccgattactacaaggtcctcggcgtcgaccgcggcgccggcgacgacgacctcaagaaggcctaccggaagctcgccatgcgatggcaccccgacaagaacaccaccaacaagaaggaggcagaaaccaagttcaaggatatctctgttgcatatgaggtccttagtgatcccaagaaacgtgcaatctatgatcagctaggagaagaaggcttcaaggggcagccgcccccaggagcaggaggttctggcgcatttcccttcttccctggcggggctcattccaccgctccccattttaatcacaggagtgcggatgatatatttaaggagttctttggatcccctggcatgggtggcatgagagcggaaccaggattccagaggtcaatgtttggcaacgatatcttctcttcacgctttggcgctgagggttccaccagtatgcagcagccaccacgcaaggcagctgcaattgagaacccacttccagtcagccttgcagatctgtacaagggcgtcacgaaaaagatgaaaatctcaagagaggctatagatgccagcgggagaatctcaaacgcagaggatattctgacaatagaagtaaggcctggttggaagaagggaacaaagattacatttcccgacaaggggaatgaagctccaaacatgaaagctgctgatattgttttcatcctcgatgagaagccccatgatgttttcactcgggatgggaatgatcttgtggtgactgagaaaatctcgctggtggaagcgctgactggatatactgcacgtgtcactacgctcgatgggcggagcctatcattgcccatcaactcgataatccatccgagctatgaagaggtagttcctagagagggcatgccaatacccaaggacccctctaagaagggaaatctgcggattaagttcaacataatgttcccttctaggctgacgtctgatcagaaggctggtctcaaaaggatattgggttcttaggccgcctcaaatgacattttatagtgaaaggtattgtgaatatcgccagtaattggctaggtagattatttatttatttatgtaacatatctgtaacggatggttataatgtgtcagatttttatctcattattattt

SEQ ID NO: 33809 - protein, 430 aa, Zea mays subsp. mays
NLLSAHDLSPLSQAQAAAARLSLSSESLLPPPQALARATSLSPCGLTVIWAWHPKAVKIREAGGTKRRASATTSSSARAARRRKEAPQPPTPREMGADYYKVLGVDRGAGDDDLKKAYRKLAMRWHPDKNTTNKKEAETKFKDISVAYEVLSDPKKRAIYDQLGEEGFKGQPPPGAGGSGAFPFFPGGAHSTAPHFNHRSADDIFKEFFGSPGMGGMRAEPGFQRSMFGNDIFSSRFGAEGSTSMQQPPRKAAAIENPLPVSLADLYKGVTKKMKISREAIDASGRISNAEDILTIEVRPGWKKGTKITFPDKGNEAPNMKAADIVFILDEKPHDVFTRDGNDLVVTEKISLVEALTGYTARVTTLDGRSLSLPINSIIHPSYEEVVPREGMPIPKDPSKKGNLRIKFNIMFPSRLTSDQKAGLKRILGS

SEQ ID NO: 33810 - protein, 336 aa, Zea mays subsp. mays
MGADYYKVLGVDRGAGDDDLKKAYRKLAMRWHPDKNTTNKKEAETKFKDISVAYEVLSDPKKRAIYDQLGEEGFKGQPPPGAGGSGAFPFFPGGAHSTAPHFNHRSADDIFKEFFGSPGMGGMRAEPGFQRSMFGNDIFSSRFGAEGSTSMQQPPRKAAAIENPLPVSLADLYKGVTKKMKISREAIDASGRISNAEDILTIEVRPGWKKGTKITFPDKGNEAPNMKAADIVFILDEKPHDVFTRDGNDLVVTEKISLVEALTGYTARVTTLDGRSLSLPINSIIHPSYEEVVPREGMPIPKDPSKKGNLRIKFNIMFPSRLTSDQKAGLKRILGS

SEQ ID NO: 33811 - protein, 308 aa, Zea mays subsp. mays
MRWHPDKNTTNKKEAETKFKDISVAYEVLSDPKKRAIYDQLGEEGFKGQPPPGAGGSGAFPFFPGGAHSTAPHFNHRSADDIFKEFFGSPGMGGMRAEPGFQRSMFGNDIFSSRFGAEGSTSMQQPPRKAAAIENPLPVSLADLYKGVTKKMKISREAIDASGRISNAEDILTIEVRPGWKKGTKITFPDKGNEAPNMKAADIVFILDEKPHDVFTRDGNDLVVTEKISLVEALTGYTARVTTLDGRSLSLPINSIIHPSYEEVVPREGMPIPKDPSKKGNLRIKFNIMFPSRLTSDQKAGLKRILGS

SEQ ID NO: 33812 - DNA, 1300 bp, Zea mays subsp. mays
gagcaaaatataaagtttataaacccactcctccccttcccctgttccctctaccaccaccaccggcaccgcgggacagtctgctctcgtcccgctgcagcccgtccccgacccggaaccctagcgactgccattgcccacgcgccgctcgcccgatgaacggcgggggctctgggctggcgcccaacgccgcgcacaccgcggacgaggtcttccgcgactacaaaggccgccgcgccggcatgatcaaggccctcaccactgatgtggagaggttcttcaaactctgtgaccctgaaaaggagaacttgtgcctttatggctatcccgatgagacgtgggaggtgaccttgccagctgaggaagttccccctgagatccctgaaccagcattaggaatcaactttgctagggatggcatgaatgagaaagactggctggcgctagttgcagtccacagtgattcctggttactgtctgttgcattctactttggtgcacgctttggatttgacagagaaactaggaggcgactctttagcctgataaacaacatgcccacgatatttgaggtagtgacaggagcagccaagaagcaggcgaaggagaagacacctaatagtagcagcaagagcaacaggcctagttcaaaagtgtcaagagcagagtctcgttcaaaggctaaggtcccccaagacgaagaagagagcggtgatgacgatgaggatgaggaggcagacgagcacaacaataccttgtgtggaacttgcggaactaacgacagcaaggaccagttctggatctgttgtgataactgcgagaagtggtaccatgggaagtgtgtcaagatcacgccagctcgagctgagcatatcaagcagtacaagtgcccagactgcaccaacaagcgggccagggcatgagcggcaaacatcggcatcgggcgacctttgataggaaggaagaaaccacctcctggcttcaagatccctagatatggcgtaggtccctagtttacgaagtctgcattttcatgtgttcattaatatatctgctgattagctgttcgacctagcagtgtctaaaacgtgccgtgtgtcttctgtgctgagtgttgacatggggcctcctccctccagcctgtaaacgctgtcactgaaggtacctctcaactgaccatccttcattgttggtgtcgtgcagtgagtagtggccgtactctttgttcccagttcctagcatttgaattgctcaaatgcgtaccttgctgagtaaggccgttggaaaatgacgaatagct

SEQ ID NO: 33813 - protein, 306 aa, Zea mays subsp. mays
AKYKVYKPTPPLPLFPLPPPPAPRDSLLSSRCSPSPTRNPSDCHCPRAARPMNGGGSGLAPNAAHTADEVFRDYKGRRAGMIKALTTDVERFFKLCDPEKENLCLYGYPDETWEVTLPAEEVPPEIPEPALGINFARDGMNEKDWLALVAVHSDSWLLSVAFYFGARFGFDRETRRRLFSLINNMPTIFEVVTGAAKKQAKEKTPNSSSKSNRPSSKVSRAESRSKAKVPQDEEESGDDDEDEEADEHNNTLCGTCGTNDSKDQFWICCDNCEKWYHGKCVKITPARAEHIKQYKCPDCTNKRARA

SEQ ID NO: 33814 - protein, 255 aa, Zea mays subsp. mays
MNGGGSGLAPNAAHTADEVFRDYKGRRAGMIKALTTDVERFFKLCDPEKENLCLYGYPDETWEVTLPAEEVPPEIPEPALGINFARDGMNEKDWLALVAVHSDSWLLSVAFYFGARFGFDRETRRRLFSLINNMPTIFEVVTGAAKKQAKEKTPNSSSKSNRPSSKVSRAESRSKAKVPQDEEESGDDDEDEEADEHNNTLCGTCGTNDSKDQFWICCDNCEKWYHGKCVKITPARAEHIKQYKCPDCTNKRARA

SEQ ID NO: 33815 - protein, 226 aa, Zea mays subsp. mays
MIKALTTDVERFFKLCDPEKENLCLYGYPDETWEVTLPAEEVPPEIPEPALGINFARDGMNEKDWLALVAVHSDSWLLSVAFYFGARFGFDRETRRRLFSLINNMPTIFEVVTGAAKKQAKEKTPNSSSKSNRPSSKVSRAESRSKAKVPQDEEESGDDDEDEEADEHNNTLCGTCGTNDSKDQFWICCDNCEKWYHGKCVKITPARAEHIKQYKCPDCTNKRARA

SEQ ID NO: 33816 - DNA, 896 bp, Zea mays subsp. mays
accacatctccagtcctccactgacaagccgccgccgctcttccacccccaccacccacccacctctccccggcctcgcacccatggccacgactttgatggttgcagccaccacctcctgctccccgggccgcgccgcgccgcgcctgaagccggtggcctcctcctcctccagcagcagcagcagcagctcggcgcggccgcggcggcccttggcgcagcagctcccgcggctgctggcgacggcggcggcggcggcggtggcagccgcgccgctcccggcgctggcggagcagatggagaaggccgcactgtttgacttcaacctgacgctcccggcgatcgcgaccgagttcctgctgctcatggtggcgctggacaagctctacttcacgccgctaggcaagttcatggatgagcgggacgccaagatccgcggtgagctcggcgatgtcaagggcgcctccgaggaggtgaagcagctggaggaccaggcggcggccatcatgaaggcggcgcgcgccgagatcgcggcggcgcttaacaagatgaagaaggagaccaccgcggagctggaggccaagctggacgagggacgcagccgtgtggaggccgagctcgtagaggcgctcgccaacctcgaggcgcagaaggaggaggctgtcaaggcgctcgacgcccagatcgcctcgctcagtgatgagatcgtcaagaaggtgctcccatccgcgtgatgaaaccaaaccggccctgccttatcctacgactatagttacatgaacatcataaattaatgataattttgaagaaaattggccgatgactccgacactttactcatgaaagattattggatgggttgtgtccaccgcctgtgttgggcgtggattggttgt

SEQ ID NO: 33817 - protein, 243 aa, Zea mays subsp. mays
HISSPPLTSRRRSSTPTTHPPLPGLAPMATTLMVAATTSCSPGRAAPRLKPVASSSSSSSSSSSARPRRPLAQQLPRLLATAAAAAVAAAPLPALAEQMEKAALFDFNLTLPAIATEFLLLMVALDKLYFTPLGKFMDERDAKIRGELGDVKGASEEVKQLEDQAAAIMKAARAEIAAALNKMKKETTAELEAKLDEGRSRVEAELVEALANLEAQKEEAVKALDAQIASLSDEIVKKVLPSA

SEQ ID NO: 33818 - protein, 216 aa, Zea mays subsp. mays
MATTLMVAATTSCSPGRAAPRLKPVASSSSSSSSSSSARPRRPLAQQLPRLLATAAAAAVAAAPLPALAEQMEKAALFDFNLTLPAIATEFLLLMVALDKLYFTPLGKFMDERDAKIRGELGDVKGASEEVKQLEDQAAAIMKAARAEIAAALNKMKKETTAELEAKLDEGRSRVEAELVEALANLEAQKEEAVKALDAQIASLSDEIVKKVLPSA

SEQ ID NO: 33819 - protein, 211 aa, Zea mays subsp. mays
MVAATTSCSPGRAAPRLKPVASSSSSSSSSSSARPRRPLAQQLPRLLATAAAAAVAAAPLPALAEQMEKAALFDFNLTLPAIATEFLLLMVALDKLYFTPLGKFMDERDAKIRGELGDVKGASEEVKQLEDQAAAIMKAARAEIAAALNKMKKETTAELEAKLDEGRSRVEAELVEALANLEAQKEEAVKALDAQIASLSDEIVKKVLPSA

SEQ ID NO: 33820 - DNA, 839 bp, Zea mays subsp. mays
ttgggattttctcagagctagaccaaaagggaaggaattagtgcgatatgaatcccctattgaacactgcccgagtgtagatgatgttaaacgagtgcttaatggaactgcaaacagcttcagtataattgatgcttacccaaggtactttcgagtactggatcaggtgaagtccggcgattagaagcagcgatagattcagtaagtggcgaattgctattaaataatggcactccttggtggtcattctatgatacaaacccatcagatttggcaggctgtcaagggctgaatggtcccatggctatagttgtttctgaggagacacctcagggcattattggcgaaacactcagtaaatttagcatatggagtttatatattacttttgttctagctgttgcgagatttattaggcttcagtgctcagacttgagaatgagaataccatatgagaaccttccgtcatgtgacaggctacttgacatctgtgaaggaatatatgcagcaagagctgaaggagagttagaagtggaagaagttctgtattggacattggtaaacatctatagatcaccacatatgctgcttgaatacacaaagcctgactagggcacccgttctgctaaggaagccattctgcaaaaaaattccatgtaatgtagtaatgtacaagtagaacacttctttcctttgaggtcacaacgaagctaacttaatcctctcccccccttgtgtcaggacaaaaaacgtgcaaataggctttgtagttgtagttcgtttttgctaacatgtatacggttgaccattatttttggagaagtatacatcaaagtttc

SEQ ID NO: 33821 - protein, 103 aa, Zea mays subsp. mays
MAIVVSEETPQGIIGETLSKFSIWSLYITFVLAVARFIRLQCSDLRMRIPYENLPSCDRLLDICEGIYAARAEGELEVEEVLYWTLVNIYRSPHMLLEYTKPD

SEQ ID NO: 33822 - protein, 60 aa, Zea mays subsp. mays
WDFLRARPKGKELVRYESPIEHCPSVDDVKRVLNGTANSFSIIDAYPRYFRVLDQVKSGD

SEQ ID NO: 33823 - protein, 57 aa, Zea mays subsp. mays
MRIPYENLPSCDRLLDICEGIYAARAEGELEVEEVLYWTLVNIYRSPHMLLEYTKPD

SEQ ID NO: 33824 - DNA, 2912 bp, Zea mays subsp. mays
tagaacatcctaatcgaaaagcctagcacccacctgtcccccgcagattcgctcgggaatccgtccaagactccaagtagccaaccatatcgcaactgctgctccccgccggcagcgtcagcggcgacttctccctccgctcccctctctctttcgctcgccttatcgcccttctctcgcccgcgacggggaggtccgccgttccgatcactaccccttcgcgccgctgacctcagaggaggaggcatgaggctgctgccgagggaggcggacaaattggcgctgcacaatgccggcttcctcgcgcagaagcgccttgcccggggcctccgcctcaactacaccgaggccgtcgcgctcatcgccgcgcagattcttgagcttattcgcgatggagacaaaaccgtgacagacctcatggacctggggaaacaactattgggcaggagacaagttcttccagctgttccataccttttacatactgtgcaggttgaaggaacatttgtggatggaacaaaactagttactgtacacgaccctatctccttggatgacggaaatttggagctagcattgcatggttcttttctcccagtgccttcacctgaaaagttttccagcgatgatgttgaagaatatcctggtgaaatacattacagttctagtcgcatagtcctaaaccttcatcgcagggctttatctctgaaggttgttaacaaggcagacagacccattcagattggaagccattaccattttatagagaccaatccttatctggtttttgataggaaaagggcctatggcatgaggttgaacatacttgctggaacagctgttcggtttgagccaggggatgcaaaaagtgttatacttgtaagcatcggaggtcataagttaatcaaaggtggaaatggcattgctgatggtcctattgacagttcaagtcttaatgtggtgatgcagaaggttaatgcaaatagttttggacatgaagattatccagatgcaagggaaggtattattggtgatggttcatttgactgtactgttgatcatgagaagtatgcgagcatttatggacctaccaccggtgataagattaggcttggtgataccaatctttatgctgagattgaaaaggacttcgccttttatggtgatgagtgcatatttggcggtggaaaagttctgcgtgatggcatgggacaagcttcagggtacccagaatctttctgcctagatacagttataacaaatgctgttgtgattgattataccggaatatacaaggctgatatcggtataaaaggtggacttatagttgctattggaaaggctggaaaccctgatgtcatggatggtgtccataacaacatgattgttggggtcaatactgaagttattgcatctgaaggcatgattgtcactgctggtggcatagattgccatgtccactttatatgtcctcagttggcagaagaggcaattgcaagcggcatcacgacattggtgggtggtggaaccggaccagcacatggaacttgtgccacaacttgcactccagcaccatctcaattgaaattaatgttgcagtccactgatcaattgccaattaacatgggattcacaggcaagggaaatacttcaaaacctgaaggattggctgaaatcattaaagctggagcaatgggtttgaagctgcatgaagattggggaactaccccatccgcgatagataattgtttatctgttgcagaagattttgatattcaggtcaatatacacacagataccttaaatgaatcaggctgcgtggagcatacaatcgcagcttttaaaggtagagccatacatacatatcacagtgaaggtgctggtggcggtcatgctccagacatcatcaaagtttgtggggtaaaaaatgtgttgccctcttcaacaaatcctacccggccatttacttcgaacactgtagacgagcaccttgatatgctgatggtttgtcaccaccttgataaaaacattccagaagatgtagcatttgccgagtctagaattcgagctgaaacaattgctgctgaggacatattgcatgacatgggagccataagtattatatcatctgattcacaggccatggggcgcgttggagaggtgataacacgaacatggcaaactgcaaacaagatgaaggtacaaagaggtagtttacctggatctggtgacgctaatgccgccccggacagtgacaacctccgtataagaagatacatagcaaaatacacaataaatccagcaatagtgaatgggttttcagactttgttggttctgttgaggtgggaaaattagctgaccttgttctttggaaaccatctttcttcggcgctaaaccagaactggttgtaaagggaggtgcaattgcatgggctaacatgggtgatcccaatgctagcattccaacacctgaacctgttgtgatgcgacctatgtttggtgcatttggaaaggctggaagttccaattcaattgcatttgtgagcaaggctgctaaagaagctggtgtcgcaacggagtacagactagaaaagagggtggaagctgtaggccgtgttcgaggcctgacaaagcttgacatgaagctcaacgacgccctcccgaaaatagaggtcgacccggagacctacacagtgaccgctgatggagaggttttgacatgccaaccagcacccacactgccactgtctcggaattacttcctgttctagaaagccactgcatcagcaaaccaccaccactactcacgccctatgcatgcacatcgtcatatacgagtataaaagatgcaagttcaattctgtacgctaccctctttttaataatatggccaatgagcaaattctttggc

SEQ ID NO: 33825 - protein, 841 aa, Zea mays subsp. mays
MRLLPREADKLALHNAGFLAQKRLARGLRLNYTEAVALIAAQILELIRDGDKTVTDLMDLGKQLLGRRQVLPAVPYLLHTVQVEGTFVDGTKLVTVHDPISLDDGNLELALHGSFLPVPSPEKFSSDDVEEYPGEIHYSSSRIVLNLHRRALSLKVVNKADRPIQIGSHYHFIETNPYLVFDRKRAYGMRLNILAGTAVRFEPGDAKSVILVSIGGHKLIKGGNGIADGPIDSSSLNVVMQKVNANSFGHEDYPDAREGIIGDGSFDCTVDHEKYASIYGPTTGDKIRLGDTNLYAEIEKDFAFYGDECIFGGGKVLRDGMGQASGYPESFCLDTVITNAVVIDYTGIYKADIGIKGGLIVAIGKAGNPDVMDGVHNNMIVGVNTEVIASEGMIVTAGGIDCHVHFICPQLAEEAIASGITTLVGGGTGPAHGTCATTCTPAPSQLKLMLQSTDQLPINMGFTGKGNTSKPEGLAEIIKAGAMGLKLHEDWGTTPSAIDNCLSVAEDFDIQVNIHTDTLNESGCVEHTIAAFKGRAIHTYHSEGAGGGHAPDIIKVCGVKNVLPSSTNPTRPFTSNTVDEHLDMLMVCHHLDKNIPEDVAFAESRIRAETIAAEDILHDMGAISIISSDSQAMGRVGEVITRTWQTANKMKVQRGSLPGSGDANAAPDSDNLRIRRYIAKYTINPAIVNGFSDFVGSVEVGKLADLVLWKPSFFGAKPELVVKGGAIAWANMGDPNASIPTPEPVVMRPMFGAFGKAGSSNSIAFVSKAAKEAGVATEYRLEKRVEAVGRVRGLTKLDMKLNDALPKIEVDPETYTVTADGEVLTCQPAPTLPLSRNYFLF

SEQ ID NO: 33826 - protein, 784 aa, Zea mays subsp. mays
MDLGKQLLGRRQVLPAVPYLLHTVQVEGTFVDGTKLVTVHDPISLDDGNLELALHGSFLPVPSPEKFSSDDVEEYPGEIHYSSSRIVLNLHRRALSLKVVNKADRPIQIGSHYHFIETNPYLVFDRKRAYGMRLNILAGTAVRFEPGDAKSVILVSIGGHKLIKGGNGIADGPIDSSSLNVVMQKVNANSFGHEDYPDAREGIIGDGSFDCTVDHEKYASIYGPTTGDKIRLGDTNLYAEIEKDFAFYGDECIFGGGKVLRDGMGQASGYPESFCLDTVITNAVVIDYTGIYKADIGIKGGLIVAIGKAGNPDVMDGVHNNMIVGVNTEVIASEGMIVTAGGIDCHVHFICPQLAEEAIASGITTLVGGGTGPAHGTCATTCTPAPSQLKLMLQSTDQLPINMGFTGKGNTSKPEGLAEIIKAGAMGLKLHEDWGTTPSAIDNCLSVAEDFDIQVNIHTDTLNESGCVEHTIAAFKGRAIHTYHSEGAGGGHAPDIIKVCGVKNVLPSSTNPTRPFTSNTVDEHLDMLMVCHHLDKNIPEDVAFAESRIRAETIAAEDILHDMGAISIISSDSQAMGRVGEVITRTWQTANKMKVQRGSLPGSGDANAAPDSDNLRIRRYIAKYTINPAIVNGFSDFVGSVEVGKLADLVLWKPSFFGAKPELVVKGGAIAWANMGDPNASIPTPEPVVMRPMFGAFGKAGSSNSIAFVSKAAKEAGVATEYRLEKRVEAVGRVRGLTKLDMKLNDALPKIEVDPETYTVTADGEVLTCQPAPTLPLSRNYFLF

SEQ ID NO: 33827 - protein, 653 aa, Zea mays subsp. mays
MRLNILAGTAVRFEPGDAKSVILVSIGGHKLIKGGNGIADGPIDSSSLNVVMQKVNANSFGHEDYPDAREGIIGDGSFDCTVDHEKYASIYGPTTGDKIRLGDTNLYAEIEKDFAFYGDECIFGGGKVLRDGMGQASGYPESFCLDTVITNAVVIDYTGIYKADIGIKGGLIVAIGKAGNPDVMDGVHNNMIVGVNTEVIASEGMIVTAGGIDCHVHFICPQLAEEAIASGITTLVGGGTGPAHGTCATTCTPAPSQLKLMLQSTDQLPINMGFTGKGNTSKPEGLAEIIKAGAMGLKLHEDWGTTPSAIDNCLSVAEDFDIQVNIHTDTLNESGCVEHTIAAFKGRAIHTYHSEGAGGGHAPDIIKVCGVKNVLPSSTNPTRPFTSNTVDEHLDMLMVCHHLDKNIPEDVAFAESRIRAETIAAEDILHDMGAISIISSDSQAMGRVGEVITRTWQTANKMKVQRGSLPGSGDANAAPDSDNLRIRRYIAKYTINPAIVNGFSDFVGSVEVGKLADLVLWKPSFFGAKPELVVKGGAIAWANMGDPNASIPTPEPVVMRPMFGAFGKAGSSNSIAFVSKAAKEAGVATEYRLEKRVEAVGRVRGLTKLDMKLNDALPKIEVDPETYTVTADGEVLTCQPAPTLPLSRNYFLF

SEQ ID NO: 33828 - DNA, 2587 bp, Zea mays subsp. mays
gcacgagaccattacctagaacatcctaatcgaaaaccatggagaaaactcgttgagcagattccttgttcctgcagtaaccctgtccaacccccgcagcggcggcaaccacagaaacactgcctgtaaattccattcctccgcgttcggcctccctcatcgcgcgaccgttccctctgctcgaatcggcaagcccgcatttcgagccccggaggtggccgcgaaccctaaccctacagcgaggcgtcgccggagttgtgggggctccgttggccatgtcgatggactcggacagctcgtcgcacagcggcgccgactacaggagtttccgccagatcacccgagaccgtttgttagttgaaatgctgagatcgactcgaaagagctcaaaatcatcatggaaggttctaatcatggacaaacttactgtcaagataatgtcattttcatgcaagatggcagatatcacagaagaaggggtttcattggttgaagacctatacaaacggaggcagccattgccttcaatggatgcaatttattttatgcagcctactaaagaaaatgttgacatattcatgtcggacatgtcaggaaaaaattcattgtacaagaaagcttatgtatttttcagttctcctgtacagagggagttggtagctcatataaaaaaggattcgactgtgctaacacgcatcagtgcacttagtgagatgaacttagaatactttgctattgacagtcagggcttcataactgaccatgacaaggccttggaggagttgtttagtgaagatgcagaaggctcacacaagtacaatgcatgccttaacacaatggctacaagaattgctacagtgtttgcatcattgagggaatttcctcgtgtgcactatcgtgtagccaggacaatcgatgcatctactctgacgacactacgagatttggtcccaacaaagcttgctgcttccctgtggaattcccttgtcagatttaagtcaacgatacctgaatttccacaaacagaaacatgtgaactacttattgttgaccggtcaatagatcagattgcaccaattattcatgagtggacgtatgatgctatgtgccatgatctattgtgtatggatggcaacaagtacgtgcaagaggttccaagtaagaatggttcagcaaatgagaaaaaggaggttttgttggaggatcatgatccagtatggcttgagctgcggcatgcacatatagctcatgttaatgaaacgctacatgaaaagatgaccagttttgtatcaaagaacaaagcagctcaactacagcaggcaagatctggtggagagttatctaccaagcagttgcagaaaatggttcaagctcttccacaatacagtgatcaaattgacaagctcacccttcatgttgagattgcaggaaaactcaataacataatcaaagaacaccaccttaaagatgttggacagctagagcaagatcttgtgtttggtgatgctgggacaaaagaactaatcagtttcttacgaacccgcatggatgtaagtcgtgaaaataagctgcgtttgctgatgatttatgcttccataaacccagagaaatttttcgaaagtgagaaaggtgcaaagctgatgcagcttgcaggattatctgctgatgatatgattgtagtaaataatatgcgctgcttacgtggagctgattctaagaagtcttcagttggggcttttactttgaaatttgatcttcagaagaaaaagcctggtatcaggaaggagcggactggagaagagtcaacatggatgctatctcgattttatcccatcctggaggacttgattgagaaacttagtaagggtgagctaccaaaagatgagtaccactgcatgaatgatcctagtcctagtttccgtggaattccagggagcacatctgctcgaacgagcccagctcatcagccagcccaatccatgagatctagacgaataggtggcacatgggctagacctcggaactccgatgatggttattcgagtgactctgtactgaagcatgcatcaagtgacttcagaaagttgggccagcgcctatttatctttgtaattggaggtgctactcggtctgagttgcgtgttgcccataagctgtcaggcaaactgaagagagaaattatccttggctcctctagtcttgatgacccaccgcagttcatcactaaactgaagatgttatcaaccgaggaactgtcgcttgatgatttgcaaatataacaattccaaggacgattgtccgtggcattctacactgtaattatttatttatttgcatctctacaacgggtttagttttactcccttaaccgaaccacaggtgctcttacacaggctagaggggcatgatattcattcggtagccaatgtcagttacaatcgagtgtacacacatggcagcgaccagagactgtaatataggtggcgtctttattagattggtggatcagtgaagttcaatgttccgaggacttctatttgtcctcagattgctgctattttgtggggaaagtgtatattttttcctc

SEQ ID NO: 33829 - protein, 667 aa, Zea mays subsp. mays
MSMDSDSSSHSGADYRSFRQITRDRLLVEMLRSTRKSSKSSWKVLIMDKLTVKIMSFSCKMADITEEGVSLVEDLYKRRQPLPSMDAIYFMQPTKENVDIFMSDMSGKNSLYKKAYVFFSSPVQRELVAHIKKDSTVLTRISALSEMNLEYFAIDSQGFITDHDKALEELFSEDAEGSHKYNACLNTMATRIATVFASLREFPRVHYRVARTIDASTLTTLRDLVPTKLAASLWNSLVRFKSTIPEFPQTETCELLIVDRSIDQIAPIIHEWTYDAMCHDLLCMDGNKYVQEVPSKNGSANEKKEVLLEDHDPVWLELRHAHIAHVNETLHEKMTSFVSKNKAAQLQQARSGGELSTKQLQKMVQALPQYSDQIDKLTLHVEIAGKLNNIIKEHHLKDVGQLEQDLVFGDAGTKELISFLRTRMDVSRENKLRLLMIYASINPEKFFESEKGAKLMQLAGLSADDMIVVNNMRCLRGADSKKSSVGAFTLKFDLQKKKPGIRKERTGEESTWMLSRFYPILEDLIEKLSKGELPKDEYHCMNDPSPSFRGIPGSTSARTSPAHQPAQSMRSRRIGGTWARPRNSDDGYSSDSVLKHASSDFRKLGQRLFIFVIGGATRSELRVAHKLSGKLKREIILGSSSLDDPPQFITKLKMLSTEELSLDDLQI

SEQ ID NO: 33830 - protein, 665 aa, Zea mays subsp. mays
MDSDSSSHSGADYRSFRQITRDRLLVEMLRSTRKSSKSSWKVLIMDKLTVKIMSFSCKMADITEEGVSLVEDLYKRRQPLPSMDAIYFMQPTKENVDIFMSDMSGKNSLYKKAYVFFSSPVQRELVAHIKKDSTVLTRISALSEMNLEYFAIDSQGFITDHDKALEELFSEDAEGSHKYNACLNTMATRIATVFASLREFPRVHYRVARTIDASTLTTLRDLVPTKLAASLWNSLVRFKSTIPEFPQTETCELLIVDRSIDQIAPIIHEWTYDAMCHDLLCMDGNKYVQEVPSKNGSANEKKEVLLEDHDPVWLELRHAHIAHVNETLHEKMTSFVSKNKAAQLQQARSGGELSTKQLQKMVQALPQYSDQIDKLTLHVEIAGKLNNIIKEHHLKDVGQLEQDLVFGDAGTKELISFLRTRMDVSRENKLRLLMIYASINPEKFFESEKGAKLMQLAGLSADDMIVVNNMRCLRGADSKKSSVGAFTLKFDLQKKKPGIRKERTGEESTWMLSRFYPILEDLIEKLSKGELPKDEYHCMNDPSPSFRGIPGSTSARTSPAHQPAQSMRSRRIGGTWARPRNSDDGYSSDSVLKHASSDFRKLGQRLFIFVIGGATRSELRVAHKLSGKLKREIILGSSSLDDPPQFITKLKMLSTEELSLDDLQI

SEQ ID NO: 33831 - protein, 638 aa, Zea mays subsp. mays
MLRSTRKSSKSSWKVLIMDKLTVKIMSFSCKMADITEEGVSLVEDLYKRRQPLPSMDAIYFMQPTKENVDIFMSDMSGKNSLYKKAYVFFSSPVQRELVAHIKKDSTVLTRISALSEMNLEYFAIDSQGFITDHDKALEELFSEDAEGSHKYNACLNTMATRIATVFASLREFPRVHYRVARTIDASTLTTLRDLVPTKLAASLWNSLVRFKSTIPEFPQTETCELLIVDRSIDQIAPIIHEWTYDAMCHDLLCMDGNKYVQEVPSKNGSANEKKEVLLEDHDPVWLELRHAHIAHVNETLHEKMTSFVSKNKAAQLQQARSGGELSTKQLQKMVQALPQYSDQIDKLTLHVEIAGKLNNIIKEHHLKDVGQLEQDLVFGDAGTKELISFLRTRMDVSRENKLRLLMIYASINPEKFFESEKGAKLMQLAGLSADDMIVVNNMRCLRGADSKKSSVGAFTLKFDLQKKKPGIRKERTGEESTWMLSRFYPILEDLIEKLSKGELPKDEYHCMNDPSPSFRGIPGSTSARTSPAHQPAQSMRSRRIGGTWARPRNSDDGYSSDSVLKHASSDFRKLGQRLFIFVIGGATRSELRVAHKLSGKLKREIILGSSSLDDPPQFITKLKMLSTEELSLDDLQI

SEQ ID NO: 33832 - DNA, 1224 bp, Zea mays subsp. mays
ccctttcctgcccctccccctccgcctttcctctctctcgctctcctcctctcctctcctctcctctccttccgcatcacacaccacgactcccaaccgccggttggctttgctgctccgagctcttcctcttccacacccgccctctctcttgggtcggcggccgagtgtctgcgtcgtccacggagatcagggatcggcggcggggtatggcgagggagcgacgggagataaagaggatagagagcgcggcggcgcggcaggtcacgttctccaagcgccgccgcggcctcttcaagaaggctgaggagctctccgtgctgtgcgatgccgacgtcgcgctcatcgtcttctcctccacgggaaagctctcccagttcgccagctccagtatgaatgagatcattgacaagtacagcacacattctaaaaacctggggaaagcagaacagccttcacttgacttgaacttagaacatagcaaatatgcaaatttgaatgagcaacttgtggaagcaagccttcgactcaggcagatgagaggtgaagaacttgagggattgagtgttgaagaactccagcaattggagaagaatctggaatctggtctgcatagggtgcttcaaacaaaggatcaacaattcttggaacagatcagcgacctcgaacaaaagagtacacaactggcagaggagaacaggcaactgaggaatcaagtatcccacatacccccagttggcaagcaatcagttgctgatactgaaaatgttatcgctgaagatgggcaatcctctgaatcagtcatgactgcgttgcattctgggagttcacaggataatgatgatggttcggatgtctctctaaaattagggctgccttgtgttgcatggaagtgaaaaaacaagatggtctgtgttgatctgggtggagctgcggcttcagcagataggcacttgtgttattgtcttatggacgacccccgactactgcaataatcttgcatcggaagcgagatcagttaacctgatttgtcatccttgtggcttcatgatgcgatgttgcgcttgtaccgtttgctaggatgttaactggactagaatcgtgtctacttttgtactgctcgtgaatcctatctactttgtgctatccaaagttatgacctaccacttgcatcggcatggcgcgccggccgtaagctgtgctcaagcatgcatgcttcgtgtt

SEQ ID NO: 33833 - protein, 297 aa, Zea mays subsp. mays
LSCPSPSAFPLSRSPPLLSSPLLPHHTPRLPTAGWLCCSELFLFHTRPLSWVGGRVSASSTEIRDRRRGMARERREIKRIESAAARQVTFSKRRRGLFKKAEELSVLCDADVALIVFSSTGKLSQFASSSMNEIIDKYSTHSKNLGKAEQPSLDLNLEHSKYANLNEQLVEASLRLRQMRGEELEGLSVEELQQLEKNLESGLHRVLQTKDQQFLEQISDLEQKSTQLAEENRQLRNQVSHIPPVGKQSVADTENVIAEDGQSSESVMTALHSGSSQDNDDGSDVSLKLGLPCVAWK

SEQ ID NO: 33834 - protein, 228 aa, Zea mays subsp. mays
MARERREIKRIESAAARQVTFSKRRRGLFKKAEELSVLCDADVALIVFSSTGKLSQFASSSMNEIIDKYSTHSKNLGKAEQPSLDLNLEHSKYANLNEQLVEASLRLRQMRGEELEGLSVEELQQLEKNLESGLHRVLQTKDQQFLEQISDLEQKSTQLAEENRQLRNQVSHIPPVGKQSVADTENVIAEDGQSSESVMTALHSGSSQDNDDGSDVSLKLGLPCVAWK

SEQ ID NO: 33835 - protein, 167 aa, Zea mays subsp. mays
MNEIIDKYSTHSKNLGKAEQPSLDLNLEHSKYANLNEQLVEASLRLRQMRGEELEGLSVEELQQLEKNLESGLHRVLQTKDQQFLEQISDLEQKSTQLAEENRQLRNQVSHIPPVGKQSVADTENVIAEDGQSSESVMTALHSGSSQDNDDGSDVSLKLGLPCVAWK

SEQ ID NO: 33836 - DNA, 1286 bp, Zea mays subsp. mays
gcacgagaccattacctagaacatcctaatcaaaaaaccaaacaaactgaaccactgtccgctgcgtgctttccttcctctcaacgccagccttgccgagagcccgagaccaatcgccgccatctcccggaatgacggggtgacgaaaccgcgccgcaccagacaagacagaggagccgccgccgcgacccacaggccaccgggtcgccgaggaggggatccagcgagccatgtcgaccgacgtgcccatgagccccgagctcgagcaggtggacggcgagatccaggacatcttccgcgcgctccagaatgggttccagaagatggacaagatcaaggactccagcaggcagtccaagcagctggaggatctcacggccaagatgagagagtgcaagcgcttgatcaaagagtttgaccgtatactcaaggatgaggagaaaaagaacacccctgatgtcaacaagcagctcaatgacaagaagcagttcatgatcaaagaactcaactcctatgtgaccttaaggaaaacgtaccagagcagccttggtaataagaggatcgaactattcgatacgggtaatgaccaggtggctgagggaactccagttcaaatggcatcagaaatgtcaaatcaagaactcattagcaccggaaggaaacaaatggaccaaactgatcaagctattgagcgctcaaaaatggttgtagcacaaactgttgaagttggagctcagactgctgcaactctgacacagcaaacggaacaaatgaagaggataggcaatgagctagattctgtccacttttcactgaagaaggctagtcaaatggtgaaagagattggccgtcaggttgctactgacaaatgcattatggcgttcctgtttctgattgtctgtggtgtcattgcaataattgttgttaagattgtcaacccgcataacaagaacatcagagacattccgggcctagcacctcccgccatgaacaggaagctgctgtccatcgacgctgcaggactctgagcgttgtgaatggctgcctcccgcagcacagcgcaacgcagcgcgtcagagttctcttatgagccacgatacatggcttcgcgattcttttgtgcttgtagtttacgtccgcccattctttccctattgcattggtgagtagtagcctcaggtttgtagcgggactcttgttgtttattgcttgcgagcccatagctttctggttgtttgtgtatatgcggtagtgatgtgaatgtgagagtcgagtggagattcttc

SEQ ID NO: 33837 - protein, 265 aa, Zea mays subsp. mays
MSTDVPMSPELEQVDGEIQDIFRALQNGFQKMDKIKDSSRQSKQLEDLTAKMRECKRLIKEFDRILKDEEKKNTPDVNKQLNDKKQFMIKELNSYVTLRKTYQSSLGNKRIELFDTGNDQVAEGTPVQMASEMSNQELISTGRKQMDQTDQAIERSKMVVAQTVEVGAQTAATLTQQTEQMKRIGNELDSVHFSLKKASQMVKEIGRQVATDKCIMAFLFLIVCGVIAIIVVKIVNPHNKNIRDIPGLAPPAMNRKLLSIDAAGL

SEQ ID NO: 33838 - protein, 259 aa, Zea mays subsp. mays
MSPELEQVDGEIQDIFRALQNGFQKMDKIKDSSRQSKQLEDLTAKMRECKRLIKEFDRILKDEEKKNTPDVNKQLNDKKQFMIKELNSYVTLRKTYQSSLGNKRIELFDTGNDQVAEGTPVQMASEMSNQELISTGRKQMDQTDQAIERSKMVVAQTVEVGAQTAATLTQQTEQMKRIGNELDSVHFSLKKASQMVKEIGRQVATDKCIMAFLFLIVCGVIAIIVVKIVNPHNKNIRDIPGLAPPAMNRKLLSIDAAGL

SEQ ID NO: 33839 - protein, 234 aa, Zea mays subsp. mays
MDKIKDSSRQSKQLEDLTAKMRECKRLIKEFDRILKDEEKKNTPDVNKQLNDKKQFMIKELNSYVTLRKTYQSSLGNKRIELFDTGNDQVAEGTPVQMASEMSNQELISTGRKQMDQTDQAIERSKMVVAQTVEVGAQTAATLTQQTEQMKRIGNELDSVHFSLKKASQMVKEIGRQVATDKCIMAFLFLIVCGVIAIIVVKIVNPHNKNIRDIPGLAPPAMNRKLLSIDAAGL

SEQ ID NO: 33840 - DNA, 1739 bp, Zea mays subsp. mays
tagaacatcctaatcgaaaaaccctaccccccacacggccacacacacaccgccgcgtccgacccccacgccgtcgactgctcgaccggtcggctccgatggggtacgtgctgtcggcggtgggcagggtgctggagcagcccacggcgtggggggcggcctgggagatggcactcctcgcggggcccctgtgggcggcggccctcctcggcctgctgctcggctgggcctggcgcccgcgctgggcatccggcctcgtcgtcgccaccgcggacgacggcggtagccccgccgccgccgcgcagccgcccttcgccacgctcgacttctggaaggcccagctccccgcccgcctccgcgccccgctcggcaccgccgtgcagcagagggagggtgacacggacgccgtgcaacggaaccgcggaacggtggcgcttggcaggtcctcagagacggagacggcgacggtggcggtggggatggccgacctggtgaacctctggaggctggtggagggcgcggacggcggcccggcctggaccaagatgatggagaagtcgctgcccaccatgacctaccgggcgtggaggagggacgcccagaccgggcctccgcagtaccagagcagcagcatcttcgagaacgccagtccagaggaggtgagggacttcttcggggacgacgagttccggatgtccaacaggtgggacgacatgctcatctaccacaagaccctggaggagtgccggaccactgggacgatgaaagtgcattgggtccggaagttccccttcttctgcagcgacagggagtacataatcgcccggcggatatggaagctggggggcgcctattattgcgtcacaaagggcataccatgctcatccattccacggcgtagcagacctcggagagtcgatctgtattactcaagctggtgcatccgcgcagtggagtccaggagagggaacggaggaggaaggggggcgacggcctgtgaggttctgctgttccaccacgaggacatgggcatcccgtacgagatcgccaagctgggcatcaggcaggggatgtgggggtgcgtgaagaggatcgagccggggctccgggcctaccagcaggcgcgggccgcgggggcgccgccgtcgcggagcgccctgatggcccggatcaacaccaaggtcagcgccgacggtttcactcgccagtcgtcgtccagttccagcggcggcgacgggccggagaccgcggacgacgcgcaggagaccgagaacaagaagcccgcgacgaggagccacgcagcggcgaggctcctcgtgctcggcggcgcggtcgctctggcctgctgcacccttgaccaggggctcctgaccaaggctctcatcttcggcgtcgcgcggaggttcgtcgggcagaggaaggacgttgtagcgtcccacacaccttgtcgctcgtacggtcgtgccgtgtgctgatcgccgacgtcgagaagcgggggaaggaggtggtttgtgtgggctttgtggatgtgtaattggtgctgatgccattgtggctgaaagagagcggacgaagagcgttttggtgtctacgtgtgtatacgctgccggctgtcggatcacgagggagaggggtttcctactatatacatgtgtaaaaatttgtttcatgtaatcttgtatctgagtgaccagatcaggtgattatgcagatgagaagaacagagttttttttcggcc

SEQ ID NO: 33841 - protein, 490 aa, Zea mays subsp. mays
EHPNRKTLPPTRPHTHRRVRPPRRRLLDRSAPMGYVLSAVGRVLEQPTAWGAAWEMALLAGPLWAAALLGLLLGWAWRPRWASGLVVATADDGGSPAAAAQPPFATLDFWKAQLPARLRAPLGTAVQQREGDTDAVQRNRGTVALGRSSETETATVAVGMADLVNLWRLVEGADGGPAWTKMMEKSLPTMTYRAWRRDAQTGPPQYQSSSIFENASPEEVRDFFGDDEFRMSNRWDDMLIYHKTLEECRTTGTMKVHWVRKFPFFCSDREYIIARRIWKLGGAYYCVTKGIPCSSIPRRSRPRRVDLYYSSWCIRAVESRRGNGGGRGATACEVLLFHHEDMGIPYEIAKLGIRQGMWGCVKRIEPGLRAYQQARAAGAPPSRSALMARINTKVSADGFTRQSSSSSSGGDGPETADDAQETENKKPATRSHAAARLLVLGGAVALACCTLDQGLLTKALIFGVARRFVGQRKDVVASHTPCRSYGRAVC

SEQ ID NO: 33842 - protein, 458 aa, Zea mays subsp. mays
MGYVLSAVGRVLEQPTAWGAAWEMALLAGPLWAAALLGLLLGWAWRPRWASGLVVATADDGGSPAAAAQPPFATLDFWKAQLPARLRAPLGTAVQQREGDTDAVQRNRGTVALGRSSETETATVAVGMADLVNLWRLVEGADGGPAWTKMMEKSLPTMTYRAWRRDAQTGPPQYQSSSIFENASPEEVRDFFGDDEFRMSNRWDDMLIYHKTLEECRTTGTMKVHWVRKFPFFCSDREYIIARRIWKLGGAYYCVTKGIPCSSIPRRSRPRRVDLYYSSWCIRAVESRRGNGGGRGATACEVLLFHHEDMGIPYEIAKLGIRQGMWGCVKRIEPGLRAYQQARAAGAPPSRSALMARINTKVSADGFTRQSSSSSSGGDGPETADDAQETENKKPATRSHAAARLLVLGGAVALACCTLDQGLLTKALIFGVARRFVGQRKDVVASHTPCRSYGRAVC

SEQ ID NO: 33843 - protein, 435 aa, Zea mays subsp. mays
MALLAGPLWAAALLGLLLGWAWRPRWASGLVVATADDGGSPAAAAQPPFATLDFWKAQLPARLRAPLGTAVQQREGDTDAVQRNRGTVALGRSSETETATVAVGMADLVNLWRLVEGADGGPAWTKMMEKSLPTMTYRAWRRDAQTGPPQYQSSSIFENASPEEVRDFFGDDEFRMSNRWDDMLIYHKTLEECRTTGTMKVHWVRKFPFFCSDREYIIARRIWKLGGAYYCVTKGIPCSSIPRRSRPRRVDLYYSSWCIRAVESRRGNGGGRGATACEVLLFHHEDMGIPYEIAKLGIRQGMWGCVKRIEPGLRAYQQARAAGAPPSRSALMARINTKVSADGFTRQSSSSSSGGDGPETADDAQETENKKPATRSHAAARLLVLGGAVALACCTLDQGLLTKALIFGVARRFVGQRKDVVASHTPCRSYGRAVC

SEQ ID NO: 33844 - DNA, 683 bp, Zea mays subsp. mays
cttagcaagagagcacatgaagccgaagaacaggcgagcgagaaggtagcagaagcactggcacaggtagtgtcggcaaaggaatcagaagcaatgagcctggagagcctaaaggaagcgtccgatgaaatggacgagaagaaggaagctcttgagatcgccttggagagagccgggagggcgaacgaaggaaagcttggcgcggagcaggagcttaggaaatggagagccgaccacgagcagcgccgcagagctcacgaatccgcgaaacgcgcggtgaatcctttgaacggtccgtctagaatatttgtcgaacagaagggtccataccacaacgagcaggaatccaaggtgcaggtgtcggggagtagtagctacgagggcctcgttccaaaccaaaagatgcagaggaagaaatcgctgttccctctgatgggctcggttctatccaggaagacccgggcacagacgtgaggtaaacgagatcctataggcacctggggctttgccattcacattgctgtacattggtgtaataagctgttttcttttctcggtcttctttggaaagagcctttttgttttgttttaaaggttggtatatcctgtggaaggtgtaatttaatttgtcggtataaacagcgtagaacacattggaatactttttatatgatttttttggc

SEQ ID NO: 33845 - protein, 157 aa, Zea mays subsp. mays
LSKRAHEAEEQASEKVAEALAQVVSAKESEAMSLESLKEASDEMDEKKEALEIALERAGRANEGKLGAEQELRKWRADHEQRRRAHESAKRAVNPLNGPSRIFVEQKGPYHNEQESKVQVSGSSSYEGLVPNQKMQRKKSLFPLMGSVLSRKTRAQT

SEQ ID NO: 33846 - protein, 126 aa, Zea mays subsp. mays
MSLESLKEASDEMDEKKEALEIALERAGRANEGKLGAEQELRKWRADHEQRRRAHESAKRAVNPLNGPSRIFVEQKGPYHNEQESKVQVSGSSSYEGLVPNQKMQRKKSLFPLMGSVLSRKTRAQT

SEQ ID NO: 33847 - protein, 114 aa, Zea mays subsp. mays
MDEKKEALEIALERAGRANEGKLGAEQELRKWRADHEQRRRAHESAKRAVNPLNGPSRIFVEQKGPYHNEQESKVQVSGSSSYEGLVPNQKMQRKKSLFPLMGSVLSRKTRAQT

SEQ ID NO: 33848 - DNA, 572 bp, Zea mays subsp. mays
aatatagtaacgtacgatcagctgaatggtcgtgtgagaggcgacgctcgctagcgaccgacgtcgtctcgccgttcagcatgcattattgcacgctttggttacgtatgtatggttgctaacggtgaccgtgtgcgccgccgccgcgcgctgggattgcttttgttgttgttgcagtacacgatggagcgcggggtggtgcacgcgtgccacgccggcggcgtggtgcactgcctggaagggtgggagcaccacgaggtgggcgccctcgaggtggaccggatcgacgtcgtgtgggaggcggcgctcaagcacgggctcacgccggcgtgagctggcgggcgcccggagcgggagaccgagacggccggcgcgcgcggcccccgcccggaaataacgcgtcgtctattcgttgtcgcatggctgttgcgacgggtgggtgggtgtgctaccgtgtactactactaccagctactagctaccatagtccaagactgctgcaagcgcaatgcaacagagttgataggctggttcgcatataccaatactcttatgtacgtacgaatactgcg

SEQ ID NO: 33849 - protein, 73 aa, Zea mays subsp. mays
MVANGDRVRRRRALGLLLLLLQYTMERGVVHACHAGGVVHCLEGWEHHEVGALEVDRIDVVWEAALKHGLTPA

SEQ ID NO: 33850 - protein, 51 aa, Zea mays subsp. mays
MAVATGGWVCYRVLLLPATSYHSPRLLQAQCNRVDRLVRIYQYSYVRTNTA

SEQ ID NO: 33851 - protein, 49 aa, Zea mays subsp. mays
MERGVVHACHAGGVVHCLEGWEHHEVGALEVDRIDVVWEAALKHGLTPA

SEQ ID NO: 33852 - DNA, 2056 bp, Zea mays subsp. mays
gcacgagaccattacctagaacatcctaatcgaaaaccgacgagtggcgttgagcacagaagacgacgagtggagtggagtaggacacgaggtggttccggccggcccactcgcagaatcttctgccactgcccttccatctcgtcccttagctacaagtcatctcgccgcaaccggaacccgcagccatggggacggaggcggagcagccggacatggacagccaccgaaacgacggcgtcgtggtggtgccagcgccgcgcccgcgtaaggggctcgcctcctgggcgcttgacctgctcgagtccctcgccgtgcgcctcggccacgacaagaccaagccgctccactggctctccggcaacttcgcccccgtcgtcgaggagaccccgccggccccaaaccttagcgtccgcggacacctcccggagtgcttgaatggagagtttgtcagggttgggcctaatccgaagtttgctcctgttgcggggtatcactggtttgatggagacgggatgattcatgccatgcgtattaaggatggaaaagctacctatgtatcaagatatgtgaagactgcccgcctcaaacaagaggagtattttggtggagcaaagtttatgaagattggagaccttaagggattttttggattgtttatggtccaaatgcagcaacttcggaaaaaattcaaagtcttggattttacctatggatttgggacagctaatactgcacttatatatcatcatggtaaactcatggccttgtcagaagcagataagccatatgttgttaaggtccttgaagatggagacttgcagactcttggcttgttggattatgacaaaaggttgaaacattcttttactgcccatccaaaggttgacccttttacagatgaaatgttcacattcggatattcacatgaacctccatactgtacataccgtgtgattaacaaagaaggagctatgcttgatcctgtgccaataacaataccggaatctgtaatgatgcatgattttgccatcacagagaattactctatttttatggacctccctttattgttccgaccaaaggaaatggtgaagaacggtgagtttatctacaagtttgatcctacaaagaaaggtcgttttggtattctcccccgctatgcaaaggatgacaaactcatcagatggtttcaactccctaattgtttcatattccataatgctaatgcttgggaagagggtgatgaagttgttctcattacctgccgccttgagaatccagatttggacaaggtgaatggatatcaaagtgacaagctcgaaaacttcgggaatgagctgtacgagatgagattcaacatgaaaacgggtgctgcttcacaaaagcaattgtctgtttctgctgtggattttcctcgtgttaatgagagctatactggcagaaagcagcggtatgtctactgcactatacttgacagcattgcgaaggtgactggcatcataaagtttgatctgcatgctgaaccggaaagtggtgtgaaagaacttgaagtgggaggaaatgtacaaggcatatatgacctgggacctggtagatttggttcagaggcgatttttgttcccaagcatccaggtgtgtccggagaagaagatgacggctatttgatattctttgtacacgacgagaatacagggaaatctgaagtaaatgttatcgatgcaaagacaatgtctgctgatccagttgcggtggttgagcttcctaatagggttccttatggattccatgccttctttgcaactgaggaccaactggctcgacaggcggaggggcagtgaagatacggcacctgcagattctgcacacgcgggtacaggttggaaattattgcagaggacatgtatatgtatatgacaagtttattacacatgtattcgaaccacacattacacaagtttattgcaggacgtgtattcgaaccacacattacacatgtatatgtgtaggacaagtttattacagtcctgattgattgcaaattactcagtctgtc

SEQ ID NO: 33853 - protein, 550 aa, Zea mays subsp. mays
MGTEAEQPDMDSHRNDGVVVVPAPRPRKGLASWALDLLESLAVRLGHDKTKPLHWLSGNFAPVVEETPPAPNLSVRGHLPECLNGEFVRVGPNPKFAPVAGYHWFDGDGMIHAMRIKDGKATYVSRYVKTARLKQEEYFGGAKFMKIGDLKGFFGLFMVQMQQLRKKFKVLDFTYGFGTANTALIYHHGKLMALSEADKPYVVKVLEDGDLQTLGLLDYDKRLKHSFTAHPKVDPFTDEMFTFGYSHEPPYCTYRVINKEGAMLDPVPITIPESVMMHDFAITENYSIFMDLPLLFRPKEMVKNGEFIYKFDPTKKGRFGILPRYAKDDKLIRWFQLPNCFIFHNANAWEEGDEVVLITCRLENPDLDKVNGYQSDKLENFGNELYEMRFNMKTGAASQKQLSVSAVDFPRVNESYTGRKQRYVYCTILDSIAKVTGIIKFDLHAEPESGVKELEVGGNVQGIYDLGPGRFGSEAIFVPKHPGVSGEEDDGYLIFFVHDENTGKSEVNVIDAKTMSADPVAVVELPNRVPYGFHAFFATEDQLARQAEGQ

SEQ ID NO: 33854 - protein, 541 aa, Zea mays subsp. mays
MDSHRNDGVVVVPAPRPRKGLASWALDLLESLAVRLGHDKTKPLHWLSGNFAPVVEETPPAPNLSVRGHLPECLNGEFVRVGPNPKFAPVAGYHWFDGDGMIHAMRIKDGKATYVSRYVKTARLKQEEYFGGAKFMKIGDLKGFFGLFMVQMQQLRKKFKVLDFTYGFGTANTALIYHHGKLMALSEADKPYVVKVLEDGDLQTLGLLDYDKRLKHSFTAHPKVDPFTDEMFTFGYSHEPPYCTYRVINKEGAMLDPVPITIPESVMMHDFAITENYSIFMDLPLLFRPKEMVKNGEFIYKFDPTKKGRFGILPRYAKDDKLIRWFQLPNCFIFHNANAWEEGDEVVLITCRLENPDLDKVNGYQSDKLENFGNELYEMRFNMKTGAASQKQLSVSAVDFPRVNESYTGRKQRYVYCTILDSIAKVTGIIKFDLHAEPESGVKELEVGGNVQGIYDLGPGRFGSEAIFVPKHPGVSGEEDDGYLIFFVHDENTGKSEVNVIDAKTMSADPVAVVELPNRVPYGFHAFFATEDQLARQAEGQ

SEQ ID NO: 33855 - protein, 441 aa, Zea mays subsp. mays
MIHAMRIKDGKATYVSRYVKTARLKQEEYFGGAKFMKIGDLKGFFGLFMVQMQQLRKKFKVLDFTYGFGTANTALIYHHGKLMALSEADKPYVVKVLEDGDLQTLGLLDYDKRLKHSFTAHPKVDPFTDEMFTFGYSHEPPYCTYRVINKEGAMLDPVPITIPESVMMHDFAITENYSIFMDLPLLFRPKEMVKNGEFIYKFDPTKKGRFGILPRYAKDDKLIRWFQLPNCFIFHNANAWEEGDEVVLITCRLENPDLDKVNGYQSDKLENFGNELYEMRFNMKTGAASQKQLSVSAVDFPRVNESYTGRKQRYVYCTILDSIAKVTGIIKFDLHAEPESGVKELEVGGNVQGIYDLGPGRFGSEAIFVPKHPGVSGEEDDGYLIFFVHDENTGKSEVNVIDAKTMSADPVAVVELPNRVPYGFHAFFATEDQLARQAEGQ

SEQ ID NO: 33856 - DNA, 1718 bp, Zea mays subsp. mays
gcacgagaccattacctagaacatcctaatcgaaaaacggacatcccctggcccctgccgctccccacccatctccgatctgcgattccttccagccgacgcctccgcatccacctccccggagccaccagcggccagccactggccgtccaaccatcgtccccaagcggcgagttgcggggtgtggcgaagatgatcagcaggcagctcgtgctgacctacctctacctgctgatctacatctgcctctcttcgggcgtcatcctgttcaacaaatgggtcctttctccaaagtacttcaaattccctttccctatcacgcttacgatgattcacatggcattttctggaatcgtgacattcttccttgtccgagtttttaaggttgttgcacccgtcaagatgactttccatatatatgccacatgtgtgattccaattagtgcctttttcgcttcaagtctgtggtttggcaacacggcgtacttgtatatttccgtggccttcattcagatgctcaaggccttgatgcctgtagcaacatttataatggctgttttctgtggtactgacaaattaagatgggacctcttcttgaacatggtattggtcagtgttggtgttgtagtttcatcttatggtgagatccactttaatgtgattggaaccttgtaccaagtcactggtatctttgcggaagccctcaggctggtcctaactcaggtccttctccaaaagaagggcttaaccctgaatcccattacaagcttgtattacatagccccttgcagtttcatcttcctgtttattccatggtatttactggaaaagccagaaatggacgtgactcaaattcaattcaactattcaatatttttcctgaatgcactttctgcattcgcattgaacatatccatattcttagttattggaagaactggagctgtcaccattcgagttgctggtgttctgaaggactggatacttattgctctctcaactattatcttccctgaatccgttattacaagtctcaacataattggatacgcagttgcgctctcttgtgttgtcctgtacaattatctgaagatgaaagatgtcagagcaaaccagcttccagcagataataattctgatagggctacaaaggacaagaagtcttctagtatgttcaggcctgacaattccatggacaacagtgatgggactgtagcaggaggcctggcatcagaagctgcagcagttgatgaggaagcccctttgatcccttctgcacgcctctcctacgttacacggacccaaacaggcagctccagtaacagataaccatggtgtacctgttctgtgggttgaccaccatatatttttgttccggtgaacctgaaagaggtgctggtatacgtgtggaaaagaatatggttaaggaagctcctgcaagtcgcacctcatctcataccatgacgacacctggatgtctcctctcgatgtacctttttcgctaggcgtgtatatttcggggagatacctagaggtggattagagaacttgaagagataggctataacttttgcttagtatttggagaaacacgttaggccatgtgttggctatagtatttccttaaccaaacatatggaaatggtgttaaacgttagatgttgtgaagcacttcataggctctaatttgagtgttagtgttgtttccttttcggttc

SEQ ID NO: 33857 - protein, 442 aa, Zea mays subsp. mays
ARDHYLEHPNRKTDIPWPLPLPTHLRSAIPSSRRLRIHLPGATSGQPLAVQPSSPSGELRGVAKMISRQLVLTYLYLLIYICLSSGVILFNKWVLSPKYFKFPFPITLTMIHMAFSGIVTFFLVRVFKVVAPVKMTFHIYATCVIPISAFFASSLWFGNTAYLYISVAFIQMLKALMPVATFIMAVFCGTDKLRWDLFLNMVLVSVGVVVSSYGEIHFNVIGTLYQVTGIFAEALRLVLTQVLLQKKGLTLNPITSLYYIAPCSFIFLFIPWYLLEKPEMDVTQIQFNYSIFFLNALSAFALNISIFLVIGRTGAVTIRVAGVLKDWILIALSTIIFPESVITSLNIIGYAVALSCVVLYNYLKMKDVRANQLPADNNSDRATKDKKSSSMFRPDNSMDNSDGTVAGGLASEAAAVDEEAPLIPSARLSYVTRTQTGSSSNR

SEQ ID NO: 33858 - protein, 378 aa, Zea mays subsp. mays
MISRQLVLTYLYLLIYICLSSGVILFNKWVLSPKYFKFPFPITLTMIHMAFSGIVTFFLVRVFKVVAPVKMTFHIYATCVIPISAFFASSLWFGNTAYLYISVAFIQMLKALMPVATFIMAVFCGTDKLRWDLFLNMVLVSVGVVVSSYGEIHFNVIGTLYQVTGIFAEALRLVLTQVLLQKKGLTLNPITSLYYIAPCSFIFLFIPWYLLEKPEMDVTQIQFNYSIFFLNALSAFALNISIFLVIGRTGAVTIRVAGVLKDWILIALSTIIFPESVITSLNIIGYAVALSCVVLYNYLKMKDVRANQLPADNNSDRATKDKKSSSMFRPDNSMDNSDGTVAGGLASEAAAVDEEAPLIPSARLSYVTRTQTGSSSNR

SEQ ID NO: 33859 - protein, 333 aa, Zea mays subsp. mays
MIHMAFSGIVTFFLVRVFKVVAPVKMTFHIYATCVIPISAFFASSLWFGNTAYLYISVAFIQMLKALMPVATFIMAVFCGTDKLRWDLFLNMVLVSVGVVVSSYGEIHFNVIGTLYQVTGIFAEALRLVLTQVLLQKKGLTLNPITSLYYIAPCSFIFLFIPWYLLEKPEMDVTQIQFNYSIFFLNALSAFALNISIFLVIGRTGAVTIRVAGVLKDWILIALSTIIFPESVITSLNIIGYAVALSCVVLYNYLKMKDVRANQLPADNNSDRATKDKKSSSMFRPDNSMDNSDGTVAGGLASEAAAVDEEAPLIPSARLSYVTRTQTGSSSNR

SEQ ID NO: 33860 - DNA, 1534 bp, Zea mays subsp. mays
gcacgagaccattacctagaacatcctaatcgaaaaaaaagcgaacgaggcaggcgctcctccgcaccaccgtacaccggacccggagcagctcgccgccgaacccagcgctgaaccgacggggagaggcgaggccgcgctttaccccgggaactacgaagcaacgacggcgggactgagcaggcggggatatgactgtgatcaaggcagctggagcggagccgtgcggagacggcggcgcgtacggcgcgaggcggcggcagtcgctgcgggcgcggtacgcgtacgggttcgtcttcttcgccaccaacctgctggcctggttcgtcagggactacggggcaagggcgctccgcggcttgcatcatgtgccggtctgcggagcaggggactccaagtgcttccagtccggaggagtgcttcgagtaagcttgggctgcttcatatttttctgggtgatgtttgccacaacatttggaactcgcaagctccatgaagctcgtaattcgtggcattctggatgttggattctgaagtctcttgtgtatgccatgtcgatcggcatcccatttatcatccctaacatcttcatccaattttatggtgaagttgctcgactgggtgccgggatatttctcctcctccagctcataagcatgctccacttcatatcatggtgcaataaacgatggatgccagatcctggatcaaatcaatgtgggttgtttgggttattcttgtcaaccatctcctacattgcttcgtttgttggaattggcgtgctgtatgttctgtatgtccccaactcctcttgtgcgttcaacatcttcactattacatggatggcaatcttggtgactataatgatggcagtatcattgcactccaaggttaacgagggtcttctctcttctgggatcatgagttcatatattgttttcctttgttggtctgcactccacagtgagccgcaaactgggaagtgccactctcatatgaaaattgcccaggatggcgattcagctactatcgttagcttcattatcgcaatttgttccattgtaatggccacgttttctactggaatcgacaccaaatccttccagtttcggaatgataaagtacaattggatgaggacatcccctacagctacgagattttccacattgtgtttgcgatgggggctatgtacttcgcaatgctgttcattagctgggagcttaatcacccaacaagaaagtggagcatagatgttggatgggcaagtacatgggtgaagatcatcaacgagtggttcgcggctagcatatacctctggaggttgatctccccagtcgtattgaggaaccaacttgccaatgaagagttgatgccacacaggcctacagtatagttttgatgatatagagaaaacgagttctataacccgctgattctttccttctaaaaagatcgctatatgctttattcttttaatacacttgtacatcgaaactcgaaaccacacgaaaaaaagactaggaattcttgtct

SEQ ID NO: 33861 - protein, 400 aa, Zea mays subsp. mays
MTVIKAAGAEPCGDGGAYGARRRQSLRARYAYGFVFFATNLLAWFVRDYGARALRGLHHVPVCGAGDSKCFQSGGVLRVSLGCFIFFWVMFATTFGTRKLHEARNSWHSGCWILKSLVYAMSIGIPFIIPNIFIQFYGEVARLGAGIFLLLQLISMLHFISWCNKRWMPDPGSNQCGLFGLFLSTISYIASFVGIGVLYVLYVPNSSCAFNIFTITWMAILVTIMMAVSLHSKVNEGLLSSGIMSSYIVFLCWSALHSEPQTGKCHSHMKIAQDGDSATIVSFIIAICSIVMATFSTGIDTKSFQFRNDKVQLDEDIPYSYEIFHIVFAMGAMYFAMLFISWELNHPTRKWSIDVGWASTWVKIINEWFAASIYLWRLISPVVLRNQLANEELMPHRPTV

SEQ ID NO: 33862 - protein, 311 aa, Zea mays subsp. mays
MFATTFGTRKLHEARNSWHSGCWILKSLVYAMSIGIPFIIPNIFIQFYGEVARLGAGIFLLLQLISMLHFISWCNKRWMPDPGSNQCGLFGLFLSTISYIASFVGIGVLYVLYVPNSSCAFNIFTITWMAILVTIMMAVSLHSKVNEGLLSSGIMSSYIVFLCWSALHSEPQTGKCHSHMKIAQDGDSATIVSFIIAICSIVMATFSTGIDTKSFQFRNDKVQLDEDIPYSYEIFHIVFAMGAMYFAMLFISWELNHPTRKWSIDVGWASTWVKIINEWFAASIYLWRLISPVVLRNQLANEELMPHRPTV

SEQ ID NO: 33863 - protein, 280 aa, Zea mays subsp. mays
MSIGIPFIIPNIFIQFYGEVARLGAGIFLLLQLISMLHFISWCNKRWMPDPGSNQCGLFGLFLSTISYIASFVGIGVLYVLYVPNSSCAFNIFTITWMAILVTIMMAVSLHSKVNEGLLSSGIMSSYIVFLCWSALHSEPQTGKCHSHMKIAQDGDSATIVSFIIAICSIVMATFSTGIDTKSFQFRNDKVQLDEDIPYSYEIFHIVFAMGAMYFAMLFISWELNHPTRKWSIDVGWASTWVKIINEWFAASIYLWRLISPVVLRNQLANEELMPHRPTV

SEQ ID NO: 33864 - DNA, 1098 bp, Zea mays subsp. mays
  misc_feature (721)..(721): n is a, c, g, or t
gcacgtttctctgcgactcgcacggcccgcgcccaccaccgaccaccccacctggttcggtcggcactcggcaccccgccccgcatacatgccgccgcccagcctcaccgtggcgcgcgacccggccgccgccgccaccacgcggcaccgcaaggtccacccgacgccgggcggaggcgcagggacgacgaaggagatgggcgcggcggaggggtgggcgcggcccgagtggtgctcggcggcgggcgccgcggccgtgctgcggcggcacccggcgcccgcgctcttcgggtgcggcctcctgctcttcatggccgtcgagtacaccatccccatggtcaggccggacgcgccgccgctcgacctgggcttcgtcgccaccaggggcttgcacgccgccgtcgccgcgaggccctggctcaactcgctcctcgccgcgctcaacacggtcttcgtcgcgatgcaggcggcgtacatcctgtgggccatcctcggcgagcagcggccgcgcgccgccgtcgccacgctcatgatgttcacctgccggggcgcgctgggctgcgccacccagctcccgctgccggaggagttcctggggtccgggatggacttccccgtgggcaacgtctccttcttcctcttcttctcgggccacgtcgcgggcgcggtcatcgcggccgccgacatgcgccgcgagggccggctggcgctggcgcgcctntacgacgcgctcaacgcgctccagggggtcaggctgctggcgtgcaggggacactacaccatcgacctggccgtcggtgtcggagcggggatcctcttcgatacgctctccggatggtacttccacgccaagaacgcaccggagaagcactgccgcagctgccagtgccacaaggctctcctttcacgctagctcataggtgtggtgtgtttggtaagttactgtagcggtgctgttttgtaagaaatggttttgattgccagtcgttgtgatagttttcatcgcgggtttataatacgaatcgactgagaactattttcgccaacgattcgatatactaaccgttgtgaaaaatatgttataggtgtatttatcct

SEQ ID NO: 33865 - protein, 315 aa, Zea mays subsp. mays
  misc_feature (241)..(241): Xaa can be any naturally occurring amino acid
ARFSATRTARAHHRPPHLVRSALGTPPRIHAAAQPHRGARPGRRRHHAAPQGPPDAGRRRRDDEGDGRGGGVGAARVVLGGGRRGRAAAAPGARALRVRPPALHGRRVHHPHGQAGRAAARPGLRRHQGLARRRRREALAQLAPRRAQHGLRRDAGGVHPVGHPRRAAAARRRRHAHDVHLPGRAGLRHPAPAAGGVPGVRDGLPRGQRLLLPLLLGPRRGRGHRGRRHAPRGPAGAGAPXRRAQRAPGGQAAGVQGTLHHRPGRRCRSGDPLRYALRMVLPRQERTGEALPQLPVPQGSPFTLAHRCGVFGKLL

SEQ ID NO: 33866 - protein, 303 aa, Zea mays subsp. mays
  misc_feature (240)..(240): Xaa can be any naturally occurring amino acid
HVSLRLARPAPTTDHPTWFGRHSAPRPAYMPPPSLTVARDPAAAATTRHRKVHPTPGGGAGTTKEMGAAEGWARPEWCSAAGAAAVLRRHPAPALFGCGLLLFMAVEYTIPMVRPDAPPLDLGFVATRGLHAAVAARPWLNSLLAALNTVFVAMQAAYILWAILGEQRPRAAVATLMMFTCRGALGCATQLPLPEEFLGSGMDFPVGNVSFFLFFSGHVAGAVIAAADMRREGRLALARXYDALNALQGVRLLACRGHYTIDLAVGVGAGILFDTLSGWYFHAKNAPEKHCRSCQCHKALLSR

SEQ ID NO: 33867 - protein, 274 aa, Zea mays subsp. mays
  misc_feature (211)..(211): Xaa can be any naturally occurring amino acid
MPPPSLTVARDPAAAATTRHRKVHPTPGGGAGTTKEMGAAEGWARPEWCSAAGAAAVLRRHPAPALFGCGLLLFMAVEYTIPMVRPDAPPLDLGFVATRGLHAAVAARPWLNSLLAALNTVFVAMQAAYILWAILGEQRPRAAVATLMMFTCRGALGCATQLPLPEEFLGSGMDFPVGNVSFFLFFSGHVAGAVIAAADMRREGRLALARXYDALNALQGVRLLACRGHYTIDLAVGVGAGILFDTLSGWYFHAKNAPEKHCRSCQCHKALLSR

SEQ ID NO: 33868 - DNA, 4403 bp, Zea mays subsp. mays
gcacgagaccattacctagaacatcctaatcaaaaaatcacacggccgtgaggagcaactctgttcctcatctcccgttcaccccgcgggcgcagggcgcgctctctcctcgtggcgatcgccgaccgtagcggccgctgcccgggttttcgtcggccgcttcgccatgtcttcgctggacccttcgccagcgacgagcacccaacagcagaagcaattggagagtttggtaaatctactgacgcagggaagcaggttctaccgcaaagcatataatgaactgttctcaggtgtaactactgagcaggatccggattcatcgactaatattcctgagtatatgctttttgggtggcatctcttcttaatgctccatttgagatcaccagaattgttcaaggacctggtgtcctgcatccatggattagttgctgtgttggccatacttttgattcacgtgccagctaaatttaggagcttcacgattgaaggctcttctcacttaatcaaacaaactgagaaaggcgtggatcttattgcttcattatgtcataactatcatacctctgaagaacgtttgaaagaaatgttgcacaagtctcacaatgcaatagaagacattttccatatgaaagcactaagtgcttcagagtgcaaaccagaaaatttggataagatagacacagatgacctgatgtatttcaaaggtctgattgatatggaatgtttccagtcaaatttggaaaaaatggagaaactatgtaattctaatagctgtaaaggggagcttgattttaaatcaattttgatcaataatgattatattccctatgatgagaactcgacgggggattccaccaatttaggacattcaaagtgtgcctttgaaacattggcatctcccacaaagacaataaagaacatgctgactgttcctagttctcctttgtcaccagccaccggtggttcagtcaagattgtgcaaatgacaccagtaacttctgccatgacgacagctaagtggcttcgtgaggtgatatcttcattgccagataagccttcatctaagcttcagcagtttctgtcatcatgcgatagggatttgacaaatgctgtcacagaaagggtcagcatagttttggaagcaatttttccaaccaaatcttctgccaatcggggtgtatcgttaggtctcaattgtgcaaatgcctttgacattccgtgggcagaagccagaaaagtggaggcttccaagttgtactatagggtattagaggcaatctgcagagcggagttacaaaacagcaatgtaaataatctaactccattgctgtcaaatgagcgtttccaccgatgtttgattgcatgttcagcggacttagtattggcgacacataagacagtcatcatgatgtttcctgctgttcttgagagtaccggtctaactgcatttgatttgagcaaaataattgagaactttgtgagacatgaagagaccctcccaagagaattgaaaaggcacctaaattccttagaagaacagcttttggaaagcatggcatgggagaaaggttcatcattgtataactcactgattgttgccaggccatctgttgcttcagaaataaaccgccttggtcttttggctgaaccaatgccatctcttgatgacttagtgtcaaggcagaatgttcgtatcgagggcttgcctgctacaccatctaaaaaacgtgctgctggtccagatgacaacgctgatcctcgatcaccaaagagatcgtgcaatgaatctaggaacacagtagtagagcgcaatttgcagacacctccacccaagcaaagccacatggtgtcaactagtttgaaagcaaaatgccatccactccagtccacatttgcaagtccaactgtctgtaatcctgttggtgggaatgaaaaatgtgctgacgtgacaattcatatattcttttccaagattctgaagttggctgctattagaataagaaacttgtgcgaaagggttcaatgtgtggaacagacagagcgtgtctataatgtcttcaagcagattcttgagcaacagacaacattattttttaatagacacatcgatcaacttatcctttgctgtctttatggtgttgcaaaggtttgtcaattagaactcacattcagggagatactcaacaattacaaaagagaagcacaatgcaagccagaagttttttcaagtatctatattgggagtacgaaccgtaatggggtattagtatcgcgccatgttggtatcattactttttacaatgaggtatttgttccagcagcgaagcctttcctggtgtcactaatatcatctggtactcatccagaagacaagaagaatgctagtggccaaattcctggatcacccaagccatctcctttcccaaatttaccagatatgtccccgaagaaagtttcagcatctcataatgtatatgtgtctcctttgcggcaaaccaagttggatctactgctgtcaccaagttccaggagtttttatgcatgcattggtgaaggcacccatgcttatcagagcccatctaaggatttggctgctataaatagccgcctaaattataatggcaggaaagtaaacagtcgattaaatttcgacatggtgagtgactcagtggtagccggcagtctgggccagataaatggtggttctacctcggatcctgcagctgcatttagccccctttcaaagaagagagagacagatacttgatcaattataaatggtggcctctctcgtatatagctcacagatccgtgctccgtagcagtctattcttctgaataagtggattaactggagcgatttaactgtacatgtatgtgttagtgagaagcagcagtttttaggcagcaaactgtttcaagttagcttttgagctatcaccatttctctgctgattgaacatatccgctgtgtagagtgctaatgaatctttagttttcattgggctgacataacaaatctttatcctagttggctggttgttgggaggcattcatcagggttatatttggttgtcaaaaagtactgtacttaattcacatctttcacatttttcactagcaatagcagccccaaattgctttcctgactaggaacatattctttacaggtataagcatgccaactctaaactatatgaatcctttttatattctcatttttaagtacttctctgtttctgctacttttgtactgtatatttccagcttctccatcagactgatgatcccatattcagtgtgctgcaagtgatttgacatatgtggcttatccttcaggtatgtctcatgttgtgacttcattgctgattgcttttgtaatggtactgttgagttcatttctggttacaatcagcctttactgctttatattgttctactaattttggcttgcacagccaggacgattggttttctgcatcaatcaatcttttttaggacaagatatttttgtatgctacacttcccaaattgcaattaatccagaagtctaccttgttttattctattagttctcagcaacagtgaatgaatatgaatcagtcatgctgatagatgttcatctggttattccaaacaatctgacatcgcatctctttctgcaagtgagatgaagaaaacctgaaatgctatcaccatttaaaacattggcttctgaagttcaggtgattagcaggagacgttctgacattgccattgacatgtacggtagtgatggcaggagacgttcttaaacagcagctgctccttcagcttgtaatgtctgattgtattgaccaagagcatccaccttgccttatggtactaactgaatgagctggtgacgctgactcatctgcataatggcagatgcttaaccatctttaggagctcatgtcatgattccagctgcaccgtgtgcaaatgtgaaggccctgcaagggctttccaggccgcaccaatcctgcttgcttcttgaagatacatatggtgccacctaaataaaagctgtttctggttatgtctgtccttgacatgtcaacagattagtgttgggttgcagtcgtgtggtgtttaagtcttggagaaggcgagaagtcattgctgccagcattgtgtcgtcaggcacagaagtactcaaaagtgagagctactttgttgcgagcaaacggagggcgatataggttgatagccaatttcagttctctatatacaagcagcggattttgtttagagttagcttttgagatgcatcatttctttcacatctgattctgtgtgttgtaactcggagtcgcgtagaagttagaatgctaactgacccttaattttcaccgaataatttgctagcgtttttcagt

SEQ ID NO: 33869 - protein, 867 aa, Zea mays subsp. mays
MSSLDPSPATSTQQQKQLESLVNLLTQGSRFYRKAYNELFSGVTTEQDPDSSTNIPEYMLFGWHLFLMLHLRSPELFKDLVSCIHGLVAVLAILLIHVPAKFRSFTIEGSSHLIKQTEKGVDLIASLCHNYHTSEERLKEMLHKSHNAIEDIFHMKALSASECKPENLDKIDTDDLMYFKGLIDMECFQSNLEKMEKLCNSNSCKGELDFKSILINNDYIPYDENSTGDSTNLGHSKCAFETLASPTKTIKNMLTVPSSPLSPATGGSVKIVQMTPVTSAMTTAKWLREVISSLPDKPSSKLQQFLSSCDRDLTNAVTERVSIVLEAIFPTKSSANRGVSLGLNCANAFDIPWAEARKVEASKLYYRVLEAICRAELQNSNVNNLTPLLSNERFHRCLIACSADLVLATHKTVIMMFPAVLESTGLTAFDLSKIIENFVRHEETLPRELKRHLNSLEEQLLESMAWEKGSSLYNSLIVARPSVASEINRLGLLAEPMPSLDDLVSRQNVRIEGLPATPSKKRAAGPDDNADPRSPKRSCNESRNTVVERNLQTPPPKQSHMVSTSLKAKCHPLQSTFASPTVCNPVGGNEKCADVTIHIFFSKILKLAAIRIRNLCERVQCVEQTERVYNVFKQILEQQTTLFFNRHIDQLILCCLYGVAKVCQLELTFREILNNYKREAQCKPEVFSSIYIGSTNRNGVLVSRHVGIITFYNEVFVPAAKPFLVSLISSGTHPEDKKNASGQIPGSPKPSPFPNLPDMSPKKVSASHNVYVSPLRQTKLDLLLSPSSRSFYACIGEGTHAYQSPSKDLAAINSRLNYNGRKVNSRLNFDMVSDSVVAGSLGQINGGSTSDPAAAFSPLSKKRETDT

SEQ ID NO: 33870 - protein, 809 aa, Zea mays subsp. mays
MLFGWHLFLMLHLRSPELFKDLVSCIHGLVAVLAILLIHVPAKFRSFTIEGSSHLIKQTEKGVDLIASLCHNYHTSEERLKEMLHKSHNAIEDIFHMKALSASECKPENLDKIDTDDLMYFKGLIDMECFQSNLEKMEKLCNSNSCKGELDFKSILINNDYIPYDENSTGDSTNLGHSKCAFETLASPTKTIKNMLTVPSSPLSPATGGSVKIVQMTPVTSAMTTAKWLREVISSLPDKPSSKLQQFLSSCDRDLTNAVTERVSIVLEAIFPTKSSANRGVSLGLNCANAFDIPWAEARKVEASKLYYRVLEAICRAELQNSNVNNLTPLLSNERFHRCLIACSADLVLATHKTVIMMFPAVLESTGLTAFDLSKIIENFVRHEETLPRELKRHLNSLEEQLLESMAWEKGSSLYNSLIVARPSVASEINRLGLLAEPMPSLDDLVSRQNVRIEGLPATPSKKRAAGPDDNADPRSPKRSCNESRNTVVERNLQTPPPKQSHMVSTSLKAKCHPLQSTFASPTVCNPVGGNEKCADVTIHIFFSKILKLAAIRIRNLCERVQCVEQTERVYNVFKQILEQQTTLFFNRHIDQLILCCLYGVAKVCQLELTFREILNNYKREAQCKPEVFSSIYIGSTNRNGVLVSRHVGIITFYNEVFVPAAKPFLVSLISSGTHPEDKKNASGQIPGSPKPSPFPNLPDMSPKKVSASHNVYVSPLRQTKLDLLLSPSSRSFYACIGEGTHAYQSPSKDLAAINSRLNYNGRKVNSRLNFDMVSDSVVAGSLGQINGGSTSDPAAAFSPLSKKRETDT

SEQ ID NO: 33871 - protein, 800 aa, Zea mays subsp. mays
MLHLRSPELFKDLVSCIHGLVAVLAILLIHVPAKFRSFTIEGSSHLIKQTEKGVDLIASLCHNYHTSEERLKEMLHKSHNAIEDIFHMKALSASECKPENLDKIDTDDLMYFKGLIDMECFQSNLEKMEKLCNSNSCKGELDFKSILINNDYIPYDENSTGDSTNLGHSKCAFETLASPTKTIKNMLTVPSSPLSPATGGSVKIVQMTPVTSAMTTAKWLREVISSLPDKPSSKLQQFLSSCDRDLTNAVTERVSIVLEAIFPTKSSANRGVSLGLNCANAFDIPWAEARKVEASKLYYRVLEAICRAELQNSNVNNLTPLLSNERFHRCLIACSADLVLATHKTVIMMFPAVLESTGLTAFDLSKIIENFVRHEETLPRELKRHLNSLEEQLLESMAWEKGSSLYNSLIVARPSVASEINRLGLLAEPMPSLDDLVSRQNVRIEGLPATPSKKRAAGPDDNADPRSPKRSCNESRNTVVERNLQTPPPKQSHMVSTSLKAKCHPLQSTFASPTVCNPVGGNEKCADVTIHIFFSKILKLAAIRIRNLCERVQCVEQTERVYNVFKQILEQQTTLFFNRHIDQLILCCLYGVAKVCQLELTFREILNNYKREAQCKPEVFSSIYIGSTNRNGVLVSRHVGIITFYNEVFVPAAKPFLVSLISSGTHPEDKKNASGQIPGSPKPSPFPNLPDMSPKKVSASHNVYVSPLRQTKLDLLLSPSSRSFYACIGEGTHAYQSPSKDLAAINSRLNYNGRKVNSRLNFDMVSDSVVAGSLGQINGGSTSDPAAAFSPLSKKRETDT

SEQ ID NO: 33872 - DNA, 2036 bp, Zea mays subsp. mays
  misc_feature (1997)..(1997): n is a, c, g, or t
acactggccaccctcccaaaggtgagtcgcttctcctcttccttgatcgccgatttccggattctttccttttcccctccgccgccggggattgtggttgtggttgtggcttccatatcctcatcctcatggcgtgatagaaggttgcttcgtttctttgattggccatggacgtacgtctttcgttttctcggtgggggatgggagggggttcttgatagtgatgcgctgctgctacagtgctcctgctcctgctcctgctgctcgacgctgacggctcgagcttatccctccggcctccggggtctcgctctctggattattcctacttctttttctttctttttgtctcatcttgaattgaaaaacttggccctgcggtgtttcgcctccactggtcactggagcactggaccgatgtatatagagagagaccgaccgacctggcgtcacgcacgcaccgcactgattgggctccaagatcggccgctgccaactgggggcctcaccgccacccgttcttggaaaacagcacgctacttgcttgaaagcaaagggagatacttgccgcgttgggattctccaactccaactccaaccaagacgaacgatttcatcccagtgcattttgtgtgaggatccagacgcaggaggatggctctcaagaagttgctgcagctcttttgtgtcggaaagaaggattccaagaagaaaggtaaattcatcgatccactctggcaagcctctgcctcccgctcctctgtgaatgtcactgcaaacaagactcatttggatccctgttcaagtgggaatgacactgtaagcgtgcaaaaccatgaagttgaatcctcaagtacggtttcctcgtgggcaaggacagagcaaggaactgagattgctcatcatacgccctttagtcaatttgatgttgtccaagatttctcggatcaccactatgcaaagacttcagcaggaaaggtcacaaaggattgggtgaaggcaatccaaagtgaatgggatcttctacagaaaaacctacctgaatctatatacgttagagtctatgaggacaggactgatctgctgagggctgccatagtcgggccagcaggaactccataccatgatggtctgttcttcttcgatgtccgttttccttgcgaatacccaaagtgcccaccagtacgtgaccactagacatccatcatcctgcctctgcctctcttgtatagtttcttccattcaaagtgagcagcagtacttgattgatgtcgtgtgttcagaaagtatactaccattctggcggacttcggctgaacccgaacctgtacgagagcgggaaagtgtgcctgagccttctgaacacctggtggggcaaggggtgcgagaagtggggcaagtcgagctccagcatgctgcaggttctggtctccatccagggcctcgtgctgaatgacaggccatacttcaatgagccaggatccaagaactcggctgaaacgacaggtggtgagaggtgttccctggcttacaatcagacggccttcgtcagatcatgcaagacgatgctgtattcactccggaagcctccaatgcattttgagacccttgtgttgtggcacttccacgagcatgagcgtgccatcctcgacgcttgcagggcttacatgtctgggacagtcgttgggtcgtctgctgggactgggagcaaccgcagatacgtccatgacaagtgctttgcagaattccacaagtcgctgacgctctacactgaacatctcagggctgagtttgctgcaaacacaagacgagtgatggagctggaaacagaagacgagatcgtgcctagcatagcagctagcgtgaaatcgtgttgaaggcaaatgccccacggtgttgtatgttgctctcatcatcagatatttgctggcttagctatttctagcctcattctacttcattcatgtcacttgaataatctaattcatggcaattgnacctgtccctatacctagatggcttaaaatctgaaggtt

SEQ ID NO: 33873 - protein, 211 aa, Zea mays subsp. mays
TLATLPKVSRFSSSLIADFRILSFSPPPPGIVVVVVASISSSSWRDRRLLRFFDWPWTYVFRFLGGGWEGVLDSDALLLQCSCSCSCCSTLTARAYPSGLRGLALWIIPTSFSFFLSHLELKNLALRCFASTGHWSTGPMYIERDRPTWRHARTALIGLQDRPLPTGGLTATRSWKTARYLLESKGRYLPRWDSPTPTPTKTNDFIPVHFV

SEQ ID NO: 33874 - protein, 202 aa, Zea mays subsp. mays
MSCVQKVYYHSGGLRLNPNLYESGKVCLSLLNTWWGKGCEKWGKSSSSMLQVLVSIQGLVLNDRPYFNEPGSKNSAETTGGERCSLAYNQTAFVRSCKTMLYSLRKPPMHFETLVLWHFHEHERAILDACRAYMSGTVVGSSAGTGSNRRYVHDKCFAEFHKSLTLYTEHLRAEFAANTRRVMELETEDEIVPSIAASVKSC

SEQ ID NO: 33875 - protein, 180 aa, Zea mays subsp. mays
MALKKLLQLFCVGKKDSKKKGKFIDPLWQASASRSSVNVTANKTHLDPCSSGNDTVSVQNHEVESSSTVSSWARTEQGTEIAHHTPFSQFDVVQDFSDHHYAKTSAGKVTKDWVKAIQSEWDLLQKNLPESIYVRVYEDRTDLLRAAIVGPAGTPYHDGLFFFDVRFPCEYPKCPPVRDH

SEQ ID NO: 33876 - DNA, 2067 bp, Zea mays subsp. mays
gcacgagaccattacctagaacatcctaatcgaaaaatggttgcctcccttccccctcctcctcttcctcccagctgagctgcccttcttctttctccagcaagcaagcagcagcagcagcccaattgcattgcattgcagtgatggtgatgtgatttctgcggcgcgagacaagcacacccaccctcccagctcaacttacggtgacgccgtgacggtgaggttaggagctgggtgactgacgggggaggcccaccggacgtacgtgatcggcagccaagccaaggcgatgcctgcagccgcggctccagctccacacaccaggaccagggaccaggtccagcggcagcccccagcgcaggccatcggccccccgcttccttactggggcggcgccgctgttggcgcagaggagcagaggtggcgcatcggcatggactccgccgccgctgccctcctcgactccgcctccgcgtccgcctcttccgccaacgccgcaggcaaggagatgcccaccgcccgccacatcgcccaccgcaccgcccacaacatgtcctcctcctcgctccgcaagaagtccgacctcgcgctcctccgcaaggtcccctgcgccccgctccgacgcctcctcgacaacctccaggaggttttgctcgccaccaagctcgccctcctcttccccgccgttctactcgcgatcgccgcgcgaatcttccacttcggccaggaatgggtctttgtgcttagcttgatcggtctcgttcctcttgctgagcgacttagctttctgactgagcaggttgcgttttacatagggcctactgtgggtggactgttgaatgcaacatttggaaacgtaacagaggtcatcattgcgatctttgcactctatcaaggcaaggtagtggtggtgaaatgctccctgctaggctcagtcttgtccaacctgttgcttgtccttggaacctcccttttctttggtggcctggctaaccttggaactgagcagctatacgacaaaatgcaagtagatgtcagcacaggacttctgattcttggtgtgctatgccactctctgccactgatgctgagatatgctgtgagctccggggagcacgcagaatcctcttgggattcaggactggagctgtcccgagcatgcagcattgtcatgctccttgcctatgtagcctaccttttcttccaactgaaaacccaccgccaactatttgaaccccaaccccaagaggttgaagatgatggtgatgattcggtctctcaagacgaggcagtactgggattttccagtgcaatgatttggctgggagtcatgaccctgatgacagcactcctatcagagtttgttgtgagcacaattgaggcagcatcggaatcttgggagctatctgtcagtttcattagcgtcatcttgattccaatagttggtaatgcagcagagcatgctggtgcagtgatatttgcgtttaaaaacaatctggacatcaccctcggagtatctttggggtccgctacgcagatttccatgtttgtggtgccattgagtgtccttgtagcatggatcatgggagtcccgatggatcttgatttcaacttgcttgagactggttgtttgtttcttgcaatattagtaacggccttcacgctccaggatggatcatcacattatctgaagggactgctgcttgtgttttgctacattgtcatctccttatgctttttcgttttgagacagcatggaaatggaagcaacgatgatcagctgggtgtagcaagcaagccatggaggatttagggcgcctgagctggcagtagtttctcaacaagtagcgtggactttggtttgcacgattttgcatggaacactggaggggagacccgtgaagtttgactaaagtatgtagactgcgggaagatgctgttcagctgatgtgtgaatgtaagtacatacaaagactatagatgaaaactgatgttgcgtgagagactatttgtgtgtttttcttgttctttccaccaagcaatggctagaattcggttgagctgttg

SEQ ID NO: 33877 - protein, 507 aa, Zea mays subsp. mays
MPAAAAPAPHTRTRDQVQRQPPAQAIGPPLPYWGGAAVGAEEQRWRIGMDSAAAALLDSASASASSANAAGKEMPTARHIAHRTAHNMSSSSLRKKSDLALLRKVPCAPLRRLLDNLQEVLLATKLALLFPAVLLAIAARIFHFGQEWVFVLSLIGLVPLAERLSFLTEQVAFYIGPTVGGLLNATFGNVTEVIIAIFALYQGKVVVVKCSLLGSVLSNLLLVLGTSLFFGGLANLGTEQLYDKMQVDVSTGLLILGVLCHSLPLMLRYAVSSGEHAESSWDSGLELSRACSIVMLLAYVAYLFFQLKTHRQLFEPQPQEVEDDGDDSVSQDEAVLGFSSAMIWLGVMTLMTALLSEFVVSTIEAASESWELSVSFISVILIPIVGNAAEHAGAVIFAFKNNLDITLGVSLGSATQISMFVVPLSVLVAWIMGVPMDLDFNLLETGCLFLAILVTAFTLQDGSSHYLKGLLLVFCYIVISLCFFVLRQHGNGSNDDQLGVASKPWRI

SEQ ID NO: 33878 - protein, 459 aa, Zea mays subsp. mays
MDSAAAALLDSASASASSANAAGKEMPTARHIAHRTAHNMSSSSLRKKSDLALLRKVPCAPLRRLLDNLQEVLLATKLALLFPAVLLAIAARIFHFGQEWVFVLSLIGLVPLAERLSFLTEQVAFYIGPTVGGLLNATFGNVTEVIIAIFALYQGKVVVVKCSLLGSVLSNLLLVLGTSLFFGGLANLGTEQLYDKMQVDVSTGLLILGVLCHSLPLMLRYAVSSGEHAESSWDSGLELSRACSIVMLLAYVAYLFFQLKTHRQLFEPQPQEVEDDGDDSVSQDEAVLGFSSAMIWLGVMTLMTALLSEFVVSTIEAASESWELSVSFISVILIPIVGNAAEHAGAVIFAFKNNLDITLGVSLGSATQISMFVVPLSVLVAWIMGVPMDLDFNLLETGCLFLAILVTAFTLQDGSSHYLKGLLLVFCYIVISLCFFVLRQHGNGSNDDQLGVASKPWRI

SEQ ID NO: 33879 - protein, 434 aa, Zea mays subsp. mays
MPTARHIAHRTAHNMSSSSLRKKSDLALLRKVPCAPLRRLLDNLQEVLLATKLALLFPAVLLAIAARIFHFGQEWVFVLSLIGLVPLAERLSFLTEQVAFYIGPTVGGLLNATFGNVTEVIIAIFALYQGKVVVVKCSLLGSVLSNLLLVLGTSLFFGGLANLGTEQLYDKMQVDVSTGLLILGVLCHSLPLMLRYAVSSGEHAESSWDSGLELSRACSIVMLLAYVAYLFFQLKTHRQLFEPQPQEVEDDGDDSVSQDEAVLGFSSAMIWLGVMTLMTALLSEFVVSTIEAASESWELSVSFISVILIPIVGNAAEHAGAVIFAFKNNLDITLGVSLGSATQISMFVVPLSVLVAWIMGVPMDLDFNLLETGCLFLAILVTAFTLQDGSSHYLKGLLLVFCYIVISLCFFVLRQHGNGSNDDQLGVASKPWRI

SEQ ID NO: 33880 - DNA, 1711 bp, Zea mays subsp. mays
taatcgaaaagtgcttcaagaattgatccgttcgcggtgcgacctccagctccaggagcagcaccaatcccccaagccgccatggccgccgaccccacgctgctgcttctcgtacctttcctcgccatccccctctacttcttcttggccaccagacgtaggacgccacgcgggggcgcgcggctcccgccggggccgtgggcgctgcccgtggtcgggcacctgcatcacctagcccggggcctcccgcaccgcgtcatgcgcgacctggcgaggcgccacggcccgctcatgatgctccggttcggcgaggtccccgtggtggtggcctcctcgccggccgcggcgcgcgaggtgatgcggacccacgacgcggcgttcgcgtcgcggcccatcggtcccgtgtcccggctctggttccagggcgccgagggcatcctcttcgcgccctacggcgacgactggcgccacctccgcagggtctgcacccaggagctcctcaccgcccgccgcgtccaatccttccgccccgtgcgcgaggacgagctccgccgcctgctcgcctccgtcgcctcgacgtcggggcccgtcaacctgaccgagaagatatcgacctacatcgccgactccacggtgcgcgccatcatcggcagccgacggctcaaggaccgcgacgcgtacctgcggatgctcaagggcctcttcggcatcatgcccgggatgagcctgccggacctcttcccgtcctcgcgcctcgccatgctcctcagccgcgctcctgcccggatccaggcctaccgtcgcagcatggcgacgcatcatggacggcatcatccaggagcaccgggacagagcagccgctggcgacggcgacgaagaggacttcgttgacgtgctcctcagacttcagaaggaagtggactcccagttcccgctcacaactgagaacatcaaaacagtcatgctggacatctttggcgcgagcacggagacgtcgacgacgacgctggattgggcgatggccgagctcctgcggaaccccagggtgatggagaaggcgcagcgtgaggtccggcaagcgctttccggccacggcgcggtgaccgaggacagactagccggcctgcgctacctgcgcttcgtcatcaaggagtcgctgcggctgcacccgccggcgacgatgctggttccacgccagtgccagagcgcgtgccaggtgctcgggtacgacgtgccggcgggcatcacggtgatcgtgaacgcgtgggcgatcggcagggacccggcccactgggacgagcccgacaagttcttgccggaaaggttcgagcagagtaccagggacttcaagggggcagacttcgagttcataccgttcggtgccgggcggcggatctgccccggcatgacgttcgggctggctcatatcgagatcgcgctcgccgcgttgctgttccacttcgactggagtttgccgggagggctagcggcggaggagctggacatgaccgaggcatttgggattgctacgccacggcgttccgaccttttggtggtggcaacccctcgtgtcccacttccacaaagttaccgtatataggcattattattctccttgagggcttgttcggttattcctatcctatgtagattggatgggattggaaaaaattatgaaagattttaacttgtttaggattgaaactcatct

SEQ ID NO: 33881 - protein, 269 aa, Zea mays subsp. mays
MAADPTLLLLVPFLAIPLYFFLATRRRTPRGGARLPPGPWALPVVGHLHHLARGLPHRVMRDLARRHGPLMMLRFGEVPVVVASSPAAAREVMRTHDAAFASRPIGPVSRLWFQGAEGILFAPYGDDWRHLRRVCTQELLTARRVQSFRPVREDELRRLLASVASTSGPVNLTEKISTYIADSTVRAIIGSRRLKDRDAYLRMLKGLFGIMPGMSLPDLFPSSRLAMLLSRAPARIQAYRRSMATHHGRHHPGAPGQSSRWRRRRRGLR

SEQ ID NO: 33882 - protein, 259 aa, Zea mays subsp. mays
MDGIIQEHRDRAAAGDGDEEDFVDVLLRLQKEVDSQFPLTTENIKTVMLDIFGASTETSTTTLDWAMAELLRNPRVMEKAQREVRQALSGHGAVTEDRLAGLRYLRFVIKESLRLHPPATMLVPRQCQSACQVLGYDVPAGITVIVNAWAIGRDPAHWDEPDKFLPERFEQSTRDFKGADFEFIPFGAGRRICPGMTFGLAHIEIALAALLFHFDWSLPGGLAAEELDMTEAFGIATPRRSDLLVVATPRVPLPQSYRI

SEQ ID NO: 33883 - protein, 212 aa, Zea mays subsp. mays
MLDIFGASTETSTTTLDWAMAELLRNPRVMEKAQREVRQALSGHGAVTEDRLAGLRYLRFVIKESLRLHPPATMLVPRQCQSACQVLGYDVPAGITVIVNAWAIGRDPAHWDEPDKFLPERFEQSTRDFKGADFEFIPFGAGRRICPGMTFGLAHIEIALAALLFHFDWSLPGGLAAEELDMTEAFGIATPRRSDLLVVATPRVPLPQSYRI

SEQ ID NO: 33884 - DNA, 1399 bp, Zea mays subsp. mays
actacccgagttcacttcacactcgtgcacccatccgggtcactggctcactgacaccgcgccccaatcacgcgcgcgccacccgcgatgatggcggcggcggcgatctccggctccagcggccacctcgtcgtctcctccccccgcttcaggcagccgctcacgctcccttctcgcagcggtcgcccaatcgccgccgccgcctcggccgtggcccgcggcggggtcgcggtcgccgccgtgtccagccccgctgtgtcggccgtcgcggggaaggatgccaaacaggctcctaaggatttccttcatatcaatgattttgacaaggatacaataatgaatatccttaatcgagcgatcgaggttaaggcagcgataaagtctggagacaggagcttccaaccattcaatgggaaatcaatggcgatgatttttgccaagccatcaatgaggacccgtgtttcatttgaggcgggattcttcttacttggtgggcatgctatttatttgggtccagatgatatccagatgggcaagcgtgaggagactcgtgatgttgctcgagtactttctggctataatgatatcattatggccagggtctttgctcatcaggatattctggacttggcaaaatatgcagctgtacctgtcataaatggtctcaccgactataaccatccatgccagataatggctgatgcacttactatgcttgagcacgttggtcgcattgagaacactaaggttgtctatgttggagatgggaacaacattgtgcactcgtggcttctattggctgctgtacttccttttcactttgtatgtgcttgtcccaagggatttgagcccgatgcaaagacagtggagatcgccaggagtgctggaatcagtaagattgaaataacaaacgatcccagggaagcagttaagggagcagatgttgtgtatacagatgtttgggccagcatgggccaaaaggaagaagctgattatagaaaacagaagttccagggattcacggtggatgaagccctgatggagattgctggcccacaggcctaccttatgcactgtttgcccgcagagagaggagtggaggtgaccgacggtgccatcgaggctccaaattcaatcgtttcccccaggctgagaacagaatgcacgctcagaacgccatcatgcttcacgttctcggtgcttaaccctcctattgcacaccagtgtttaacttttcttgaatttgcttagggattgaggcagttttggctttagggcatatgtgagagcttaattcagcgaactgttcagtaacgtggtaactgttcttcagggtgggagtttgttgtactggaaaagtttggcaacctgaataaaaaataatcttttgtgctggttt

SEQ ID NO: 33885 - protein, 387 aa, Zea mays subsp. mays
MMAAAAISGSSGHLVVSSPRFRQPLTLPSRSGRPIAAAASAVARGGVAVAAVSSPAVSAVAGKDAKQAPKDFLHINDFDKDTIMNILNRAIEVKAAIKSGDRSFQPFNGKSMAMIFAKPSMRTRVSFEAGFFLLGGHAIYLGPDDIQMGKREETRDVARVLSGYNDIIMARVFAHQDILDLAKYAAVPVINGLTDYNHPCQIMADALTMLEHVGRIENTKVVYVGDGNNIVHSWLLLAAVLPFHFVCACPKGFEPDAKTVEIARSAGISKIEITNDPREAVKGADVVYTDVWASMGQKEEADYRKQKFQGFTVDEALMEIAGPQAYLMHCLPAERGVEVTDGAIEAPNSIVSPRLRTECTLRTPSCFTFSVLNPPIAHQCLTFLEFA

SEQ ID NO: 33886 - protein, 386 aa, Zea mays subsp. mays
MAAAAISGSSGHLVVSSPRFRQPLTLPSRSGRPIAAAASAVARGGVAVAAVSSPAVSAVAGKDAKQAPKDFLHINDFDKDTIMNILNRAIEVKAAIKSGDRSFQPFNGKSMAMIFAKPSMRTRVSFEAGFFLLGGHAIYLGPDDIQMGKREETRDVARVLSGYNDIIMARVFAHQDILDLAKYAAVPVINGLTDYNHPCQIMADALTMLEHVGRIENTKVVYVGDGNNIVHSWLLLAAVLPFHFVCACPKGFEPDAKTVEIARSAGISKIEITNDPREAVKGADVVYTDVWASMGQKEEADYRKQKFQGFTVDEALMEIAGPQAYLMHCLPAERGVEVTDGAIEAPNSIVSPRLRTECTLRTPSCFTFSVLNPPIAHQCLTFLEFA

SEQ ID NO: 33887 - protein, 304 aa, Zea mays subsp. mays
MNILNRAIEVKAAIKSGDRSFQPFNGKSMAMIFAKPSMRTRVSFEAGFFLLGGHAIYLGPDDIQMGKREETRDVARVLSGYNDIIMARVFAHQDILDLAKYAAVPVINGLTDYNHPCQIMADALTMLEHVGRIENTKVVYVGDGNNIVHSWLLLAAVLPFHFVCACPKGFEPDAKTVEIARSAGISKIEITNDPREAVKGADVVYTDVWASMGQKEEADYRKQKFQGFTVDEALMEIAGPQAYLMHCLPAERGVEVTDGAIEAPNSIVSPRLRTECTLRTPSCFTFSVLNPPIAHQCLTFLEFA

SEQ ID NO: 33888 - DNA, 1883 bp, Zea mays subsp. mays
ctaatcactagtataaagcaggcggagacagccggcccctctggcctcgctgctcccccttcctccccgtccccacccacatgccctgcctccgccccgccccgccctgcccaaggtgattgattgattggttgcttggttgcttgcttcgtttcacgctttccccttcctttgctgagatccaaaagctgagactcagcttgtcgatccatctgttctgtgcgcctactcgtatcttaggatccatctgtatgttgtttacttgttttcctgattgaatcgcgcattggatgcctggtggttggccttgctcctagtcttttcatttacacgagctttcgacgaagccgcgtctggtctgtctgctccatcacaagagcacgcaaatggttcgatctgccgtgccagatgattgctgcattcagtgggacgtcatgcacatccacgatggattgtagcgtcagcactctgatctttccttgtcgatttgtttgtcgcagctgagttcccccaccccccaacaaacaattactagagtagctgcattggcggggaaattaaagcgctagaagctcagcagcaatggcggagcaggcgggcgccggaaggtactggtgccacatgtgcgccgcggccgttagccccgcggagggcgaggtggagatgaagtgcccgttctgccacagcggcttcctcgaggagatggagaccgcccgcggggccgcgaccgacgacggtgacggcgacggcgcggtggctcaggtgcaccccggcgccgaccgcccgagctccatctgggcgcacgctatcctcagcacggtcgacagctccgcccgtcgccgccgcaaccggcggcagcaggaggccgccagcgacgtctacgactggaacgaccccgagttctcgctgcgccggcggcgcgtcaccgcgttcctgcggctcctgcacgagctccgggaccgccagctgcagcggctggagtccgctgccggcgtcgccctcgaaggcgaccagctgaccccgttcggccggagcctcttcatcggcgcagctggcggcgagcatggcgtggcgctgggcgactacttcctcggccccagcctcgacgccttggtacagcagctcgccgagaacgatgcggcgcggcacggaacgccgccggccaagaaggaggccgtggaggcaatgccgaccgtggaaatcgccggcggcaacgatggcgacgacgcggccagctgcccggtctgcctggaggactacgcggccggcgagcgcgcccgcgagatgccctgcaggcacaggttccacgccaattgcatcgtgccgtggctcgagatgcacagctcctgccctgtctgccggttccagctgccggccaccgacgacaagagctcatgcaacggcggcgacggtggtttcgtcagtgtcgatgcggatcgtgaaggcagtgacaacggcgggggtgatggtagggcaagctctcggggcaatgccgagctagctgaagctgaagagagtggcaggcggttgccgccatccttgcagtggctcaacagcctgttctcgccgtcggcgcagtcctccggtagcggcggcagcagttcgcatcattgggagaactaagcaatattgccatggttgctgccgcttgaaagcttggcccgttggttggtcccaatgtacataggaaggagcaggagcgcatgccgggttggtgccatggaaaaatctggacccttttttctctgatatgtatcatggctgtaaaaaagaacagaaatgggcaaatgtatgaacttgccgcgctcttgcgtgaactgggtgctaatcatcgtcttactactcaattttggtttttattaacaaaactatagtatttatgc

SEQ ID NO: 33889 - protein, 346 aa, Zea mays subsp. mays
MAEQAGAGRYWCHMCAAAVSPAEGEVEMKCPFCHSGFLEEMETARGAATDDGDGDGAVAQVHPGADRPSSIWAHAILSTVDSSARRRRNRRQQEAASDVYDWNDPEFSLRRRRVTAFLRLLHELRDRQLQRLESAAGVALEGDQLTPFGRSLFIGAAGGEHGVALGDYFLGPSLDALVQQLAENDAARHGTPPAKKEAVEAMPTVEIAGGNDGDDAASCPVCLEDYAAGERAREMPCRHRFHANCIVPWLEMHSSCPVCRFQLPATDDKSSCNGGDGGFVSVDADREGSDNGGGDGRASSRGNAELAEAEESGRRLPPSLQWLNSLFSPSAQSSGSGGSSSHHWEN

SEQ ID NO: 33890 - protein, 333 aa, Zea mays subsp. mays
MCAAAVSPAEGEVEMKCPFCHSGFLEEMETARGAATDDGDGDGAVAQVHPGADRPSSIWAHAILSTVDSSARRRRNRRQQEAASDVYDWNDPEFSLRRRRVTAFLRLLHELRDRQLQRLESAAGVALEGDQLTPFGRSLFIGAAGGEHGVALGDYFLGPSLDALVQQLAENDAARHGTPPAKKEAVEAMPTVEIAGGNDGDDAASCPVCLEDYAAGERAREMPCRHRFHANCIVPWLEMHSSCPVCRFQLPATDDKSSCNGGDGGFVSVDADREGSDNGGGDGRASSRGNAELAEAEESGRRLPPSLQWLNSLFSPSAQSSGSGGSSSHHWEN

SEQ ID NO: 33891 - protein, 319 aa, Zea mays subsp. mays
MKCPFCHSGFLEEMETARGAATDDGDGDGAVAQVHPGADRPSSIWAHAILSTVDSSARRRRNRRQQEAASDVYDWNDPEFSLRRRRVTAFLRLLHELRDRQLQRLESAAGVALEGDQLTPFGRSLFIGAAGGEHGVALGDYFLGPSLDALVQQLAENDAARHGTPPAKKEAVEAMPTVEIAGGNDGDDAASCPVCLEDYAAGERAREMPCRHRFHANCIVPWLEMHSSCPVCRFQLPATDDKSSCNGGDGGFVSVDADREGSDNGGGDGRASSRGNAELAEAEESGRRLPPSLQWLNSLFSPSAQSSGSGGSSSHHWEN

SEQ ID NO: 33892 - DNA, 1159 bp, Zea mays subsp. mays
gcacgagaccattacctagaacatcctaatcgaaaaaaactttagtgggagcattcaatttcagtgtttaaatactacttcgtctgctggcttcgcgtctctctcgagattatagttgataaacgatgaccgggaaaaagaccacagcctcctcttcccgcggcactccaaagaaggccaagatcgaggatgaggaagaggcggggttggaaaatgaggaagaggcgactgtgacactatccgtggagaaagacgcgctggagtgcgatatctgctgcctacccttccagtccgaagtttttatgtgcaagaacggacattctggatgtgcaaagtgctgcatccgcagagacggtaagtgctggacctgctccgagcgcattggcgacatgcgttgccgtccgctcgagaagctcctggcggcggcgaccacctcctgcgtgttcaagagcaacggctgctacgacgccgtcagctacctcgagagggcgacccacgaggagacatgccagcgcgcgccgtacaagtgccccatcgacggctgcgcctatagcggcctgcggctcggccaccacgtcgcacaggaccacggccgccgcgatggcctcgcctccatcgtctttatctccggcaaggcggtggcgaccgtacgcaaggacgagccgttccgcgtcctgctgcagcgcaacacggagcgcgtgttcctgctgctcaacggccaccgatttgctacaggggcgctcgctgtccctgctctgccttggcccgcgcttccaggacggcgtggaggtggagccgaggtataagatggaggtgagccacggtgcgctcacgctgtcggcgtctggcaccatacagttcgcccggcggctcgatgggttccaggccgaagggtttctcttcgtgccggatgcatactggggctccgccggctcgatcgccgtcaccgtcagaatttacttctgacgtcgcctcgtgctagctggtgtggataggttgattcctactggtcaaccgttcgtctcgttggtacttgctctggttgtttatggtttgaatctaccgtcgcactctacgtgctgatgctagtacttttgttaatcgcaacaacgtatgctagtacttttgttaatcgcaacaacgtatgttctgtcgtttt

SEQ ID NO: 33893 - protein, 226 aa, Zea mays subsp. mays
MTGKKTTASSSRGTPKKAKIEDEEEAGLENEEEATVTLSVEKDALECDICCLPFQSEVFMCKNGHSGCAKCCIRRDGKCWTCSERIGDMRCRPLEKLLAAATTSCVFKSNGCYDAVSYLERATHEETCQRAPYKCPIDGCAYSGLRLGHHVAQDHGRRDGLASIVFISGKAVATVRKDEPFRVLLQRNTERVFLLLNGHRFATGALAVPALPWPALPGRRGGGAEV

SEQ ID NO: 33894 - protein, 167 aa, Zea mays subsp. mays
MCKNGHSGCAKCCIRRDGKCWTCSERIGDMRCRPLEKLLAAATTSCVFKSNGCYDAVSYLERATHEETCQRAPYKCPIDGCAYSGLRLGHHVAQDHGRRDGLASIVFISGKAVATVRKDEPFRVLLQRNTERVFLLLNGHRFATGALAVPALPWPALPGRRGGGAEV

SEQ ID NO: 33895 - protein, 138 aa, Zea mays subsp. mays
MRCRPLEKLLAAATTSCVFKSNGCYDAVSYLERATHEETCQRAPYKCPIDGCAYSGLRLGHHVAQDHGRRDGLASIVFISGKAVATVRKDEPFRVLLQRNTERVFLLLNGHRFATGALAVPALPWPALPGRRGGGAEV

SEQ ID NO: 33896 - DNA, 1533 bp, Zea mays subsp. mays
aatctcagttgtccttgtcccctcgaacgcgcactgttcaaacaaaccctccactgccctccccactctccccttcaccgcgccgcactcccaagtcccaactcccaacaggcctaaatggcggcggccggaacaattcccggcgccgccgcagccattggcgcttctgtgtcccaacgccaacgtcgcgtcggcgctccttctttcgtagctgcctacgtctccgagggcacccgcctcgtctgccggaggcagctccgtccggctccggtcctcgcttcttccttcatctccctttctcatccagcgaggcggcggttcctctgcgatgctgcggccggagcctcctcaggtcccgctggagaagccaagccccagggatttgcagagagatacccagctcttgtcacaggtttcttcttcttcttgtggtattttctgaatgtaatatttaacatcctcaacaagaagatcttcgactacttcccctatccatattttgtgtcagtgagccatctttttattggagtactatactgccttattggctggagcttcggcatcccaaagcgcgcgccaatcaactcaacacttctgaagcagcttgttccagttgcggtttgccatgccattggccatgtaacaagcactgtgtcatttgctgctgtagctgtgtcatttgcccacactattaaagctctcgagccattcttcaatgcggctgcttcccagtttatccttggacaaccagttccattgacactctggctgtctcttgttccagtggtgattggtgtctcggtagcatccctcactgaactctcatttaattggactggcttcattaatgccatgatctcaaatatttctttcacctaccgaagcatctattctaagaaggctatgactgacatggatagtaccaacttgtatgcatacatatcaataattgctctctttgtctgcatcccccctgcaattattattgaaggacctcaattagtgcagcatggttttaaagatgcaattgccaaagttggattaacaaagttgatttctaatttttttgtggtgggcttattctatcacctttataaccaggttgctacaaacacattggagcgggtagcccctttaacacatgccatcggcaatgtgttgaaacgtgttttcgtcattggcttttccatcatcgcattcggcaacaagatcaccacacagactggaattggcacttccattgctgtttctggtgttgccctctactcatttataaaggctaagattgaggagaaaaagcaaataaagagtgcataaggtgttggctgatgtggatgcggttggtttgtcgctttgatggacctctattctctcggtgaacgaacaaacttgcaagatggataaaatcttgctatctcctagtacatttgattgttattcccagtctggtactgaggtgtgcggttgttgttggctaacttgtttatttgaagcaaatttgagcaatgctcagtggcatggaatttccattcc

SEQ ID NO: 33897 - protein, 399 aa, Zea mays subsp. mays
MAAAGTIPGAAAAIGASVSQRQRRVGAPSFVAAYVSEGTRLVCRRQLRPAPVLASSFISLSHPARRRFLCDAAAGASSGPAGEAKPQGFAERYPALVTGFFFFLWYFLNVIFNILNKKIFDYFPYPYFVSVSHLFIGVLYCLIGWSFGIPKRAPINSTLLKQLVPVAVCHAIGHVTSTVSFAAVAVSFAHTIKALEPFFNAAASQFILGQPVPLTLWLSLVPVVIGVSVASLTELSFNWTGFINAMISNISFTYRSIYSKKAMTDMDSTNLYAYISIIALFVCIPPAIIIEGPQLVQHGFKDAIAKVGLTKLISNFFVVGLFYHLYNQVATNTLERVAPLTHAIGNVLKRVFVIGFSIIAFGNKITTQTGIGTSIAVSGVALYSFIKAKIEEKKQIKSA

SEQ ID NO: 33898 - DNA, 448 bp, Zea mays subsp. mays
  misc_feature (309)..(309): n is a, c, g, or t
  misc_feature (334)..(334): n is a, c, g, or t
  misc_feature (431)..(431): n is a, c, g, or t
  misc_feature (433)..(433): n is a, c, g, or t
aacatgaggaaaagcgtgcggcggcttgctctgaccgtcgtgtgtatgcgcttccagccaagcatagcaagaactagaagacatcgtaatccaagaaccggggccactccaagcataacaagaactagaagacatctatatatatattgtgtgcatatgcgcttcacgagcaaagtgtccgaagaataacaggaaattaaagcgatatcgtaatccaagaaccgaggccatgtccggtcgtaatttcgcaacgacggtggccatagcggtcgtcgtcgtagccgctctagcgtcggcgtcggcgtcggngggcgcggacgacgacgagcaaggncacctgcgccgggaagccgaccgcatcgtccggctgcccgggcagcccgacgacggcgtggacttcccgatgtactcagggtacgtgaccgtggacnanggcgcggggcgggcg

SEQ ID NO: 33899 - protein, 61 aa, Zea mays subsp. mays
MRKSVRRLALTVVCMRFQPSIARTRRHRNPRTGATPSITRTRRHLYIYCVHMRFTSKVSEE

SEQ ID NO: 33900 - protein, 73 aa, Zea mays subsp. mays
  misc_feature (27)..(27): Xaa can be any naturally occurring amino acid
  misc_feature (35)..(35): Xaa can be any naturally occurring amino acid
  misc_feature (68)..(68): Xaa can be any naturally occurring amino acid
MSGRNFATTVAIAVVVVAALASASASXGADDDEQXHLRREADRIVRLPGQPDDGVDFPMYSGYVTVDXGAGRA

SEQ ID NO: 33901 - protein, 62 aa, Zea mays subsp. mays
NMRKSVRRLALTVVCMRFQPSIARTRRHRNPRTGATPSITRTRRHLYIYCVHMRFTSKVSEE

SEQ ID NO: 33902 - DNA, 1698 bp, Zea mays subsp. mays
cctttttccccttcacagccccgtactactatccccgctaccgctagccgccgcgctgctcatctggtggcggctcgcctccctccccccatccgccgccgccggctcctcctctagctccctccttaccccgagctttaagctcgtgctacctgcctacctatccgtagggagagagagagagaggggagaaggttcggtcggtcggtcgggggctctcggatctcgccgctgcctccccgtttcttcgttgggatctcgctcgcttcgcgcccatggccgccgtcgcgacgccaccggcccccgcgcccgccgctccggcaccggcaccggcaccggctgctgctccggctcccgtcaccgtcgcccctgccgcggaccaaaccacggatctgctgcagaagttgtcgctggattcgcagcccaaggcggcgggtgcgacagagcctgctgctgctgccgctgccgccaaggagggtgctgtgacaaaccagccgctgagtgtggccatcccgccagagcggtctatcacgccggtgcttcaggactttatggatcccaacctgttctatctaccagcgtattactatggaggctacgacagttccatgagcgagtgggatgattatccaagatatctaaattcagatggagtggagattgccccagcagtgtatggagatatttatggatatgggtatgctccttacggggcatactctccggccacttccccagttccaacggttgatggtcagatgtttggcgcacagcattaccagtatccaaccacgtattttcagcctcctacaccaattccttctaccactcaaagcaacctccagtcttccaacaatcctgaaaagccagcagctaaagcagatcctgccaaggcaaccgctaatggtgttccaaatggtactggtcacactcacagttacagtggaactgtaccaagccaacaaagttcagcactgacgcctgatggaacttatagggcgcccttgctaggtggagttccttctgctggttacctagacacgacatattatgggtatgacagcacaggggcacaatttgcatggtatgatggctctgcttatgcaaatggacagcaaagaacaaccacaactaatcgttttccatcctcgtcattcagtggtaatggttcatctgcaatatatcagaacaagagctccaccacgcagcagatgggtatgcagaatagaagacctacaactacatcagcagctcctacctatcccaataggatgtaccctagcccccgaccgtacaccccagtatgggaattcagtaaaaactggtcttccctacgggagtaacggttatgattccaggatatatggtcgatgtggtcttggtaatggtatggataacaggtacaggcccagggcatgtagtggatactatggttatggcaatgagagtcaggatggaacaattgagttaaacagaggtcctagatctggccggttcaagaaccagaaattgtacggtcatactgtcactattgctgtgaaagggcagtctctcccttctagtgaaagcaagaatgatagtgctgtgcctgatagagcaaagtacaatagagatgacttccctgttcagtacgatgctgcaaagttctttgtcattaaatcgtacagcgaggatgacatccacaagagcgtaaagtac

SEQ ID NO: 33903 - protein, 355 aa, Zea mays subsp. mays
MAAVATPPAPAPAAPAPAPAPAAAPAPVTVAPAADQTTDLLQKLSLDSQPKAAGATEPAAAAAAAKEGAVTNQPLSVAIPPERSITPVLQDFMDPNLFYLPAYYYGGYDSSMSEWDDYPRYLNSDGVEIAPAVYGDIYGYGYAPYGAYSPATSPVPTVDGQMFGAQHYQYPTTYFQPPTPIPSTTQSNLQSSNNPEKPAAKADPAKATANGVPNGTGHTHSYSGTVPSQQSSALTPDGTYRAPLLGGVPSAGYLDTTYYGYDSTGAQFAWYDGSAYANGQQRTTTTNRFPSSSFSGNGSSAIYQNKSSTTQQMGMQNRRPTTTSAAPTYPNRMYPSPRPYTPVWEFSKNWSSLRE

SEQ ID NO: 33904 - protein, 263 aa, Zea mays subsp. mays
MDPNLFYLPAYYYGGYDSSMSEWDDYPRYLNSDGVEIAPAVYGDIYGYGYAPYGAYSPATSPVPTVDGQMFGAQHYQYPTTYFQPPTPIPSTTQSNLQSSNNPEKPAAKADPAKATANGVPNGTGHTHSYSGTVPSQQSSALTPDGTYRAPLLGGVPSAGYLDTTYYGYDSTGAQFAWYDGSAYANGQQRTTTTNRFPSSSFSGNGSSAIYQNKSSTTQQMGMQNRRPTTTSAAPTYPNRMYPSPRPYTPVWEFSKNWSSLRE

SEQ ID NO: 33905 - protein, 244 aa, Zea mays subsp. mays
MSEWDDYPRYLNSDGVEIAPAVYGDIYGYGYAPYGAYSPATSPVPTVDGQMFGAQHYQYPTTYFQPPTPIPSTTQSNLQSSNNPEKPAAKADPAKATANGVPNGTGHTHSYSGTVPSQQSSALTPDGTYRAPLLGGVPSAGYLDTTYYGYDSTGAQFAWYDGSAYANGQQRTTTTNRFPSSSFSGNGSSAIYQNKSSTTQQMGMQNRRPTTTSAAPTYPNRMYPSPRPYTPVWEFSKNWSSLRE

SEQ ID NO: 33906 - DNA, 747 bp, Zea mays subsp. mays
  misc_feature (604)..(604): n is a, c, g, or t
tcgctctcaaatatctctcaccacctctcccctcagcttctccccacctttggtcaggcaggctcaggcaaagggggcggccaacaaggacgagcgatggcgaccaaggtcatctgcttccttgtgctcgcatccctgctcctcgccgtcgcctttcccgtgtctgctctgcggcagcaggtgaagaagggcggcggcggcggtggtggcggaggcagtgttagcggaagcggaggcggcaacctgaatccctgggagtgctcgcccaagtgcgggtcgcggtgctccaagacgcagtacaggaaggcctgcctcaccttatgcaacaagtgctgcgccaagtgcctctgcgtgccaccggggttctacggcaacaagggcgcctgcccctgctacaacaactggaaaaccaaggaaggagggcccaagtgcccctagaataagatccaccgcagctcccgtccgccattgtccccccttctccgaatctggaacgtgttgttcatcttcgaccaccccctaggcttggcattttattactagtataatgctagtgtccgcccgttgcttaatctggaatgctaccagccagatctccatgctntcctgtgagccactcggcagagtgaggattactaggtagggtggcatgtcatgtgctccaccctccactggtacgagtcaatcaactaaagctacccccggattgatgaggaacatcccgcgcgattagtggggcatgtcatt

SEQ ID NO: 33907 - protein, 145 aa, Zea mays subsp. mays
SLSNISHHLSPQLLPTFGQAGSGKGGGQQGRAMATKVICFLVLASLLLAVAFPVSALRQQVKKGGGGGGGGGSVSGSGGGNLNPWECSPKCGSRCSKTQYRKACLTLCNKCCAKCLCVPPGFYGNKGACPCYNNWKTKEGGPKCP

SEQ ID NO: 33908 - protein, 113 aa, Zea mays subsp. mays
MATKVICFLVLASLLLAVAFPVSALRQQVKKGGGGGGGGGSVSGSGGGNLNPWECSPKCGSRCSKTQYRKACLTLCNKCCAKCLCVPPGFYGNKGACPCYNNWKTKEGGPKCP

SEQ ID NO: 33909 - protein, 73 aa, Zea mays subsp. mays
ALKYLSPPLPSASPHLWSGRLRQRGRPTRTSDGDQGHLLPCARIPAPRRRLSRVCSAAAGEEGRRRRWWRRQC

SEQ ID NO: 33910 - DNA, 1394 bp, Zea mays subsp. mays
aatcgaaaagatttgttttgatttctgagccttctcttgtgtcgttctgtgttgggttgcggacgcgtcctcaactaggtttttcttccatcatttgtgtgttcgttcaactgagccgccatgcgccagccacggtccgggccggggaagaggcggggccgcggtccgcgcatccctgcggcgacgcttcagaagcagaaaacggcgttggcgaacgtcgaccagatcaccggcgccaagattccgaagagcttcgtattctcccgcggtaaactcccctccacgcttcgccatcttcagcaggacctccgcaaggtcatgctcccctacactgctctcaatctcaaggagaagaaacgaaataacctcaaggattttgtcaatgttgccggcccgatgggtgtgacacatttcttaatcctctcaaaccctcaaagcctgccacatttgcgctttgccaaatcaccgcagggcccaacattcacatttcagatagaggagtactcacttgcggcggacattgcaaactctcagaagcgcccaaggtgcccaccagggatattcaaaaactcaccactggttgtacttggtgggttgacaggtctcggcaaccctttcaggagtttggtcgaatacttccaacatatgttcccttccgttgacccaaccactgtcaagctggcaacatgccaaaggattctgttgttaaaacatgataaagagaaggatgttattgaattccggcattactccatcaagctccagcctgttggggtcagtcgcaggattagaaagctcatgcaaaacaatcaagtgcctgatctaggagaatttgaagatgttagtgagtttgtgaaaaaagctgggtatggatcagaaagtgaagcagacgatgaagcagcaatggtaagcttgccaagtgacattgacaaattaaaccgggcatccagaaaaagcgctgtcagactccaggagattggaccaaggatgactatgcgcctagttaaagttgaagctgggctatgttcaggagatgtcttatacccatggcctgtggaaaaggaagtggtgggaaagaaaggaacagaaactggggaagtagaagggcaagaagacgattctgaggccacagatgagtccgaggatgagatggtgtaggatttcagatgttttggacaggcagacgcaggtgttttgacagtcctggatgtttcatgctgaaaccaacgggccctgtgcccaataacgtggtgcattcatgccaattttgtcactgaaggtgcattgcattcgttgtaacgaagtgtaacattgttttgccgatggttacctcttttgtgttatgacaagtttggaggatagtttttggttcgcagtctaagatttctcattct

SEQ ID NO: 33911 - protein, 345 aa, Zea mays subsp. mays
MRQPRSGPGKRRGRGPRIPAATLQKQKTALANVDQITGAKIPKSFVFSRGKLPSTLRHLQQDLRKVMLPYTALNLKEKKRNNLKDFVNVAGPMGVTHFLILSNPQSLPHLRFAKSPQGPTFTFQIEEYSLAADIANSQKRPRCPPGIFKNSPLVVLGGLTGLGNPFRSLVEYFQHMFPSVDPTTVKLATCQRILLLKHDKEKDVIEFRHYSIKLQPVGVSRRIRKLMQNNQVPDLGEFEDVSEFVKKAGYGSESEADDEAAMVSLPSDIDKLNRASRKSAVRLQEIGPRMTMRLVKVEAGLCSGDVLYPWPVEKEVVGKKGTETGEVEGQEDDSEATDESEDEMV

SEQ ID NO: 33912 - protein, 279 aa, Zea mays subsp. mays
MLPYTALNLKEKKRNNLKDFVNVAGPMGVTHFLILSNPQSLPHLRFAKSPQGPTFTFQIEEYSLAADIANSQKRPRCPPGIFKNSPLVVLGGLTGLGNPFRSLVEYFQHMFPSVDPTTVKLATCQRILLLKHDKEKDVIEFRHYSIKLQPVGVSRRIRKLMQNNQVPDLGEFEDVSEFVKKAGYGSESEADDEAAMVSLPSDIDKLNRASRKSAVRLQEIGPRMTMRLVKVEAGLCSGDVLYPWPVEKEVVGKKGTETGEVEGQEDDSEATDESEDEMV

SEQ ID NO: 33913 - protein, 253 aa, Zea mays subsp. mays
MGVTHFLILSNPQSLPHLRFAKSPQGPTFTFQIEEYSLAADIANSQKRPRCPPGIFKNSPLVVLGGLTGLGNPFRSLVEYFQHMFPSVDPTTVKLATCQRILLLKHDKEKDVIEFRHYSIKLQPVGVSRRIRKLMQNNQVPDLGEFEDVSEFVKKAGYGSESEADDEAAMVSLPSDIDKLNRASRKSAVRLQEIGPRMTMRLVKVEAGLCSGDVLYPWPVEKEVVGKKGTETGEVEGQEDDSEATDESEDEMV

SEQ ID NO: 33914 - DNA, 1063 bp, Zea mays subsp. mays
atggcttcgcgtggtgcggcgtaggtgggcggccatcgcgtcgtacctgccggagcggacggacaacgacatcaagaactactggaacacgcacctcaagcgcaagctgcagagcggcggcgacggggcggccaagccgccggcgcacaggccgccgtcgtcgtccaagggccagtgggagaggaggctgcagacggacatcaacctggcgcgccgcgcgcttcgcgaggccctcaccccgctcgacgacctcaagccgcagctgcagcgcgacgccgccgccgacgcgccggccgctggcgcgggcacgggcggcggtgacagcccggcttcgagctcgtcgggcgcgtcgcagtcctcccctttggcgccagcggccttcgccgccgccgccgcggggccgtacgttctcaccgcggagaacatctcgcggatgctggacgggtgggctggccggaaggtccgcggcggcgggaccccgggcacccccggcggtgccgagagcgcgtccacgggatcctcggacgcgtcggaggtgtcgtacggtggcgccgccgtcgcatcggccgcgccggcgcccgcttgtggtgggccggtcttcgaatacgaggcgaagccgggcgtgccgacgtcccatcagcagatgccgctgtcggcgatcgagtcgtggctgttcgacgacgacagccacttgcaccatggctgtccagagcgccagcttgctcgatgccgcccccatggattaccccttctagctctagtgtgtccaatcgatcaagctcaagctaatcccttcaagcgaggagtgtgattacagcgctgtctcctaaagaaaactacacagatcctgcagtacgacgtcggtggctgattaatcgatcggctaagtagctgattcagatcggtcgcttgatcaggttgtttacgtgggatctgcgtagttttcatttagattccaaagaacataagtagaaccacacttatgacgacgacggagtatgttcttgggccttttcttttactgttttctagccttttctcccaagtaaagcttggggtacgt

SEQ ID NO: 33915 - protein, 269 aa, Zea mays subsp. mays
WLRVVRRRWAAIASYLPERTDNDIKNYWNTHLKRKLQSGGDGAAKPPAHRPPSSSKGQWERRLQTDINLARRALREALTPLDDLKPQLQRDAAADAPAAGAGTGGGDSPASSSSGASQSSPLAPAAFAAAAAGPYVLTAENISRMLDGWAGRKVRGGGTPGTPGGAESASTGSSDASEVSYGGAAVASAAPAPACGGPVFEYEAKPGVPTSHQQMPLSAIESWLFDDDSHLHHGCPERQLARCRPHGLPLLALVCPIDQAQANPFKRGV

SEQ ID NO: 33916 - protein, 250 aa, Zea mays subsp. mays
GFAWCGVGGRPSRRTCRSGRTTTSRTTGTRTSSASCRAAATGRPSRRRTGRRRRPRASGRGGCRRTSTWRAARFARPSPRSTTSSRSCSATPPPTRRPLARARAAVTARLRARRARRSPPLWRQRPSPPPPRGRTFSPRRTSRGCWTGGLAGRSAAAGPRAPPAVPRARPRDPRTRRRCRTVAPPSHRPRRRPLVVGRSSNTRRSRACRRPISRCRCRRSSRGCSTTTATCTMAVQSASLLDAAPMDYPF

SEQ ID NO: 33917 - DNA, 1301 bp, Zea mays subsp. mays
attacattgacatatcggaggaagtacaccacctatgtgcatctcccttcgcggcgcgaacggttcctctgacgtccggccgctgccatgtggggcatgccatccccgatcctgccggctttgcggtctgctcactcgatcgtcgaatagtgcgtcccttcggctcatcgcgcaaagcaaggaggcatggcagctagggttcgtgcgccactcatccccatctccctccgccgtcgactcccttcataccagtagcgccgcccactccatccgccgaatagtagcgctgcccattccatccgctcggaaggaccgccgccctcctcccttcaccatccaccgcacctatccaaggtaaaagcacaatctgcgtcttcgccgaaaagtagcgctgcccactccatccgttcggaagacccgccgccctcctcccctcaccatccaccgcccctatccaaggacattctccgtgcaccgcccttctatccccgtgcggaggttaggcctccacgccgaagcttgtttcaggcttgtcctagtacataatattgctcgcctctcctgtctcctctcctcgtcgagcggtagtgggtggtcgatccataaggccggaatggcaaaccaccaggagaagcccaccacgtccccaccgccccagccggcggagggcagcgtcgctcgcccccgcttgcccggcgtcggcaacgcacacccgggcagtgccggatacccaaacccgccagatgccgcgatccccgatgcggcgactcttcgggaccagtggcggtttgccgtgcggcagtacagccgctggtactcccacgcctggggcaccgccatccttgccggtgccgccttcttcgcgcttgggtggcttgtcaaggggtcaaacccgctcccgtcccgggccgagccacaacacggcgccattggcaaatccgtcgctaaggaggacaattgaccggcttaggtgaaccaccttgagttacgagctacagctttagtacaggatttcaagccgttcggttgctggtcatggtgttggctgttggtacagtatttggtgagagcttgatgtcacagcagcagtagaagcggtgctgtaaaacctggcagccgaacagcgtgaaaggaaggtttgtatttcaaaggatctacaacaatcaaattctgtggttttgattatgtccgttctatcgttgagctgatattgtagttcagttctttcttgtgcttggagtattattacatacatgtatgacaatatgagttaataaacttggagcgctttgaattatgct

SEQ ID NO: 33918 - protein, 115 aa, Zea mays subsp. mays
MANHQEKPTTSPPPQPAEGSVARPRLPGVGNAHPGSAGYPNPPDAAIPDAATLRDQWRFAVRQYSRWYSHAWGTAILAGAAFFALGWLVKGSNPLPSRAEPQHGAIGKSVAKEDN

SEQ ID NO: 33919 - protein, 107 aa, Zea mays subsp. mays
MCISLRGANGSSDVRPLPCGACHPRSCRLCGLLTRSSNSASLRLIAQSKEAWQLGFVRHSSPSPSAVDSLHTSSAAHSIRRIVALPIPSARKDRRPPPFTIHRTYPR

SEQ ID NO: 33920 - protein, 76 aa, Zea mays subsp. mays
MPRSPMRRLFGTSGGLPCGSTAAGTPTPGAPPSLPVPPSSRLGGLSRGQTRSRPGPSHNTAPLANPSLRRTIDRLR

SEQ ID NO: 33921 - DNA, 1584 bp, Zea mays subsp. mays
  misc_feature (1228)..(1228): n is a, c, g, or t
  misc_feature (1239)..(1239): n is a, c, g, or t
  misc_feature (1308)..(1308): n is a, c, g, or t
  misc_feature (1452)..(1452): n is a, c, g, or t
gaaaccccagagctttaaagcttttccgattccgcaatgctcaccgttcggttccttctcgtaccgagccgcgggtagccagccaaccgccgacgcagtccacaagcgatgaagcgcttcttccagccagtgcccaaggacggctccccgtccaagaagcggctagcgggtgctgctgaaccgggcgacggccccacatcagccggtgccgccaccggcgctggcggggatgtagaggggaggcccaccgaggagccgttcaagttcctgacgtggaacgccaacagcctgctcctccggatgaagagcgactggcctgctttctcgcagctcgtcgcccgccttgaccccgacgtcatttgtgtccaggaagtgcggatgccggcagctggttccaaaggggcacctaaaaaccccagtgaactaaaagatgacacaagcttgtcacgggatgaaaagcaggtagttctacgtgctttgtcagcttcacctttcaaagactaccgtgtctggtggtctctttcagattcaaaatatgctgggacagctatgtttataaagaaaaagtttgagcctaagaaggtgtctttcaacttggatagaacatcttctaagcatgaagccgatgggcgtgttataattgcggaatttgaatcattcctttttactgaacacttattctccaaacaatggatggaaggaggaggaaaatgcatttcaaagaagacgtaagtgggacaagaggatgctagaatttgttcaacacgtggataaacccttaatctggtgtggggacttgaatgtcagtcatgaagaaatcgacgtcagccatcctgatttctttagcagcgctaagctgaatggatacaccccacccaataaagaggactgtggacagccaggattcaccccagcagagagacggcgttttggcaacatattattccaaggaaagctggtagatgcttacaggcacctgcacaaagaaaaggacatagacggtggcttctcttggtccggtcatccaattggcaagtaccgaggaaagagaatgaggatcgactacttccttgtttcggaacagttaaaggacagaatagtttcatgtgaaatgcatggccgtggcattgaattggatggattttatggaagtgaccactgccctgtttcgcttgagctttccgaagctgtagcagaagaagcaccaggacagcccaagccatccatntaaatataccnccatggtggtcattgttgagacatttccggtccttcattaaacctgactgttccatgcattgcctactntaggtagctgaggtttgattgtaggtattattatgatcccagtaggttaccagttcctgtggtcagggctggtatagtttagggatcattgccatttaagcagtgcaatttggacatctcattctgcttgaaatgttgtttgtntaagagcagccatggactacctaatacctcatggggatcgaagagattaatcccttcgtatccaattttaactagcaagggatttaatccacccctaacaagcacaataaaatcttgttcgttttttctacc

SEQ ID NO: 33922 - protein, 207 aa, Zea mays subsp. mays
MKRFFQPVPKDGSPSKKRLAGAAEPGDGPTSAGAATGAGGDVEGRPTEEPFKFLTWNANSLLLRMKSDWPAFSQLVARLDPDVICVQEVRMPAAGSKGAPKNPSELKDDTSLSRDEKQVVLRALSASPFKDYRVWWSLSDSKYAGTAMFIKKKFEPKKVSFNLDRTSSKHEADGRVIIAEFESFLFTEHLFSKQWMEGGGKCISKKT

SEQ ID NO: 33923 - protein, 161 aa, Zea mays subsp. mays
  misc_feature (161)..(161): Xaa can be any naturally occurring amino acid
MLEFVQHVDKPLIWCGDLNVSHEEIDVSHPDFFSSAKLNGYTPPNKEDCGQPGFTPAERRRFGNILFQGKLVDAYRHLHKEKDIDGGFSWSGHPIGKYRGKRMRIDYFLVSEQLKDRIVSCEMHGRGIELDGFYGSDHCPVSLELSEAVAEEAPGQPKPSX

SEQ ID NO: 33924 - protein, 143 aa, Zea mays subsp. mays
MKSDWPAFSQLVARLDPDVICVQEVRMPAAGSKGAPKNPSELKDDTSLSRDEKQVVLRALSASPFKDYRVWWSLSDSKYAGTAMFIKKKFEPKKVSFNLDRTSSKHEADGRVIIAEFESFLFTEHLFSKQWMEGGGKCISKKT

SEQ ID NO: 33925 - DNA, 483 bp, Zea mays subsp. mays
agctgatcaacgccaccgcagacagcaacacactgcacacacacattgcaatggcagcggctggaggcggggtaggagatagcgagctgcggctgctgggcaagtcgtcgagcccttgggtgttccgggtgagagtggcgctgggactcagggggctgagctacgagtacatagaggaggacctcggcaacaagagcgagctcctgctccggtccaacccggtgcacaagaaggtgccggtcctcatccacggcggccgcccggtgtgcgagtcgctcgtgatcctccagtacgtcgacgagatctggcggggcaccggccctccgctccttccgtccgacccctacgaccgcgccacggcacggttctgggcggcctacgtcgacgacaagggtcgaggacggacgggcagagagcggaggcgctccagaacgccctcctcgtggcggagacgttggagcgggcgttcacggagtgctccag

SEQ ID NO: 33926 - protein, 160 aa, Zea mays subsp. mays
LINATADSNTLHTHIAMAAAGGGVGDSELRLLGKSSSPWVFRVRVALGLRGLSYEYIEEDLGNKSELLLRSNPVHKKVPVLIHGGRPVCESLVILQYVDEIWRGTGPPLLPSDPYDRATARFWAAYVDDKGRGRTGRERRRSRTPSSWRRRWSGRSRSAP

SEQ ID NO: 33927 - protein, 144 aa, Zea mays subsp. mays
MAAAGGGVGDSELRLLGKSSSPWVFRVRVALGLRGLSYEYIEEDLGNKSELLLRSNPVHKKVPVLIHGGRPVCESLVILQYVDEIWRGTGPPLLPSDPYDRATARFWAAYVDDKGRGRTGRERRRSRTPSSWRRRWSGRSRSAP

SEQ ID NO: 33928 - DNA, 1040 bp, Zea mays subsp. mays
aaagcaccaaagatgttgccgtggcctcgccgcacaagaaaatcacagcagtacagcaccagaaacagaaaggtagtagatcaaggaacgccagtgcggcgacaatgaccggcagtggaagcacgggcgccaatggcaagagccagagatccagggccaaggcaatgctgttcgccttgggcaagagctttcctgaccaagttctgcctcaggagaaggttgtggagagctacctccaagaaagcagctgcgacgatcccgccaccagggccaagcttcagcgcctttgcacgactacaacagtgaagacaaggtacactgttatgtccaaggagctattggataagcacccagagctgaagatggagggtactccgacactgacacctcgccttgacatctgcaatgccgcggtgatcgaccttggtgctgccgcagctcgcgctgcccttgacgaatggggtcgccctgcagctgatattacccacctcatctacatctcatccagtgaccttcgtctcccagggggcgaccttcacctggctgctcgccttggccttagcccaaacaccgtgcgcacttcccttctcttccttggctgctccggtggtgctgctgccctccgcactgccaaggacattgctgagaacaatccagggagccgtgtcctagtaacagctgctgagaccactgtgctaggcttccggccaccaagttatgaccgtccttatgaccttgttggtgctgcgctgtttggtgatggtgcatcagccgtgattataggagcaggtcccatgacaccagcagaaaatcctttcttggagcttgagttctccacgcaggagttcctacctgggactgataaggtaattgatggcaaaatctcagaggaaggaattaattttaaactagggcgtgatttgcctgagaagattgaaagccgcatagaaggtttctgcaggactctcatgaaccaggtagggataaaggatttcaacgatatattttgggctgtgcatcctggtggaccagcaatattg

SEQ ID NO: 33929 - protein, 346 aa, Zea mays subsp. mays
STKDVAVASPHKKITAVQHQKQKGSRSRNASAATMTGSGSTGANGKSQRSRAKAMLFALGKSFPDQVLPQEKVVESYLQESSCDDPATRAKLQRLCTTTTVKTRYTVMSKELLDKHPELKMEGTPTLTPRLDICNAAVIDLGAAAARAALDEWGRPAADITHLIYISSSDLRLPGGDLHLAARLGLSPNTVRTSLLFLGCSGGAAALRTAKDIAENNPGSRVLVTAAETTVLGFRPPSYDRPYDLVGAALFGDGASAVIIGAGPMTPAENPFLELEFSTQEFLPGTDKVIDGKISEEGINFKLGRDLPEKIESRIEGFCRTLMNQVGIKDFNDIFWAVHPGGPAIL

SEQ ID NO: 33930 - protein, 312 aa, Zea mays subsp. mays
MTGSGSTGANGKSQRSRAKAMLFALGKSFPDQVLPQEKVVESYLQESSCDDPATRAKLQRLCTTTTVKTRYTVMSKELLDKHPELKMEGTPTLTPRLDICNAAVIDLGAAAARAALDEWGRPAADITHLIYISSSDLRLPGGDLHLAARLGLSPNTVRTSLLFLGCSGGAAALRTAKDIAENNPGSRVLVTAAETTVLGFRPPSYDRPYDLVGAALFGDGASAVIIGAGPMTPAENPFLELEFSTQEFLPGTDKVIDGKISEEGINFKLGRDLPEKIESRIEGFCRTLMNQVGIKDFNDIFWAVHPGGPAIL

SEQ ID NO: 33931 - protein, 292 aa, Zea mays subsp. mays
MLFALGKSFPDQVLPQEKVVESYLQESSCDDPATRAKLQRLCTTTTVKTRYTVMSKELLDKHPELKMEGTPTLTPRLDICNAAVIDLGAAAARAALDEWGRPAADITHLIYISSSDLRLPGGDLHLAARLGLSPNTVRTSLLFLGCSGGAAALRTAKDIAENNPGSRVLVTAAETTVLGFRPPSYDRPYDLVGAALFGDGASAVIIGAGPMTPAENPFLELEFSTQEFLPGTDKVIDGKISEEGINFKLGRDLPEKIESRIEGFCRTLMNQVGIKDFNDIFWAVHPGGPAIL

SEQ ID NO: 33932 - DNA, 1957 bp, Zea mays subsp. mays
  misc_feature (251)..(251): n is a, c, g, or t
aggcctccactcattcctgcccccgacactcccactgccaccagtcctctcaccgccaggcgcggcacaatgcagccgcctacccttctcccgctaggcgccgtcgtggtcgccatcctcctgctcgccaccgccccgagccccgccgtctcccgccaccgccactcgtccgccgcggacacggagacgctcgatgtagccgcctcgctctcccgcgcccgcgccgcgctctccaccgacgccgtctcggntgcaccagtccgcggccgccgccgccgccggggcgaagcgctccccgcgagcgcgggagggcggcctcacgctgcggctccactcccgggacttcctgcccgaggagcaggggcggcacgagacgtaccgctcgctcgtgctctcccgcctccgccgcgactcggcgcgcgccgctgcggtgtcggcccgcgcgacgctggcggcggacggcgtgacccggctggacctgcgccccgcgaacgggtcggcggtgttcgcggcgtcggcggcggcggcggcgatccagggtcccgtggtgtccggcgtcgggcagggcagcggcgagtacttctcccgcgtgggcatcggcagccccgcgcggcagctgtacatggtgctggacaccggcagcgacgtcacctgggtgcagtgccagccctgcgccgactgctaccagcagtccgacccggtgttcgacccgtccctctccgcctcctacgccgccgtctcctgcgactcccagcgctgccgggacctggacaccgcggcgtgccgcaacgccacgggcgcctgcctctacgaggtggcctacggcgacggctcctacaccgtgggcgacttcgccaccgagacgctcacgctgggggactccaccccggtcggcaacgtcgccatcgggtgcggccacgacaacgagggcctcttcgtcggcgccgcggggctgctggcgctgggcggcgggccgctctccttcccgtcccagatctccgcgtccaccttctcctactgcctcgtggaccgcgactccccggccgcgtccacgctccagttcggcgacggcgccgccgaggcgggcaccgtgacggcgcctctcgtgcgcagcccgcgcacgagcaccttctactacgtggcgctttcgggcatctcggtgggcgggcagccgctgtccatcccggcatccgccttcgccatggacgccacgtcgggctcgggcggcgtcatcgtggactccggcaccgccgtgacgcggctccagtccgccgcgtacgcggcgctccgcgacgccttcgtccagggcgcgccgtcgctgccccggacctccggggtgtcgctgttcgacacgtgctacgacctgtcggaccggacgagcgtggaggtgcccgcggtgtcgctgcggttcgagggcggcggcgcgctgcggctgccggcgaagaactacctgatccccgtggacggagccggcacctactgcctggcgttcgcgccgacgaacgcggccgtgtccatcatcgggaacgtgcagcagcagggcacccgcgtcagcttcgacaccgccaggggcgccgtcggcttcacccccaacaagtgctagcctagcctagcctaagcctgccttctggctaaccgtgccctgttagccacggttgtcagtagtaatgacaagccggtgtttaattagcgggagaatgattagatggggggtaattaagcggtgggccctgccgggtctggggaggagcgaaaggcaaaggcgaggacagatgatgccattgccatgccagcctgtgtccggcgcgatgggtccagctccagcagtgtttctctctttctctcgagtatgcgtgcgtggagccttgtcatgacgaattagatcgtgggggctcccaagttaagagtatttatttttattttatttgctatgtcaagaaaatggaagtttccatcc

SEQ ID NO: 33933 - protein, 535 aa, Zea mays subsp. mays
  misc_feature (84)..(84): Xaa can be any naturally occurring amino acid
RPPLIPAPDTPTATSPLTARRGTMQPPTLLPLGAVVVAILLLATAPSPAVSRHRHSSAADTETLDVAASLSRARAALSTDAVSXAPVRGRRRRRGEALPASAGGRPHAAAPLPGLPARGAGAARDVPLARALPPPPRLGARRCGVGPRDAGGGRRDPAGPAPRERVGGVRGVGGGGGDPGSRGVRRRAGQRRVLLPRGHRQPRAAAVHGAGHRQRRHLGAVPALRRLLPAVRPGVRPVPLRLLRRRLLRLPALPGPGHRGVPQRHGRLPLRGGLRRRLLHRGRLRHRDAHAGGLHPGRQRRHRVRPRQRGPLRRRRGAAGAGRRAALLPVPDLRVHLLLLPRGPRLPGRVHAPVRRRRRRGGHRDGASRAQPAHEHLLLRGAFGHLGGRAAAVHPGIRLRHGRHVGLGRRHRGLRHRRDAAPVRRVRGAPRRLRPGRAVAAPDLRGVAVRHVLRPVGPDERGGARGVAAVRGRRRAAAAGEELPDPRGRSRHLLPGVRADERGRVHHRERAAAGHPRQLRHRQGRRRLHPQQVLA

SEQ ID NO: 33934 - protein, 512 aa, Zea mays subsp. mays
  misc_feature (61)..(61): Xaa can be any naturally occurring amino acid
MQPPTLLPLGAVVVAILLLATAPSPAVSRHRHSSAADTETLDVAASLSRARAALSTDAVSXAPVRGRRRRRGEALPASAGGRPHAAAPLPGLPARGAGAARDVPLARALPPPPRLGARRCGVGPRDAGGGRRDPAGPAPRERVGGVRGVGGGGGDPGSRGVRRRAGQRRVLLPRGHRQPRAAAVHGAGHRQRRHLGAVPALRRLLPAVRPGVRPVPLRLLRRRLLRLPALPGPGHRGVPQRHGRLPLRGGLRRRLLHRGRLRHRDAHAGGLHPGRQRRHRVRPRQRGPLRRRRGAAGAGRRAALLPVPDLRVHLLLLPRGPRLPGRVHAPVRRRRRRGGHRDGASRAQPAHEHLLLRGAFGHLGGRAAAVHPGIRLRHGRHVGLGRRHRGLRHRRDAAPVRRVRGAPRRLRPGRAVAAPDLRGVAVRHVLRPVGPDERGGARGVAAVRGRRRAAAAGEELPDPRGRSRHLLPGVRADERGRVHHRERAAAGHPRQLRHRQGRRRLHPQQVLA

SEQ ID NO: 33935 - protein, 326 aa, Zea mays subsp. mays
MVLDTGSDVTWVQCQPCADCYQQSDPVFDPSLSASYAAVSCDSQRCRDLDTAACRNATGACLYEVAYGDGSYTVGDFATETLTLGDSTPVGNVAIGCGHDNEGLFVGAAGLLALGGGPLSFPSQISASTFSYCLVDRDSPAASTLQFGDGAAEAGTVTAPLVRSPRTSTFYYVALSGISVGGQPLSIPASAFAMDATSGSGGVIVDSGTAVTRLQSAAYAALRDAFVQGAPSLPRTSGVSLFDTCYDLSDRTSVEVPAVSLRFEGGGALRLPAKNYLIPVDGAGTYCLAFAPTNAAVSIIGNVQQQGTRVSFDTARGAVGFTPNKC

SEQ ID NO: 33936 - DNA, 818 bp, Zea mays subsp. mays
acatcaccttgattcgaaaaaagttgcccgatgagaaagaaggtcaaggacaagtgagcatggctcagtttctgggattcctgggactgttcaatatgttgtttttctttcctgttgcgttggtgttgaacttcgccaagctggagccattccacaggctcacatgggaacaagctggtcttgttgttggaaaaggtttgatagacaatgttttgagtgactacttgtgggcgaaagcgatccttctcacaacaaccacggttgctacagctggcctcacaatccaagttccgattgctgccattgtggacacactcaccgtcatgctcctcatctactggactatgttggagccgctgccgtcctagtcggtttcgctggaatcaacataccagctggagagtctccacaggatgttcagcaggagcaggaaactcctattgttagcatggtcgatgacgacccggttcatttgcccagcagtaacaatgctactgatgttgtctcatagaccctggagccgtgtgatttatcaacaatgtatagagatagggagtttggccagatgagtagtttctttgtacccccccccccccccccctcccaacacaagggatcgacatggactgaaggctagagtagcctacctagtttgttcagagctttgagtaacaagtgttatgggtatttcatttttatcttgcaatcgtttacatctgtgggaaaaaaacccagtttcctacggaagagtaaagtctgtttgtgattcatggaaggtgttgtgtttatagaaggatataacaaagtttcctgctgcg

SEQ ID NO: 33937 - protein, 121 aa, Zea mays subsp. mays
ITLIRKKLPDEKEGQGQVSMAQFLGFLGLFNMLFFFPVALVLNFAKLEPFHRLTWEQAGLVVGKGLIDNVLSDYLWAKAILLTTTTVATAGLTIQVPIAAIVDTLTVMLLIYWTMLEPLPS

SEQ ID NO: 33938 - protein, 102 aa, Zea mays subsp. mays
MAQFLGFLGLFNMLFFFPVALVLNFAKLEPFHRLTWEQAGLVVGKGLIDNVLSDYLWAKAILLTTTTVATAGLTIQVPIAAIVDTLTVMLLIYWTMLEPLPS

SEQ ID NO: 33939 - protein, 90 aa, Zea mays subsp. mays
MLFFFPVALVLNFAKLEPFHRLTWEQAGLVVGKGLIDNVLSDYLWAKAILLTTTTVATAGLTIQVPIAAIVDTLTVMLLIYWTMLEPLPS

SEQ ID NO: 33940 - DNA, 934 bp, Zea mays subsp. mays
  misc_feature (652)..(652): n is a, c, g, or t
  misc_feature (689)..(689): n is a, c, g, or t
  misc_feature (710)..(710): n is a, c, g, or t
  misc_feature (774)..(774): n is a, c, g, or t
  misc_feature (867)..(867): n is a, c, g, or t
  misc_feature (927)..(929): n is a, c, g, or t
catcttgatgtaatgcttagatcactgctcttgactgcgctggtcagacttggacataatgaaactataaatgaaggagttcggcgtttccacatcttctttgaagacggcaaaacttcccttcttccaccagatactagaaaggctgcatatcttgccgtgatgcgaactgttagcacctcaagcagatccggttttgatgctctccttaaaatctacagagaagcatctgaaccacaggagaaatcacgtgtcttaggctccctgtcttcatcaccggatcaggatattgttttggaggcattgaactttatgtttactgatgaggtgcggaatcaagattcattttacatccttggtggcattagcttagaaggacgagaaattgcatggacctggttgaaggaaaactgggatcacgtgttgaagacatggaaatcgagttcactcatatcagacttcattgagtccattgtcccacggtttacctccgaggagaaagctgtcgaggttaccgagttctttgctggccaagttaagccatcattcgagagagcactgaagcagagcctggagagggtgcggatcagcgcgagatggatcgagagcattaggagtgagcccaagcttggtcagacagtgcaggagctgntgcaggccgatgcgtaaacatgtggcctggaaggtancggttcctcagtgtgatcatntcatacgggctgttcgggtcagattaaagtcggttgtttagattgctgcagttataatctatanagataaacattgtagaaacagtagaagtcggtataaattaaacctaaacgaccaggcctataaattcttgaaaaggttcaggtgggcttattntacattgtattggcagttgcttgcgtatgatttgttgagggaaaaaactgatgcaatgannnttgtt

SEQ ID NO: 33941 - protein, 222 aa, Zea mays subsp. mays
  misc_feature (218)..(218): Xaa can be any naturally occurring amino acid
HLDVMLRSLLLTALVRLGHNETINEGVRRFHIFFEDGKTSLLPPDTRKAAYLAVMRTVSTSSRSGFDALLKIYREASEPQEKSRVLGSLSSSPDQDIVLEALNFMFTDEVRNQDSFYILGGISLEGREIAWTWLKENWDHVLKTWKSSSLISDFIESIVPRFTSEEKAVEVTEFFAGQVKPSFERALKQSLERVRISARWIESIRSEPKLGQTVQELXQADA

SEQ ID NO: 33942 - protein, 218 aa, Zea mays subsp. mays
  misc_feature (214)..(214): Xaa can be any naturally occurring amino acid
MLRSLLLTALVRLGHNETINEGVRRFHIFFEDGKTSLLPPDTRKAAYLAVMRTVSTSSRSGFDALLKIYREASEPQEKSRVLGSLSSSPDQDIVLEALNFMFTDEVRNQDSFYILGGISLEGREIAWTWLKENWDHVLKTWKSSSLISDFIESIVPRFTSEEKAVEVTEFFAGQVKPSFERALKQSLERVRISARWIESIRSEPKLGQTVQELXQADA

SEQ ID NO: 33943 - protein, 168 aa, Zea mays subsp. mays
  misc_feature (164)..(164): Xaa can be any naturally occurring amino acid
MRTVSTSSRSGFDALLKIYREASEPQEKSRVLGSLSSSPDQDIVLEALNFMFTDEVRNQDSFYILGGISLEGREIAWTWLKENWDHVLKTWKSSSLISDFIESIVPRFTSEEKAVEVTEFFAGQVKPSFERALKQSLERVRISARWIESIRSEPKLGQTVQELXQADA

SEQ ID NO: 33944 - DNA, 1249 bp, Zea mays subsp. mays
  misc_feature (43)..(43): n is a, c, g, or t
  misc_feature (269)..(269): n is a, c, g, or t
  misc_feature (337)..(337): n is a, c, g, or t
  misc_feature (498)..(498): n is a, c, g, or t
gctcgagggacaccttgctggatgctgaccttgagagcgacgnctaggctggcagtacatttctgggtctctccctgatggccgtgagcttgaccgcatcgacaaccctcagtttgaagggtacaagtttgatccgcacggggagtacgtccggcgatggctaccggagctggcaaggctgccaacggaatggatacaccatccctgggatgcacctgagtctgtgcttcaggctgcaggggttgagctaggatctaactacccacgcnccattgtcgagttagatgcagccaattccaggttgcaggatgccctgtcagagatgtgggagcttgangcagcctctcgctgctgccatggagaacggaatggaagaaggcctcggcgattccatcggatgagccgccgatcgacttccctcaagaactacggatcggaagtggaccgacagccggttcaacctgctatccacgcaccgggagtgactggtcggagacnagaggatcagatggtgcccagcatgacttcctcgttcattagagctgagaccgaactcactgcagattttggccacaccagtgaggacagtaggccagaagtgccatcaaacatccaccatttgcaggctcgcccggagagggaagagacagttgacggtggcactggcaatgctgtcagggtgcatggcaaccatcaccagcagaaccttcagaacaacatgcaccgcgtgctaggtatcgctccatcgatttcagaggcatcaagcagttggacgggcagggatggtggagtggtaccagtctggtcgcctccggcagcttcgggacactctgattcttatgctgccgatgaggctgacatttccagtaggggttatctggacaggcatccacagtcacataccgatgatgaactggagccagctctctcagtcattgacaacagggtgggaagtggataattagcgctgtgtgtccggatttaattgcttaggatttcgggcagagagaattatacatatgtaaattatcagattttgttcgtctatatagccttggtgtgcatgcaagtcatcaatcatgcagcttcctggatgcaataatggttatgtgaagctagttgtacagaaccttgctggtataggttgctaggtgtccacaagatatatgtattattcgtcagaagagttttctagcatcaggttcattttgtatctggttactgtcttattatagtctttggtgatgac

SEQ ID NO: 33945 - protein, 212 aa, Zea mays subsp. mays
  misc_feature (5)..(5): Xaa can be any naturally occurring amino acid
  misc_feature (59)..(59): Xaa can be any naturally occurring amino acid
MWELXAASRCCHGERNGRRPRRFHRMSRRSTSLKNYGSEVDRQPVQPAIHAPGVTGRRXEDQMVPSMTSSFIRAETELTADFGHTSEDSRPEVPSNIHHLQARPEREETVDGGTGNAVRVHGNHHQQNLQNNMHRVLGIAPSISEASSSWTGRDGGVVPVWSPPAASGHSDSYAADEADISSRGYLDRHPQSHTDDELEPALSVIDNRVGSG

SEQ ID NO: 33946 - protein, 187 aa, Zea mays subsp. mays
  misc_feature (34)..(34): Xaa can be any naturally occurring amino acid
MSRRSTSLKNYGSEVDRQPVQPAIHAPGVTGRRXEDQMVPSMTSSFIRAETELTADFGHTSEDSRPEVPSNIHHLQARPEREETVDGGTGNAVRVHGNHHQQNLQNNMHRVLGIAPSISEASSSWTGRDGGVVPVWSPPAASGHSDSYAADEADISSRGYLDRHPQSHTDDELEPALSVIDNRVGSG

SEQ ID NO: 33947 - protein, 150 aa, Zea mays subsp. mays
MVPSMTSSFIRAETELTADFGHTSEDSRPEVPSNIHHLQARPEREETVDGGTGNAVRVHGNHHQQNLQNNMHRVLGIAPSISEASSSWTGRDGGVVPVWSPPAASGHSDSYAADEADISSRGYLDRHPQSHTDDELEPALSVIDNRVGSG

SEQ ID NO: 33948 - DNA, 833 bp, Zea mays subsp. mays
gatcctattagtattcgttctacgttggaatttgaaaactggggcaaaaggtcattgcgctgtcgtcgtcgttcgcaagcagcaagcaggcagctccgggctgccggccatggcatcagcaccaaggaatgtcggtaccaggactaccagcaacccggagatcccagagttcctggtgggcccggctggccggccggtgccggccgtggggctcggcacggcatcgttcccgttcgtggaggaaaacgtcagggccgccgtcctcgcggcactggagctcggataccgccacctcgataccgcttcgctctaccgctctgaacgtgccgtcggcgacgccgtggccgaggcagcgcggcgcgggatcgtggcgtccagggaggaggtgttcgtgacgaccaagatgtggtgctcgcagtgccacccggatctcgtgctaccttccctcaaggagagcttgcaggcgcccgggattcttccgtgctaatggggaatgggtcacatgcttctgttcatggcactggcacggtggatctgaagtttacttcgggaaagatcgtgcagctgaagaacgtgcatcatgtcccttctatacacaagaatctcgttagcggaacccttctatgtagagatgggttcaaggtagttttagagtccaataaattagttgtgtccaagtctggacaatttattggtaaaggctatgattgcggaggcttgttccgcttttctttgttagatttcaataataagtctgtgaaccatatttgtgctaatgttgatgatcttgcgagtatttggcattctcgtttgtgtcatactaattttggctc

SEQ ID NO: 33949 - protein, 161 aa, Zea mays subsp. mays
ILLVFVLRWNLKTGAKGHCAVVVVRKQQAGSSGLPAMASAPRNVGTRTTSNPEIPEFLVGPAGRPVPAVGLGTASFPFVEENVRAAVLAALELGYRHLDTASLYRSERAVGDAVAEAARRGIVASREEVFVTTKMWCSQCHPDLVLPSLKESLQAPGILPC

SEQ ID NO: 33950 - protein, 125 aa, Zea mays subsp. mays
MASAPRNVGTRTTSNPEIPEFLVGPAGRPVPAVGLGTASFPFVEENVRAAVLAALELGYRHLDTASLYRSERAVGDAVAEAARRGIVASREEVFVTTKMWCSQCHPDLVLPSLKESLQAPGILPC

SEQ ID NO: 33951 - protein, 115 aa, Zea mays subsp. mays
MGNGSHASVHGTGTVDLKFTSGKIVQLKNVHHVPSIHKNLVSGTLLCRDGFKVVLESNKLVVSKSGQFIGKGYDCGGLFRFSLLDFNNKSVNHICANVDDLASIWHSRLCHTNFG

SEQ ID NO: 33952 - DNA, 2752 bp, Zea mays subsp. mays
gcacgagaccattacctagaacatcctaatcgaaaaacaactcggcaactacggagctgcctccaactcatttgcttaccatccctaccgcctggctcagatctcgatgcggcgcaagcttcccggcgacgcgccgctgtcggcggcggggcctggtcatgcgttgtccgcatccgcgccgtccgaggtggacctcgctcagctctccgccgccatcgcggccggggaggaccttggccccttcgtgcgccgggccttcgcgtgcggccgccccgagccgctgctcgcctcgctccgcggcgcggcgcgggaccgcgaggcggagatcgaggagctctgccgcgcacacttccacgattttatccgcgccgtcgacgacctccggtccctccttgccgacgccgacgcgctcaagggctccctctcggcgtcccactccgcgcttctctcctcggcggccccgttgctcgcctcgcttgaatccttcctcgccgcgcgctcgctcgcggggaatctctcctccgcgctagcctcctcccgacgctgcgtacggctgctcgcgctcgcggcgcgggcgaacgcgcacttacaggccggcaatcatgggctctacctcgccctgcgcgccgtcgacgccatcgaccgtgatctcgcctcgggacccgagcctctgccgctacccacgctccgccgcatgctgctcagcgtcgtccctgcggtgcgtgcgcatgccgagcgcgagatctcccgggagttctcagactggatggttagcattcgcgctgcttcgaggcacctcggccaggtggccatcagccggtcggctgccgcgaggcagcgccaggaggagctccgctccaagcaccgcccgctggaggagtgcatcaccttggatgacgatggtgttggtgacctcgacgattttgcggcagccgcggcaacagctgaagcagcagatggtgccgctgcagcctcttttgaccttacgccgctctatcgagcgatgcatatacaccagacgctggcgctaggtgagcggttcaagaagtactacctggaaaacaggaagctgcagctgacatcggactttgatgtcattgcggcgacgccattcctcgagtcccaccaggtgtttttctcgcagattgctgggttctttattgttgaagaccgggtgtttagaacagggggtgggctcacatctcggccagatgtagatgcactttgggatgccgctgtggggaagatggtctctgtcatggaagataacttctccaggatgcagacagcaaaccacttgcttctcatcactgattatgctgctttgctttctgccacaatgcggcggtatggttatccagtagggatgctactcgatgtgctggccaagcacagggacaagtaccatgatttgctgcttgcagattgccgtaggcaggtggctgaggcactgacagcagataagtttgatcagatgctcatgagaaaggagtatgagtactcaatgaatgtccttgcatttggaattcagagctcagacattaccccagctttcccatatgttgcaccgttttcatgcaccgtcccagacatttgccgtattgttcgttcgttcattgaagattctgtgagcttcatggcacatgggggaggtggggatacctatgcagcagtgaagaagtaccttggtcggatcctatctgaggtggtggatgcttcgattaaaaaacttttggattcaggcagtggtctaagtgtgtcccaggcaatgcaggttgctgctaacatgtctgtgatggagcgggcatgcgagttctttacacgccatgctgcacaactgtgtggtgtgccgctgcgtgctgtggagcgtggtcggcgggacttcccacttcgcaggtcacgtgatgctgcggaggcgctcctgctgcggcttctgcgtgccaaggttgatgagtttatgagacaatctgatggtatcaactggatggctgatgactctcctcctggcggcaatgagtatgcgaatgaggtcatcatctaccttgagacgctcacatcaacggcacagcagatccttccccttcctgtgctacaccgtgtacttgtggcagtgcttgcccacatctctgaaaggatcatcgagctcttcttgaacgattcagtaaagcggttcaatgccaatgcggtcactggtatagatactgatctcaaaatgtttgagacgtttgcagagggcatgtctagcctgtttgtggactcaggtcaagaatctgcaaaaaatgaaatgaaggctgcactagtggaagcaaggcagctagtgaatcttcttatgagcaatagtccagagaatttcctaaatccagtgatccgtgagaagagctataacaagctagattatagaaaggttgcaatcatctcagagaagtttagagatacctcagagagttatttctcaacatttgggacaaggggtgccaggcagaacccaaagaagaaatctctggataccctgatcaagaggctcacagaagccagttagatatcctcccagctgtaagataatacatgcaactggcttctcacatcctcatattttcgtgaaataatctgtatctggtttgtgttatgcctgtttcagtcgttaaccttatgctgtaattgctgttagattctatgtttcatatgtgtggaaatcatcttgttgattcttttgccatttactatatgatcgaggtatagtatattagtatgg

SEQ ID NO: 33953 - protein, 810 aa, Zea mays subsp. mays
MRRKLPGDAPLSAAGPGHALSASAPSEVDLAQLSAAIAAGEDLGPFVRRAFACGRPEPLLASLRGAARDREAEIEELCRAHFHDFIRAVDDLRSLLADADALKGSLSASHSALLSSAAPLLASLESFLAARSLAGNLSSALASSRRCVRLLALAARANAHLQAGNHGLYLALRAVDAIDRDLASGPEPLPLPTLRRMLLSVVPAVRAHAEREISREFSDWMVSIRAASRHLGQVAISRSAAARQRQEELRSKHRPLEECITLDDDGVGDLDDFAAAAATAEAADGAAAASFDLTPLYRAMHIHQTLALGERFKKYYLENRKLQLTSDFDVIAATPFLESHQVFFSQIAGFFIVEDRVFRTGGGLTSRPDVDALWDAAVGKMVSVMEDNFSRMQTANHLLLITDYAALLSATMRRYGYPVGMLLDVLAKHRDKYHDLLLADCRRQVAEALTADKFDQMLMRKEYEYSMNVLAFGIQSSDITPAFPYVAPFSCTVPDICRIVRSFIEDSVSFMAHGGGGDTYAAVKKYLGRILSEVVDASIKKLLDSGSGLSVSQAMQVAANMSVMERACEFFTRHAAQLCGVPLRAVERGRRDFPLRRSRDAAEALLLRLLRAKVDEFMRQSDGINWMADDSPPGGNEYANEVIIYLETLTSTAQQILPLPVLHRVLVAVLAHISERIIELFLNDSVKRFNANAVTGIDTDLKMFETFAEGMSSLFVDSGQESAKNEMKAALVEARQLVNLLMSNSPENFLNPVIREKSYNKLDYRKVAIISEKFRDTSESYFSTFGTRGARQNPKKKSLDTLIKRLTEAS

SEQ ID NO: 33954 - protein, 614 aa, Zea mays subsp. mays
MLLSVVPAVRAHAEREISREFSDWMVSIRAASRHLGQVAISRSAAARQRQEELRSKHRPLEECITLDDDGVGDLDDFAAAAATAEAADGAAAASFDLTPLYRAMHIHQTLALGERFKKYYLENRKLQLTSDFDVIAATPFLESHQVFFSQIAGFFIVEDRVFRTGGGLTSRPDVDALWDAAVGKMVSVMEDNFSRMQTANHLLLITDYAALLSATMRRYGYPVGMLLDVLAKHRDKYHDLLLADCRRQVAEALTADKFDQMLMRKEYEYSMNVLAFGIQSSDITPAFPYVAPFSCTVPDICRIVRSFIEDSVSFMAHGGGGDTYAAVKKYLGRILSEVVDASIKKLLDSGSGLSVSQAMQVAANMSVMERACEFFTRHAAQLCGVPLRAVERGRRDFPLRRSRDAAEALLLRLLRAKVDEFMRQSDGINWMADDSPPGGNEYANEVIIYLETLTSTAQQILPLPVLHRVLVAVLAHISERIIELFLNDSVKRFNANAVTGIDTDLKMFETFAEGMSSLFVDSGQESAKNEMKAALVEARQLVNLLMSNSPENFLNPVIREKSYNKLDYRKVAIISEKFRDTSESYFSTFGTRGARQNPKKKSLDTLIKRLTEAS

SEQ ID NO: 33955 - protein, 590 aa, Zea mays subsp. mays
MVSIRAASRHLGQVAISRSAAARQRQEELRSKHRPLEECITLDDDGVGDLDDFAAAAATAEAADGAAAASFDLTPLYRAMHIHQTLALGERFKKYYLENRKLQLTSDFDVIAATPFLESHQVFFSQIAGFFIVEDRVFRTGGGLTSRPDVDALWDAAVGKMVSVMEDNFSRMQTANHLLLITDYAALLSATMRRYGYPVGMLLDVLAKHRDKYHDLLLADCRRQVAEALTADKFDQMLMRKEYEYSMNVLAFGIQSSDITPAFPYVAPFSCTVPDICRIVRSFIEDSVSFMAHGGGGDTYAAVKKYLGRILSEVVDASIKKLLDSGSGLSVSQAMQVAANMSVMERACEFFTRHAAQLCGVPLRAVERGRRDFPLRRSRDAAEALLLRLLRAKVDEFMRQSDGINWMADDSPPGGNEYANEVIIYLETLTSTAQQILPLPVLHRVLVAVLAHISERIIELFLNDSVKRFNANAVTGIDTDLKMFETFAEGMSSLFVDSGQESAKNEMKAALVEARQLVNLLMSNSPENFLNPVIREKSYNKLDYRKVAIISEKFRDTSESYFSTFGTRGARQNPKKKSLDTLIKRLTEAS

SEQ ID NO: 33956 - DNA, 1369 bp, Zea mays subsp. mays
aagtgatgttccatcatgtttgcttaaaaagacacgcactgcctctgcctgtgcctgcctgttcatggtcctcatcctcacagagctggttaccgaaaaattggtatactttttcttggcgcaggatctgagctgaagctgccaggcagagcagggcaggcagtgtaggctccatcagatccaacgccaccagctagcagcagcagcagcagcatggccaccaccagcacgcctcgcctcgccaccctcctggtgctcctggcggcggcgtcaccgctgctgagcgcagctcaaaaggccgcccccaaggctccggcggcggcgaaggcggcgccagggccggcggcgtcgtcgtcgtccggcgcgggcgcggcggacgcggtcccctcccacagacgtgaacaaggcgctcaaggacgaccagttcagcgagttcaagcagctgctgcacgacacgcgcgtggacacgcagatcaacgcgcagctgacggacagctacaacgggctgaccatcatggcgcccaccaacgccgccttcgacaagatgaaggccggcgtgctcaacgggctgtcgccgcaggaccagatccagctcgtcctctactgcgtgctgccccgcttctacagcctctccatgctcggcaccctcgacggcaaggtcaacacgcagggctccggccacgacgggccctacaggtactgacatcaagcggtcgggcaacaacgtcaacgtgtccacgggcgtcaactggatgctgctgggcagccccgtcagcaaggacttcccgctcgccatctaccccgtcgacaaggtgccgctcccctacgagctgttcgggcccaagccgcccaccccggcgcccgcgccggccccggcacccgccaagtccaagaccaagaagaagaagaaggccgccggcatcgccgagccgcccacggccgacgacgacacctccgcctccgacgaccagaaggcggccgccgcgcccggcaccgccggcagctggaccgccaccgcgctctcggcgctcgccgccgctgccctcggcgccggcctcttctgatggggagagggaggatagagtcagtcaccatcgttcagatttgagatcacatggcgcggcgctactgcggtggcgatcgatcgctcctgcgccgcgcgccgtgcattgccatacaatgtcgcacggtcgatacgatcagagttggtgtgccccatccatccatgtacccatccatgcatttgtggctttattaattctttcttccccttgctttctctctccttttcctttcggcggatttctattggtgatttgtatttgtaacctaatgtgatgtacacaagtagtgcttcctctttcactgt

SEQ ID NO: 33957 - protein, 374 aa, Zea mays subsp. mays
MATTSTPRLATLLVLLAAASPLLSAAQKAAPKAPAAAKAAPGPAASSSSGAGAADAVPSHRREQGAQGRPVQRVQAAAARHARGHADQRAADGQLQRADHHGAHQRRLRQDEGRRAQRAVAAGPDPARPLLRAAPLLQPLHARHPRRQGQHAGLRPRRALQVLTSSGRATTSTCPRASTGCCWAAPSARTSRSPSTPSTRCRSPTSCSGPSRPPRRPRRPRHPPSPRPRRRRRPPASPSRPRPTTTPPPPTTRRRPPRPAPPAAGPPPRSRRSPPLPSAPASSDGEREDRVSHHRSDLRSHGAALLRWRSIAPAPRAVHCHTMSHGRYDQSWCAPSIHVPIHAFVALLILSSPCFLSPFPFGGFLLVICICNLM

SEQ ID NO: 33958 - DNA, 1024 bp, Zea mays subsp. mays
actcccccacgacgccgtcctcgtccccgtcccgacgaattggaataggagaagcaaaagatgatggatctcgccgacagccagcaacagcggctcatcgccggcgcggctctgctggtcgccaccgtcgccttcctcaggctcctcctgagctcccgctccgggggcaagcgcctgccgcccaccatcccgggggcgccggtggtcggcgggcctcgtcaagttcatgcgcgcgcctatcccgatgatccgggagcagtacgcccgcctcggcagcgtcttcaccgtccccatcatcagccgcaagatcacgttcctcgtcgggcccgaggtgtccgcgcacttcttcaagggcaacgaggccgagatgagccagcaggaggtgtacaggttcaacgtgcccaccttcggccccggggtcgtctttgacgtcgactactccatcaggcaggagcagttcaggttcttcaccgaggcgctccgggccaataagctgcgcagctatgtcgaccagatggttgttgaggctgaggagtacttctcaaagtggggagaaagtggcactgttgatttgaagtacgagttggagcacctcatcatactgacagctagccggtgcttgctgggaagggaggtgcgagaaaagctgttcgacgatgtttctgctctcttccatgaccttgacaacgggatgcagccaatcagtgtcctcttcccgtacctcccaatccctgcgcataagcgccgtgacagggcacgggcacgtttggcagaaatctttgccaccatcatcaagtcccgcaaggcctctggacagtctgaggaagacatgctgcagtgcttcattgattccaagtacaagaatgggcgccccaccaccgagggtgaggtaaccgggctacttatcgcagcgctctttgctggacagcataccagctcaatcacctcaacctggactggagcgtacatgcttcgcttcaagcagtactttgcagaagccgtagaggagcagaaggatatcatg

SEQ ID NO: 33959 - protein, 266 aa, Zea mays subsp. mays
MRAPIPMIREQYARLGSVFTVPIISRKITFLVGPEVSAHFFKGNEAEMSQQEVYRFNVPTFGPGVVFDVDYSIRQEQFRFFTEALRANKLRSYVDQMVVEAEEYFSKWGESGTVDLKYELEHLIILTASRCLLGREVREKLFDDVSALFHDLDNGMQPISVLFPYLPIPAHKRRDRARARLAEIFATIIKSRKASGQSEEDMLQCFIDSKYKNGRPTTEGEVTGLLIAALFAGQHTSSITSTWTGAYMLRFKQYFAEAVEEQKDIM

SEQ ID NO: 33960 - protein, 260 aa, Zea mays subsp. mays
MIREQYARLGSVFTVPIISRKITFLVGPEVSAHFFKGNEAEMSQQEVYRFNVPTFGPGVVFDVDYSIRQEQFRFFTEALRANKLRSYVDQMVVEAEEYFSKWGESGTVDLKYELEHLIILTASRCLLGREVREKLFDDVSALFHDLDNGMQPISVLFPYLPIPAHKRRDRARARLAEIFATIIKSRKASGQSEEDMLQCFIDSKYKNGRPTTEGEVTGLLIAALFAGQHTSSITSTWTGAYMLRFKQYFAEAVEEQKDIM

SEQ ID NO: 33961 - protein, 219 aa, Zea mays subsp. mays
MSQQEVYRFNVPTFGPGVVFDVDYSIRQEQFRFFTEALRANKLRSYVDQMVVEAEEYFSKWGESGTVDLKYELEHLIILTASRCLLGREVREKLFDDVSALFHDLDNGMQPISVLFPYLPIPAHKRRDRARARLAEIFATIIKSRKASGQSEEDMLQCFIDSKYKNGRPTTEGEVTGLLIAALFAGQHTSSITSTWTGAYMLRFKQYFAEAVEEQKDIM

SEQ ID NO: 33962 - DNA, 1177 bp, Zea mays subsp. mays
aatcagcccatcactcccgtcggcagcagggtcaaccactgccaccggcgcacgcagctgtgcatgaggtctcctcacccaccggccgccgcgtccggacccagcccggcaactcgcacctcctcctcctgctgacgcccgcgcgcttggccccgtgctcacacgggggtgtcgatcagaagaacatcctgctcacggcgttccccgacgcgtggctcgtaacgcactcttcccgcggtacaagtgcgacccacggtgctggcggagaggaacctagcagcggaagatcgagttcagggatggcttctggtggaaccttccggaaccttctcctggtgctccccctctacctcgcgctcgcctcgttggtcggtggcgaggcctcgaggaggttctggatcgagaacgacacctttaggaaggatggagtaccgttccaaatcgtcggtggtgatgttcactatttccgcattgttcctgagtactggaaggatcgccttttaagagcaaaagcattaggcttgaacacaattcaaacatatgtaccttggaatttgcatgagccagaaccacagagctggaaattcaagggcttcgcagacattgaatcatatctgagacttgctcaagaactagaaatgctggtcatgcttcgtgtagggccatacatttgtggagaatgggacttaggaggttttccaccttggttgctcaccatagaaccagcccttaaactgcgatcatcagattcgtcctatctttccttggtggagagatggtggggagtactacttctgaaagtggcaccattattatacaataatggaggtccagttattatggttcagattgaaaatgaatttggttcttttggagatgataagaattaccttcatcaccttgttcaactggccaggagatatcttggaaacgacattattctgtgaggaagtagcagacttttgctgcttctgtgccaaggtggttcccaaagaagaaaaacaagactgaagtgcgggaggactcggtcctccacttaggatcttttgcttatagcttatcgggaggagtttgtgcctcccttggtttgtataatattactactctgcactcacttttagttctggtctgtaataaaataactcaagcttgctttgaaataaatgtaagtttatgc

SEQ ID NO: 33963 - protein, 314 aa, Zea mays subsp. mays
SAHHSRRQQGQPLPPAHAAVHEVSSPTGRRVRTQPGNSHLLLLLTPARLAPCSHGGVDQKNILLTAFPDAWLVTHSSRGTSATHGAGGEEPSSGRSSSGMASGGTFRNLLLVLPLYLALASLVGGEASRRFWIENDTFRKDGVPFQIVGGDVHYFRIVPEYWKDRLLRAKALGLNTIQTYVPWNLHEPEPQSWKFKGFADIESYLRLAQELEMLVMLRVGPYICGEWDLGGFPPWLLTIEPALKLRSSDSSYLSLVERWWGVLLLKVAPLLYNNGGPVIMVQIENEFGSFGDDKNYLHHLVQLARRYLGNDIIL

SEQ ID NO: 33964 - protein, 215 aa, Zea mays subsp. mays
MASGGTFRNLLLVLPLYLALASLVGGEASRRFWIENDTFRKDGVPFQIVGGDVHYFRIVPEYWKDRLLRAKALGLNTIQTYVPWNLHEPEPQSWKFKGFADIESYLRLAQELEMLVMLRVGPYICGEWDLGGFPPWLLTIEPALKLRSSDSSYLSLVERWWGVLLLKVAPLLYNNGGPVIMVQIENEFGSFGDDKNYLHHLVQLARRYLGNDIIL

SEQ ID NO: 33965 - DNA, 1625 bp, Zea mays subsp. mays
  misc_feature (1610)..(1610): n is a, c, g, or t
atccccagctccgtttccgtctccggcaccaggaccagtgccacgccaaccaccgctacctgctccacgccaaacgccagttgctttgcagctactcgtgcagccgtgctcgccgcacacgattggcgccagtctttagttcaccggcaaagcttccgcgagcgcgcgggtgtaccacgtgacggactacggcgcggacccgaccggcgccgccgacgccacggcggcgatcagcaaggccatagctgacgcgttccgcccgcccaccaacgccaccatgaccggcggcatccccgacctcggcggcgccgaggtgcacctcgacggcggcacgtacctcatcaaggggcccctcacgctgccggcatccggcggcggcaacttcaagatccacagcgggtcgctgcgcgcgtccgacgacttcccgacggaccggtacctgatcgagctgtcggcggccaagagcagccggagctacgactacgagtacgccacgctgcgggacctgatgctggactgcagctaccgcggcggcggcgtggcggtggtggactcgctccgcgtcgccgtcgacaactgctacgtggcgcacttcgcgtccgacggcgtcgcggtgcgcggcggccacgagacgctcatccgcaacacctacctcggccagcacatgacggccgggggcgacccgggggagcgcggcttcacgggcacggccatccgcctcgacggcaacgacaactccgtgtccggacgtcgtcatcttctccgcggccacggggatcatggtcaccgcgccggccaactccatctccggcgtgcactgctacaacaaggccacgggcttcggcggcaccggcatccacctcaagatcccgggcctcacgcaggcgtggatcagcaactgctacatggactacaccagcatcgtcgccgaggaccccgtgctgctccacgtctccggatccttcttcctcggcgacgccaacgtcgtcctcaaggccgtcagcggcgtcgccaggggcgtccaggtcgtcggcaacatcttcagcggcagggacaagggcgtcgacatcgtgcagctggacggcgccttcgccaccgtggaccaggtgtacgtgcagcagaactccgccacggggatgaccgtcaggtccacctccgcgcgcgcatcgctccagggcaacgggacctcctggacgctcgacttctcgccggtgctgctgttcccggaccgcatcggccacgtgcagtactcgctcgtcgccggcgacgagttcccgggccacacgctccggaacgtgtccgggaaccaggtcgtggtcgccaccgacaaggccgtctcggccacggtccacgtcttggtggaccagaacagcgactgagataagataagagacactcgagagtgcctgcgtgcacgcagtatgcgtgctgctgcctgctcgcgcggctgctgcggagcaaggcgttattccttcgtttctttcttcttctcggaaatttcagccattcatgtcgtcgggaagatgacaattgtttgatgcgacaaaatgctccagaatgtatcattcttttgctgtatgaaatgaaatgattcagaagctccatcaatntgcgtaccaaggcat

SEQ ID NO: 33966 - protein, 368 aa, Zea mays subsp. mays
MTGGIPDLGGAEVHLDGGTYLIKGPLTLPASGGGNFKIHSGSLRASDDFPTDRYLIELSAAKSSRSYDYEYATLRDLMLDCSYRGGGVAVVDSLRVAVDNCYVAHFASDGVAVRGGHETLIRNTYLGQHMTAGGDPGERGFTGTAIRLDGNDNSVSGRRHLLRGHGDHGHRAGQLHLRRALLQQGHGLRRHRHPPQDPGPHAGVDQQLLHGLHQHRRRGPRAAPRLRILLPRRRQRRPQGRQRRRQGRPGRRQHLQRQGQGRRHRAAGRRLRHRGPGVRAAELRHGDDRQVHLRARIAPGQRDLLDARLLAGAAVPGPHRPRAVLARRRRRVPGPHAPERVREPGRGRHRQGRLGHGPRLGGPEQRLR

SEQ ID NO: 33967 - protein, 291 aa, Zea mays subsp. mays
MLDCSYRGGGVAVVDSLRVAVDNCYVAHFASDGVAVRGGHETLIRNTYLGQHMTAGGDPGERGFTGTAIRLDGNDNSVSGRRHLLRGHGDHGHRAGQLHLRRALLQQGHGLRRHRHPPQDPGPHAGVDQQLLHGLHQHRRRGPRAAPRLRILLPRRRQRRPQGRQRRRQGRPGRRQHLQRQGQGRRHRAAGRRLRHRGPGVRAAELRHGDDRQVHLRARIAPGQRDLLDARLLAGAAVPGPHRPRAVLARRRRRVPGPHAPERVREPGRGRHRQGRLGHGPRLGGPEQRLR

SEQ ID NO: 33968 - protein, 239 aa, Zea mays subsp. mays
MTAGGDPGERGFTGTAIRLDGNDNSVSGRRHLLRGHGDHGHRAGQLHLRRALLQQGHGLRRHRHPPQDPGPHAGVDQQLLHGLHQHRRRGPRAAPRLRILLPRRRQRRPQGRQRRRQGRPGRRQHLQRQGQGRRHRAAGRRLRHRGPGVRAAELRHGDDRQVHLRARIAPGQRDLLDARLLAGAAVPGPHRPRAVLARRRRRVPGPHAPERVREPGRGRHRQGRLGHGPRLGGPEQRLR

SEQ ID NO: 33969 - DNA, 1561 bp, Zea mays subsp. mays
aagaaccccgacccgaccgccgatagctacctagctcccaccccgcacccctgactccaccttctccattcttgatcccttcgccgcgcggagatccaagaacaggggcagcctgacaggggaacgggcggctatgggaggaagcagcgcgatgctcgccgtgttggcggtggtggttcttgcggcggtcggcggcgctgacgccgcggcggaatcgagtgaggcgtcggccaaggggaggtaccacgcgctcttcaatttcggggactcgctagccgacgctggcaacctcatccagaacggcaccccggacatcctggccaccgcgcgcctgccctacggccagacctacttcggcagggccaccggccgctgctccgacggacgcctcgtcatcgaccacctcgcacaagagtttggcctgccgctgctgccgccgtccaaggccacgaacgccagcttcgcgtacggcgccaatttcgccatcaccggcgccaccgcgctcgacacgccctacttcgaggccaaggggctcggtgccgtcatctggaactccggagcgctcatgacccaaatccagtggttccgtgatctcaagcctttcttctgcaacacaacgcaggcatgcaagaaattctttgccaaggcgctgtttgtggtcggtgagtttggcggcaatgactacaatgcacccctctttgcgggcatgggcatcccagaggtttacaaattcatgccggatgtcatccagggcatctctgacggtattgaggcactgattgctgagggggctgtggagatgattgtgcctggtgttatgcccactggctgcttcccagtgtacttgaacatgcttgatgagcccaaagagggatatggctcccgcagtgggtgtgtccgccggtacaacacattctcctgggtgcacaatgcacatctcaaggccatgcttaagaagctccgggctaagcatcccaatgtgaggatcatatatggcgattactacactccagttgtccagttcatgcttcagcctgagaagtttggttttgccaaacaactgcctagggcatgttgtggggctccatcgactcctgagaaagcagcttacaacttcaatgtcacggccaaatgcggtgagcctggtgcgactgcctgtgctgatccgacaacccattggagctgggatggcattcacctgacggaggctgcgtaccgccatatcgctaaaggctggttatacgggccttttgcggaccaaccaatcatccaatcctcatgatcacgccactcctgctgtagagtttcatcaaagtagcgcactggaaaaaaaatggagcgggggaaagtagttcttccatacagtttcaatgtttgcatacatgtacatctccattttgattgtattcatttaacttgggtggtacaaaggtgggatagggaggctgcacaaaggcctgatttcttgatttgtcagggggtataaatatgaaaaatataacgtacatataatcatgtatattgtgtcctggaaatgtgatacagactgtctgcttgagct

SEQ ID NO: 33970 - protein, 382 aa, Zea mays subsp. mays
MGGSSAMLAVLAVVVLAAVGGADAAAESSEASAKGRYHALFNFGDSLADAGNLIQNGTPDILATARLPYGQTYFGRATGRCSDGRLVIDHLAQEFGLPLLPPSKATNASFAYGANFAITGATALDTPYFEAKGLGAVIWNSGALMTQIQWFRDLKPFFCNTTQACKKFFAKALFVVGEFGGNDYNAPLFAGMGIPEVYKFMPDVIQGISDGIEALIAEGAVEMIVPGVMPTGCFPVYLNMLDEPKEGYGSRSGCVRRYNTFSWVHNAHLKAMLKKLRAKHPNVRIIYGDYYTPVVQFMLQPEKFGFAKQLPRACCGAPSTPEKAAYNFNVTAKCGEPGATACADPTTHWSWDGIHLTEAAYRHIAKGWLYGPFADQPIIQSS

SEQ ID NO: 33971 - protein, 376 aa, Zea mays subsp. mays
MLAVLAVVVLAAVGGADAAAESSEASAKGRYHALFNFGDSLADAGNLIQNGTPDILATARLPYGQTYFGRATGRCSDGRLVIDHLAQEFGLPLLPPSKATNASFAYGANFAITGATALDTPYFEAKGLGAVIWNSGALMTQIQWFRDLKPFFCNTTQACKKFFAKALFVVGEFGGNDYNAPLFAGMGIPEVYKFMPDVIQGISDGIEALIAEGAVEMIVPGVMPTGCFPVYLNMLDEPKEGYGSRSGCVRRYNTFSWVHNAHLKAMLKKLRAKHPNVRIIYGDYYTPVVQFMLQPEKFGFAKQLPRACCGAPSTPEKAAYNFNVTAKCGEPGATACADPTTHWSWDGIHLTEAAYRHIAKGWLYGPFADQPIIQSS

SEQ ID NO: 33972 - protein, 238 aa, Zea mays subsp. mays
MTQIQWFRDLKPFFCNTTQACKKFFAKALFVVGEFGGNDYNAPLFAGMGIPEVYKFMPDVIQGISDGIEALIAEGAVEMIVPGVMPTGCFPVYLNMLDEPKEGYGSRSGCVRRYNTFSWVHNAHLKAMLKKLRAKHPNVRIIYGDYYTPVVQFMLQPEKFGFAKQLPRACCGAPSTPEKAAYNFNVTAKCGEPGATACADPTTHWSWDGIHLTEAAYRHIAKGWLYGPFADQPIIQSS

SEQ ID NO: 33973 - DNA, 1234 bp, Zea mays subsp. mays
gtctcccggcgcctgttccccgcggcaccgcggctacacataccctctccccatcccatttcccagatcccaccaacgcagcgcagggatcgagtagcccaccaccccaccccgcgacgctaaccgacgcaatggcgacgctcaccgttccttcctccgtcccggccgtcgccgaggactgcgagcagctccacaaggccttcgaaggttggggcaccaacgagaaactgatcatctccatcctggcccaccgcaacgccgcgcaggcccgcgcgatccgccgcggctatgccgaggcctacgggaaggagctgctccgcgctctcggcgacgagatccacggcaagttcgagagggcggtgatcctgtggacgctggaccccgcggagagggacgcggtgctggcgaacgaggaggcgaagaagagccaccccggcggccgcgcgctggtggagatcgcgtgcgcgcgcacgcccgcgcagctctttgcggtcaagcaggcgtaccatgaccggtttaagcgatcgctcgaggaggacgttgccgcgcatgtcaccggcgacttccgaaagcttttagtgcctcttgttagtgcgtaccgctatgatggcccagaggtgaacacatctttggctcattctgaagccaaaatacttcatgagaagatccataagaaggcttacagtgatgaggagatcattagaattctcaccacacggagcaaagctcagctacttgcaacattcaatagctacaaggatcagttcactcatgcaatcaacaaggatctgaaagctgaccccaaggatgagtttctttcaacactgcgggcgatcatccggtgcttcacctgccctgacagatacttcgagaaagtcattcgactggctcttggaggcatgggcactgatgaggatgacctcaccagggtcgtaactactcgcgccgaggtcgacctgaagctgataaaggaggcttatcagaagagaaacagtgtgccgctggagcgtgctgtggccaaagatacaactagagattatgaggatattatgcttgccctccttggggcggagtgaggaggcgtgcctcaactcgatctcatctgctcctacttgtttgatggggccaaaaaactgcatcgacgtggtatccacatggccgtggttttgaataataataaatttgtaacacgtagcctgcattagcagcgcgttttaaataaaggaacttcctg

SEQ ID NO: 33974 - protein, 357 aa, Zea mays subsp. mays
LPAPVPRGTAATHTLSPSHFPDPTNAAQGSSSPPPHPATLTDAMATLTVPSSVPAVAEDCEQLHKAFEGWGTNEKLIISILAHRNAAQARAIRRGYAEAYGKELLRALGDEIHGKFERAVILWTLDPAERDAVLANEEAKKSHPGGRALVEIACARTPAQLFAVKQAYHDRFKRSLEEDVAAHVTGDFRKLLVPLVSAYRYDGPEVNTSLAHSEAKILHEKIHKKAYSDEEIIRILTTRSKAQLLATFNSYKDQFTHAINKDLKADPKDEFLSTLRAIIRCFTCPDRYFEKVIRLALGGMGTDEDDLTRVVTTRAEVDLKLIKEAYQKRNSVPLERAVAKDTTRDYEDIMLALLGAE

SEQ ID NO: 33975 - protein, 314 aa, Zea mays subsp. mays
MATLTVPSSVPAVAEDCEQLHKAFEGWGTNEKLIISILAHRNAAQARAIRRGYAEAYGKELLRALGDEIHGKFERAVILWTLDPAERDAVLANEEAKKSHPGGRALVEIACARTPAQLFAVKQAYHDRFKRSLEEDVAAHVTGDFRKLLVPLVSAYRYDGPEVNTSLAHSEAKILHEKIHKKAYSDEEIIRILTTRSKAQLLATFNSYKDQFTHAINKDLKADPKDEFLSTLRAIIRCFTCPDRYFEKVIRLALGGMGTDEDDLTRVVTTRAEVDLKLIKEAYQKRNSVPLERAVAKDTTRDYEDIMLALLGAE

SEQ ID NO: 33976 - DNA, 700 bp, Zea mays subsp. mays
gatcagcgaacggaagaccgtggaagcaaagaggcgcaagcgagcacggaacaaatacaccttcaggtggcctccctccgactgccgactgaatcttccacctcgcttcgcgcctccggctccgcgccgggcccgcataatctgtgctcgggatcgcctcttcccgcggcaaatgggggccgactccgaggacgccgtcaagcagctcagcctcctcatggagcaagtggaggccccgctgaagagatcgtttcagaatatgcaccagggctatcctaaagaaacactggtgcgtttccttaaggctagagagtggaatgtagcaaaggctcataaaatgattgtagaatgtttgaattggaggattcaaaatgaaattgatagtgtgctagagaggcctatagtcccagtagatttatacaggtcaatacgtgattcacaacttattggcctgtcaggatacacaaaggagggtctcccaatttttggcattggtgttggacatagcacatatgacaaagcttcggtccactactatgtgcaatctcatatccagattaacgagtaccgtgatcgtataattttgcctaggctgacacaacagtttgggcggcctgttaccagctgtataaaagtgctggatatgactggtttgaagctatcagcactaagccaaataaagatgttgacttccatatcg

SEQ ID NO: 33977 - protein, 233 aa, Zea mays subsp. mays
ISERKTVEAKRRKRARNKYTFRWPPSDCRLNLPPRFAPPAPRRARIICARDRLFPRQMGADSEDAVKQLSLLMEQVEAPLKRSFQNMHQGYPKETLVRFLKAREWNVAKAHKMIVECLNWRIQNEIDSVLERPIVPVDLYRSIRDSQLIGLSGYTKEGLPIFGIGVGHSTYDKASVHYYVQSHIQINEYRDRIILPRLTQQFGRPVTSCIKVLDMTGLKLSALSQIKMLTSIS

SEQ ID NO: 33978 - protein, 176 aa, Zea mays subsp. mays
MGADSEDAVKQLSLLMEQVEAPLKRSFQNMHQGYPKETLVRFLKAREWNVAKAHKMIVECLNWRIQNEIDSVLERPIVPVDLYRSIRDSQLIGLSGYTKEGLPIFGIGVGHSTYDKASVHYYVQSHIQINEYRDRIILPRLTQQFGRPVTSCIKVLDMTGLKLSALSQIKMLTSIS

SEQ ID NO: 33979 - protein, 161 aa, Zea mays subsp. mays
MEQVEAPLKRSFQNMHQGYPKETLVRFLKAREWNVAKAHKMIVECLNWRIQNEIDSVLERPIVPVDLYRSIRDSQLIGLSGYTKEGLPIFGIGVGHSTYDKASVHYYVQSHIQINEYRDRIILPRLTQQFGRPVTSCIKVLDMTGLKLSALSQIKMLTSIS

SEQ ID NO: 33980 - DNA, 1448 bp, Zea mays subsp. mays
  misc_feature (178)..(178): n is a, c, g, or t
  misc_feature (255)..(255): n is a, c, g, or t
  misc_feature (298)..(298): n is a, c, g, or t
  misc_feature (311)..(311): n is a, c, g, or t
  misc_feature (879)..(879): n is a, c, g, or t
  misc_feature (1126)..(1126): n is a, c, g, or t
gactcagtggcacggggcgcggacgctgccgctcgcgatatttgcgagagagagagagagagagagggcccgagagccgaggacgagtgcagtctggctggcgtgatgctgcttcggagcgcgtcctcgccgctgctcaactgcgggcgcgcgccggctgcggcggcgtcggtcgagncacctcgcggtggtttcgccgttgttatcaccggcagtggcggcgctaggcaggggccggtgctgtgccgcgccatntccgagggggacctcgccgcgccgctcgtgcccaagaaggatnatggacacggganggcgccgaggctatcggcgtccttgtcctcgtccgcctccatcttcgtcgaggaggacggcgagggcgaggaggaggaggaggacctggtcgcggtcgcggtcgcgggggccggcgtggacgtgccgctgccgctgcgtcggctgctgacgaacacggggctggacgtgtccgccgccgcggcgctggcgttcgtggagcagggcgtcggcggcagcggcgggggcgggaaggcgtgcggcagcagcggcggcaagggtggggtcggggacggcgacggtggcagcaaccgcgccgccacggacgcccactaccggcagatgatcgaggcggacccgggcaactcgctgctcctggtcaactacgccaggttcctcaaggaggtggcgggggacgcagcaagggcgcaggagtactgcgagcgcgccatcctcgccagtcccggcgacgccgaggcgctgtcgctctacgcgggcctcgtttgggagaccagccgcgacgctggccgcgccgaggactactacagccgcgccgtccaggccgcacccgacgactgctacgtcctgggntcttacgccgggttcctgtgggacgccgaggaggacgaggaagagaactccgagcccttgccacctccttcgctgttccagggggcagctcagcgtccttccatcacagcggcctcttagatgatcgtgaactcgatctagatctcaccaccgcctgtgaacgaagctgaatctggaaccctggagagtggagagtgactgggagtgggagataaccgtgcagaaacccccgacgagtgactcgcantcgccggccggctcctcgccgcttgtgaactgaatcacggcacatgtaaaactgaatctggcagagcacacacgcgccgcgcctaagcctattagcgtctatagactttgcagggctatgtatagtagatatgtagattgagaccctgctgagcttgtacgtgcagtatgttcctagtcacttgtgtatcattactagtaatgcagtatctctcgcaaaataaacgtcaaaaacccttcctgctgcttcatccgagcagagcatcttccaagaagagcagatatcgaactgcaagaactgatgcactgaatcacaaagcttt

SEQ ID NO: 33981 - protein, 332 aa, Zea mays subsp. mays
  misc_feature (60)..(60): Xaa can be any naturally occurring amino acid
  misc_feature (85)..(85): Xaa can be any naturally occurring amino acid
  misc_feature (100)..(100): Xaa can be any naturally occurring amino acid
  misc_feature (104)..(104): Xaa can be any naturally occurring amino acid
  misc_feature (293)..(293): Xaa can be any naturally occurring amino acid
DSVARGADAAARDICEREREREGPRAEDECSLAGVMLLRSASSPLLNCGRAPAAAASVEXPRGGFAVVITGSGGARQGPVLCRAXSEGDLAAPLVPKKDXGHGXAPRLSASLSSSASIFVEEDGEGEEEEEDLVAVAVAGAGVDVPLPLRRLLTNTGLDVSAAAALAFVEQGVGGSGGGGKACGSSGGKGGVGDGDGGSNRAATDAHYRQMIEADPGNSLLLVNYARFLKEVAGDAARAQEYCERAILASPGDAEALSLYAGLVWETSRDAGRAEDYYSRAVQAAPDDCYVLXSYAGFLWDAEEDEEENSEPLPPPSLFQGAAQRPSITAAS

SEQ ID NO: 33982 - protein, 297 aa, Zea mays subsp. mays
  misc_feature (25)..(25): Xaa can be any naturally occurring amino acid
  misc_feature (50)..(50): Xaa can be any naturally occurring amino acid
  misc_feature (65)..(65): Xaa can be any naturally occurring amino acid
  misc_feature (69)..(69): Xaa can be any naturally occurring amino acid
  misc_feature (258)..(258): Xaa can be any naturally occurring amino acid
MLLRSASSPLLNCGRAPAAAASVEXPRGGFAVVITGSGGARQGPVLCRAXSEGDLAAPLVPKKDXGHGXAPRLSASLSSSASIFVEEDGEGEEEEEDLVAVAVAGAGVDVPLPLRRLLTNTGLDVSAAAALAFVEQGVGGSGGGGKACGSSGGKGGVGDGDGGSNRAATDAHYRQMIEADPGNSLLLVNYARFLKEVAGDAARAQEYCERAILASPGDAEALSLYAGLVWETSRDAGRAEDYYSRAVQAAPDDCYVLXSYAGFLWDAEEDEEENSEPLPPPSLFQGAAQRPSITAAS

SEQ ID NO: 33983 - DNA, 2043 bp, Zea mays subsp. mays
gtcggcgtgtcgggccacaacccgaacgctgaaccaaggctcgggaccgcgacactcgtgtgtccttctcctcagatctcgccggcggcggcatgctcccctcgtccggcagcggctggggccgcggcccgcggccgccacctattgctcagcagggccctagctctcgctgcactgctcgcgctcgcgctccgcctccgagtccgaccacaagtacaaaactgaagagccagttaagctttgggtgaataaagttggcccttacaataatcctcaagaaacctacaactattacagccttccattttgtcaaccgtctgagaaccccacacataaatggggtggtcttggagaggtccttggtggaaatgagctgattgatagtcagcttgaaataaagttcttaaaaaacgtggagaagggcttcatttgtacacttgagcttgatgctaaaaaggtccagcagtttgctgatgccattgaaagctcatattggttcgaattttttatagatgatctgcctctttggggttttgttggggagtctgacaagaacagtgaaaacaagcattacctttacacacacaagaacatccttgttaaatacaatgataacaggataattcatgtaaatctcacccaagagtctcctaagcttcttgaagatggcaagaaactggaaatgacatattcagtgaagtgggtagcaacagatgtgtcatttgcacgccgttttgaagtgtacctggactatcctttctttgaacaccagattcactggttctccattttcaactctttcatgatggttattttcctaactggtttggtttcgatgatattgatgcggactttgagaaatgattatgccaagtatgctcgtgaagatgatgatctagagtccctggagagagatgttaatgaggaatcaggatggaagcttgtccatggtgacgtatttcggcctccccgaagtttgatgtttctttctgcacttgttggtatcggcacccaattggcagctcttatcctacttgtgattgttttggccattgttggcatgctatacattgggcgaggggctatcatcacaaccttcattgtgtgctatgctcttacatcgtttatttctggatatgttagtggtggtctttactcaaggagcggtggcaaaaaactggattaaagcgatggttcttacagcatccctctttccgttcttgtgtttttcaattggtttcgcactgaatacaattgctattttctaccgctcattagcagcaataccatttggcacaatggttgtcatgtttgtactttgggctttcatatcttttccgttggtgcttttgggaactgttgttggtagaaactggagtggtgctcctaacaacccctgccgagtaaagactattccacggcctattcctgagaagaagtggtaccttacaccttctgtcatctcattgatgggtggcctgcttccctttggcagtatcttcattgagatgtacttcgtgttcacatcattctggaactataaggtgtattatgtctatggtttcatgttgctggtcttcgtcatccttctaatagtcaccatctgcgtcaccattgtgggtacttatttcttgctgaacgccgagaactatcactggcaatggacgtcgttttcctctgcagcgtcaaccgctttgtatgtgtatctgtactccatctactactaccatgtgaagacaaagatgtcaggcttcttccagacaagtttctactttggttacacactgatgttctgccttggtctaggcatactttgtggtgctattgggtatctagggtcaaccctttttgtaaggagaatctacagaaatatcaaatgtgattaaatccctgctacttactagcagcagaaagaccatatgtattgtcagtggaagcaaggcctgaaaaaaatggattttgatggtagaccctgaataggtttttgaaactgctgatgacttgaccccgttgttcttatacgcacatttttgtttgcctgcg

SEQ ID NO: 33984 - protein, 258 aa, Zea mays subsp. mays
MLLHRLFLDMLVVVFTQGAVAKNWIKAMVLTASLFPFLCFSIGFALNTIAIFYRSLAAIPFGTMVVMFVLWAFISFPLVLLGTVVGRNWSGAPNNPCRVKTIPRPIPEKKWYLTPSVISLMGGLLPFGSIFIEMYFVFTSFWNYKVYYVYGFMLLVFVILLIVTICVTIVGTYFLLNAENYHWQWTSFSSAASTALYVYLYSIYYYHVKTKMSGFFQTSFYFGYTLMFCLGLGILCGAIGYLGSTLFVRRIYRNIKCD

SEQ ID NO: 33985 - protein, 249 aa, Zea mays subsp. mays
MLVVVFTQGAVAKNWIKAMVLTASLFPFLCFSIGFALNTIAIFYRSLAAIPFGTMVVMFVLWAFISFPLVLLGTVVGRNWSGAPNNPCRVKTIPRPIPEKKWYLTPSVISLMGGLLPFGSIFIEMYFVFTSFWNYKVYYVYGFMLLVFVILLIVTICVTIVGTYFLLNAENYHWQWTSFSSAASTALYVYLYSIYYYHVKTKMSGFFQTSFYFGYTLMFCLGLGILCGAIGYLGSTLFVRRIYRNIKCD

SEQ ID NO: 33986 - protein, 231 aa, Zea mays subsp. mays
MVLTASLFPFLCFSIGFALNTIAIFYRSLAAIPFGTMVVMFVLWAFISFPLVLLGTVVGRNWSGAPNNPCRVKTIPRPIPEKKWYLTPSVISLMGGLLPFGSIFIEMYFVFTSFWNYKVYYVYGFMLLVFVILLIVTICVTIVGTYFLLNAENYHWQWTSFSSAASTALYVYLYSIYYYHVKTKMSGFFQTSFYFGYTLMFCLGLGILCGAIGYLGSTLFVRRIYRNIKCD

SEQ ID NO: 33987 - DNA, 591 bp, Zea mays subsp. mays
aaagcgcgccaaacaattccattccatggatgcggagatggaggacgcaggaagacagaccgagatcgagtggggcggcggcggcggcggcgccgaagcggtcctgggtcttgccggcggcgcctcctctgtgtcgctgtgctaccaccaggcgttcggtccccacgacgacctcgtgctcctcgaggccgctgacgacctcctccctgacctcctgcaaggccgggtgactgtaagagggcgtcctgatgaagatgctttcctctgcacaccttgtgcaacttactccatgaagtttgttggcacatcaaattctatgtttttgataccaccttgggaaccatctgctaaatgcttaagaccagacaacaccagtggcaatgctaatgcgttggctgctaccattaaactggcaccggggagcattgaattggtccgagtcgctccacgactagataaacttaagagccttctccggggagcggccctacatacttgatgaggatattggggatgatgacctccaacataagaataagaaggggctgtacttgcccttgatgattaatgatttctgttatacagttgctt

SEQ ID NO: 33988 - protein, 165 aa, Zea mays subsp. mays
KRAKQFHSMDAEMEDAGRQTEIEWGGGGGGAEAVLGLAGGASSVSLCYHQAFGPHDDLVLLEAADDLLPDLLQGRVTVRGRPDEDAFLCTPCATYSMKFVGTSNSMFLIPPWEPSAKCLRPDNTSGNANALAATIKLAPGSIELVRVAPRLDKLKSLLRGAALHT

SEQ ID NO: 33989 - protein, 157 aa, Zea mays subsp. mays
MDAEMEDAGRQTEIEWGGGGGGAEAVLGLAGGASSVSLCYHQAFGPHDDLVLLEAADDLLPDLLQGRVTVRGRPDEDAFLCTPCATYSMKFVGTSNSMFLIPPWEPSAKCLRPDNTSGNANALAATIKLAPGSIELVRVAPRLDKLKSLLRGAALHT

SEQ ID NO: 33990 - protein, 153 aa, Zea mays subsp. mays
MEDAGRQTEIEWGGGGGGAEAVLGLAGGASSVSLCYHQAFGPHDDLVLLEAADDLLPDLLQGRVTVRGRPDEDAFLCTPCATYSMKFVGTSNSMFLIPPWEPSAKCLRPDNTSGNANALAATIKLAPGSIELVRVAPRLDKLKSLLRGAALHT

SEQ ID NO: 33991 - DNA, 1294 bp, Zea mays subsp. mays
gcgcaccgtccctcaccgccggcctctgctcctcttccgccgccgcaggatctcgtatcgccggagaccatgtaccgcgccgccgggagccacctccgctccctcaagcatcatggtgcttctaggcttgccagtacaagtgttgcgaagcagtcctcaggtggtctgttcagctggcttcttggtggaaaatcaagcgaactccctccccttgatgttccactcccaggcattagcattccctcacctctaccagattttgtagagccatctaagacaaaagtcactactcttccaaatggcgtcaagatcgcctcggagacatcatcgagcccagcagcatctgtgggtctgtacattgactgtggttccatttacgaaacacctgcttcatctggagtatcacatctgttggagagaatggccttcaagagcacagtgaatcggactcacttacggttagttcgtgaggtagaagccattggaggaaatgtctctgcatcagcttcccgtgaacaaatgagctatacctatgatgcattgaagagctatacaccagaaatggttgaagttctcattgacagtgtaaggaatccagcattcctcgattgggaggtcaaagagcagctccagaacataaaatctgaaatagctgatgcgtctgctaatcctcaaggtctacttctggaggcccttcattcggttggatattccggggcactggcaaaacctttgatggcttcagaatctgctgtaaaccggttggatgttagcagcttggaggaatttgttgctgaacattacactgctcccaggatggttcttgcagcatcaggagttgatcatgatgcgctgatttcagttgtagaaccacttctgtctgaccttccgtgcgtgaaacgtcctgaagagccaaaatctgtgtacgtgggaggagactatcgctgccaagcagattctccaaacacacacatcgcacttgcttttgagatgccaggtggttggaatcaagagaaaactgcaatggttgtgacagtgcttcagatgctcatgggaggaggagggtccttctctgctggtgggcctggaaagggaatgcattctcgattgtatctccgtgtcttgaccaacttccaacagattgaatcattctctgctttcaatagcgtctataacaattcgggcctttttggaatttatgcagtcactagcccagacttttcatcgaaggctgtggatttggcagcaggggaactcctggagattgcgacacctggaaaagttacacaagaac

SEQ ID NO: 33992 - protein, 431 aa, Zea mays subsp. mays
AHRPSPPASAPLPPPQDLVSPETMYRAAGSHLRSLKHHGASRLASTSVAKQSSGGLFSWLLGGKSSELPPLDVPLPGISIPSPLPDFVEPSKTKVTTLPNGVKIASETSSSPAASVGLYIDCGSIYETPASSGVSHLLERMAFKSTVNRTHLRLVREVEAIGGNVSASASREQMSYTYDALKSYTPEMVEVLIDSVRNPAFLDWEVKEQLQNIKSEIADASANPQGLLLEALHSVGYSGALAKPLMASESAVNRLDVSSLEEFVAEHYTAPRMVLAASGVDHDALISVVEPLLSDLPCVKRPEEPKSVYVGGDYRCQADSPNTHIALAFEMPGGWNQEKTAMVVTVLQMLMGGGGSFSAGGPGKGMHSRLYLRVLTNFQQIESFSAFNSVYNNSGLFGIYAVTSPDFSSKAVDLAAGELLEIATPGKVTQE

SEQ ID NO: 33993 - protein, 408 aa, Zea mays subsp. mays
MYRAAGSHLRSLKHHGASRLASTSVAKQSSGGLFSWLLGGKSSELPPLDVPLPGISIPSPLPDFVEPSKTKVTTLPNGVKIASETSSSPAASVGLYIDCGSIYETPASSGVSHLLERMAFKSTVNRTHLRLVREVEAIGGNVSASASREQMSYTYDALKSYTPEMVEVLIDSVRNPAFLDWEVKEQLQNIKSEIADASANPQGLLLEALHSVGYSGALAKPLMASESAVNRLDVSSLEEFVAEHYTAPRMVLAASGVDHDALISVVEPLLSDLPCVKRPEEPKSVYVGGDYRCQADSPNTHIALAFEMPGGWNQEKTAMVVTVLQMLMGGGGSFSAGGPGKGMHSRLYLRVLTNFQQIESFSAFNSVYNNSGLFGIYAVTSPDFSSKAVDLAAGELLEIATPGKVTQE

SEQ ID NO: 33994 - protein, 291 aa, Zea mays subsp. mays
MAFKSTVNRTHLRLVREVEAIGGNVSASASREQMSYTYDALKSYTPEMVEVLIDSVRNPAFLDWEVKEQLQNIKSEIADASANPQGLLLEALHSVGYSGALAKPLMASESAVNRLDVSSLEEFVAEHYTAPRMVLAASGVDHDALISVVEPLLSDLPCVKRPEEPKSVYVGGDYRCQADSPNTHIALAFEMPGGWNQEKTAMVVTVLQMLMGGGGSFSAGGPGKGMHSRLYLRVLTNFQQIESFSAFNSVYNNSGLFGIYAVTSPDFSSKAVDLAAGELLEIATPGKVTQE

SEQ ID NO: 33995 - DNA, 1192 bp, Zea mays subsp. mays
  misc_feature (1172)..(1172): n is a, c, g, or t
  misc_feature (1174)..(1177): n is a, c, g, or t
gttcccacttcccacaccgtctgcggtctgcctgaccgaaaccgaaccccccagcctacaccacccgctgtcctgatggcgacggaccccgcgccggtgccggcgatgcgctgctactcgctgccgccagtccgcctccccgcggaggacattctcttctgcgtcgacgttgacctcgaggcccgcgccgagatgaagtccgccgccgccgccgcagcgtcctcgggctccacctccaccgcttcgccgcagccgacgcagcccgcgggggccgggggtgccccggcggcggggccccggaccgtggtcaggcggatggacgcggtcaggcaggcgctgctgctgttcgtccacagcaagctcaccatgtgcccagagcaccgcttcgccttcgcctccctcggcgagacgttctccatggtgaagaagggcttcagcagtgatgctggtttcgcaatggaggcaatccattccttgtctgcttcagaaacaagatatgctatggctgatctgacccagctctttatgacagcttgccaggaagggaaaagagcagaatcgcaaggccggattctccgggtggtgctcatatactgccgttcctctacaaagccacagcatcagtggcccgtgaagccaaagaatttcaccctcgacataatctatctccacgacaagccaaatcctgacaactgcccacagaaggtatatgatgccttggtcgatgttcttgagcatgtcagccagtatgaggggtacattctcgagactggtcaagggcttgctcgcgtgctctttcgtcagatgtgcattcttgtatcccatcctttgcaacgttgcatgcaagatgaccttgatattcccaaacaagtcgctaagaaaatcgtggcagccgaacctgcacagaatgaagatgccgctccagtctccagccaacagtagggtcttctagttgaacggtatgcaaacatgaagttactcgcaagcggttggcattaccgttctactagatcagaatgcctgttctgtgtgatggagattccatcccagaatttgtgtactatgctttaactgtccaaggagtcatcctcttgcccccgtcccttgtttgcttgggtattcagcatgtagttgcacatgatacagataactcaaatctttggcacttgaantnnnnttgtttgcgaacttc

SEQ ID NO: 33996 - protein, 313 aa, Zea mays subsp. mays
VPTSHTVCGLPDRNRTPQPTPPAVLMATDPAPVPAMRCYSLPPVRLPAEDILFCVDVDLEARAEMKSAAAAAASSGSTSTASPQPTQPAGAGGAPAAGPRTVVRRMDAVRQALLLFVHSKLTMCPEHRFAFASLGETFSMVKKGFSSDAGFAMEAIHSLSASETRYAMADLTQLFMTACQEGKRAESQGRILRVVLIYCRSSTKPQHQWPVKPKNFTLDIIYLHDKPNPDNCPQKVYDALVDVLEHVSQYEGYILETGQGLARVLFRQMCILVSHPLQRCMQDDLDIPKQVAKKIVAAEPAQNEDAAPVSSQQ

SEQ ID NO: 33997 - protein, 288 aa, Zea mays subsp. mays
MATDPAPVPAMRCYSLPPVRLPAEDILFCVDVDLEARAEMKSAAAAAASSGSTSTASPQPTQPAGAGGAPAAGPRTVVRRMDAVRQALLLFVHSKLTMCPEHRFAFASLGETFSMVKKGFSSDAGFAMEAIHSLSASETRYAMADLTQLFMTACQEGKRAESQGRILRVVLIYCRSSTKPQHQWPVKPKNFTLDIIYLHDKPNPDNCPQKVYDALVDVLEHVSQYEGYILETGQGLARVLFRQMCILVSHPLQRCMQDDLDIPKQVAKKIVAAEPAQNEDAAPVSSQQ

SEQ ID NO: 33998 - protein, 278 aa, Zea mays subsp. mays
MRCYSLPPVRLPAEDILFCVDVDLEARAEMKSAAAAAASSGSTSTASPQPTQPAGAGGAPAAGPRTVVRRMDAVRQALLLFVHSKLTMCPEHRFAFASLGETFSMVKKGFSSDAGFAMEAIHSLSASETRYAMADLTQLFMTACQEGKRAESQGRILRVVLIYCRSSTKPQHQWPVKPKNFTLDIIYLHDKPNPDNCPQKVYDALVDVLEHVSQYEGYILETGQGLARVLFRQMCILVSHPLQRCMQDDLDIPKQVAKKIVAAEPAQNEDAAPVSSQQ

SEQ ID NO: 33999 - DNA, 1283 bp, Zea mays subsp. mays
aaaacaccgattcgtttccccttggcacctggcgccctgtcgccttcgaaaaacagccgccgccgtcgcccgtcccggatccgacggcccccgctccttcgtctagtatttatactagtgccttgccggcgctgctcctgttgcctctcgcatttgcccacgcccgcagcgcctcgcctcggctgctctacctctatcccgcgacccgcgagatcggaatcgcggcgccccgccgccctcctccaaaatggcaccgtctctgctcggggggttcaccaagtcgttggccatgacggtgctctccgagatcggggacaagaccttcttcgccgccgcgattctggctatgcgccatcccaggaaactcgtattggcaggctgtttaactgcactaatagtcatgacagctctatcggcttctctaggttgggttgcaccaaatctgatttcacgtaaatggactcatcatttgaccactctattgttctttctatttggcatttggtcattgtgggaaggcttcaaggaagatgggtaccgagattcggaagaattggctgaagttgaagcagagctggatgctgcctttaagagtaataaaggtgaatctaaaaataaatttaaggcgaatgatgatatgaagaaacagcaaagaccatttctcatgcagttcttctcaccaatttttctgaaggcattttctattacattctttggtgagtggggtgacaagagccagattgctacaattggcttggctgctgatgaaaacccgttcggtgttgtcctgggtggaatcatagcgcaagcactctgcactactgctgccgttcttggtggaaagagcctagcgtcccagatatctgagaagatggttgaactgtcaagcggagtgctcttcctgctcttcggtatcatgtccttactctctggaccagaaggagaattgtaatccctgcttgagcctttttcagctagctgattaacatggctttctcttcttagacctatcttatttcagtacatgaatgatggcaacgaaagccatccatccatggcgaacaggatggtgatttaacagtttagccgacacgctgtaaacatttcagtcgcccttcaaaaattactacatgttacagaagtctgtagcgattgtatatttgtattctgtcgtgcccagcacgtgaaattttgttatcgcaattacatgcgttaacaaagctttgttcgtgaaccaagtattcaggcaattaatatggggcttatagcaggcctttgtcttt

SEQ ID NO: 34000 - protein, 234 aa, Zea mays subsp. mays
MAPSLLGGFTKSLAMTVLSEIGDKTFFAAAILAMRHPRKLVLAGCLTALIVMTALSASLGWVAPNLISRKWTHHLTTLLFFLFGIWSLWEGFKEDGYRDSEELAEVEAELDAAFKSNKGESKNKFKANDDMKKQQRPFLMQFFSPIFLKAFSITFFGEWGDKSQIATIGLAADENPFGVVLGGIIAQALCTTAAVLGGKSLASQISEKMVELSSGVLFLLFGIMSLLSGPEGEL

SEQ ID NO: 34001 - protein, 220 aa, Zea mays subsp. mays
MTVLSEIGDKTFFAAAILAMRHPRKLVLAGCLTALIVMTALSASLGWVAPNLISRKWTHHLTTLLFFLFGIWSLWEGFKEDGYRDSEELAEVEAELDAAFKSNKGESKNKFKANDDMKKQQRPFLMQFFSPIFLKAFSITFFGEWGDKSQIATIGLAADENPFGVVLGGIIAQALCTTAAVLGGKSLASQISEKMVELSSGVLFLLFGIMSLLSGPEGEL

SEQ ID NO: 34002 - protein, 201 aa, Zea mays subsp. mays
MRHPRKLVLAGCLTALIVMTALSASLGWVAPNLISRKWTHHLTTLLFFLFGIWSLWEGFKEDGYRDSEELAEVEAELDAAFKSNKGESKNKFKANDDMKKQQRPFLMQFFSPIFLKAFSITFFGEWGDKSQIATIGLAADENPFGVVLGGIIAQALCTTAAVLGGKSLASQISEKMVELSSGVLFLLFGIMSLLSGPEGEL

SEQ ID NO: 34003 - DNA, 1139 bp, Zea mays subsp. mays
atcccccacactttttcctggcaaaccctgcacgcctccgcaaccgcaaccgcgtcgtcggcgtgcgcgatcccgagaggcccagccatcagcttccttggcggggtgtgtatgcgcgtacgtcggccgtgaccagatcggctgagccaaggccatggcggaaccggccctcctcgcgccggaccccttcgcggacctccccttccccgaatttcaggcgcccatcgacggcgacagtttcgcgctcgaggacttcgatctggaggatctggacctggacgtggacttcgacctcgacctcttcgcctcggacgggcaaccctcgcaaccgcccccgctcgcgacctcgtcctcctcggccgggtctccggttggaggctcgtcctcttccggtgccgtcggggacggcagagggctgaggaatgaggagtcttcggagtcgtcttcgaggagcgcgagcggcacggatggcagcggcaaggggaagggggaggaggacgaagcgaagcggcgcgcgcggcaggtacgcaaccgcgagagcgcgcacctgtcgcggcagaggaagaagcagtacgtggaggagttagagggtaaggtgaaggccatgcaggccaccatcgccgacctctccgccaggatctcctgcgtcaccgccgagaacgccgctctcaaacagcagcctgggtggcgctgctggggccgcgccgccgccgatgccgatgtaccccgcgatgtattctttgccgatgccgtggatgcacccatcgtatcccatgcgtggatcgcaggtgccgctcgtgccaattcctcggctgaaacccccgcagcctgcacctgctgtagcagagccaccggccaagaaggctaggaagaccaagaaggttgcaagtgttagtctcctggggttgatttgcgttgcaatgctttgtgggtgtttgattcctgcagtaaatcggatgtatgactctgttgatgctggagaaggtgctgcatacggtccatctcatcgtgggagggtgctggctgttgaggggcctcatgataatgtttcagatggtgtcgatccaaagccgccacagcgtgccagtgagacgcttccagcactgttgtatctaccaaagaatgggaagcatgtcaag

SEQ ID NO: 34004 - protein, 237 aa, Zea mays subsp. mays
MAEPALLAPDPFADLPFPEFQAPIDGDSFALEDFDLEDLDLDVDFDLDLFASDGQPSQPPPLATSSSSAGSPVGGSSSSGAVGDGRGLRNEESSESSSRSASGTDGSGKGKGEEDEAKRRARQVRNRESAHLSRQRKKQYVEELEGKVKAMQATIADLSARISCVTAENAALKQQPGWRCWGRAAADADVPRDVFFADAVDAPIVSHAWIAGAARANSSAETPAACTCCSRATGQEG

SEQ ID NO: 34005 - protein, 142 aa, Zea mays subsp. mays
MPMYPAMYSLPMPWMHPSYPMRGSQVPLVPIPRLKPPQPAPAVAEPPAKKARKTKKVASVSLLGLICVAMLCGCLIPAVNRMYDSVDAGEGAAYGPSHRGRVLAVEGPHDNVSDGVDPKPPQRASETLPALLYLPKNGKHVK

SEQ ID NO: 34006 - protein, 140 aa, Zea mays subsp. mays
MYPAMYSLPMPWMHPSYPMRGSQVPLVPIPRLKPPQPAPAVAEPPAKKARKTKKVASVSLLGLICVAMLCGCLIPAVNRMYDSVDAGEGAAYGPSHRGRVLAVEGPHDNVSDGVDPKPPQRASETLPALLYLPKNGKHVK

SEQ ID NO: 34007 - DNA, 1617 bp, Zea mays subsp. mays
agccaaatcgaaggagattgaacgaagcagcccagccaaattcccctcgccgccccgtcccttctcgacatttcttgtcccgtcgtcgcctcaatctcgaagcctctccggcggagccgcctcatcatgttccgaaggcctccaaccaaacatcctctagggtttccgcatcgtccgtcgcgatgggcttcacgaagcggtcgccccagcatcccgcctccccagccggcggcgaggtcggcgcccagacggcagggaaggtcacaccagtgccggcggcgccggagtcggcgcccgcggcggtggtgccgaggcctccggacgtggcgcccttcctgaccaaggtctacgacatggtctccgacccggccaccgacgcggtcatctcctggagcgccgccggcggcagtttcgtgatctgggactcgcacgctttcgagcgcgacctgctgccgcggcacttcaagcacaatcacttcaccagcttcatacgccagctcaacacctacggatttcataaagttgatccagatagatgggaatgggccaatgaaggctttgttaagggccaaaaacatcttttgaagaccatcaagagaaagaagaaatcctctcaggatgtacctagtgatctgcagtcggtgcctgtcaaaactgcacctggcactgagaatatcgagataggaaaatatggaggccttgaaaaggaggttgagacacttaagagggacaaggcccttctaatgcagcagcttgtagatctacggcagtaccagcaatcatctagcgctgaagtgcagaatttaattcaacgcctccgtgtgatggagcagaaccagcagcagatgatggcacttttggcaattgttgtccagaatccagacttcctgaaccagctcgtgcagcagcagcgcaggagtaactggtggaatgatgatggtaacaggaaaagaaggttccaagctctggaacatggtcctgtagatgaccaagagacttctggtggaggcgcacaaattattcaatatcgtcctcctgttcctgaaacttccaatcagccaataccagcaaatgaagctttctattcaacccctgcacaaccagcttcaagccctgcacttgagatgcccatggatgtagagatgacttcaaacaatgttaatacctttgattcaactggcaatgattttactgacacctctgctctatgtgaatggtatgacatggatatatttggtgatgaacttgagcacattcttcaacagccagagcaggactttcaagtggaccctcctttaacagttgaggattatggttatgatcatccacggttagagcaggactatcagatggaagcacaacagaattgcaaaaatcctcaatatgttgcctgtgtcttgaagcaaagggaaagccatgcatctgatgtccattagtactgatcagtttgagctgatgtcataactgaagcatgagcggtggtcccccagaatgttgtccagtaacattagtggatagagatttgtgatgaacagaatcttgagactggcaggttagccaccattgggaacctgaagaccgtcgggattgctcagaattcagtatactaatactaat

SEQ ID NO: 34008 - protein, 477 aa, Zea mays subsp. mays
PNRRRLNEAAQPNSPRRPVPSRHFLSRRRLNLEASPAEPPHHVPKASNQTSSRVSASSVAMGFTKRSPQHPASPAGGEVGAQTAGKVTPVPAAPESAPAAVVPRPPDVAPFLTKVYDMVSDPATDAVISWSAAGGSFVIWDSHAFERDLLPRHFKHNHFTSFIRQLNTYGFHKVDPDRWEWANEGFVKGQKHLLKTIKRKKKSSQDVPSDLQSVPVKTAPGTENIEIGKYGGLEKEVETLKRDKALLMQQLVDLRQYQQSSSAEVQNLIQRLRVMEQNQQQMMALLAIVVQNPDFLNQLVQQQRRSNWWNDDGNRKRRFQALEHGPVDDQETSGGGAQIIQYRPPVPETSNQPIPANEAFYSTPAQPASSPALEMPMDVEMTSNNVNTFDSTGNDFTDTSALCEWYDMDIFGDELEHILQQPEQDFQVDPPLTVEDYGYDHPRLEQDYQMEAQQNCKNPQYVACVLKQRESHASDVH

SEQ ID NO: 34009 - protein, 417 aa, Zea mays subsp. mays
MGFTKRSPQHPASPAGGEVGAQTAGKVTPVPAAPESAPAAVVPRPPDVAPFLTKVYDMVSDPATDAVISWSAAGGSFVIWDSHAFERDLLPRHFKHNHFTSFIRQLNTYGFHKVDPDRWEWANEGFVKGQKHLLKTIKRKKKSSQDVPSDLQSVPVKTAPGTENIEIGKYGGLEKEVETLKRDKALLMQQLVDLRQYQQSSSAEVQNLIQRLRVMEQNQQQMMALLAIVVQNPDFLNQLVQQQRRSNWWNDDGNRKRRFQALEHGPVDDQETSGGGAQIIQYRPPVPETSNQPIPANEAFYSTPAQPASSPALEMPMDVEMTSNNVNTFDSTGNDFTDTSALCEWYDMDIFGDELEHILQQPEQDFQVDPPLTVEDYGYDHPRLEQDYQMEAQQNCKNPQYVACVLKQRESHASDVH

SEQ ID NO: 34010 - protein, 360 aa, Zea mays subsp. mays
MVSDPATDAVISWSAAGGSFVIWDSHAFERDLLPRHFKHNHFTSFIRQLNTYGFHKVDPDRWEWANEGFVKGQKHLLKTIKRKKKSSQDVPSDLQSVPVKTAPGTENIEIGKYGGLEKEVETLKRDKALLMQQLVDLRQYQQSSSAEVQNLIQRLRVMEQNQQQMMALLAIVVQNPDFLNQLVQQQRRSNWWNDDGNRKRRFQALEHGPVDDQETSGGGAQIIQYRPPVPETSNQPIPANEAFYSTPAQPASSPALEMPMDVEMTSNNVNTFDSTGNDFTDTSALCEWYDMDIFGDELEHILQQPEQDFQVDPPLTVEDYGYDHPRLEQDYQMEAQQNCKNPQYVACVLKQRESHASDVH

SEQ ID NO: 34011 - DNA, 1509 bp, Zea mays subsp. mays
ccgaggatcattccgtgcagctcttagggacctggaggggttccatctatttcttctccagctttaccaaaaactggatggtgttttgcgagttttcttgtccataattactaaaacctctgaagaatctgacaataatgatgctgccctttccgattttccttcacctggagccagctatagtactcctcgccttcctagtaagcatctgaacaatgagcttcatagtgattctgaaatgctgaaatctgcaatgaagtcctcttctgtgggatcccgcggaagctcagattcagtttctcctctgcccagggagagttggaacaacaagtccttcaagggaagtgcagaggctccccgtagtttaagaatgacaatgaaacttcgtgatttttacaaaaccccaaaggttgatcctgaattgctcaaagagattgagcagtggaacgaagcacttaagaatgatgtgatcaaattttgccaagagaacaattttcattctggtttctttgatggaactgaaaacaacatggtagctgatgcctatgaattgaaggtgcgtcttgaacacatcattgaaaggatagccttgatttctgatgctgcaaatacagaacgaccttctcttgttgtcaacaacttgttcataggtggggctctggctgcaaggtctaagtacaccctacagcatttgggcattacccatgtactctgtttgtgttcaaatgagattggtcaatccgattcccaatttcccgatctttttgaatacaagaacttttcaattagcgatgatgatgatgcaaacatcagtgatctttttgaggaagcatcagacttcattgatcatgtggatcatgttgggggcaaggttctagttcattgctttgaagggaaaagtcggagtgccacagtcgtacttgcctatcttatgcttagagagggctttactcttgcaaaagcctggaacttactgaagaaagtacaccgtcgagcgcagccaaacgacggcttcgcaaaggctctcctggcccttgacaagaggctgcatggcaaggtatctatggactggcaacacaagcggccagaaatgaaggtgtgtccaatctgcagcaagaatgttggtctaagtacgagttcactcaagctgcacctgcagaaggcacacaagcgtctatctgcaggcagtgtcgacagcgccatgaccatgaagatccaaaaatcgatcgagtcactccagatcagccgaggaggaagcctgagcccgtcccagaagctgaccaaggtgttcagcaatgagctgagcttctgatctgttttcctgtactatagatgaggcaatgtacttggctcacattgtaataacttgtactatcagactgaacttgtgactgtaggtttagttcacacgcctatatgattagcacacgaatgttcaggtgtgaagggtgcaacactaaagaatgttcaggtcttgtatttgttgcctgcagtatgcagttttcttct

SEQ ID NO: 34012 - protein, 436 aa, Zea mays subsp. mays
RGSFRAALRDLEGFHLFLLQLYQKLDGVLRVFLSIITKTSEESDNNDAALSDFPSPGASYSTPRLPSKHLNNELHSDSEMLKSAMKSSSVGSRGSSDSVSPLPRESWNNKSFKGSAEAPRSLRMTMKLRDFYKTPKVDPELLKEIEQWNEALKNDVIKFCQENNFHSGFFDGTENNMVADAYELKVRLEHIIERIALISDAANTERPSLVVNNLFIGGALAARSKYTLQHLGITHVLCLCSNEIGQSDSQFPDLFEYKNFSISDDDDANISDLFEEASDFIDHVDHVGGKVLVHCFEGKSRSATVVLAYLMLREGFTLAKAWNLLKKVHRRAQPNDGFAKALLALDKRLHGKVSMDWQHKRPEMKVCPICSKNVGLSTSSLKLHLQKAHKRLSAGSVDSAMTMKIQKSIESLQISRGGSLSPSQKLTKVFSNELSF

SEQ ID NO: 34013 - protein, 357 aa, Zea mays subsp. mays
MLKSAMKSSSVGSRGSSDSVSPLPRESWNNKSFKGSAEAPRSLRMTMKLRDFYKTPKVDPELLKEIEQWNEALKNDVIKFCQENNFHSGFFDGTENNMVADAYELKVRLEHIIERIALISDAANTERPSLVVNNLFIGGALAARSKYTLQHLGITHVLCLCSNEIGQSDSQFPDLFEYKNFSISDDDDANISDLFEEASDFIDHVDHVGGKVLVHCFEGKSRSATVVLAYLMLREGFTLAKAWNLLKKVHRRAQPNDGFAKALLALDKRLHGKVSMDWQHKRPEMKVCPICSKNVGLSTSSLKLHLQKAHKRLSAGSVDSAMTMKIQKSIESLQISRGGSLSPSQKLTKVFSNELSF

SEQ ID NO: 34014 - protein, 352 aa, Zea mays subsp. mays
MKSSSVGSRGSSDSVSPLPRESWNNKSFKGSAEAPRSLRMTMKLRDFYKTPKVDPELLKEIEQWNEALKNDVIKFCQENNFHSGFFDGTENNMVADAYELKVRLEHIIERIALISDAANTERPSLVVNNLFIGGALAARSKYTLQHLGITHVLCLCSNEIGQSDSQFPDLFEYKNFSISDDDDANISDLFEEASDFIDHVDHVGGKVLVHCFEGKSRSATVVLAYLMLREGFTLAKAWNLLKKVHRRAQPNDGFAKALLALDKRLHGKVSMDWQHKRPEMKVCPICSKNVGLSTSSLKLHLQKAHKRLSAGSVDSAMTMKIQKSIESLQISRGGSLSPSQKLTKVFSNELSF

SEQ ID NO: 34015 - DNA, 704 bp, Zea mays subsp. mays
agcaatattgtgtacaaaagctgatggtgtttggtggagtgtccttgttgagatcacttcagccttaaactcagccgaaaacatcatcaaaagacagtggcttctggatgcattagacattggctgtgttacagctcacccctcaacggtgctgtgttttgttggcttgctttgtggtagctgctgcatctatatgccgcttcttcttgttaattcgataaatgtactgagcgacttgccggtcaccctgcctgcctttctctccaccatcgtttctgatgatttcaggaactctgtggcagacaggctatggctgttgactactgacatctatacttgggctgaacaattagctcacggacacgatcaacctggacatgatcgtattcatagaagtgaaactgagattgcgacttttttggccaatattctgctctctacatgcattacagtcgaggactacctgtctgttgataagcggctaaagcttgcaaatcttgaagcactctaatcaaagggagatgtgtttcttttctattttatgtatgtatttatgtacggtatcagtcatgttttaatagttgatgtccctgctgatgatccagcaatgtttttttcatgtacataattaatttaactaactcatcttatgcactgaaaacaatctattgttcaaagatagatagacctatgaaataatattg

SEQ ID NO: 34016 - protein, 169 aa, Zea mays subsp. mays
AILCTKADGVWWSVLVEITSALNSAENIIKRQWLLDALDIGCVTAHPSTVLCFVGLLCGSCCIYMPLLLVNSINVLSDLPVTLPAFLSTIVSDDFRNSVADRLWLLTTDIYTWAEQLAHGHDQPGHDRIHRSETEIATFLANILLSTCITVEDYLSVDKRLKLANLEAL

SEQ ID NO: 34017 - protein, 105 aa, Zea mays subsp. mays
MPLLLVNSINVLSDLPVTLPAFLSTIVSDDFRNSVADRLWLLTTDIYTWAEQLAHGHDQPGHDRIHRSETEIATFLANILLSTCITVEDYLSVDKRLKLANLEAL

SEQ ID NO: 34018 - DNA, 351 bp, Zea mays subsp. mays
ccagcacctccccctcccttcctatctctctgatctctccctcgctctcgcagccgccactgtagaagcttcgaggctgctgctgcgcccatggccgcggaagccaagacgccgtccctcgctgaggaatattcacttccaccacaggaagttccagtggaaaaggtagctgaggagggggcgggggaggctgcagaaacttatgttgtagttgtagagcaaggaaaggtgaggtgaggtgtggtgtcggctagttcttgttcttggcccggcgatgcttcggtgggtgagcgaggtgttgccgtgtagccggcgtcaccgtttttagtgaaaggagcgaaaagaaaatgc

SEQ ID NO: 34019 - protein, 55 aa, Zea mays subsp. mays
QHLPLPSYLSDLSLALAAATVEASRLLLRPWPRKPRRRPSLRNIHFHHRKFQWKR

SEQ ID NO: 34020 - protein, 48 aa, Zea mays subsp. mays
MAAEAKTPSLAEEYSLPPQEVPVEKVAEEGAGEAAETYVVVVEQGKVR

SEQ ID NO: 34021 - DNA, 1136 bp, Zea mays subsp. mays
aatgaaagtggagttaaaagaatgaatgctttagcccgggctgctgaatctatagcggacggtgatcttgttaatgtacagataagaagatatcgacagtggcagctgtcacaagctgcttgttttgcttcatctatagtacctgccgctttgatgcatgggaacagagaaatccttgaagcaggtgagcgaaactttaataggtttggtggattttgggtaagtactcgactactaacaaaaacagaaggctactggaagatgtccacagtcatattcttgcctcccagcaagcaaacttggacagggatgcattgaggttggattatcttactcttatcttgagagagctgactgacccactgaaaaaaatgtcaaaggatgaagctgttcaaaaggtggtagagtttatggatacatactctttaagccaggaagacttcgatacgattgttgaagtatccaaatttaagggtcatccaagtcctatggatgggattcaacctgctgttaaaagtgccttgacaaaggcatacaaacaaggaagtagttcccgtgttgttcgagcagcagatctaataaacattccaggcatgaaaaagcctttaaagaaacgagtggcggcgatcttggagccggtagaagagagcctacctgaagaaaatggactagcatcagctgaagatgatgaagatggttcttctgatgctgaaaataatgatgagcttgtgcctgctgactctacgccgaagctggacctgcaaagcgacaagaagaaaggaatccaagtgcagcttgacctgaagagcaatggggatggcccgcgcgggaagaaggcgcctgctgccaggtcaagagcaaccgggtcaggtgggaaggccgcggcgggaggaggttcggctgggaagaggaagaggtaaatgagacatttggcgcctgcccacagttggccggtggttagtttggacgcacagatcccatgatgaacttgagcgcaagaagagtataccgcttgtagttactctgtaacgtacgcaggcagagagcgcgcgttccagcgtatacgtacacgtagacgtagtacgtacatgtactacccgttacttgctctccaatcgagttgcagttgcagcccg

SEQ ID NO: 34022 - protein, 182 aa, Zea mays subsp. mays
MSKDEAVQKVVEFMDTYSLSQEDFDTIVEVSKFKGHPSPMDGIQPAVKSALTKAYKQGSSSRVVRAADLINIPGMKKPLKKRVAAILEPVEESLPEENGLASAEDDEDGSSDAENNDELVPADSTPKLDLQSDKKKGIQVQLDLKSNGDGPRGKKAPAARSRATGSGGKAAAGGGSAGKRKR

SEQ ID NO: 34023 - protein, 169 aa, Zea mays subsp. mays
MDTYSLSQEDFDTIVEVSKFKGHPSPMDGIQPAVKSALTKAYKQGSSSRVVRAADLINIPGMKKPLKKRVAAILEPVEESLPEENGLASAEDDEDGSSDAENNDELVPADSTPKLDLQSDKKKGIQVQLDLKSNGDGPRGKKAPAARSRATGSGGKAAAGGGSAGKRKR

SEQ ID NO: 34024 - protein, 143 aa, Zea mays subsp. mays
MDGIQPAVKSALTKAYKQGSSSRVVRAADLINIPGMKKPLKKRVAAILEPVEESLPEENGLASAEDDEDGSSDAENNDELVPADSTPKLDLQSDKKKGIQVQLDLKSNGDGPRGKKAPAARSRATGSGGKAAAGGGSAGKRKR

SEQ ID NO: 34025 - DNA, 831 bp, Zea mays subsp. mays
  misc_feature (788)..(788): n is a, c, g, or t
ccttttggcaggcaattatgattcggtgatcatctgccttggggccaaggcttgctcacttcctgaacttgcaaataagttgcctcttaggacctgcagaggagttatcgctgaatttcagttgccatccactacagtagaagaatatgacagtcaaagtgcttcaatcttatctgatgcatggctagcattccaaggtccccgaactgtttctatcggatcaacttggcaatggatttctgagaacgattcttcaactgtttccgatgaagaatctcttactgcaatcgaagagttgctccctaaagcttctggcgtatatccaagaattagtaaatgggattttgtacgcgcaagagctggaatacgagccatgcctccacttacaacaaatgggtcattgccacttttgggttgtttggatgatttactaggcaataagagcaactgcacattttggctagttggtggacttggtgcacgaggtcttctgtatcatggtttggttggaaagttgactgccaaagctgcgatttcctgtaatgaaaacataataccttctgagttcacgtgctggaatatagttaagccttagtgagaactgctaacatcgtccaaacttcaagcacgcatgctgtgtttgatctgtaggaaataaaacctttgtagatgagccaaatcctgacaaggatgctggcaaaacccatgatgtcatcctggtgcagtgagccagtcactactgcatattgaaatctgcccaatgcattccatgtccgtccatgtaaacncaaatgacaccgcgactctgcaagtaagctgaggttctgcttc

SEQ ID NO: 34026 - protein, 197 aa, Zea mays subsp. mays
LLAGNYDSVIICLGAKACSLPELANKLPLRTCRGVIAEFQLPSTTVEEYDSQSASILSDAWLAFQGPRTVSIGSTWQWISENDSSTVSDEESLTAIEELLPKASGVYPRISKWDFVRARAGIRAMPPLTTNGSLPLLGCLDDLLGNKSNCTFWLVGGLGARGLLYHGLVGKLTAKAAISCNENIIPSEFTCWNIVKP

SEQ ID NO: 34027 - DNA, 2027 bp, Zea mays subsp. mays
gcacgagaccattacctagaacatcctaatcaaaagatctctcgttcgacctcgtctctcttccccttctgctttgccttttccccttcctctctcccctgtcccccctccgtcccagccgagcgagaaagcgaaggggccaaaaaagccgcaccggcttccttcccccacccgaagagatggaactgttctacgaactgctcctcacggcggcggtcaccctcctcgctgccctcctgctcgccacgctcttcgcagccaatgattcccatcgccggaccgatcgcgccgcagccgcgatcgccgaggaggtggcggaggaggagaggatcatcgaggtcgacgaggtgatgcgtagcgaagggatggcggcggtggcgccgtcggaggcggatgggtgggttgaggcggagaaggcgccggcggtggtcgtcgcggaggtgaaggagccggagagcttgcccgaggaggagggggttcccgtgaaggctgttcgggaggtgcgccttgctgcggaagtggaggagggggaggacggtggtggcggcgtgaagcggcctgatttgacctccgcaactgttgtggcggcggtgggtgctgaagcgagccagctggtgtcgggcgctgaggttgtgcctaaggaggtttctggtgcggcagggttggaggaacgaaccgtgcaggatgttgtggtgaaccagtatgatctgggtgctgaggttgctcttgttcccgttgaagttctcgaagcaggaccggacaagcagggagtagaagttgttggagttgcgcaagtgcctcccttggaaacagaagctgctgaagtgaaacagcaccatctcgttgccgaagcggctcctgctgaagatgttcttgacgtgggattagtggacaagagtgtacgagctatcgaagtgaggcccaacgaattggattccgagactgttcttgaagagattcttgatgcggtattggaggaggaggagcaagtagagcatgaattgcctgctggggctgctccacaaccagttctcgatgtgccattggcagggaagggagagcttaaacatcatcagcccgttgaagaagctgccgaggtacacgaggatgtgcagtgcaagcaggaagctgagtgtgaggcccaaacagttgatcaacaacaagaactggttcctgaagaggagtcggtcgcaggaaaaaatgatgatgtgaatgttatccatgaatgtagcttcagtgatgaagtggttaccgaattgcctgtgggggaagtgacatcgcaagggctgccgaaggatgaccctgaggcagacatggagtttgaggagtgggaagggatcgagaggagtgaagtggagaagaggtttggtgcggctgcagcatttgctgctagtggggctggggcggctgccctgtcaaagctcgatagtgatgtgcagctgcagcttcaaggtctcctcaaggttgccattgacggtccctgttatgactcagcgcagccacttacactgagaccctcatctcgtgcaaaatggtctgcttggcagaagttagggaatatgaaccctgagattgctatggagaaatacatgaatcttttatcagaaacaattccagggtggatgatgaatgaaaccttgtgtatgcatgttgtactctaggacacagagaacactggcagtttacctgcggagactatcttaacaacgatggcttctacaagtgatcaacggagcaatcaagggaatgaagataattctagcataggtgaaggtcatccaataacttcccctaacccagagaaaggccagagctctgatatcccaactgaatgaaggcaacactgataaaacatttcttgtatcagtggttccagcccattgctgggagcattatcgatgcgttcgtcataaaattagatttgtacagttgtggcggttgtgctgtgatgatgttggttcgtgtatgtatatgactgtatatatatgtttgtgctaatactactgctgcggcctgtatatttggcc

SEQ ID NO: 34028 - protein, 493 aa, Zea mays subsp. mays
MELFYELLLTAAVTLLAALLLATLFAANDSHRRTDRAAAAIAEEVAEEERIIEVDEVMRSEGMAAVAPSEADGWVEAEKAPAVVVAEVKEPESLPEEEGVPVKAVREVRLAAEVEEGEDGGGGVKRPDLTSATVVAAVGAEASQLVSGAEVVPKEVSGAAGLEERTVQDVVVNQYDLGAEVALVPVEVLEAGPDKQGVEVVGVAQVPPLETEAAEVKQHHLVAEAAPAEDVLDVGLVDKSVRAIEVRPNELDSETVLEEILDAVLEEEEQVEHELPAGAAPQPVLDVPLAGKGELKHHQPVEEAAEVHEDVQCKQEAECEAQTVDQQQELVPEEESVAGKNDDVNVIHECSFSDEVVTELPVGEVTSQGLPKDDPEADMEFEEWEGIERSEVEKRFGAAAAFAASGAGAAALSKLDSDVQLQLQGLLKVAIDGPCYDSAQPLTLRPSSRAKWSAWQKLGNMNPEIAMEKYMNLLSETIPGWMMNETLCMHVVL

SEQ ID NO: 34029 - protein, 436 aa, Zea mays subsp. mays
MRSEGMAAVAPSEADGWVEAEKAPAVVVAEVKEPESLPEEEGVPVKAVREVRLAAEVEEGEDGGGGVKRPDLTSATVVAAVGAEASQLVSGAEVVPKEVSGAAGLEERTVQDVVVNQYDLGAEVALVPVEVLEAGPDKQGVEVVGVAQVPPLETEAAEVKQHHLVAEAAPAEDVLDVGLVDKSVRAIEVRPNELDSETVLEEILDAVLEEEEQVEHELPAGAAPQPVLDVPLAGKGELKHHQPVEEAAEVHEDVQCKQEAECEAQTVDQQQELVPEEESVAGKNDDVNVIHECSFSDEVVTELPVGEVTSQGLPKDDPEADMEFEEWEGIERSEVEKRFGAAAAFAASGAGAAALSKLDSDVQLQLQGLLKVAIDGPCYDSAQPLTLRPSSRAKWSAWQKLGNMNPEIAMEKYMNLLSETIPGWMMNETLCMHVVL

SEQ ID NO: 34030 - protein, 431 aa, Zea mays subsp. mays
MAAVAPSEADGWVEAEKAPAVVVAEVKEPESLPEEEGVPVKAVREVRLAAEVEEGEDGGGGVKRPDLTSATVVAAVGAEASQLVSGAEVVPKEVSGAAGLEERTVQDVVVNQYDLGAEVALVPVEVLEAGPDKQGVEVVGVAQVPPLETEAAEVKQHHLVAEAAPAEDVLDVGLVDKSVRAIEVRPNELDSETVLEEILDAVLEEEEQVEHELPAGAAPQPVLDVPLAGKGELKHHQPVEEAAEVHEDVQCKQEAECEAQTVDQQQELVPEEESVAGKNDDVNVIHECSFSDEVVTELPVGEVTSQGLPKDDPEADMEFEEWEGIERSEVEKRFGAAAAFAASGAGAAALSKLDSDVQLQLQGLLKVAIDGPCYDSAQPLTLRPSSRAKWSAWQKLGNMNPEIAMEKYMNLLSETIPGWMMNETLCMHVVL

SEQ ID NO: 34031 - DNA, 486 bp, Zea mays subsp. mays
tcatgctgataattttgcccacattggtggatttgcttctgggtttcttattggatttgtgctgctggcaagacctcaatttggttggatggaacgcagcgagctacctcagactagtcaacctccaaagtacaaatcgtaccagtatgtcttgtgggttgctgcactcctcttgctggtagttgggtttgccattatcttggtcatgctcttcacgggtaagaatgggaacgacagctgccactggtgccattacctgaactgcgtaccaacgtccagatggaagtgcgatacctgaattccgcaaagtatatgctccactggtgttcgtgtgttcgtggaaatgtacgaccaaatgtatcctccacttgaccatcctgcgcttcttttgcccggattctccctggttccatgaaatacaaatgttccagaattgtagcacgagcttgtaactgttgatttcggcataattgatgtattcatctc

SEQ ID NO: 34032 - protein, 98 aa, Zea mays subsp. mays
HADNFAHIGGFASGFLIGFVLLARPQFGWMERSELPQTSQPPKYKSYQYVLWVAALLLLVVGFAIILVMLFTGKNGNDSCHWCHYLNCVPTSRWKCDT

SEQ ID NO: 34033 - protein, 69 aa, Zea mays subsp. mays
MERSELPQTSQPPKYKSYQYVLWVAALLLLVVGFAIILVMLFTGKNGNDSCHWCHYLNCVPTSRWKCDT

SEQ ID NO: 34034 - protein, 59 aa, Zea mays subsp. mays
MLIILPTLVDLLLGFLLDLCCWQDLNLVGWNAASYLRLVNLQSTNRTSMSCGLLHSSCW

SEQ ID NO: 34035 - DNA, 1210 bp, Zea mays subsp. mays
aacaggcacacagccgtgtcctccggactctcggggtctcccgacgtcgactcgtcctcggtttccctccatgccctcaaggcctcaatctatcctcgggctgtccgctgtccccttcccgcgtcgaaaccctagctcgtcacctcgccgccgtgctgtccgctgtcctagtccgcggctccgcgccccatctctcttgccgtcgcatctgatgttcttctcccgcaacgcattccgcgacctggaccccatcgactcgccggcctccatggcgtcctcgaagaaggttgcgacccgtgacgagtgggagcggaagcttcgcgacgtcaagatacgcaaggaggacatgaaccgcctcgtcatgaacttcctcgtcactgagggcttcgtcgacgccgccgacaagttccgcatcgagtccggcacccagccggagattgacctagcgatcatcgcggatcgaatggaggttaagagagcagtacagtcgggtaatgttcaggaagcgatcgagaagatcaacgatcttaaccccacgattctggacatgaatccccaactatactttcatctccagcaacagaaactaatagagttgattcgcgagggaaaaacaaatgaagctttggagttcgctcaagaagaacttgcaccgagaggcgaagaaaatcaaacatttctcgaggagatagaaaaaactgtagcgctactgatttttaaaggtgtaaaaaattgcccttacagagaactattggatgtttctcaacgtttgaagactgcaagtgaagttaatgctgctattcttgcaagccaaagtcatgggaaagattcgaagcttccaagcttgttaaagatgttgaaatggacacaaaatcatctggacgaaagggcggcatatcctgcaatcaatgacttcaccactgctgtagtggaagatccatcaatatgaatctgctgcaaaaaggttgatgataactgagggtaggcaccaagcctgcctggtggctgcatgtggtttgccccggatctgtcaatagatcatcatctgcagcgattgagttcacccctttcaccagtgttgaagcaattaagctcaatgcaaggagttgacctgaaacgtcacctgtgttctactacctgtacatgatgtagaaagacatgtttgaaccccttttcagccagtgaaaatattggatttgatttttcatgg

SEQ ID NO: 34036 - protein, 315 aa, Zea mays subsp. mays
TGTQPCPPDSRGLPTSTRPRFPSMPSRPQSILGLSAVPFPRRNPSSSPRRRAVRCPSPRLRAPSLLPSHLMFFSRNAFRDLDPIDSPASMASSKKVATRDEWERKLRDVKIRKEDMNRLVMNFLVTEGFVDAADKFRIESGTQPEIDLAIIADRMEVKRAVQSGNVQEAIEKINDLNPTILDMNPQLYFHLQQQKLIELIREGKTNEALEFAQEELAPRGEENQTFLEEIEKTVALLIFKGVKNCPYRELLDVSQRLKTASEVNAAILASQSHGKDSKLPSLLKMLKWTQNHLDERAAYPAINDFTTAVVEDPSI

SEQ ID NO: 34037 - protein, 292 aa, Zea mays subsp. mays
MPSRPQSILGLSAVPFPRRNPSSSPRRRAVRCPSPRLRAPSLLPSHLMFFSRNAFRDLDPIDSPASMASSKKVATRDEWERKLRDVKIRKEDMNRLVMNFLVTEGFVDAADKFRIESGTQPEIDLAIIADRMEVKRAVQSGNVQEAIEKINDLNPTILDMNPQLYFHLQQQKLIELIREGKTNEALEFAQEELAPRGEENQTFLEEIEKTVALLIFKGVKNCPYRELLDVSQRLKTASEVNAAILASQSHGKDSKLPSLLKMLKWTQNHLDERAAYPAINDFTTAVVEDPSI

SEQ ID NO: 34038 - protein, 245 aa, Zea mays subsp. mays
MFFSRNAFRDLDPIDSPASMASSKKVATRDEWERKLRDVKIRKEDMNRLVMNFLVTEGFVDAADKFRIESGTQPEIDLAIIADRMEVKRAVQSGNVQEAIEKINDLNPTILDMNPQLYFHLQQQKLIELIREGKTNEALEFAQEELAPRGEENQTFLEEIEKTVALLIFKGVKNCPYRELLDVSQRLKTASEVNAAILASQSHGKDSKLPSLLKMLKWTQNHLDERAAYPAINDFTTAVVEDPSI

SEQ ID NO: 34039 - DNA, 1291 bp, Zea mays subsp. mays
gtttgtgatgaagcactgtcgtcgcccatgacgggaaaacggctccatatacgtactactaacgtacacaccacagcgactctccggccatgcagttgccggctgcacaacttgtgcaagtgcatgcatgcatggatttggatccatgcatggccacagcccacagcccacaggggaggggaaggtgaggccgcgccgcgaggaaccgcgtcgaccttgtcgtcgatgttggcttgcaaggcgagcccgagccggccgtgcgtcgtcccccttgtttgcctgctggtggtggcggccgcagtcgtcgtcgtcgctgcctcggcgccgccggcggaggcggcgttcgacgacaactacgtggcgcagtggggtagagatggttatcaccttgtcgtccggggcacgggaggcgaatgtcaccatggaccagagctctggtgcccgggttccggtccaagtccacgtacggctcagggttcttccacatgaggatgaagctgccctccgggtacacggccggcgtcgtcacgaccttctacctcatctcgcagccggaggatgggagccgcgacgaggtggacttggagttcctgggcgacaaggccggcgtgcccatcaccctccagaccaacgtcttcgtcgacggccgcggcgacagggagcagcggacgcgcctctggttcgaccccgccgccgacttccacgactacaagatcctctggaacccataccagctcgtgatgttcgtggacgacacgccggtccgggtgctgaggaacctgacgggcgccgtgccggggtacccgttcccggggaagcagacgatgctgatccgcgcgagcgtgtgggacggctccgactgggccacggacggcggccggaccaaggtggactggtccaggggccccttcaccgccggctaccggggcttcgacgtcgacggctgcgccaacaacgggagcgacgcgtgccaatcgcccgacctatggtggaacgccgccgagtaccggaacatcaccgcggagcagcgggcggcgtacgaggacgtgaagaggagttacatgaactacgactactgcgccgataaggccaggtttaacagcaccaccgtacccattgaatgcaactacgcttgagaagccagttaggagtggcggcgttgtatatcaacggtttatatatatatattatatatatatacacacacacgaaaaagatatgtcttcttatttgttgcaagggtttaaatatgcaaatgcttataaggactaaaaaaatatatttccatgtc

SEQ ID NO: 34040 - protein, 319 aa, Zea mays subsp. mays
MHGFGSMHGHSPQPTGEGKVRPRREEPRRPCRRCWLARRARAGRASSPLFACWWWRPQSSSSLPRRRRRRRRSTTTTWRSGVEMVITLSSGAREANVTMDQSSGARVPVQVHVRLRVLPHEDEAALRVHGRRRHDLLPHLAAGGWEPRRGGLGVPGRQGRRAHHPPDQRLRRRPRRQGAADAPLVRPRRRLPRLQDPLEPIPARDVRGRHAGPGAEEPDGRRAGVPVPGEADDADPRERVGRLRLGHGRRPDQGGLVQGPLHRRLPGLRRRRLRQQRERRVPIARPMVERRRVPEHHRGAAGGVRGREEELHELRLLRR

SEQ ID NO: 34041 - protein, 313 aa, Zea mays subsp. mays
MHGHSPQPTGEGKVRPRREEPRRPCRRCWLARRARAGRASSPLFACWWWRPQSSSSLPRRRRRRRRSTTTTWRSGVEMVITLSSGAREANVTMDQSSGARVPVQVHVRLRVLPHEDEAALRVHGRRRHDLLPHLAAGGWEPRRGGLGVPGRQGRRAHHPPDQRLRRRPRRQGAADAPLVRPRRRLPRLQDPLEPIPARDVRGRHAGPGAEEPDGRRAGVPVPGEADDADPRERVGRLRLGHGRRPDQGGLVQGPLHRRLPGLRRRRLRQQRERRVPIARPMVERRRVPEHHRGAAGGVRGREEELHELRLLRR

SEQ ID NO: 34042 - protein, 240 aa, Zea mays subsp. mays
MSPWTRALVPGFRSKSTYGSGFFHMRMKLPSGYTAGVVTTFYLISQPEDGSRDEVDLEFLGDKAGVPITLQTNVFVDGRGDREQRTRLWFDPAADFHDYKILWNPYQLVMFVDDTPVRVLRNLTGAVPGYPFPGKQTMLIRASVWDGSDWATDGGRTKVDWSRGPFTAGYRGFDVDGCANNGSDACQSPDLWWNAAEYRNITAEQRAAYEDVKRSYMNYDYCADKARFNSTTVPIECNYA

SEQ ID NO: 34043 - DNA, 2214 bp, Zea mays subsp. mays
agaccattacctagaagatcctaatcgaaaaaaacgatccatcctcaccaccattcgactccacagctggaggctgaagctccgcagtcacagcattcaaatcaatctctctctttctctctctctctctcacaggagataagccatggcagagttgcctttggcagcggggctgatggaccttcgcaactgcaagctctctccgaagccagcgccgcccttgccactccccgcgctccgccgcatgcacacaagcgccacggctacgacggccccgtccccgcgccatgcggtccccgaactccactccactaccgagctggcggacgggagcatcgtcttccgtttcggccatcctaagtccaaggcgctggagccggagccggcgagcgtaaagaccagcccttactccagagttgcccctgcctcgggcgctgtgcccggcagccagatggagccggagattgactctgaacatggattagacggcgtgcgaataggcaccacggctggggttgagaagccgagcccgaatgccgcagccgaggcctggccgacacctccacctcctgacgccggcgcggtaaccggtgccacttccgctgcgctagaggaggcgccggagcaggaggcgggttccaatgctgccgttgaggaggtggacaccaggccatcatccgcagagtctcttgtcccgtcgagatcagaggatgggccaaagggcgacggcgtcgctgttgaggctggcatgccgaccagtggtgctgccatggatacgattgagactgctttggaggggcgcggggcaagcgaggatgactcagcagttgatgtgagtggtggcttggatgaggcggcgacttccggtttggaggactccgaagccgcatcggaaggctccactgcacaggatttctacaccgacgttgaaacggagtccagcggctccagcagcgacgagcagagagctgagttcggcttttccttaccaccaccggaacaagttagcaacaaggcggattggaaaaatgacacttcagaggtgaagagttctgataggatgattccaatagctcaacggacacgtgtgttatcgtcaggtgctgcaatattgcctcatccgtcaaaggtagcaacaggtggagaagatgcatatttcattgcagccaatggctggtttggtgtagcagatggagttggccagtggtcatttgaaggaatcaacgcagggctttatgcaagagaactaatggatggctgcaaaaagttcgttaccgagaatcaaggggatccagatcttagaccagagcagatcctttccaaagcagtagatgaagcatgttcacctggttcttgcactgtattagttgctcattttgatggccaggcccttcaagcatcaaatattggggactctgggtttatagtgataagaaatggagaagtgttcaaaaagtctaaacctacgctttatggtttcaatttcccactacaaattcagaagggagatgacccctcaaagtttgtacagaattatgctattgatctagaggacggcgatgcaattgtgacagcaaccgatggcctttttgataatgtatacgagcatgaaatagctggaattgtctccaaatcgttacaggcagatctagaaccagcggagattgcggaacacttggctgtgaaggcccaggaagtagggaggtctggggctgggagaagcccattttcagatgctgctctctcggctgggtaccttggctacagtgggggcaaactggatgacatagccgtcgttgtatcaattgtccggactgaaattcaagaggataggctaagatgactatgcagaaaagaagctcatgttttgtggaagctcaacaccaagcgaccacgcgggttgccctatcagtattctgtactgctagaactgcagctatgtggcgatttctggaaagttaagggcgtatgcatcagcatcatacaccgtgctcgatcatcaataggcgggccaataaccattggacatcagcattgtagcgaagccccttcctgttgcccttgccagtgcaccggcgccacattttgatttttggtttcgctataaaaatataaggcatttagatgttgcccttgccattaaaccaatgtcatgtactccttctgtcataaattaaaattcgttttggtttctaatggattcatataatactt

SEQ ID NO: 34044 - protein, 565 aa, Zea mays subsp. mays
MAELPLAAGLMDLRNCKLSPKPAPPLPLPALRRMHTSATATTAPSPRHAVPELHSTTELADGSIVFRFGHPKSKALEPEPASVKTSPYSRVAPASGAVPGSQMEPEIDSEHGLDGVRIGTTAGVEKPSPNAAAEAWPTPPPPDAGAVTGATSAALEEAPEQEAGSNAAVEEVDTRPSSAESLVPSRSEDGPKGDGVAVEAGMPTSGAAMDTIETALEGRGASEDDSAVDVSGGLDEAATSGLEDSEAASEGSTAQDFYTDVETESSGSSSDEQRAEFGFSLPPPEQVSNKADWKNDTSEVKSSDRMIPIAQRTRVLSSGAAILPHPSKVATGGEDAYFIAANGWFGVADGVGQWSFEGINAGLYARELMDGCKKFVTENQGDPDLRPEQILSKAVDEACSPGSCTVLVAHFDGQALQASNIGDSGFIVIRNGEVFKKSKPTLYGFNFPLQIQKGDDPSKFVQNYAIDLEDGDAIVTATDGLFDNVYEHEIAGIVSKSLQADLEPAEIAEHLAVKAQEVGRSGAGRSPFSDAALSAGYLGYSGGKLDDIAVVVSIVRTEIQEDRLR

SEQ ID NO: 34045 - protein, 555 aa, Zea mays subsp. mays
MDLRNCKLSPKPAPPLPLPALRRMHTSATATTAPSPRHAVPELHSTTELADGSIVFRFGHPKSKALEPEPASVKTSPYSRVAPASGAVPGSQMEPEIDSEHGLDGVRIGTTAGVEKPSPNAAAEAWPTPPPPDAGAVTGATSAALEEAPEQEAGSNAAVEEVDTRPSSAESLVPSRSEDGPKGDGVAVEAGMPTSGAAMDTIETALEGRGASEDDSAVDVSGGLDEAATSGLEDSEAASEGSTAQDFYTDVETESSGSSSDEQRAEFGFSLPPPEQVSNKADWKNDTSEVKSSDRMIPIAQRTRVLSSGAAILPHPSKVATGGEDAYFIAANGWFGVADGVGQWSFEGINAGLYARELMDGCKKFVTENQGDPDLRPEQILSKAVDEACSPGSCTVLVAHFDGQALQASNIGDSGFIVIRNGEVFKKSKPTLYGFNFPLQIQKGDDPSKFVQNYAIDLEDGDAIVTATDGLFDNVYEHEIAGIVSKSLQADLEPAEIAEHLAVKAQEVGRSGAGRSPFSDAALSAGYLGYSGGKLDDIAVVVSIVRTEIQEDRLR

SEQ ID NO: 34046 - protein, 532 aa, Zea mays subsp. mays
MHTSATATTAPSPRHAVPELHSTTELADGSIVFRFGHPKSKALEPEPASVKTSPYSRVAPASGAVPGSQMEPEIDSEHGLDGVRIGTTAGVEKPSPNAAAEAWPTPPPPDAGAVTGATSAALEEAPEQEAGSNAAVEEVDTRPSSAESLVPSRSEDGPKGDGVAVEAGMPTSGAAMDTIETALEGRGASEDDSAVDVSGGLDEAATSGLEDSEAASEGSTAQDFYTDVETESSGSSSDEQRAEFGFSLPPPEQVSNKADWKNDTSEVKSSDRMIPIAQRTRVLSSGAAILPHPSKVATGGEDAYFIAANGWFGVADGVGQWSFEGINAGLYARELMDGCKKFVTENQGDPDLRPEQILSKAVDEACSPGSCTVLVAHFDGQALQASNIGDSGFIVIRNGEVFKKSKPTLYGFNFPLQIQKGDDPSKFVQNYAIDLEDGDAIVTATDGLFDNVYEHEIAGIVSKSLQADLEPAEIAEHLAVKAQEVGRSGAGRSPFSDAALSAGYLGYSGGKLDDIAVVVSIVRTEIQEDRLR

SEQ ID NO: 34047 - DNA, 706 bp, Zea mays subsp. mays
agaccattacctagaacatcctaatcgaaaatcatcaaccgcagtacacggcgcatcattcccagcgaccacgagagactagatagccaagtgcatgcaaccagccatgcaggccgggaagacggcagtggaggcgacgaaggaggccgcggccaacgtcggggcctcggcgaacgccggcatgcagaagacccgtgccgccgtgcaaggccaggtggagaaggccacggcgcgcaacgcgtcggacaaggccgcggcggaggagcgccagcgggagcgcgtgcgcgccgcggagctgcagaagcaggacgccgtgcgcgccaacgcggccgcgaaggagcgcgccacgggcggcgcggccacgtaccagcaccagcacccgtcgcagggcgcgcccgggatcggcgcccagcagcattatggcggcggaagagtcgcccccgcgggcgggcacgtcgaggccggcgtcggcgagacccgccccgtcgcgaggggcaccggcacggcgcggcccagcgccgcgcacaacccgctcgtcggcagcgacttctcgcaggcgcgcggcaccggcggacagtaccagtgagctgccgcctccgcgacgtgcccgtacgtgtgacctatcatgtgtgtgagataggcatgtacacgaatggtccttgtgtgataatctatgctaaataatatgtctctaatataatagtgt

SEQ ID NO: 34048 - protein, 163 aa, Zea mays subsp. mays
MQPAMQAGKTAVEATKEAAANVGASANAGMQKTRAAVQGQVEKATARNASDKAAAEERQRERVRAAELQKQDAVRANAAAKERATGGAATYQHQHPSQGAPGIGAQQHYGGGRVAPAGGHVEAGVGETRPVARGTGTARPSAAHNPLVGSDFSQARGTGGQYQ

SEQ ID NO: 34049 - protein, 159 aa, Zea mays subsp. mays
MQAGKTAVEATKEAAANVGASANAGMQKTRAAVQGQVEKATARNASDKAAAEERQRERVRAAELQKQDAVRANAAAKERATGGAATYQHQHPSQGAPGIGAQQHYGGGRVAPAGGHVEAGVGETRPVARGTGTARPSAAHNPLVGSDFSQARGTGGQYQ

SEQ ID NO: 34050 - protein, 134 aa, Zea mays subsp. mays
MQKTRAAVQGQVEKATARNASDKAAAEERQRERVRAAELQKQDAVRANAAAKERATGGAATYQHQHPSQGAPGIGAQQHYGGGRVAPAGGHVEAGVGETRPVARGTGTARPSAAHNPLVGSDFSQARGTGGQYQ

SEQ ID NO: 34051 - DNA, 736 bp, Zea mays subsp. mays
ccattacctagaacatcctaatcaaaactacggtgttgtattgctcgagctgctcactgggaaaccgcctacagattcaactgacttcggtgacgacaacaatcttgtaggatgggtgaaacaacactcgaagtcgaggctcacggatctgtttgatcctgaactcgtgaaggaggatccagccctcgagctcgagctactggagcacctaaaaatcgcttgtgcatgcttggacaacagaccgtcgaagcgtccaacaatgctgaaggtcatggcaatgttcaaggagatgcaggccagttcgacggtggactcaaagacttcggcgtgcacagacgatgcatgttttgccgatgtggagatgacgaccctgaaagaagacaaggaggagaaggactaacaaggccaccgacacgcgagaaactgctcctggtgcacctgcccagggggtgagtggcagcagctacacggcgagtcagaggcaaaatgcccgtaggaggaatcagttggtgaggataccatttgaagtctcttgttgagcttagcattcccttcttgatggtagaagacagaagttttccctcatagcttcgccagttgaatatgctgtgtacctatgggagtaggttgattttcttttcttctttctttttaagctttcttcatctcttcttgtcacacgtcagtaagatctgtgtatgtacatatataaatggtgatttttttcttcggtgcc

SEQ ID NO: 34052 - protein, 132 aa, Zea mays subsp. mays
HYLEHPNQNYGVVLLELLTGKPPTDSTDFGDDNNLVGWVKQHSKSRLTDLFDPELVKEDPALELELLEHLKIACACLDNRPSKRPTMLKVMAMFKEMQASSTVDSKTSACTDDACFADVEMTTLKEDKEEKD

SEQ ID NO: 34053 - protein, 75 aa, Zea mays subsp. mays
MLGQQTVEASNNAEGHGNVQGDAGQFDGGLKDFGVHRRCMFCRCGDDDPERRQGGEGLTRPPTREKLLLVHLPRG

SEQ ID NO: 34054 - protein, 46 aa, Zea mays subsp. mays
MLKVMAMFKEMQASSTVDSKTSACTDDACFADVEMTTLKEDKEEKD

SEQ ID NO: 34055 - DNA, 1230 bp, Zea mays subsp. mays
tagaacatcctaatcgaaaacaaataggcagtttcaagaaaatcacaaaaaagctgacattgtggatttgcttcatgaagatgatggagatgaaggcacatacatagactgtaatgaaattcgaaaacaaaaaacagatgacgtgagagtaaaatctagaggcaaaatgcaaagtggcaagaaaaaagtcagcagatgtcaggcaagtgatggttcgcacaatggaggcaaggaaatgaaattatcaagtgacatagaagtgtgcaacagaagaggagatggaacaacggcagccaattttgaagaaattccaaaagaaaaggccgatgctgtgaaagtgaaacccaagatgcaaggtgacaagaaaaaaaccagtaaacatcaggcaggcgatggagataaaggagcaaaattttcttgcgatatagaagggtgtgacatgagtttcagcacccagcatgacctgtcgctgcacaagagagacatctgtcctgtcaaaggatgcaagaagaagttcttctgccataaatacttgctccagcaccgcaaagtgcacctggatgaaaggccgctcatgtgccattcccaggctgcgcgaagacattcaagtggccatgggcgaggacagagcacatgagggtgcatacaggggtgcgcccgtacgcatgcacggaacctggctgcacccagacgttccggtttgtgtcggacttcagccgccacaagaggaagactggccactcgtgtgacaagaaaaagaaacgcggcctttgactgctcgtgcacaagtacaggtttcttctctgacggcgagcgatcagaaggggatggatgctaatcgaataattgcgccaggttccattgtttgcagaattaatctgcattaggagtctaattcatttcattgtttattaccgctgcaacataacagctcattcactgtcgctttaggtccaactgacctgctggtgactgagattgtaccatgtcaattgtatcgttctttcgttcatacttagaaatcgggaagtttctgttgacaggaacgttggatttagtgtacggcgcctgttattaacatgcgtgtaattctgtactgaagtgctcctttcttatttttacattttttaaaatctggaaggaattagtgtacggcgcctgctagttttgatgtaggattcatttggcagttcttgaaacgattatcgcaaaaatagaatcacttgttcg

SEQ ID NO: 34056 - protein, 156 aa, Zea mays subsp. mays
MQSGKKKVSRCQASDGSHNGGKEMKLSSDIEVCNRRGDGTTAANFEEIPKEKADAVKVKPKMQGDKKKTSKHQAGDGDKGAKFSCDIEGCDMSFSTQHDLSLHKRDICPVKGCKKKFFCHKYLLQHRKVHLDERPLMCHSQAARRHSSGHGRGQST

SEQ ID NO: 34057 - protein, 133 aa, Zea mays subsp. mays
MKLSSDIEVCNRRGDGTTAANFEEIPKEKADAVKVKPKMQGDKKKTSKHQAGDGDKGAKFSCDIEGCDMSFSTQHDLSLHKRDICPVKGCKKKFFCHKYLLQHRKVHLDERPLMCHSQAARRHSSGHGRGQST

SEQ ID NO: 34058 - protein, 96 aa, Zea mays subsp. mays
MTCRCTRETSVLSKDARRSSSAINTCSSTAKCTWMKGRSCAIPRLREDIQVAMGEDRAHEGAYRGAPVRMHGTWLHPDVPVCVGLQPPQEEDWPLV

SEQ ID NO: 34059 - DNA, 1493 bp, Zea mays subsp. mays
ctgttcatttcctcctgctcccccctcctccctcccccccccctcctcgccgctcgccgttgaagaggtaggcccacgggccggcgagaatggaggcggcgacgatggcgtggacggcggcggtggtcggggcggggctggtgtactggttcgtctgggtgatgggcgcggcggaggtgaagggcaagcgggcggtggatctcaagatgggatccatcacgcgggacaaggtgcaggacaagtacacgcagtactggtccttcttccgccgccccaaggagacggccaccacggcggcgtcggcggagaaggtgccggccttcgtcgacaccttctacaacctcgtgaccgacatctacgagtgggggtggggccagtccttccacttctccccgtccctccccggccgctcccaccgcgacgccacgcgcgtccacgaggagcgcgtcgccgacctcctcggcgccaggccgggccaccgcctcctggacgtcggctgcggcgtcggcgggcccatgcgcgccatcgccgcgcactcggggatccaacgtcgtcggcatcaccatcaacgagtaccaggtgaaccgcgcccgcgcgcacaaccgcaaggccggcctcgactccccgcgctgcgaggtcgtctgcggcaacttcctctccatgccgttcccggacgcctccttcgacggcgcctactccatcgaggccacctgccacgcgcccaggctgcaggacgtgtacggcgaggtctaccgcgtgctcaagccggggggactctacgtctcctacgagtgggtcaccaccccgctgtaccgcgccgaggacccggaccacgtcgagtgcatccacggcatcgagcgcggcgacgcgctaccggggctccgccgccaggacgagatcgcgtccatcgctaaggaggtcgggttcgaggtgctcaaggagcaggacctggcgctgccccccgcgctgccctggtggacgcgcctcaagatgggccgcatcgcctactggcgcaactccctcgtcgtccgcgtgctcaccatgctccgggtcgcgcccaagggcgtctccgaggtgcacgagatgctgtacgagaccgcgcagcacctcacccgcggcggcgagaccggcatcttcacgcccatgcacatggtgctcctccgcaagcccgccgccgccgcctccaccgaggaggccaactagtgtaagactacacaccgccaccaatcagttactactcgcccaccgcaagggggagaaaatggggagggaggaaaaagatgcaagcagcagcagcaccagaggtaagaagagcaggctaatcggcgacttgaagaagttacaaattgatctattagagaagaagatactactaggaacgattcttctctccgtttactcttttccctgttcgtagctttgagttttaatttttgttttttggtggacggattgttccggggaggtcgaggttgggatctaaatttattttc

SEQ ID NO: 34060 - protein, 274 aa, Zea mays subsp. mays
MEAATMAWTAAVVGAGLVYWFVWVMGAAEVKGKRAVDLKMGSITRDKVQDKYTQYWSFFRRPKETATTAASAEKVPAFVDTFYNLVTDIYEWGWGQSFHFSPSLPGRSHRDATRVHEERVADLLGARPGHRLLDVGCGVGGPMRAIAAHSGIQRRRHHHQRVPGEPRPRAQPQGRPRLPALRGRLRQLPLHAVPGRLLRRRLLHRGHLPRAQAAGRVRRGLPRAQAGGTLRLLRVGHHPAVPRRGPGPRRVHPRHRARRRATGAPPPGRDRVHR

SEQ ID NO: 34061 - protein, 269 aa, Zea mays subsp. mays
MAWTAAVVGAGLVYWFVWVMGAAEVKGKRAVDLKMGSITRDKVQDKYTQYWSFFRRPKETATTAASAEKVPAFVDTFYNLVTDIYEWGWGQSFHFSPSLPGRSHRDATRVHEERVADLLGARPGHRLLDVGCGVGGPMRAIAAHSGIQRRRHHHQRVPGEPRPRAQPQGRPRLPALRGRLRQLPLHAVPGRLLRRRLLHRGHLPRAQAAGRVRRGLPRAQAGGTLRLLRVGHHPAVPRRGPGPRRVHPRHRARRRATGAPPPGRDRVHR

SEQ ID NO: 34062 - protein, 250 aa, Zea mays subsp. mays
MGAAEVKGKRAVDLKMGSITRDKVQDKYTQYWSFFRRPKETATTAASAEKVPAFVDTFYNLVTDIYEWGWGQSFHFSPSLPGRSHRDATRVHEERVADLLGARPGHRLLDVGCGVGGPMRAIAAHSGIQRRRHHHQRVPGEPRPRAQPQGRPRLPALRGRLRQLPLHAVPGRLLRRRLLHRGHLPRAQAAGRVRRGLPRAQAGGTLRLLRVGHHPAVPRRGPGPRRVHPRHRARRRATGAPPPGRDRVHR

SEQ ID NO: 34063 - DNA, 1409 bp, Zea mays subsp. mays
agccgattacgagtgccgtgtgtgccccgctccagtaagccaacagctcattcctcctcaccacgctgctcgttactaaccaagcaatcaatttcctcctctttccattctcccagccacaaatcgatcggaaacgcacgcccctttctcttcgccttttcgcgtcgtccagatctcagtcgttcttcgctccatgagctaggaatccgaggtgtcctctaggctaagcgaagttggccggcggcggctaggatggggttgatatccgggatgatgatgggggtcattgttggcgtcgccatcatggccggctggagccgcgtcatgcgccgacgcagcacgaagcgcatcgccaaggctgcggatatcaaggtgcttgggtctctcagcagggacgacctcaggaagctgtgcggtgataacttcccggagtggatatccttcccgcagtttgagcaggttaaatggttgaacaagcatctgagcaaactttggccttttgttgtagaagctgcaacagtagtggttaaggaatccgttgaaccactgctagatgattaccggcctccaggaataaaatctttgaagttcagcaaattttctcttggaaatgtgtcaccaaagatagaaggtattcgtattcaaaatcttcaaccaggtcaaatcatcatggatatagatttccgttggggtggtaatccaagcataatcctagctgttgatgctgtagttgcatcactgccaattcagctcaaggatcttcaggtctatactgtcatacgtgttatatttcaactgtctgaagacatcccttgcatttctgctgttgttgtggctctccttgctgatccagagccaaaaattcagtacaccctgaaggccattggaggaagcctaactgcagttcctggactttctgacatgattgatgatactgtcgattcaattgtttctgatatgctcttgtggccacacaggcatgttgttaaacttggtgtcaatgttgatacgagtgacttggagcttaaacctcagggaagactttctgttactgtggtaaaagcaacttctttgagaaataaggagatgatcggtaaatcagacccttatgtgaaactgtatgtgcggccaatgtttaaggtcaaaacaaaagtcatagatgatgacctgaatccggaatggaatgaaacatttgacttgattgtcgaagacaaagaaacccaatctgttatttttgaggtttacgacgaagacaaacttcagcaagacaagagactaggtgtggcaaaactagcagtaaacactcttgaatctgagattacccaagacgccactctgaagctgctacattcactggatccaattaaaaataaggacaccaaggataggggcacattacatcttaaggt

SEQ ID NO: 34064 - protein, 385 aa, Zea mays subsp. mays
MGLISGMMMGVIVGVAIMAGWSRVMRRRSTKRIAKAADIKVLGSLSRDDLRKLCGDNFPEWISFPQFEQVKWLNKHLSKLWPFVVEAATVVVKESVEPLLDDYRPPGIKSLKFSKFSLGNVSPKIEGIRIQNLQPGQIIMDIDFRWGGNPSIILAVDAVVASLPIQLKDLQVYTVIRVIFQLSEDIPCISAVVVALLADPEPKIQYTLKAIGGSLTAVPGLSDMIDDTVDSIVSDMLLWPHRHVVKLGVNVDTSDLELKPQGRLSVTVVKATSLRNKEMIGKSDPYVKLYVRPMFKVKTKVIDDDLNPEWNETFDLIVEDKETQSVIFEVYDEDKLQQDKRLGVAKLAVNTLESEITQDATLKLLHSLDPIKNKDTKDRGTLHLK

SEQ ID NO: 34065 - protein, 379 aa, Zea mays subsp. mays
MMMGVIVGVAIMAGWSRVMRRRSTKRIAKAADIKVLGSLSRDDLRKLCGDNFPEWISFPQFEQVKWLNKHLSKLWPFVVEAATVVVKESVEPLLDDYRPPGIKSLKFSKFSLGNVSPKIEGIRIQNLQPGQIIMDIDFRWGGNPSIILAVDAVVASLPIQLKDLQVYTVIRVIFQLSEDIPCISAVVVALLADPEPKIQYTLKAIGGSLTAVPGLSDMIDDTVDSIVSDMLLWPHRHVVKLGVNVDTSDLELKPQGRLSVTVVKATSLRNKEMIGKSDPYVKLYVRPMFKVKTKVIDDDLNPEWNETFDLIVEDKETQSVIFEVYDEDKLQQDKRLGVAKLAVNTLESEITQDATLKLLHSLDPIKNKDTKDRGTLHLK

SEQ ID NO: 34066 - protein, 378 aa, Zea mays subsp. mays
MMGVIVGVAIMAGWSRVMRRRSTKRIAKAADIKVLGSLSRDDLRKLCGDNFPEWISFPQFEQVKWLNKHLSKLWPFVVEAATVVVKESVEPLLDDYRPPGIKSLKFSKFSLGNVSPKIEGIRIQNLQPGQIIMDIDFRWGGNPSIILAVDAVVASLPIQLKDLQVYTVIRVIFQLSEDIPCISAVVVALLADPEPKIQYTLKAIGGSLTAVPGLSDMIDDTVDSIVSDMLLWPHRHVVKLGVNVDTSDLELKPQGRLSVTVVKATSLRNKEMIGKSDPYVKLYVRPMFKVKTKVIDDDLNPEWNETFDLIVEDKETQSVIFEVYDEDKLQQDKRLGVAKLAVNTLESEITQDATLKLLHSLDPIKNKDTKDRGTLHLK

SEQ ID NO: 34067 - DNA, 518 bp, Zea mays subsp. mays
gagccaagaagcggtaggtggcgccaacgactcgtcgtcgtcgtatccgcggtccggttcctctcctcctgctgcgaatgcgatccctgccctgcctccgcctccgcggacgaaccgccggctgggtccaagtttagcgcgtcggaccctcgctccccaatctcagagcaatggaggtggaggcggcggggccggataagctggcgcctccctcgccggtggaaggccccggcgagaatggcgcggccaccaaggtgcagaaggtgtaccgcagctaccggacccgccgcaagctcgccgactccgccgtcgtcgtcgaggagctctggtggcaggcgctggactacgcgcgcctggagcacagcaccgtctccttcttcgacgagcccaagccggcagaccgccgcctcgcgctggaaccgcgtcagcctcaacgcatccaagttgggccagggtttatccagagacggcaaggccctcaagctggctttccagcactggatcgaagccatcgaccc

SEQ ID NO: 34068 - protein, 172 aa, Zea mays subsp. mays
EPRSGRWRQRLVVVVSAVRFLSSCCECDPCPASASADEPPAGSKFSASDPRSPISEQWRWRRRGRISWRLPRRWKAPARMARPPRCRRCTAATGPAASSPTPPSSSRSSGGRRWTTRAWSTAPSPSSTSPSRQTAASRWNRVSLNASKLGQGLSRDGKALKLAFQHWIEAID

SEQ ID NO: 34069 - protein, 116 aa, Zea mays subsp. mays
MEVEAAGPDKLAPPSPVEGPGENGAATKVQKVYRSYRTRRKLADSAVVVEELWWQALDYARLEHSTVSFFDEPKPADRRLALEPRQPQRIQVGPGFIQRRQGPQAGFPALDRSHRP

SEQ ID NO: 34070 - protein, 93 aa, Zea mays subsp. mays
MARPPRCRRCTAATGPAASSPTPPSSSRSSGGRRWTTRAWSTAPSPSSTSPSRQTAASRWNRVSLNASKLGQGLSRDGKALKLAFQHWIEAID

SEQ ID NO: 34071 - DNA, 1507 bp, Zea mays subsp. mays
ccaccaccatccacacctccttcgcccgcccgctcctcctctcctcccctcccctccgctccccacccagacgagcgcgcgcggcgacccggacccagtcagccggactcccatcccctcctccccacgcgagccgagctgcgagcgctgctcgcgcggtcggcccatggcgagcggcggcggcgggggcctgggcgcggctggcgcggggggccggatgcccacgtggagggagcgcgagaacaacaagcgccgggagcgccgccgccgcgcgatcgccgccaagatcttcgccggcctccgcgcgcacggcggctacaagctgcccaagcactgcgacaacaacgaggtgctcaaggcgctctgcaacgaggccggctgggtcgtcgagcccgacggcaccacctaccgccagggaagcaagcccatggaacgcatggatcccatcggttgctccgtgtcaccaagcccatgttcctcgtaccaaccaagtccgcgggcgtcatacaatgcaagccctacctcgtcctcattccccagcggcgcatcctcccccttcctccctcccaacgaaatgcccaacggtatcgacggcaatccaatcctaccatggctcaagacattctccaacggcactccatcaaagaaacacccgctcctcccaccgctgctgatccacggcggctcaatcagcgctccggtaacccctcctctaagctcgccgtctgcccggacgccccggatgaagacggactgggacgaagcggccgtccagcctccatggcacggtgcaagcagccccacaatagtgaactccacgccgcccagccccggccggcccatcgcgcctgacccggcatggcttgccggcatccagatctcgtccaccagtccaaactccccgaccttcagcctcgtctccaccaacccgttcggcgtcttcaaggagtccatcccggtcggcggcggcggcgactcgtcgatgaggatgtgcacgccggggcagagcggcgcctgctcccccgcgatcccgggcatgccacggcactcggacgtccacatgatggatgtggtctcggacgagttcgcgttcgggagcagcaccaacggcgcgcagcaggccgccgggctggtgagggcttgggagggcgagcggatccacgaggactctgggtccgacgacctggagctgacgctgaagctctagggcaggcgtccgggcgctgatggttaacgtagctaacgtgaggagttgctggtggtggtgtttttttttagtgtacctgttattgttctctagttgctgatggaagccggatcatgtggcctcggttcggttagattcacatctgtggtggtggtaattgtggtgttattttaactactcgaattgtagcccggcgggagctgtgttcggctagctgttggactccacttggctggtgcattaagctccttgtttgctgttgttgtgacaagtgtaaattaatgtcagaaaaccattcgg

SEQ ID NO: 34072 - protein, 401 aa, Zea mays subsp. mays
HHHPHLLRPPAPPLLPSPPLPTQTSARGDPDPVSRTPIPSSPREPSCERCSRGRPMASGGGGGLGAAGAGGRMPTWRERENNKRRERRRRAIAAKIFAGLRAHGGYKLPKHCDNNEVLKALCNEAGWVVEPDGTTYRQGSKPMERMDPIGCSVSPSPCSSYQPSPRASYNASPTSSSFPSGASSPFLPPNEMPNGIDGNPILPWLKTFSNGTPSKKHPLLPPLLIHGGSISAPVTPPLSSPSARTPRMKTDWDEAAVQPPWHGASSPTIVNSTPPSPGRPIAPDPAWLAGIQISSTSPNSPTFSLVSTNPFGVFKESIPVGGGGDSSMRMCTPGQSGACSPAIPGMPRHSDVHMMDVVSDEFAFGSSTNGAQQAAGLVRAWEGERIHEDSGSDDLELTLKL

SEQ ID NO: 34073 - protein, 346 aa, Zea mays subsp. mays
MASGGGGGLGAAGAGGRMPTWRERENNKRRERRRRAIAAKIFAGLRAHGGYKLPKHCDNNEVLKALCNEAGWVVEPDGTTYRQGSKPMERMDPIGCSVSPSPCSSYQPSPRASYNASPTSSSFPSGASSPFLPPNEMPNGIDGNPILPWLKTFSNGTPSKKHPLLPPLLIHGGSISAPVTPPLSSPSARTPRMKTDWDEAAVQPPWHGASSPTIVNSTPPSPGRPIAPDPAWLAGIQISSTSPNSPTFSLVSTNPFGVFKESIPVGGGGDSSMRMCTPGQSGACSPAIPGMPRHSDVHMMDVVSDEFAFGSSTNGAQQAAGLVRAWEGERIHEDSGSDDLELTLKL

SEQ ID NO: 34074 - protein, 329 aa, Zea mays subsp. mays
MPTWRERENNKRRERRRRAIAAKIFAGLRAHGGYKLPKHCDNNEVLKALCNEAGWVVEPDGTTYRQGSKPMERMDPIGCSVSPSPCSSYQPSPRASYNASPTSSSFPSGASSPFLPPNEMPNGIDGNPILPWLKTFSNGTPSKKHPLLPPLLIHGGSISAPVTPPLSSPSARTPRMKTDWDEAAVQPPWHGASSPTIVNSTPPSPGRPIAPDPAWLAGIQISSTSPNSPTFSLVSTNPFGVFKESIPVGGGGDSSMRMCTPGQSGACSPAIPGMPRHSDVHMMDVVSDEFAFGSSTNGAQQAAGLVRAWEGERIHEDSGSDDLELTLKL

SEQ ID NO: 34075 - DNA, 1750 bp, Zea mays subsp. mays
actttcatcgggcgcggcgtgccccctcgcctccaaggctccaacgcatcaatcaatagagcgagcgcgctgtggcatggagcacaaggatgggggcacagcttctgctggtggtctgcccgccggaagcagcttgtgctcgggctcgccgttgctcgacgcgccgatcctccgccgcctctacgccgggcaaatccttgccagatggggcgcgaggatgtgggagttttctgttgcgctgtatatgattcgcatttggcctgactcgcttctctttgcggccatctacggcgtcgtggagacatcctctctcgtggtgctcggtcccgtggtggggacgctcgttggaagggccacataccttcaggttttgggcatctggctgctgtcgcaaagcatatccttgattgtcgctggaacctcggtgaccaccctgctcatgtatgccaacctgagagccacaagcttcccggcattcatggcgctggtcgccgttaccaacgtctccggcgctctagctgccctctcagctctcgccggcaccatactgatcgagagagaatgggtggtggtgatctcgagcgggcatcctccgtcggtgcggacggggatcaactcggtggtccggcggatcgacctggcgctgctcgctgctggcccccgtgctgtcggctctcgtcatcagcctcgcgtcgactcaggcctctgcggctgtgctggcgctgtccaccgccgcctcggcggggctgcagtactgcctcttcgtctccgtctacaacggcgtgcccgccctcgccgcgccaagacagcccagagcttcggacgcagagcgcccgccgccagtaccgatgaccgtcgcgccggccgaggccgagccgacgcaggcgttggattggagggcgaggctggcagataagctctccgtcgcgtccggttgggagtcgtgggtggtgtacgcgaggcaggacgtcgcgcttcccggggtggcgctcgcattcctctacttcacagttctcagctttggtacgctgatgaccgcgacacttgactggaaaggcatacctgcatacgtgatcagtttggcgcggggcttcagcgccattgttgggatcggagcgaccctgctgtacccgctcgtgcactcccgggtgtccacgctccggacggggctgtggtccatctggatgcagtggtgctgcctgctgctgtgcgtggcctccgtctgggcggccaccggcgtggcgtccgcgtggatgctcatggccggcgtggcggcctcgcgcctgggcctctggacgttcgacctcgccgtgatgcagctgatgcaggacggcgtgcccgaccacgagcggtgcgtcgtgagcggtgtgcagaatgcgctgcagtccgtgttcgacctgctcacctacgtcgtggccatcgtcatctccgacccaaaggatttcagcaagatgatcgtgctctccttctcccttgttacctgcgccgcagtcatgtacacggtgcacgcctaccgagcacagaaagcagcgtgcacctcttccacctcgacatgacatgatcctggaaaagaagtgcgagactgcaaggtgtacggatgaaaactgagcggcttatgtatgattgattgcctccatggttttatcctagaccactgtatgcgttaattttatctgaacctatgtttggttacttgtatgtggagacacagacttagagtggtaatggatcacgatccgaataccgcttc

SEQ ID NO: 34076 - protein, 304 aa, Zea mays subsp. mays
LSSGAACPLASKAPTHQSIERARCGMEHKDGGTASAGGLPAGSSLCSGSPLLDAPILRRLYAGQILARWGARMWEFSVALYMIRIWPDSLLFAAIYGVVETSSLVVLGPVVGTLVGRATYLQVLGIWLLSQSISLIVAGTSVTTLLMYANLRATSFPAFMALVAVTNVSGALAALSALAGTILIEREWVVVISSGHPPSVRTGINSVVRRIDLALLAAGPRAVGSRHQPRVDSGLCGCAGAVHRRLGGAAVLPLRLRLQRRARPRRAKTAQSFGRRAPAASTDDRRAGRGRADAGVGLEGEAGR

SEQ ID NO: 34077 - protein, 279 aa, Zea mays subsp. mays
MEHKDGGTASAGGLPAGSSLCSGSPLLDAPILRRLYAGQILARWGARMWEFSVALYMIRIWPDSLLFAAIYGVVETSSLVVLGPVVGTLVGRATYLQVLGIWLLSQSISLIVAGTSVTTLLMYANLRATSFPAFMALVAVTNVSGALAALSALAGTILIEREWVVVISSGHPPSVRTGINSVVRRIDLALLAAGPRAVGSRHQPRVDSGLCGCAGAVHRRLGGAAVLPLRLRLQRRARPRRAKTAQSFGRRAPAASTDDRRAGRGRADAGVGLEGEAGR

SEQ ID NO: 34078 - protein, 235 aa, Zea mays subsp. mays
MTVAPAEAEPTQALDWRARLADKLSVASGWESWVVYARQDVALPGVALAFLYFTVLSFGTLMTATLDWKGIPAYVISLARGFSAIVGIGATLLYPLVHSRVSTLRTGLWSIWMQWCCLLLCVASVWAATGVASAWMLMAGVAASRLGLWTFDLAVMQLMQDGVPDHERCVVSGVQNALQSVFDLLTYVVAIVISDPKDFSKMIVLSFSLVTCAAVMYTVHAYRAQKAACTSSTST

SEQ ID NO: 34079 - DNA, 1075 bp, Zea mays subsp. mays
ctatttgcggaaaggaacttctgttagtgctggccaaacatcaagttcatcaaatggaacaactgcaggagaaaggcctctcctacgtgagaaattgtcaaagggaaaggatggctttgttgctgctgatttcacagctacagaagctcattgtgctgtaccctcgactccaatactttggttccagcaggcagatgagtgcatgcacctatgcatttatcagcacaaaagtctcactatcttactgctggttcctgcttcctcagtgataaatggagaagagggcattactcatgtgaagaaggcgatccttgaaaatgcatcacagaagattgtcactgttgagcagaaattgacacgaggatggggaggagaaaatgcgtatcatgttagtggatatcgttatttgcttgttgatccggagagaagagtatcaagagcctccccacctgggaaagtcaccaccctagcaaaggattctctacttgccctcaacatgctaagacaagaagtagatctagagaagtcaagatacaagagaggcgacccttgtcatgataaggatttcgaagtatgtatcagaacaaaaaacaatgcgtgggttattgctaaaatcagtcaaggaagggagctttacatggctctagagaagggtggtgaaacgcttctatatgcatccacagctgtagagaaattcagcaacaggtactgtgagggagcattctctacagattagaagcaccagagggagatcttagcttttccatacattacctattatgtacatcctgttttttttcccagctgtatcgttgccccctattgttgagagactcggaccactctttgcgaagggaataaggagttcgtatcagttgtacagctgctctgctgtcgtgtgctatctgcaaaagaatagcctagtctgggaataacgcagagcgggatagagtttgtttgttcacttatgcccttccttaacgcagagcattgtgcgtgttttcattttgctgtaacagccggcgatttacctgcagactgggaaagtaacttagcgtttaatttggtattctgc

SEQ ID NO: 34080 - protein, 244 aa, Zea mays subsp. mays
YLRKGTSVSAGQTSSSSNGTTAGERPLLREKLSKGKDGFVAADFTATEAHCAVPSTPILWFQQADECMHLCIYQHKSLTILLLVPASSVINGEEGITHVKKAILENASQKIVTVEQKLTRGWGGENAYHVSGYRYLLVDPERRVSRASPPGKVTTLAKDSLLALNMLRQEVDLEKSRYKRGDPCHDKDFEVCIRTKNNAWVIAKISQGRELYMALEKGGETLLYASTAVEKFSNRYCEGAFSTD

SEQ ID NO: 34081 - protein, 177 aa, Zea mays subsp. mays
MHLCIYQHKSLTILLLVPASSVINGEEGITHVKKAILENASQKIVTVEQKLTRGWGGENAYHVSGYRYLLVDPERRVSRASPPGKVTTLAKDSLLALNMLRQEVDLEKSRYKRGDPCHDKDFEVCIRTKNNAWVIAKISQGRELYMALEKGGETLLYASTAVEKFSNRYCEGAFSTD

SEQ ID NO: 34082 - DNA, 1077 bp, Zea mays subsp. mays
cccccactgtcgccgctcctcgtcttccactctctccactttgctgcttcttctcccttattaatgctcgtgggctcctatgatccgccctccgccgcgggtttcttgatccatccccggcccaaggaagcggaccccggcgaacactcctgacagattcgcccgtccgccgctccctcgattcggtcctccccgtcagcggcaggtgtttaggacctctgcagcatagcatctggtccgtccctggagatgtccggcgtacaggagcagttcgagatcaagttccggctgccggacggcaccgacatcggacccaggcggttcccgccggcgtccaccgtcgccacgctcaaggagaccatcatcgcccagtggcccaaagataaggaaaaaggtcctaggactgtgaatgatcttaagcttattaatgctgggaagatactggagaacaacaaaaccctatcagaatgcaaaagcccgatttgcgacttctctgcgatgacaacaatgcatgtcgtcatccgcgcaccgacttcaagcaaacagtctgataaaagagcagaaaagaaagcgaaaaatttcaggtgcggttgtgccattatgtgacagcattgtgaatagtagcagagagaacgtggccatttcagttttctccctttttttttcctgctctcgctggagtgttgtattatgttcgaggcgctttctcctttcattttgttttgaagtaccgcgtgcaagcttcaacagctgtcaagtgccctttaatcgtgagtgtgcatcaagcacagaattagaaggcggttggctgctaattacccttaatcttgagtttgtcaagcacacaatttgaaggcagtcattagcgtcgaaactacgatgtccaccctatccaatcttccatggtttcacgcttctcttctatatttatgctaccctgggtgacaaatgtttaatgtatgccttccatgctagatgaactttttggaacgccattctaactcatcaatttctattctgtaaaactaaaaccagttgtaatctgccatagatcagtatgcttgctatatgggagtc

SEQ ID NO: 34083 - protein, 118 aa, Zea mays subsp. mays
MSGVQEQFEIKFRLPDGTDIGPRRFPPASTVATLKETIIAQWPKDKEKGPRTVNDLKLINAGKILENNKTLSECKSPICDFSAMTTMHVVIRAPTSSKQSDKRAEKKAKNFRCGCAIM

SEQ ID NO: 34084 - protein, 113 aa, Zea mays subsp. mays
MSSSAHRLQANSLIKEQKRKRKISGAVVPLCDSIVNSSRENVAISVFSLFFSCSRWSVVLCSRRFLLSFCFEVPRASFNSCQVPFNRECASSTELEGGWLLITLNLEFVKHTI

SEQ ID NO: 34085 - DNA, 1370 bp, Zea mays subsp. mays
atcagtcatcgtcagaatttcctcttttttttccttccccaacttctccctgcatcggccgatgctgcggcgactgaccacagctttcgaccctctccagtggagggaacggggttagcgagcggcctccgctgcgacggcaacgcaacggcgtgggagggccatggcggcccccgcgctcgccttccccatgttgctggctgcctcactgatctccgtcgccgctcctgcgctggctcgaagcccatcttgccctgatggttggcaagtcggccctgttcagaacagatgcttcatgtacatatcagcctccctttcttgggatagatccgaggctgtctgccataactacagcgggcatctcgctgcagtatcatcaatccaggagctaaacttcgtgaagtctctctgtggatcatcatccacaggatgctgggttggagggcatcactacagcactagtaccggtaacggttggaaatggtctgacgattcctctgtttggaatgagactgtcttccttggtgagccattgcctgccaactgcagtgatcctgcatgtaaagtagccaccagcaacgatttgtgtactttggtcaccaatggtcagccttcaactattactgaaaaaaggtgcggtgagtcccatggtctcatctgcaggatgaaccacgtggacagatgctaccatgatcattgtcacaaggagtatttcatatccattattgctgtgagtggtttcatcctggcaaccactctagccgttgtggtttggctgcttgtctacaggcgaagcaagaaacgaagaagatcgcgagaagtgttaagtgcctcagctgctgcactggtagcaccgcaatggaaagtattcaccagtgaagaacttagatcgatcacaaagaacttcagcgagggtaaccggcttcccggcaacgcaaagacaggcggaacctatagtggaatcttaccggatggatccaaagtagcaatcaagaggcttaagagatccagcctgcaaaggaaaaaggacttctactctgagatccggagagttgcaaagctatatcaccctaatttggttgctgtaaaaggatgttgctatgatcatggtgaccgttttattgtctatgagtttgtcgcgaatggtcctttggatgtgtggctgcatcatattcccagaggagggcggagccttgattgggcaatgagaatgagagctgccacaactcttgctcagggaattgcgttcttgcacgacaaggtaaagccgcaggtggtgcaccgtgacatccgtgcaagcaacgtcctactcgacgaggaattcgggtcgcatctgatgggggtggggctttcaaagttcgtgccgtggg

SEQ ID NO: 34086 - protein, 402 aa, Zea mays subsp. mays
MAAPALAFPMLLAASLISVAAPALARSPSCPDGWQVGPVQNRCFMYISASLSWDRSEAVCHNYSGHLAAVSSIQELNFVKSLCGSSSTGCWVGGHHYSTSTGNGWKWSDDSSVWNETVFLGEPLPANCSDPACKVATSNDLCTLVTNGQPSTITEKRCGESHGLICRMNHVDRCYHDHCHKEYFISIIAVSGFILATTLAVVVWLLVYRRSKKRRRSREVLSASAAALVAPQWKVFTSEELRSITKNFSEGNRLPGNAKTGGTYSGILPDGSKVAIKRLKRSSLQRKKDFYSEIRRVAKLYHPNLVAVKGCCYDHGDRFIVYEFVANGPLDVWLHHIPRGGRSLDWAMRMRAATTLAQGIAFLHDKVKPQVVHRDIRASNVLLDEEFGSHLMGVGLSKFVPW

SEQ ID NO: 34087 - protein, 393 aa, Zea mays subsp. mays
MLLAASLISVAAPALARSPSCPDGWQVGPVQNRCFMYISASLSWDRSEAVCHNYSGHLAAVSSIQELNFVKSLCGSSSTGCWVGGHHYSTSTGNGWKWSDDSSVWNETVFLGEPLPANCSDPACKVATSNDLCTLVTNGQPSTITEKRCGESHGLICRMNHVDRCYHDHCHKEYFISIIAVSGFILATTLAVVVWLLVYRRSKKRRRSREVLSASAAALVAPQWKVFTSEELRSITKNFSEGNRLPGNAKTGGTYSGILPDGSKVAIKRLKRSSLQRKKDFYSEIRRVAKLYHPNLVAVKGCCYDHGDRFIVYEFVANGPLDVWLHHIPRGGRSLDWAMRMRAATTLAQGIAFLHDKVKPQVVHRDIRASNVLLDEEFGSHLMGVGLSKFVPW

SEQ ID NO: 34088 - protein, 358 aa, Zea mays subsp. mays
MYISASLSWDRSEAVCHNYSGHLAAVSSIQELNFVKSLCGSSSTGCWVGGHHYSTSTGNGWKWSDDSSVWNETVFLGEPLPANCSDPACKVATSNDLCTLVTNGQPSTITEKRCGESHGLICRMNHVDRCYHDHCHKEYFISIIAVSGFILATTLAVVVWLLVYRRSKKRRRSREVLSASAAALVAPQWKVFTSEELRSITKNFSEGNRLPGNAKTGGTYSGILPDGSKVAIKRLKRSSLQRKKDFYSEIRRVAKLYHPNLVAVKGCCYDHGDRFIVYEFVANGPLDVWLHHIPRGGRSLDWAMRMRAATTLAQGIAFLHDKVKPQVVHRDIRASNVLLDEEFGSHLMGVGLSKFVPW

SEQ ID NO: 34089 - DNA, 735 bp, Zea mays subsp. mays
  misc_feature (386)..(386): n is a, c, g, or t
  misc_feature (412)..(413): n is a, c, g, or t
  misc_feature (443)..(444): n is a, c, g, or t
  misc_feature (485)..(486): n is a, c, g, or t
  misc_feature (507)..(508): n is a, c, g, or t
  misc_feature (533)..(533): n is a, c, g, or t
  misc_feature (732)..(732): n is a, c, g, or t
aaacggaagcgaaacagggcccgtctcttccaccactccgcagaggcgcagactaccgtctcatcctactactctagcccagtctcacgatccagcactcagtcactagcgcttgtcgtcgccagtacaacaacggcatgggtgagggtgacgacgaccggcgggacgagttgttgggcgcggggcgggaccatgaaccagagccggcggacgcggaggaggccaagaaacccgcacccggcgaggcggaggccggcaacggcgccggcgcggaggcggcgacctgcgactactgcgggaccgcggcggcggcggtctactgccgcgccgactccgccaggctctgcctgccgtgcgaccgcctcgtgcacggcgccaacggggtntgctcccgccacgcccgcgccccgcnntgcgccggctgctgcgccgccggggccgtnntccgccgcgcctcgacctccgccttcctctgctccaactgnnacttcgggaggcaccgggatnncggtgacccgccgctccacgaccgntgcgccgtgcagccctattccgggtgccctccggcgagcgacctcgccgcgctcctcgcggtgcccctcttcgacaagccggccgccgaagatggtgcctggtggaacatctgggaggagccccaggtgctgagtttggaggatctcatcgtgcccaccaccccttgccatggattcgaacccctcctaacgccgccgncgc

SEQ ID NO: 34090 - protein, 221 aa, Zea mays subsp. mays
  misc_feature (129)..(129): Xaa can be any naturally occurring amino acid
  misc_feature (138)..(138): Xaa can be any naturally occurring amino acid
  misc_feature (148)..(148): Xaa can be any naturally occurring amino acid
  misc_feature (162)..(162): Xaa can be any naturally occurring amino acid
  misc_feature (169)..(170): Xaa can be any naturally occurring amino acid
  misc_feature (178)..(178): Xaa can be any naturally occurring amino acid
KRKRNRARLFHHSAEAQTTVSSYYSSPVSRSSTQSLALVVASTTTAWVRVTTTGGTSCWARGGTMNQSRRTRRRPRNPHPARRRPATAPARRRRPATTAGPRRRRSTAAPTPPGSACRATASCTAPTGXAPATPAPRXAPAAAPPGPXSAAPRPPPSSAPTXTSGGTGXXVTRRSTTXAPCSPIPGALRRATSPRSSRCPSSTSRPPKMVPGGTSGRSPRC

SEQ ID NO: 34091 - protein, 198 aa, Zea mays subsp. mays
  misc_feature (83)..(83): Xaa can be any naturally occurring amino acid
  misc_feature (92)..(92): Xaa can be any naturally occurring amino acid
  misc_feature (102)..(103): Xaa can be any naturally occurring amino acid
  misc_feature (116)..(117): Xaa can be any naturally occurring amino acid
  misc_feature (124)..(124): Xaa can be any naturally occurring amino acid
  misc_feature (132)..(132): Xaa can be any naturally occurring amino acid
MGEGDDDRRDELLGAGRDHEPEPADAEEAKKPAPGEAEAGNGAGAEAATCDYCGTAAAAVYCRADSARLCLPCDRLVHGANGXCSRHARAPXCAGCCAAGAXXRRASTSAFLCSNXXFGRHRDXGDPPLHDXCAVQPYSGCPPASDLAALLAVPLFDKPAAEDGAWWNIWEEPQVLSLEDLIVPTTPCHGFEPLLTPP

SEQ ID NO: 34092 - protein, 157 aa, Zea mays subsp. mays
  misc_feature (65)..(65): Xaa can be any naturally occurring amino acid
  misc_feature (74)..(74): Xaa can be any naturally occurring amino acid
  misc_feature (84)..(84): Xaa can be any naturally occurring amino acid
  misc_feature (98)..(98): Xaa can be any naturally occurring amino acid
  misc_feature (105)..(106): Xaa can be any naturally occurring amino acid
  misc_feature (114)..(114): Xaa can be any naturally occurring amino acid
MNQSRRTRRRPRNPHPARRRPATAPARRRRPATTAGPRRRRSTAAPTPPGSACRATASCTAPTGXAPATPAPRXAPAAAPPGPXSAAPRPPPSSAPTXTSGGTGXXVTRRSTTXAPCSPIPGALRRATSPRSSRCPSSTSRPPKMVPGGTSGRSPRC

SEQ ID NO: 34093 - DNA, 718 bp, Zea mays subsp. mays
  misc_feature (575)..(575): n is a, c, g, or t
  misc_feature (597)..(597): n is a, c, g, or t
  misc_feature (688)..(688): n is a, c, g, or t
aggatttttgttacagatagaggcactgatatccttgataattgcttggctaatctccatatcaactctggtatgctaaggttcgatgaagctaaagtctgtgtacgagaactggactggaaaatggcatggcctccacctgtgggtacatatgacccttctgatccaagtcggtatttatggtctgcaagtgaagttgaggaggctgagaaagcaacagtcctgtttgctgcagatgttatttacagtgatgatctcacaaatttgttcttcaacacggtgaagaaattgatgtcggtcggtgctaagaaggtgctatacttggccctggagaagagatacaacttcagtgtagacgaactagatgtcgtggccaatggttacacgcacttccgaagtttcttcacagcccaagatgagcacggtgatccgagcaacagatctggaccaggttttgttggaaagcagatagaccctgcagagattcctcagtacatcagagagtatgagaggggcaaggatttagagatgtggatgatcatgtacagtccggaggagaaacagcacagtaactntacaaaaaccgtcttttccttntaggaggacgaagagagcaatgagtgcttggtgcaaaaagacgaattccgttaaaaagacgggaccccctcccacgggcatccatactatnttgacaaaaatgaaaactgctgcttggtgc

SEQ ID NO: 34094 - protein, 199 aa, Zea mays subsp. mays
  misc_feature (192)..(192): Xaa can be any naturally occurring amino acid
  misc_feature (199)..(199): Xaa can be any naturally occurring amino acid
RIFVTDRGTDILDNCLANLHINSGMLRFDEAKVCVRELDWKMAWPPPVGTYDPSDPSRYLWSASEVEEAEKATVLFAADVIYSDDLTNLFFNTVKKLMSVGAKKVLYLALEKRYNFSVDELDVVANGYTHFRSFFTAQDEHGDPSNRSGPGFVGKQIDPAEIPQYIREYERGKDLEMWMIMYSPEEKQHSNXTKTVFSX

SEQ ID NO: 34095 - protein, 175 aa, Zea mays subsp. mays
  misc_feature (168)..(168): Xaa can be any naturally occurring amino acid
  misc_feature (175)..(175): Xaa can be any naturally occurring amino acid
MLRFDEAKVCVRELDWKMAWPPPVGTYDPSDPSRYLWSASEVEEAEKATVLFAADVIYSDDLTNLFFNTVKKLMSVGAKKVLYLALEKRYNFSVDELDVVANGYTHFRSFFTAQDEHGDPSNRSGPGFVGKQIDPAEIPQYIREYERGKDLEMWMIMYSPEEKQHSNXTKTVFSX

SEQ ID NO: 34096 - protein, 158 aa, Zea mays subsp. mays
  misc_feature (151)..(151): Xaa can be any naturally occurring amino acid
  misc_feature (158)..(158): Xaa can be any naturally occurring amino acid
MAWPPPVGTYDPSDPSRYLWSASEVEEAEKATVLFAADVIYSDDLTNLFFNTVKKLMSVGAKKVLYLALEKRYNFSVDELDVVANGYTHFRSFFTAQDEHGDPSNRSGPGFVGKQIDPAEIPQYIREYERGKDLEMWMIMYSPEEKQHSNXTKTVFSX

SEQ ID NO: 34097 - DNA, 1633 bp, Zea mays subsp. mays
gcacgagaccattacctagaacatcctaatcgaaaaagctgccagcctagctgccaacgattgtcgtaagtcttggagaaactgcgcatcagtttgacctagctgccagcctgatactactcacgaactggcatggcatggtaggtgggttcgggctttcaagcatggcttccacacttttcctctagctactagctcctcccgcgcgcgacggccatggccagcgagctgctgtcgccgctcatcccgcaccagcagcgtcgacgcgctctcgccgtcgacgtggccgcgcccctgctcgcgctcctcctggccgctgtcgccttctcccgctcaccggtggcggcactggtcagctcttcgaggctcgttgacctgacactcctcgccggcgctcaggggaagggagcggtgtgcttggatgggaccccgcctggttaccaccttcggagaggattcggttccggagctcacaactggctcgtcttccttgagggaggaggttggtgcaacaccacgcagagctgctccgagcgcaaaatgaccaacttcggttcatctaagtatatgggagcagtaaacttcactgggatactcagcaatgatcacacagaaaatcctgatttctacaactggaatacagttgtcataaggtactgcgacggagcatcatttgctggggatgcagagggagaagatctggatggaaccaaacttttcttcagaggattgcgtatctgggaagcagttgtagatgaactcatgggaaaaggaatggacgctgctaaacaagccttgcttacaggctgttctgctggttctctagctgcgctactgcactgtgataatttccatggacggtttcctcatgaagtttcagttaaatgcctttctgatgctggattttttattgacgagaaggatttatctggagaaagatccatgcggtcgctcatcagtggagtagttcaccttcagaatgttaaagaagttttacccaatgactgcctccaaaagaaggatccaacagaggcagtgtttctttcctgctgaactgattaagggcatcaccacccccacgtttattctgaactccgattacgattcttggcagatacgaaacattctcgcaccaaatggatcctatcctggccaggaatggtctagttgcaaagcagatatccggaactgcagttgcgcacaaattgatgtactgcatggattcaagaagaaattagtcagtgaattgaaggttgccgaagataacaaggactggggcctgttcattgattcatgctttacccactgtcaaacaccattcgatatcacatggaattcaccgatctcaccaaggctcggcaacaagtctatctcagaggccgttggggattggtatttcgatagaaggcaaaacgcgaaacagattgactgcgagtacccatgcaaccccacatgcagcagtcttctgcctactgcttgattcgcaaagggctgcactgagatcaccaggcttttctcattttcaaattagttttgctgaggattcaaaaagggagctttgccttattggtaaaacctgcaattgactaaacacgacttgcagtagttgtgcttccatcaaaagcaatatgtc

SEQ ID NO: 34098 - protein, 278 aa, Zea mays subsp. mays
MASELLSPLIPHQQRRRALAVDVAAPLLALLLAAVAFSRSPVAALVSSSRLVDLTLLAGAQGKGAVCLDGTPPGYHLRRGFGSGAHNWLVFLEGGGWCNTTQSCSERKMTNFGSSKYMGAVNFTGILSNDHTENPDFYNWNTVVIRYCDGASFAGDAEGEDLDGTKLFFRGLRIWEAVVDELMGKGMDAAKQALLTGCSAGSLAALLHCDNFHGRFPHEVSVKCLSDAGFFIDEKDLSGERSMRSLISGVVHLQNVKEVLPNDCLQKKDPTEAVFLSC

SEQ ID NO: 34099 - protein, 170 aa, Zea mays subsp. mays
MTNFGSSKYMGAVNFTGILSNDHTENPDFYNWNTVVIRYCDGASFAGDAEGEDLDGTKLFFRGLRIWEAVVDELMGKGMDAAKQALLTGCSAGSLAALLHCDNFHGRFPHEVSVKCLSDAGFFIDEKDLSGERSMRSLISGVVHLQNVKEVLPNDCLQKKDPTEAVFLSC

SEQ ID NO: 34100 - protein, 166 aa, Zea mays subsp. mays
MLKKFYPMTASKRRIQQRQCFFPAELIKGITTPTFILNSDYDSWQIRNILAPNGSYPGQEWSSCKADIRNCSCAQIDVLHGFKKKLVSELKVAEDNKDWGLFIDSCFTHCQTPFDITWNSPISPRLGNKSISEAVGDWYFDRRQNAKQIDCEYPCNPTCSSLLPTA

SEQ ID NO: 34101 - DNA, 1828 bp, Zea mays subsp. mays
gcacgagaccattacctagaacatcctaatcgaaaaaaaccggagcggcggcaccatttcgttaccatggagaacctggcagggcagcagttcgtttatgaggtgacgagtctacgagcattgtttctgctgctcctcctccctcccttcatcttcctcatcatgcgcaacgcgcgagcaacaacactaatgttcgataccaagaggacaaggggccaccggcagcctgcagatcggcagcagagcctcccgccgtcgcctccggcagtgcctgtcctcggccacctgcacctcgtcggctctctcccgcacgtctccctccgcagcctcgccaggacgcttggcgcggacctcatgctgctccgcctgggctccacgccggtgctggtcgtgtcgtcgtccagcgccgccgaggccgtgctgcgcacgcacgaccacgtgttcgcgtcgcggccgcacgccctggtctccgaggtcgtcctgtacggtccgtccgacgtcgggttcgcgccgcacggcgactgctggcggcccggggcggaagctcatcaccacgcaccttctcagcgtcaacagggtgcagtcgttccgccacgcccgggaagaagaggtgagcgtggtgatgggccggatcgccgaggcggcggccgctggtgcggcggtggacgtgggcgagctgctcggctcgttcacgaacgacctagcgtgccgcgccgtgatgggcaagtccttccggagcgagggtcgcaacaagctgttccgggagcttgtcctcgacaccaccaagctgctggtcggcttcaacgtcgaggacttcttccccttcctggctcgcttcggcgtgctcagcaagctggtccgcgccaagtccgagagactgaggaggaggtgggacgagctactcgataggctgatcgaggatcgtgagagcaagtatgaggcggcggcggcgagtgatctcaaggtcaaggacgatgatgacgataacttcatacatgtcttgctctccgttcaacaggagtacggccatattaccagggagcaaatgaaagctctcctgcaggacgtgtttatcggggggatagactccacatcttcgctgctcgagttcaccatggctgagctcatgcggaaaccacgagtgatgaacaagctccaagccgaggtaaggagcagcacgcccgaggggcatgatggagtcgtcggcgaagatagcctggagcacatggcctacctgagggccgtgacaaaagagtccctccggatccataacgtgacgccgctcctggccccgcacctgtccatggatagctgcaccatcgatggctacacggtccccgccggggtgcaggtcctgatcaactcttgggccatcggcagggacacgcgctactggggcgacgacgctgaggagttcgtccctgagaggttcatggacggcggcagcgccgttcatgtcagcttcaaggggagtgacttcgagttcctgccattcgggtctggacgaaggatgtgcgccggggtgaacttcgcgatggccacggtagagctaatgttggcgaacctcgtgcatcgttttgactgggatttaccaccggggcaggagggtcgcgacattgatgtgtcgcaggtgttcggactagtagtccgccggaaaaagaaacttctcttggttccaaaattacgtgtatactagcatccccctccccgcacccaagatatactgggctgttgcatatatgtatgtactgcaataaaggttgcctatatgtaagcttacgacattacttgtactgggtatatgatgcaataatgttattagaaattt

SEQ ID NO: 34102 - protein, 357 aa, Zea mays subsp. mays
MGRIAEAAAAGAAVDVGELLGSFTNDLACRAVMGKSFRSEGRNKLFRELVLDTTKLLVGFNVEDFFPFLARFGVLSKLVRAKSERLRRRWDELLDRLIEDRESKYEAAAASDLKVKDDDDDNFIHVLLSVQQEYGHITREQMKALLQDVFIGGIDSTSSLLEFTMAELMRKPRVMNKLQAEVRSSTPEGHDGVVGEDSLEHMAYLRAVTKESLRIHNVTPLLAPHLSMDSCTIDGYTVPAGVQVLINSWAIGRDTRYWGDDAEEFVPERFMDGGSAVHVSFKGSDFEFLPFGSGRRMCAGVNFAMATVELMLANLVHRFDWDLPPGQEGRDIDVSQVFGLVVRRKKKLLLVPKLRVY

SEQ ID NO: 34103 - protein, 325 aa, Zea mays subsp. mays
MGKSFRSEGRNKLFRELVLDTTKLLVGFNVEDFFPFLARFGVLSKLVRAKSERLRRRWDELLDRLIEDRESKYEAAAASDLKVKDDDDDNFIHVLLSVQQEYGHITREQMKALLQDVFIGGIDSTSSLLEFTMAELMRKPRVMNKLQAEVRSSTPEGHDGVVGEDSLEHMAYLRAVTKESLRIHNVTPLLAPHLSMDSCTIDGYTVPAGVQVLINSWAIGRDTRYWGDDAEEFVPERFMDGGSAVHVSFKGSDFEFLPFGSGRRMCAGVNFAMATVELMLANLVHRFDWDLPPGQEGRDIDVSQVFGLVVRRKKKLLLVPKLRVY

SEQ ID NO: 34104 - protein, 302 aa, Zea mays subsp. mays
ARDHYLEHPNRKKPERRHHFVTMENLAGQQFVYEVTSLRALFLLLLLPPFIFLIMRNARATTLMFDTKRTRGHRQPADRQQSLPPSPPAVPVLGHLHLVGSLPHVSLRSLARTLGADLMLLRLGSTPVLVVSSSSAAEAVLRTHDHVFASRPHALVSEVVLYGPSDVGFAPHGDCWRPGAEAHHHAPSQRQQGAVVPPRPGRRGERGDGPDRRGGGRWCGGGRGRAARLVHERPSVPRRDGQVLPERGSQQAVPGACPRHHQAAGRLQRRGLLPLPGSLRRAQQAGPRQVRETEEEVGRATR

SEQ ID NO: 34105 - DNA, 951 bp, Zea mays subsp. mays
taatcgaaaatcctatatgttcaaggaactgcatttatggggatgatgactgggttatagtcaagaaatagcgtattaccatattaattcctccacaatcacctgttgctgcaaatcctcaatcaaatatgcccacaataagttctaagcagtcttgcataactaggagcaagagagactgggatgctgccagaaaaaagcaccccgagaagtttgcagccaagaaatatttggactcccctccagtgcatggcagtataatccatgaggatgttccatttatgacaggtgataaatcacaacacggttctgctatccctgttgcaaaatcagaatggactaaagacccggatcatgctgttcgagaattgtttcatcaagaaactgggaaggcgacaagtttctttcgaaacatcgttcagccaaggacgccacttgtgtcttcacctgttgcggataagataattcgagcccagcttcttgagaaacaggttgctgggtttggcgggctgaggaattggcttttcggttgtggtcttggatggtttgtcaacatactggacagtgaaaagctggggacgtatcagcttgcctctcttactatggaacagctgaaagatatgggtcttgttgctgtaggtccacggaggaaactgatccacgctatcgacagtttatgcggcccgcaccatgctgagatgctttcttgatcccttgcattttagttagctagaagaaaattattacaggaaggatgtctgaagtggtctctggttgtagccaactcggtgactgaagtgccagagcgcaactgaagtgccagagcgttttggaagtagaaaatgcgcaaagttttggaagtgaagctagcagtgaaagttttggaagtagaaaacgtacaactgctagagttcttccttctatgaaacacgttttcagattattacctcc

SEQ ID NO: 34106 - protein, 193 aa, Zea mays subsp. mays
MPTISSKQSCITRSKRDWDAARKKHPEKFAAKKYLDSPPVHGSIIHEDVPFMTGDKSQHGSAIPVAKSEWTKDPDHAVRELFHQETGKATSFFRNIVQPRTPLVSSPVADKIIRAQLLEKQVAGFGGLRNWLFGCGLGWFVNILDSEKLGTYQLASLTMEQLKDMGLVAVGPRRKLIHAIDSLCGPHHAEMLS

SEQ ID NO: 34107 - protein, 142 aa, Zea mays subsp. mays
MTGDKSQHGSAIPVAKSEWTKDPDHAVRELFHQETGKATSFFRNIVQPRTPLVSSPVADKIIRAQLLEKQVAGFGGLRNWLFGCGLGWFVNILDSEKLGTYQLASLTMEQLKDMGLVAVGPRRKLIHAIDSLCGPHHAEMLS

SEQ ID NO: 34108 - DNA, 984 bp, Zea mays subsp. mays
caacacagcacacattattcttcctccacccatctcttgagtcgcctggccggccgccgtcttggttcccctctagagctcaacagcagagcagctgtgtagcatagagcgaggtttaaccatcagcgcatggccatggcgatctcctctgctcttccgtgctccctcctcgtggcggccctgatgctcctcgcctccgtcgtccaagtgcaaggcatcacgaggcactacgacttcaatgtgaccatggcgaacgtgacacggctgtgcgccagcaagagcatcatcaccggtgaacgggcagttccccgggcccaagatcgtggcgagggaaggcgaccggctcgtcatccgcgtcaccaaccacgcccagcacaacatctcgctgcactggcacggcatccggcagctgcgcacggggtgggcggacgggccgggcgtacatcacgcagtgcccgatccagacggggcagagttacgtgtacaactacaccgtcgtggggcagcgcggcacgctgtggtggcacgcgcacatctcctggctgcgcgccaccgtctacgggcccctcgtcatcctgcccaagctcggcgtcccctacccgttcccggcgccctacaaggaggtccccgtcatcttcggtgagtggtggctggcggacacggaggtggtgatcaagcaggcgcttcagctcggcgctggccccaatgtctctgacgcccacaccatcaacggcctgccagggccgctctacaactgctctgccaaaggtacgttcctttgaagcgctgaggtctaaactcatacgggagtacagtgttgctgtgttttgaaggatgaggcgttagtttaatacgtatatattaccgctcgagagacatcatcatagtcgccttattaacagagaaggggaaaaaaggtgacgttcacgggcgctctgtttttccacttcccaagcatgtgtctagatcctcaaacgcaaccat

SEQ ID NO: 34109 - protein, 180 aa, Zea mays subsp. mays
MAMAISSALPCSLLVAALMLLASVVQVQGITRHYDFNVTMANVTRLCASKSIITGERAVPRAQDRGEGRRPARHPRHQPRPAQHLAALARHPAAAHGVGGRAGRTSRSARSRRGRVTCTTTPSWGSAARCGGTRTSPGCAPPSTGPSSSCPSSASPTRSRRPTRRSPSSSVSGGWRTRRW

SEQ ID NO: 34110 - protein, 178 aa, Zea mays subsp. mays
MAISSALPCSLLVAALMLLASVVQVQGITRHYDFNVTMANVTRLCASKSIITGERAVPRAQDRGEGRRPARHPRHQPRPAQHLAALARHPAAAHGVGGRAGRTSRSARSRRGRVTCTTTPSWGSAARCGGTRTSPGCAPPSTGPSSSCPSSASPTRSRRPTRRSPSSSVSGGWRTRRW

SEQ ID NO: 34111 - protein, 162 aa, Zea mays subsp. mays
MLLASVVQVQGITRHYDFNVTMANVTRLCASKSIITGERAVPRAQDRGEGRRPARHPRHQPRPAQHLAALARHPAAAHGVGGRAGRTSRSARSRRGRVTCTTTPSWGSAARCGGTRTSPGCAPPSTGPSSSCPSSASPTRSRRPTRRSPSSSVSGGWRTRRW

SEQ ID NO: 34112 - DNA, 827 bp, Zea mays subsp. mays
ctaacatcgattttcctctggaatcgtaacctcagaaagccaaatctcattctccggcgctcaggcccacccaagcgtcgactctcccgatccaatcggtacctcctagttcctcgccggcggtagcggcgtcgggcgaacagcggtgacttggcgagggcgcttggccggcgacaatcatccactaggatggaaggtgaggcagagaccgtggttggttcttgttctaaaccatgtgggcctctggaggactactacattccagattacattctgaagccaggtgcccaacaagtacttgttgatcatgcggcaccctgccccgttgtagtgttcatcaactcaagatctggaggccaacttggaagtagtttaatcaaaacatatcgtgagcttctcaatgaagcacaggtttttgatctctcaaaagaggctccagataaggtattgcatcgtttatatgccaaccttgaaaggctgaagatggaaggagacattcttgcagttcaaatttggaggacactgaggctaattgttgcaggcggtgatggtacagctagctggctgcttggggtagtcagtgaccttaagctttcccacccacctccagtggcaactgtgcctctgggaaccggaaataacctccccttttcatttggatggggaaagaagaatccttctactgaccaagaggctgtaaaatcattcctcgggctagtaaagcatgcaaaagaaattaagattgatagttggcacatcattttgagaatgcgagttccagaggaaggtccatgtgatcctattgctccactagatttgcctcattc

SEQ ID NO: 34113 - protein, 212 aa, Zea mays subsp. mays
MEGEAETVVGSCSKPCGPLEDYYIPDYILKPGAQQVLVDHAAPCPVVVFINSRSGGQLGSSLIKTYRELLNEAQVFDLSKEAPDKVLHRLYANLERLKMEGDILAVQIWRTLRLIVAGGDGTASWLLGVVSDLKLSHPPPVATVPLGTGNNLPFSFGWGKKNPSTDQEAVKSFLGLVKHAKEIKIDSWHIILRMRVPEEGPCDPIAPLDLPH

SEQ ID NO: 34114 - protein, 114 aa, Zea mays subsp. mays
MEGDILAVQIWRTLRLIVAGGDGTASWLLGVVSDLKLSHPPPVATVPLGTGNNLPFSFGWGKKNPSTDQEAVKSFLGLVKHAKEIKIDSWHIILRMRVPEEGPCDPIAPLDLPH

SEQ ID NO: 34115 - DNA, 660 bp, Zea mays subsp. mays
cagttgattttacaatggttgaggatgctgtagaaagcctgagcagggagatactgacaatacaggcaaagggcgataagccttctgcccaatctcttctccagtcccgtgcaacattgacacaaccattaagaatggcattggagaggatagagcacatgcaggtacctgttgacatagccccggtattcagcacggcaaacaagctatttgcagacatttaactatttgggctcagaatcgttgtgctttagtaccgcccacaatacctggacgaaaccaggaattgctcaagaataaggcggcgctaggaattgctcaagaataaggaagcgccccatgtcaagcaaagctgatagaaccatggcgatatgtgagtggcctttttatcggaaggaaaattgtttgcatgcttatgtattgacctcaatttttacgtattggagtgatttgatgtgaaatttaaccaaattccacgtccagtacatggccatccaaacatggcctaaagtggtgtttgatcagtgagaattggaataaacccagctttgcctgaacagttgcgaagtactgagttacatcaatgcatattttgtaacaccaaaaaaagatgtattatcctaatggatgattgaacgaaggcactgtatatcgatcccc

SEQ ID NO: 34116 - protein, 73 aa, Zea mays subsp. mays
VDFTMVEDAVESLSREILTIQAKGDKPSAQSLLQSRATLTQPLRMALERIEHMQVPVDIAPVFSTANKLFADI

SEQ ID NO: 34117 - protein, 69 aa, Zea mays subsp. mays
MVEDAVESLSREILTIQAKGDKPSAQSLLQSRATLTQPLRMALERIEHMQVPVDIAPVFSTANKLFADI

SEQ ID NO: 34118 - protein, 39 aa, Zea mays subsp. mays
MSSKADRTMAICEWPFYRKENCLHAYVLTSIFTYWSDLM

SEQ ID NO: 34119 - DNA, 687 bp, Zea mays subsp. mays
aaccaaagcctccgcccccttcttccctgacaccctcgccgccgcgcacgcacgcacgcagggaaccagcgaagagagatgggcgtctacaccttcgtgtgccgcagcgccggcggcggcgagtggaccgccaagcagcactccggcgagatcgaggcgtccgccgccaccccctacgagctgcagcgccgcctcgtcgcctccgcctccgcggccgactccgcgtccggcgtccagtcgtccttctccatggtcacccccagctccgccgtcttccaggtgatcgtcggtggtggcgcgatgatggttagtggcggcggcggcggcggcgcgtccgccgccgcgtcgggtggtgctgcggccgaagctcccaaggaggagaagaaggaagaggagaaggaagagagcgacgacgacatgggattctccctgttcgactagagacagagttaagctgcgtgtgcatggttgctgttcggtcgtgtcgcgaaacgtgaagagctcaagcggcctttttgttccagtcccacatgtgagagcttgatacgttgtctggaatgaaaaattttctccaaaattcacgaatatatattgcgtacgcacaatactgtagattaaacaatgacttgtgtagagctgtaaaatcgacgcaattatatgaaagcagcactggagtttcaaactgac

SEQ ID NO: 34120 - protein, 120 aa, Zea mays subsp. mays
MGVYTFVCRSAGGGEWTAKQHSGEIEASAATPYELQRRLVASASAADSASGVQSSFSMVTPSSAVFQVIVGGGAMMVSGGGGGGASAAASGGAAAEAPKEEKKEEEKEESDDDMGFSLFD

SEQ ID NO: 34121 - protein, 102 aa, Zea mays subsp. mays
PKPPPPSSLTPSPPRTHARREPAKRDGRLHLRVPQRRRRRVDRQAALRRDRGVRRHPLRAAAPPRRLRLRGRLRVRRPVVLLHGHPQLRRLPGDRRWWRDDG

SEQ ID NO: 34122 - protein, 93 aa, Zea mays subsp. mays
TKASAPFFPDTLAAAHARTQGTSEERWASTPSCAAAPAAASGPPSSTPARSRRPPPPPTSCSAASSPPPPRPTPRPASSRPSPWSPPAPPSSR

SEQ ID NO: 34123 - DNA, 1511 bp, Zea mays subsp. mays
aagaaatgatgcttattcttcttcctcgtgttgtgttgccttgctaatgagtgagagtcacatatagcagggagcgcagctggaaccaagcggctaaggatcgatggatcaccaccaccatcatcaccaccaccatcaccatcacatgatcccgggacaagagccgtcggcgacggacggcgcagcccctgacagcttcttcctgggccccgccgcagccgtcatcttctccggaggcgccggggccggttcgtcgtcgtcgggcgccgcggccctcggatcctccgccgggggaggcggtgggccatctccgtccagctcgtcgccgtcgctgagccggtacgagtcccagaagcgccgggactggaacactttcgggcagtatctgcgcaaccaccggccgccgctgtcgttgtcgcggtgcagcggcgcgcacgtgctggagttcctcaagtacatggatcagttcggcaagaccaaggtgcacacgccggtgtgccccttctacgggcaccccaacccgcccgcgccatgcccgtgcccgctgcgccaggcatggggctccctcgacgcgctcatcggccgcctccgcgccgcctacgaggagaacggcggcacgcccgagatgaaccccttcggcgcgcgggccgtgcggctctacctgcgcgaggtgcgcgagacgcaggcgcgggccagggggatcagctacgagaagaagaagcgcaagaagccgtcggcggcttcggccgcggccgcggggccgtcgtccgagggaagcccaccaccggggccgtccagcggcggtggaggacccgacacgtcgtcgccgcagttcatcatgccgtgagttttttgttcctagctagctagttaagtgatccatcgccatttgccatctacaatccttcccttgatcgtccatctgatgagctagccaacacacagcagcgcgagttggagttcgttccggtgctgctggtctaggccgttgttctttgtcttcttctccagtggcttgcattttgcaaaagatttctcgacctcccccacacccacaccccccaccttcttttctctgtttcattcacttgaatcatcactgtgcgcgtgcgtgagtactggtttaatcgtcgtcgctgttttgtttagctttcatcaacccattggcagcaggcagagtttatgttagttttgcttggtttgttattctcctcccgaggtacgacatgatgcaaacttgcaagaacagtttgagattccctaccaatgcagctgttgtgtgcttatgcatgtcatggcatggtgtgggagaagttttagtttgcagctagcaacaacagtgacaaaagctgtagctgtatagctagctagtagcatctttcagaatttgttcttgtatgcaacttgcaagcaactagtagtttggttctgctgcagaagccagcagccaaactagcttgctgtgctattcattatattggcagaacagaaatataatccttctacatcac

SEQ ID NO: 34124 - protein, 247 aa, Zea mays subsp. mays
MDHHHHHHHHHHHHMIPGQEPSATDGAAPDSFFLGPAAAVIFSGGAGAGSSSSGAAALGSSAGGGGGPSPSSSSPSLSRYESQKRRDWNTFGQYLRNHRPPLSLSRCSGAHVLEFLKYMDQFGKTKVHTPVCPFYGHPNPPAPCPCPLRQAWGSLDALIGRLRAAYEENGGTPEMNPFGARAVRLYLREVRETQARARGISYEKKKRKKPSAASAAAAGPSSEGSPPPGPSSGGGGPDTSSPQFIMP

SEQ ID NO: 34125 - protein, 233 aa, Zea mays subsp. mays
MIPGQEPSATDGAAPDSFFLGPAAAVIFSGGAGAGSSSSGAAALGSSAGGGGGPSPSSSSPSLSRYESQKRRDWNTFGQYLRNHRPPLSLSRCSGAHVLEFLKYMDQFGKTKVHTPVCPFYGHPNPPAPCPCPLRQAWGSLDALIGRLRAAYEENGGTPEMNPFGARAVRLYLREVRETQARARGISYEKKKRKKPSAASAAAAGPSSEGSPPPGPSSGGGGPDTSSPQFIMP

SEQ ID NO: 34126 - protein, 129 aa, Zea mays subsp. mays
MDQFGKTKVHTPVCPFYGHPNPPAPCPCPLRQAWGSLDALIGRLRAAYEENGGTPEMNPFGARAVRLYLREVRETQARARGISYEKKKRKKPSAASAAAAGPSSEGSPPPGPSSGGGGPDTSSPQFIMP

SEQ ID NO: 34127 - DNA, 906 bp, Zea mays subsp. mays
aaaaaagaagcagaggagaggcccaagcagagtaatggccaaggtctacccaaacagcgcagccgtcgcggcagagcccgccacccgagccgctgccggcgaccaacaacctgaaccgccgacggtgctgacggtatggcgcaagtcgctgctcttcaactgcgacggcttcaccgtgtacgacgcccggggagacctcgccttccgcgtcgactgctacgccacctcccgccggcgcgccgaggtcgcgctcatggacgccgcgggggcgccgctgctcacgctccaccgcaagaggctcagcctggcggagcgctggctcatctacgaagacggcgccggcaccacgcagccgcagccgcgtcgccctctcctctccgtccaccgccacgtcggtctccgcgcctccggcgggaagacgctggcgcatgtcttcgcgccctcctcggccgcccaggaggcgttcgtggtcgaggggtcgtacggccgtcgtgactgcgccgtgcgcgacgcgcgcggcgacgtcatggccgaggtccggcgcaaggaggccgtcggcgacgacgtgttcaggctggtggtcagtccccgcttcggcgcgccgctcgccatggggcttgtcatcgtcctcgacgagatgttcggcggccgcagctcgtggtcgtggctgcacagagcgtgctaggattggataggcagtagaggccctcccccagttgtcagcgtcagcagagtttataatgcaggctgcggctgggccaaccccctaaaaactagaacgccctatcaccaattacgaaatagtgagaacaatgcaaaagcaaaaaggcacatccaattattttggatatggatgtcagttgattattttgtaatgtcatcagtcatctactgattgttttccgc

SEQ ID NO: 34128 - protein, 227 aa, Zea mays subsp. mays
KKKQRRGPSRVMAKVYPNSAAVAAEPATRAAAGDQQPEPPTVLTVWRKSLLFNCDGFTVYDARGDLAFRVDCYATSRRRAEVALMDAAGAPLLTLHRKRLSLAERWLIYEDGAGTTQPQPRRPLLSVHRHVGLRASGGKTLAHVFAPSSAAQEAFVVEGSYGRRDCAVRDARGDVMAEVRRKEAVGDDVFRLVVSPRFGAPLAMGLVIVLDEMFGGRSSWSWLHRAC

SEQ ID NO: 34129 - protein, 216 aa, Zea mays subsp. mays
MAKVYPNSAAVAAEPATRAAAGDQQPEPPTVLTVWRKSLLFNCDGFTVYDARGDLAFRVDCYATSRRRAEVALMDAAGAPLLTLHRKRLSLAERWLIYEDGAGTTQPQPRRPLLSVHRHVGLRASGGKTLAHVFAPSSAAQEAFVVEGSYGRRDCAVRDARGDVMAEVRRKEAVGDDVFRLVVSPRFGAPLAMGLVIVLDEMFGGRSSWSWLHRAC

SEQ ID NO: 34130 - protein, 143 aa, Zea mays subsp. mays
MDAAGAPLLTLHRKRLSLAERWLIYEDGAGTTQPQPRRPLLSVHRHVGLRASGGKTLAHVFAPSSAAQEAFVVEGSYGRRDCAVRDARGDVMAEVRRKEAVGDDVFRLVVSPRFGAPLAMGLVIVLDEMFGGRSSWSWLHRAC

SEQ ID NO: 34131 - DNA, 554 bp, Zea mays subsp. mays
gcacgagaccattacctagaacatcctaatcgaaaaactctcacatggtcattccatttgatctaaatgagcttcctttagatgagctcgatgaagacttccaggagccggatgatgctaatgagctcggcctcaacgatgtgctgttggaaaatggcaacgattttgatttgaacttacctctagatgagtttggcgcggttgtagagaaccaccgacgaaaagagatgacaaaagatatgaggaaacaagtgtaccaagcgttgttggctagaagcaataacgggagactccacaagaaagatacccaaattgttgccaaccaatttgatctccaccttcggtcagtgcagcgcgtatggaacagaggtaaaatacaacttgcaaactcggtgccggttgtggttgctagtctaaaaaagggaagagttggtcgtaaagcaattcctattgatttggaagttttgcgtaacattcctttaaaggataggatgaccttagaggatgtttgtgccaagctaaacatgagtaaatggaaggtgctaaggtatttg

SEQ ID NO: 34132 - protein, 170 aa, Zea mays subsp. mays
MVIPFDLNELPLDELDEDFQEPDDANELGLNDVLLENGNDFDLNLPLDEFGAVVENHRRKEMTKDMRKQVYQALLARSNNGRLHKKDTQIVANQFDLHLRSVQRVWNRGKIQLANSVPVVVASLKKGRVGRKAIPIDLEVLRNIPLKDRMTLEDVCAKLNMSKWKVLRYL

SEQ ID NO: 34133 - protein, 109 aa, Zea mays subsp. mays
MTKDMRKQVYQALLARSNNGRLHKKDTQIVANQFDLHLRSVQRVWNRGKIQLANSVPVVVASLKKGRVGRKAIPIDLEVLRNIPLKDRMTLEDVCAKLNMSKWKVLRYL

SEQ ID NO: 34134 - protein, 105 aa, Zea mays subsp. mays
MRKQVYQALLARSNNGRLHKKDTQIVANQFDLHLRSVQRVWNRGKIQLANSVPVVVASLKKGRVGRKAIPIDLEVLRNIPLKDRMTLEDVCAKLNMSKWKVLRYL

SEQ ID NO: 34135 - DNA, 1370 bp, Zea mays subsp. mays
gcacgagaccattacctagaacatcctaatcgaaaaagcactgcttatcgcacgtccatccacaaatctctccagggaccaggggaacggtcgtcccgaatcgccggccatgaagtgccgctctgatgcaccaggcggtggtgacggccaccgggaccgggtcccagcccccgctgccacaggcgtcggcggctcgcccccgggcgagcggagtaagaagcagcggacgcaggagccgtcctcaagctccagcgtggatggcgagtgctcgtcttcgacttcgtcctcgcaggctctgccgccgccgctgccggagcagttgccgcaggacgcaggagtgggcgagcagccgcctccaggacccgaggccgcagggggcgagcaggcgagggtgccggatctcggggaggacctggtgttcgaggtgctgatgcgagcggaggcccggacactggcggccgcggcgtgcgtgagccgcgggtggcggctgctggcgagggacgagcggttgtgggaggcggcgtgcgtgcgggagtgggcctgcactggattctccgagcagatgcttcgcagtgtcgtgcttccgcttggcggcttccggcgcctacacgagatgtacatccgtccggtccagcggcgtgctgctggagcgccgcgcgggcagcagaggcggcagttgccggtgaggatgggccgggatcaggtccaagtctcactgtctctgctctcgacctcattcttcctgaagatgcctaatgctcctccacctcctcctaaggacaaggataaagatggagataagaatggaggtggccagtgtgggtgatcactgatcaagtttgtgaaaaataggagcttacctcccatgcagcatcaccacaagctgcttatgttatgtaggtgattatgttgtggttcttcactgtatttgtggcagtaaagaggtgatcaagtcatttggattggtgggcagagaagactattcagataggtgcggatgtactgatcgggaggcaaataaggtgagcgagattggatggaattcattgcaatagcgtattggatgactaccaagtctgtgtgttgtacctaaattacacacgaaatgggctcatctgtaaagtttccatgccatatatgtgaatatgcgaggtgccaagagagatgcagcatgctctttgtgctgttgtgccatgggaataagggtgagcctcttagggcttcatcatgctctttgtgctgttgtgccatgagagtaagtgtgagtctcttagggcttgtttagttgtatggggattaaaggggattgaggaacatacaattccttgctagttaattttggagggggattgagaggcatacaattcctt

SEQ ID NO: 34136 - protein, 238 aa, Zea mays subsp. mays
MKCRSDAPGGGDGHRDRVPAPAATGVGGSPPGERSKKQRTQEPSSSSSVDGECSSSTSSSQALPPPLPEQLPQDAGVGEQPPPGPEAAGGEQARVPDLGEDLVFEVLMRAEARTLAAAACVSRGWRLLARDERLWEAACVREWACTGFSEQMLRSVVLPLGGFRRLHEMYIRPVQRRAAGAPRGQQRRQLPVRMGRDQVQVSLSLLSTSFFLKMPNAPPPPPKDKDKDGDKNGGGQCG

SEQ ID NO: 34137 - protein, 131 aa, Zea mays subsp. mays
MRAEARTLAAAACVSRGWRLLARDERLWEAACVREWACTGFSEQMLRSVVLPLGGFRRLHEMYIRPVQRRAAGAPRGQQRRQLPVRMGRDQVQVSLSLLSTSFFLKMPNAPPPPPKDKDKDGDKNGGGQCG

SEQ ID NO: 34138 - DNA, 1109 bp, Zea mays subsp. mays
aaaaatcccgacgcgaatcgcccagaacgcgaggcggaatttcccatcctcttggacccccccccccccccctctgttcttcctccttcccccgctcctcgtccacacgctccgctccgattccgcccgcgtccgcggacccagatccggcgcccgcgcccatggcgacgcgcaggcgaatgctcctcaaggtcatcatcctcggcgacagcggggtcggcaagacctcgctgatgaaccagtacgtcaacaacaggttcagcaaccagtacaaggccaccatcggcgcggatttcctcaccaaggaggtccagatcgacgaccgcctcttcacactgcagatatgggatacggcaggacaggagcggtttcaaagtcttggtgtggcattttataggggagctgactgctgtgttcttgtatatgatgtcaacgtatccaagtcatttgaaaagctcaacaactggcgtgaggaattcctaattcaagccagcccatcagacccagagaatttcccatttgttgtgcttggtaacaagatcgatgttgatggtggtaacagccggactgtttctgagaagaaggctaaagcatggtgtgcttcaaagggaaacatcccctactttgagacgtcggctaaagagggcttcaatgtagaggctgcatttgagtgtatagcgaggaatgctgtaaaaaatgagccagaagaagatatgtatcttcctgatacgattgatgttgggggcgctggaaggcaacagcgttcgtcaggttgtgaatgctagaagatatggagcactgcgaattgctcggttggttggtctgattctctagggcttgttgtttgggtggcctgtgtcatcatttcatatatgtatttagtttgcaaaactgctatttgtggacactggatagtttggaagtctgcatgcgggtgcttattgtcgactcccgtgtagatgcagagaactcatttgtaactgccgtttcggtgttgtatcgtatctgcgctagatgctagtgttataacgcttttgattgttgatggattgcatatatgtactgtatttgtacatgaacagaacgtagtgcccattttcatagtgttc

SEQ ID NO: 34139 - protein, 260 aa, Zea mays subsp. mays
KSRRESPRTRGGISHPLGPPPPPLCSSSFPRSSSTRSAPIPPASADPDPAPAPMATRRRMLLKVIILGDSGVGKTSLMNQYVNNRFSNQYKATIGADFLTKEVQIDDRLFTLQIWDTAGQERFQSLGVAFYRGADCCVLVYDVNVSKSFEKLNNWREEFLIQASPSDPENFPFVVLGNKIDVDGGNSRTVSEKKAKAWCASKGNIPYFETSAKEGFNVEAAFECIARNAVKNEPEEDMYLPDTIDVGGAGRQQRSSGCEC

SEQ ID NO: 34140 - protein, 207 aa, Zea mays subsp. mays
MATRRRMLLKVIILGDSGVGKTSLMNQYVNNRFSNQYKATIGADFLTKEVQIDDRLFTLQIWDTAGQERFQSLGVAFYRGADCCVLVYDVNVSKSFEKLNNWREEFLIQASPSDPENFPFVVLGNKIDVDGGNSRTVSEKKAKAWCASKGNIPYFETSAKEGFNVEAAFECIARNAVKNEPEEDMYLPDTIDVGGAGRQQRSSGCEC

SEQ ID NO: 34141 - protein, 201 aa, Zea mays subsp. mays
MLLKVIILGDSGVGKTSLMNQYVNNRFSNQYKATIGADFLTKEVQIDDRLFTLQIWDTAGQERFQSLGVAFYRGADCCVLVYDVNVSKSFEKLNNWREEFLIQASPSDPENFPFVVLGNKIDVDGGNSRTVSEKKAKAWCASKGNIPYFETSAKEGFNVEAAFECIARNAVKNEPEEDMYLPDTIDVGGAGRQQRSSGCEC

SEQ ID NO: 34142 - DNA, 809 bp, Zea mays subsp. mays
  misc_feature (603)..(603): n is a, c, g, or t
  misc_feature (628)..(628): n is a, c, g, or t
  misc_feature (672)..(672): n is a, c, g, or t
  misc_feature (692)..(692): n is a, c, g, or t
  misc_feature (700)..(700): n is a, c, g, or t
  misc_feature (732)..(732): n is a, c, g, or t
  misc_feature (760)..(760): n is a, c, g, or t
  misc_feature (802)..(802): n is a, c, g, or t
acaagcacaaacggtttggaacacatcacggtttcagtgccatggcatccaacaagtactccgttggtcaccctgcgctccgattcctagccgctatggcactcgtgttaacggtatcagtctgtggccagtcgtcgtctccagctccgacgcctgctccagccccggcgcctgcaccgactcctgctttagccccaataatgccagcgccgactcctgctccgacgcctgcaacgactcctcctgcttcagctccaacggcgccagcaccgacaccagcgccaacaccatcactgacaccagcgccgactcctgccccggcgccatcccaaaaccggtgtccccctggcttccctaacctaatcaccttaattcaagccattaagaccacctatcctaataagtgcaatattattattgtccccgttccattctcgccggtgaacccagggtcgggctcgggcattccatttccaccctacaaatgcctgtgctactgctttcccattattaggattccatggcccggcatccccccctacaaatgtgttcctgtaggcactcccggcccttaacagtatgagcatatatatatatttgggngcacggaaactatgcagaaatgtgngcatgcatacttaagtatgaataagtgcatgtgaggtctgtatntggaggttgattagttccanacatgggngcagtgtgtgcatggtaagggacaattaattnacctacagttgtgtgtaatgcgtgacangctgttgttgttttactatatactacttaaagtgcatcaacnatccatg

SEQ ID NO: 34143 - protein, 190 aa, Zea mays subsp. mays
KHKRFGTHHGFSAMASNKYSVGHPALRFLAAMALVLTVSVCGQSSSPAPTPAPAPAPAPTPALAPIMPAPTPAPTPATTPPASAPTAPAPTPAPTPSLTPAPTPAPAPSQNRCPPGFPNLITLIQAIKTTYPNKCNIIIVPVPFSPVNPGSGSGIPFPPYKCLCYCFPIIRIPWPGIPPYKCVPVGTPGP

SEQ ID NO: 34144 - protein, 177 aa, Zea mays subsp. mays
MASNKYSVGHPALRFLAAMALVLTVSVCGQSSSPAPTPAPAPAPAPTPALAPIMPAPTPAPTPATTPPASAPTAPAPTPAPTPSLTPAPTPAPAPSQNRCPPGFPNLITLIQAIKTTYPNKCNIIIVPVPFSPVNPGSGSGIPFPPYKCLCYCFPIIRIPWPGIPPYKCVPVGTPGP

SEQ ID NO: 34145 - protein, 159 aa, Zea mays subsp. mays
MALVLTVSVCGQSSSPAPTPAPAPAPAPTPALAPIMPAPTPAPTPATTPPASAPTAPAPTPAPTPSLTPAPTPAPAPSQNRCPPGFPNLITLIQAIKTTYPNKCNIIIVPVPFSPVNPGSGSGIPFPPYKCLCYCFPIIRIPWPGIPPYKCVPVGTPGP

SEQ ID NO: 34146 - DNA, 985 bp, Zea mays subsp. mays
acagaagggcggagcagtgccagtgtactggccgccaccactcgccactcgtccccctccccccgaaagccggcacgagccctcccttcccttcctccaacctgttccgatccgccccgagccggctggccatggcgatcagggctggccgctcggccctccacctccacgctctcgctttcctcatcctcgccgcctccccctgcctccaagtccaagctctagtggaccatcgcaaacagatatctgactggggtaggcaacccaactttgaactgcagaatatgtcctcgagtcaaagggatggctctcatctcttgggcagatcaaaggaaataacacacaggaaactaagggtgagaattggtgtaaggaacaaaatggaagtagtgcagcaggatgatgaagcattagttaaacttgagaacacaggtattgaacgctcaaaagctgttgattctgcagtgctgggaaaatatagcatctggagacgtgaaaatgaaaatgagaaggcagattcaagggttcgtctgatgcgagatcaaatgatcatggccagaatatattctgttcttgccaaatctagggacaaacttgatctctatcaggagctgctagcaagactcaaggaaagccagcgctcccttggggaagctactgctgatgccgaacttccgaagagtgcttcagatagaatcaaagcaatgggccaagttttatcaaaagcaagggatctgttgtatgattgcaaggaaattacccagcgtttgagagcaatgcttcagtcagcagatgagcaggtccggagcttgaagaagcagagcaccttccttagccagcttgcagctaagacaatcccaaatggcatccattgtctttctatgcgcttaacaattgattattaccttctctctccagagaaaagaaagttccccaatagcgagaacttggaaaatcctgatctttaccattatgctcttttctc

SEQ ID NO: 34147 - protein, 327 aa, Zea mays subsp. mays
RRAEQCQCTGRHHSPLVPLPPKAGTSPPFPSSNLFRSAPSRLAMAIRAGRSALHLHALAFLILAASPCLQVQALVDHRKQISDWGRQPNFELQNMSSSQRDGSHLLGRSKEITHRKLRVRIGVRNKMEVVQQDDEALVKLENTGIERSKAVDSAVLGKYSIWRRENENEKADSRVRLMRDQMIMARIYSVLAKSRDKLDLYQELLARLKESQRSLGEATADAELPKSASDRIKAMGQVLSKARDLLYDCKEITQRLRAMLQSADEQVRSLKKQSTFLSQLAAKTIPNGIHCLSMRLTIDYYLLSPEKRKFPNSENLENPDLYHYALF

SEQ ID NO: 34148 - protein, 284 aa, Zea mays subsp. mays
MAIRAGRSALHLHALAFLILAASPCLQVQALVDHRKQISDWGRQPNFELQNMSSSQRDGSHLLGRSKEITHRKLRVRIGVRNKMEVVQQDDEALVKLENTGIERSKAVDSAVLGKYSIWRRENENEKADSRVRLMRDQMIMARIYSVLAKSRDKLDLYQELLARLKESQRSLGEATADAELPKSASDRIKAMGQVLSKARDLLYDCKEITQRLRAMLQSADEQVRSLKKQSTFLSQLAAKTIPNGIHCLSMRLTIDYYLLSPEKRKFPNSENLENPDLYHYALF

SEQ ID NO: 34149 - protein, 233 aa, Zea mays subsp. mays
MSSSQRDGSHLLGRSKEITHRKLRVRIGVRNKMEVVQQDDEALVKLENTGIERSKAVDSAVLGKYSIWRRENENEKADSRVRLMRDQMIMARIYSVLAKSRDKLDLYQELLARLKESQRSLGEATADAELPKSASDRIKAMGQVLSKARDLLYDCKEITQRLRAMLQSADEQVRSLKKQSTFLSQLAAKTIPNGIHCLSMRLTIDYYLLSPEKRKFPNSENLENPDLYHYALF

SEQ ID NO: 34150 - DNA, 469 bp, Zea mays subsp. mays
  misc_feature (271)..(271): n is a, c, g, or t
aaggaatctcacctgtgaaagcgagcacacgcaacgcagctacgcaagcaagcctgttctctgtcgattgaggccgctacacggcggcaatggagggaagaagggcggccgtgtcgttggtggcagcagtgtcgctgctgctggcgtgctcgcgatccccattcccggtcgtcgccgctgatgagggcgagccggcggtgggggccccggacacgaaccagctgtgcgtgacaagttgcgggacgtgcccgacgatctgcacggcgtcgcnccgacgatcctgccgatgacagcgccgccgccgccggcccttgcgctgctgccgctgtcgcccccgccgccctacctccagctggtgctgccgccgccgccgcctggggacgtgtacgacctgctgcctccggtgacgcctctcacgagcccgccggagtccccctgcacgaccccgccttcgtcctcatcgtcgtcg

SEQ ID NO: 34151 - protein, 66 aa, Zea mays subsp. mays
  misc_feature (61)..(61): Xaa can be any naturally occurring amino acid
MEGRRAAVSLVAAVSLLLACSRSPFPVVAADEGEPAVGAPDTNQLCVTSCGTCPTICTASXRRSCR

SEQ ID NO: 34152 - protein, 61 aa, Zea mays subsp. mays
MTAPPPPALALLPLSPPPPYLQLVLPPPPPGDVYDLLPPVTPLTSPPESPCTTPPSSSSSS

SEQ ID NO: 34153 - protein, 59 aa, Zea mays subsp. mays
RNLTCESEHTQRSYASKPVLCRLRPLHGGNGGKKGGRVVGGSSVAAAGVLAIPIPGRRR

SEQ ID NO: 34154 - DNA, 1122 bp, Zea mays subsp. mays
aaactcctcgctatcctcttccaatccgaaccacccggactcccggagcaagcggccgccggctaagcagacacgaacgcaggtccggcggcaatgcaacgcgccgcgctcgtcgggtcccctctcgtacctgtgggtccccttgctcagcttgccgtgcggcgccgctgccgcttccatggtggtgttcgcgtgaggtcctcaaccgggaaggacgggaccgggactgggaccgggggcggaagcgagggcggcgacggcgccggtgccgcagcgtcttggctgagctcggcggtcggggagaaagtggacgagcttctgcgccgcgaagagaaccgggccctgctcgagggcgtcgaggacgccgagcgccgcgttgagcgcgcgcgcgccgcgctcgccgacatcgagcgccaggaggccgccgcacgcctcgcccgcgaggaggtccgccgcctcgagaagcggcgcgatgagattgcagagtcccagcgggaattgcttcaagcaagagaaatgattgatgaagctcagcgatccttgtcttctagtcttgacgaaggaagctttggagatatgtcaagtggtgatgttgatgaagataacgagagaatagaatccgtaaaagctgctgcagtttcctctgtcgtcggtgttctggctagtttgcccatatctttctatgaagttgaagatcttccacaactattccttcggtcatcaattgttttcataagttgtgctttgtttggagtcacattccggtacgctgttagaagagatctggataatatccaactaaaaactggggctcctgcagcatttgcttttgttagaggccttgctctgctggaatctggtagaaccttcgagctgagtactgataccttaatatcagttactcttgatgctgcagtcagtgtggttgagaacattttcatatttctgcctgctgctgttgcactggactactgttttaagatgagatttttgagtccctttcctagaagaaaacaatagcttctgtgaagaatatgtatgatcaatagcaatcttgatagctcaaatggtcatatgtaacacaagtgatatcttagattcattaaaaaaacatttcccccc

SEQ ID NO: 34155 - protein, 308 aa, Zea mays subsp. mays
MQRAALVGSPLVPVGPLAQLAVRRRCRFHGGVRVRSSTGKDGTGTGTGGGSEGGDGAGAAASWLSSAVGEKVDELLRREENRALLEGVEDAERRVERARAALADIERQEAAARLAREEVRRLEKRRDEIAESQRELLQAREMIDEAQRSLSSSLDEGSFGDMSSGDVDEDNERIESVKAAAVSSVVGVLASLPISFYEVEDLPQLFLRSSIVFISCALFGVTFRYAVRRDLDNIQLKTGAPAAFAFVRGLALLESGRTFELSTDTLISVTLDAAVSVVENIFIFLPAAVALDYCFKMRFLSPFPRRKQ

SEQ ID NO: 34156 - protein, 167 aa, Zea mays subsp. mays
MIDEAQRSLSSSLDEGSFGDMSSGDVDEDNERIESVKAAAVSSVVGVLASLPISFYEVEDLPQLFLRSSIVFISCALFGVTFRYAVRRDLDNIQLKTGAPAAFAFVRGLALLESGRTFELSTDTLISVTLDAAVSVVENIFIFLPAAVALDYCFKMRFLSPFPRRKQ

SEQ ID NO: 34157 - DNA, 1376 bp, Zea mays subsp. mays
attgaccccgccgtggcacggcctcgaggccggcgacgacgcaggcgcgaggcgccggagggtccggccatgacgtcgtccgtgcggcagtggtggcgccgcgccgccgctgcgctcaaggacaggaggagcctgctcctggcgcgcctgcgcccgcgccgggccgggtcgtcgtcgtggcaccaccgggagctggaggcggccgtgatccgcgcgacgagccacgaggaccggtggatggactaccggagcgccgcgcgggtgttcgcgtgggcgcgctcgtcgcccacgttcatccggcccgtcatgtgggcgctggcgcgccgcgcgcggcggacgcggtgctgggtcgtggcgctcaagtcgctcatgatcgcgcacggcatcctcctccgctcgggccgcgcgccgcgcgccggccgcgtccccttcgagctcgctgacttccgagaccggtcctcgtcggcggcggccaggtccctggccttctccgcctttgtgcgcgcttacttccggtttctggactaccgctccctcttcgccgcgcaggagtacaccgacggcgatgacgacgccgaaaggtgctcggatccccagacggcctgtcttgatcggatagcgaagaaacagttcatgctcgagctgctcctacaaatccgcccgtacggcgacggcatggaggtgccgctggtcctcgaggccatggattgcgtcctcatcgagatcttccaggtgtacggcgagatatgcaccggcatcgcgcggttcctcatcagcggcgttcagggcggaccggcgatgctgacgacccgcaaggaggtcatggcggcaggggtgaaggtgctctggcgggcggcggagcagagcgctcagctctcgtcctacttcgacctgtgccgcgagctcggcgtggccaacgcgcgcaagctcccgacatcattagttcgcttgaaagacgacgacgtccgggacctcgagcggatcctcatgagtgagagtgacatccagaacgaaagcggtgaggaggcggaggcggaggcagaggcagaggcagaggcggcggcggacgtgaaggacgcggggtcaacgtcgacgaacactgcggtggtgatggcaacaacggaatgggtgacattcgacgaggagagaccaagcgctggcgttgtcgcctaccacggcgggggtcacgtctctaatcactggaaccccttcgtcgctgcgccgttagacggtagggaaggcggaaacctaatcgagcttttctagttttctaaccgaacgcaatattgttgggttaaaccataaccttttgctcttttgcgcccgcccgattgtacactatgctctttgtaaatagtaacgtgactcgtttggtc

SEQ ID NO: 34158 - protein, 421 aa, Zea mays subsp. mays
IDPAVARPRGRRRRRREAPEGPAMTSSVRQWWRRAAAALKDRRSLLLARLRPRRAGSSSWHHRELEAAVIRATSHEDRWMDYRSAARVFAWARSSPTFIRPVMWALARRARRTRCWVVALKSLMIAHGILLRSGRAPRAGRVPFELADFRDRSSSAAARSLAFSAFVRAYFRFLDYRSLFAAQEYTDGDDDAERCSDPQTACLDRIAKKQFMLELLLQIRPYGDGMEVPLVLEAMDCVLIEIFQVYGEICTGIARFLISGVQGGPAMLTTRKEVMAAGVKVLWRAAEQSAQLSSYFDLCRELGVANARKLPTSLVRLKDDDVRDLERILMSESDIQNESGEEAEAEAEAEAEAAADVKDAGSTSTNTAVVMATTEWVTFDEERPSAGVVAYHGGGHVSNHWNPFVAAPLDGREGGNLIELF

SEQ ID NO: 34159 - protein, 398 aa, Zea mays subsp. mays
MTSSVRQWWRRAAAALKDRRSLLLARLRPRRAGSSSWHHRELEAAVIRATSHEDRWMDYRSAARVFAWARSSPTFIRPVMWALARRARRTRCWVVALKSLMIAHGILLRSGRAPRAGRVPFELADFRDRSSSAAARSLAFSAFVRAYFRFLDYRSLFAAQEYTDGDDDAERCSDPQTACLDRIAKKQFMLELLLQIRPYGDGMEVPLVLEAMDCVLIEIFQVYGEICTGIARFLISGVQGGPAMLTTRKEVMAAGVKVLWRAAEQSAQLSSYFDLCRELGVANARKLPTSLVRLKDDDVRDLERILMSESDIQNESGEEAEAEAEAEAEAAADVKDAGSTSTNTAVVMATTEWVTFDEERPSAGVVAYHGGGHVSNHWNPFVAAPLDGREGGNLIELF

SEQ ID NO: 34160 - protein, 342 aa, Zea mays subsp. mays
MDYRSAARVFAWARSSPTFIRPVMWALARRARRTRCWVVALKSLMIAHGILLRSGRAPRAGRVPFELADFRDRSSSAAARSLAFSAFVRAYFRFLDYRSLFAAQEYTDGDDDAERCSDPQTACLDRIAKKQFMLELLLQIRPYGDGMEVPLVLEAMDCVLIEIFQVYGEICTGIARFLISGVQGGPAMLTTRKEVMAAGVKVLWRAAEQSAQLSSYFDLCRELGVANARKLPTSLVRLKDDDVRDLERILMSESDIQNESGEEAEAEAEAEAEAAADVKDAGSTSTNTAVVMATTEWVTFDEERPSAGVVAYHGGGHVSNHWNPFVAAPLDGREGGNLIELF

SEQ ID NO: 34161 - DNA, 1521 bp, Zea mays subsp. mays
acggaagaagcgttttgccagtccatccacccaagcgaggcgaccgaggctggcctcttcgcctatcacccgaaacaagattagattagagatagcaaaaggcgaagcgacgggtaaccgccaccaccaaatcgctaccgccaatccgccatgatgctcccgacggccaccgcgacggccgtcttcctcaccgcggcgccttcctctttctccacccgccgtcggcgcagtcgcgccatcttcgcatccctttcgccgtccttctcctcctcggaggagccgctgctggtgcgcgcggcgcggggcgaggacggcctcccacgcccgcccgcgtggatgatgcggcaggcagggcggtacatggcggagtaccaggcgctggccaagcgccacccctcgttccgggagcgctccgagaacacggacctcatcgtcgagatcacgctgcagccgtggcgtgccttcgcgcccgacggcgtcatcctgttctcggacatactcacgcccctgccggccatcggggtgccgttcgatatctcggactccaaggggcccgtgatccaatcgccagtacggtccaaagagcaggtgagggagctcgtccccatcgaccttgatatgctccagttcgtcggggagtcactaaagattctgcgaaatgagattgatggaaaagctgctttgctaggatttgtgggggccccatggacaattgcaacttacattgttgaaggggggatgaccaatacgtacacaaatataaagagcatgtgccatacagctccagatgtcttgaagggtcttctctctcaccttgcacaggccatatctgactatatcatttaccaagttaactcgggggcccagtgtatacagatatttgattcatggggtggacagcttccacctcatgtgtgggagcagtggtcaaaaccatatatcaaacagattgtgagtaggattaagaaagagtgccctaatgtaccccttgtgttgtatataaatggaaatggaggtttacttgagcgcatgaagaacacaggagctgatgttattgggcttgactggacagtggacatgactgatggaaggaggcgccttggtaatggcattagtgtacaagggaatgtggatccagcatttttgttctcaccattaccagtactgactgatgaaattcatagggttgtgaaagcagctggtccaaaaggtcatatacttaatctgggctgtacttcagaaaacacccgaagaagctgtagcacatttctttgatgtcacaaggcgcttgagatatgacacccttttccaaggttctgttgctgaagaattgcatcacgttgcttgacaacggcaatgacattcccatttttcatcaagtggtgtatttgatctgtcatatcatcttagagtcgtagtagattcctagtgttgcctgcattctacctttcaagagagactcattttcttaagcctgtatatgtattgcagagataccggcggcaaatctagtgcaatttt

SEQ ID NO: 34162 - protein, 374 aa, Zea mays subsp. mays
MMLPTATATAVFLTAAPSSFSTRRRRSRAIFASLSPSFSSSEEPLLVRAARGEDGLPRPPAWMMRQAGRYMAEYQALAKRHPSFRERSENTDLIVEITLQPWRAFAPDGVILFSDILTPLPAIGVPFDISDSKGPVIQSPVRSKEQVRELVPIDLDMLQFVGESLKILRNEIDGKAALLGFVGAPWTIATYIVEGGMTNTYTNIKSMCHTAPDVLKGLLSHLAQAISDYIIYQVNSGAQCIQIFDSWGGQLPPHVWEQWSKPYIKQIVSRIKKECPNVPLVLYINGNGGLLERMKNTGADVIGLDWTVDMTDGRRRLGNGISVQGNVDPAFLFSPLPVLTDEIHRVVKAAGPKGHILNLGCTSENTRRSCSTFL

SEQ ID NO: 34163 - protein, 373 aa, Zea mays subsp. mays
MLPTATATAVFLTAAPSSFSTRRRRSRAIFASLSPSFSSSEEPLLVRAARGEDGLPRPPAWMMRQAGRYMAEYQALAKRHPSFRERSENTDLIVEITLQPWRAFAPDGVILFSDILTPLPAIGVPFDISDSKGPVIQSPVRSKEQVRELVPIDLDMLQFVGESLKILRNEIDGKAALLGFVGAPWTIATYIVEGGMTNTYTNIKSMCHTAPDVLKGLLSHLAQAISDYIIYQVNSGAQCIQIFDSWGGQLPPHVWEQWSKPYIKQIVSRIKKECPNVPLVLYINGNGGLLERMKNTGADVIGLDWTVDMTDGRRRLGNGISVQGNVDPAFLFSPLPVLTDEIHRVVKAAGPKGHILNLGCTSENTRRSCSTFL

SEQ ID NO: 34164 - protein, 312 aa, Zea mays subsp. mays
MMRQAGRYMAEYQALAKRHPSFRERSENTDLIVEITLQPWRAFAPDGVILFSDILTPLPAIGVPFDISDSKGPVIQSPVRSKEQVRELVPIDLDMLQFVGESLKILRNEIDGKAALLGFVGAPWTIATYIVEGGMTNTYTNIKSMCHTAPDVLKGLLSHLAQAISDYIIYQVNSGAQCIQIFDSWGGQLPPHVWEQWSKPYIKQIVSRIKKECPNVPLVLYINGNGGLLERMKNTGADVIGLDWTVDMTDGRRRLGNGISVQGNVDPAFLFSPLPVLTDEIHRVVKAAGPKGHILNLGCTSENTRRSCSTFL

SEQ ID NO: 34165 - DNA, 868 bp, Zea mays subsp. mays
  misc_feature (467)..(467): n is a, c, g, or t
  misc_feature (475)..(475): n is a, c, g, or t
tccttctctgtacagagttgatgaagtactcacaatggaaccaaacaaggttgatgatatttcattgaagcgattgccattaacgtttcagtgtttagatactggaggtttgtacctccttgatgatggcttcactttcctagtgtggttaggtaggatgctcccgcctgaacttgtgaacaacattcttggagtgagcttggcaaacttccctgacctatcaaagattgtattgagagagtgtgacaatgaattgtcaagaaatttcatgaaaatactaagatccctgcgcgagaaggatccttcctatcaccagctatgccgtgtggtgcgacagggtgaacagccaagagaaggctatctgcttctatctaaccttgttgaggaccagatggctggaacaagtagttacgttgattggatacagcaaattcaccgtcaaacgcaaagctaatgacgaagaaccnacaggaancgatgcttggaatttttgccttagtgtaaactgctgcaggatgtagattcagctgctgccggttccaaatcaatctcgcaaccccgtggcagatcttgttcagaagccagcgacccaacatgccggcttgtaagcaggattggctggcaaaaaaaaatgctgttaatatctgtccttgtgattattctatttttgcacagtgagaatacagctgttgtatcggaataagtaggcagcaataccgtgggtattatacaactgggttcgtgtagtggcctgtgcgtttattaatcgcgttctttcctcatctggattcagttacttgccatttgggttataaatagttcatcgtgtaaactaactttttggctactttagtctgtttgtaatggg

SEQ ID NO: 34166 - protein, 150 aa, Zea mays subsp. mays
PSLYRVDEVLTMEPNKVDDISLKRLPLTFQCLDTGGLYLLDDGFTFLVWLGRMLPPELVNNILGVSLANFPDLSKIVLRECDNELSRNFMKILRSLREKDPSYHQLCRVVRQGEQPREGYLLLSNLVEDQMAGTSSYVDWIQQIHRQTQS

SEQ ID NO: 34167 - protein, 139 aa, Zea mays subsp. mays
MEPNKVDDISLKRLPLTFQCLDTGGLYLLDDGFTFLVWLGRMLPPELVNNILGVSLANFPDLSKIVLRECDNELSRNFMKILRSLREKDPSYHQLCRVVRQGEQPREGYLLLSNLVEDQMAGTSSYVDWIQQIHRQTQS

SEQ ID NO: 34168 - protein, 98 aa, Zea mays subsp. mays
MLPPELVNNILGVSLANFPDLSKIVLRECDNELSRNFMKILRSLREKDPSYHQLCRVVRQGEQPREGYLLLSNLVEDQMAGTSSYVDWIQQIHRQTQS

SEQ ID NO: 34169 - DNA, 1053 bp, Zea mays subsp. mays
ttaattccaatgaccagaaatatatatgttgcactcattgttgcatacgcaagacttggtaattttgatatggccaagcaggttctactcgataaagaaataccatgtaagttcctcagtgacatcaagagcgcacttgtaggagcgctggcattaaatgggcaagtgtcggatgcacttcgcttgcatgatgagataatgcaacccggcggctccctggaaccaaaagctgccattgccttgattgagcatattcgaacagaaggtgaactggatagaatgcatcaacttctcgatgggctgaatgactcaaacagctggtttgatggctgtggcagagtacttttatactgtgtccagcacaactatcctgatgctgcaattgatctacttaagcagatcagggagaaagatgaaatgagtacatatatggttgttgatcaggttttttgccaaatatgggacatggagaccacaaatttggattttggaatggtgtttcttgatgctgtcaaagagcttggacttaatgtttctcggacaagccttgactttcttctcagcgcatgtgtaaaagcaaaggatttgcgacgtgcccaacagatctggacagaatacgaatctgctggtcttccacacaacgtgctgagttccttgaggatgtatcaagcttttctttcatctgggggacgtaaggcggctaagaagttgttgaaaaagatacaaaaggaagatgctcacgtgcgctacataacatatgcttgtcgtgcgacatactgcagtaaagacttcaagccttctgctacagttaggttaagttccaaaggaagagctagatcaaaacctactaatgaggggtaagaggtctatttacttttaccacttccgttgcagtgaaatactgaaacgggatgaaatcaattcttttgttctgggaaattcgctcgtacttgttaactcctatcgctttggatcttagagactagggtgatcattgctaacatcggattatatcttaagcaattggtggagccatggagattttctgatttt

SEQ ID NO: 34170 - protein, 286 aa, Zea mays subsp. mays
LIPMTRNIYVALIVAYARLGNFDMAKQVLLDKEIPCKFLSDIKSALVGALALNGQVSDALRLHDEIMQPGGSLEPKAAIALIEHIRTEGELDRMHQLLDGLNDSNSWFDGCGRVLLYCVQHNYPDAAIDLLKQIREKDEMSTYMVVDQVFCQIWDMETTNLDFGMVFLDAVKELGLNVSRTSLDFLLSACVKAKDLRRAQQIWTEYESAGLPHNVLSSLRMYQAFLSSGGRKAAKKLLKKIQKEDAHVRYITYACRATYCSKDFKPSATVRLSSKGRARSKPTNEG

SEQ ID NO: 34171 - protein, 283 aa, Zea mays subsp. mays
MTRNIYVALIVAYARLGNFDMAKQVLLDKEIPCKFLSDIKSALVGALALNGQVSDALRLHDEIMQPGGSLEPKAAIALIEHIRTEGELDRMHQLLDGLNDSNSWFDGCGRVLLYCVQHNYPDAAIDLLKQIREKDEMSTYMVVDQVFCQIWDMETTNLDFGMVFLDAVKELGLNVSRTSLDFLLSACVKAKDLRRAQQIWTEYESAGLPHNVLSSLRMYQAFLSSGGRKAAKKLLKKIQKEDAHVRYITYACRATYCSKDFKPSATVRLSSKGRARSKPTNEG

SEQ ID NO: 34172 - protein, 263 aa, Zea mays subsp. mays
MAKQVLLDKEIPCKFLSDIKSALVGALALNGQVSDALRLHDEIMQPGGSLEPKAAIALIEHIRTEGELDRMHQLLDGLNDSNSWFDGCGRVLLYCVQHNYPDAAIDLLKQIREKDEMSTYMVVDQVFCQIWDMETTNLDFGMVFLDAVKELGLNVSRTSLDFLLSACVKAKDLRRAQQIWTEYESAGLPHNVLSSLRMYQAFLSSGGRKAAKKLLKKIQKEDAHVRYITYACRATYCSKDFKPSATVRLSSKGRARSKPTNEG

SEQ ID NO: 34173 - DNA, 2506 bp, Zea mays subsp. mays
gcacgagaccattacctagaacatcctaatcgaaaaaatcgaagccacgcggcttcttccttctgcgttccgcccctcctcttctccctcctcgcacccgcactgcccgcccgttcgtccgtcgtcgtcttcgccgctccctcccggcctcccgggctggacgaaacgaaccctcgctcgccctccttataaccgaacggccgaacccagccaacccagccgtttctcttcgtacggcctctgccagccagtgtctgctactagggaagcataccaactccccattcttctcttcgccgcagccaggaaggaaggatgtgcgggatcttcgcctacctcaactacaacgtctcgcgggagcgccgctacatcctcgaggtcctcttcaacggcctccgccgcctcgagtaccgcggctacgactccgccgggatcgcgctcgatgccgaccgccaggtcccctcccccgctcccgcttcctcttccgacgcgcggccgtacgccggggcgccgccgctcgtgttccgccaggagggcaagatcgagaacctcgtgcgatccgtctactccgaggttgatgagaaggatgtgaacctggatgctgcgttcagtgtgcatgctgggatcgcacataccaggtgggccacacacggtgtgcctgctccaaggaacagccacccccaatcgtctggtgccggtgatgagttcttggttgtccacaatggcattatcaccaactatgaggtcttgaaagagacactaactaggcacggcttcacctttgagtctgatacagacacagaagtcatccctaagctagcaaagttcgtttttgataaatctcatgatgaacaaggtgatgtgacgtttagccaagttgttatggaagtcatgaggcagcttgaaggagcctacgcacttatctttaaaagtccgcactatcccaatgaattgattgcatgcaaacgaggcagccaactgatacttggtgtcaacgaattgagtggtcaacagaatgggaaatcatttcatgatgtcaaaaccttgacaacaaatggaaagcccaaagaattattcttctccagtgatctatgtgctattgtagagcatacgaagaactacttagctcttgaagataatgaaattgttcatattaaggatggtagtgtttcgatcctcaagtttgaccctcacaaagagaagccagcatctgtgcaacgagcattgtctgttcttgagatggaagttgagcaaataaagaaaggaagttatgatcacttcatgcaaaaagaaatccatgaacagccacattcgttgaaaacaacaatgaggggtagattgaaggatggtggggttgttctaggtggactgaaggaatatctcaagacaattaggcgctgtagaagggtggtatttattggttgtggaacaagttacaatgctgccttagctgcaagaccttttgtggaagaactgactggtattcctgtgactatggaggttgcaagtgacttgctggacagacaaggtcccatctacagagaagacactgcagtttttgttagtcaatctggggagacagcagataccctccttgctctagattatgcactagaaaatggagctctctgtgttggcataacaaatactgttggaagcacgctgtctagaaaaacacactgtggggttcatatcaatgctggttgtgagattggtgttgccagtacaaaggcttatacaagtcaaatagtagccatggcgatgatggcgttggctattgggtccgatcagatatctactcaagctaggagggacagtatcattagtggactgaacaacctttcaagcaatgtcagcgaagttctcaagctagatgctggaatgaaggagctcgcctcttcgctgatcgactcagagtcgctcctcgtgttcggaaggggttacaactacgccaccgcgctggagggcgccctgaaggtcaaggaggtggcgctgatgcacagcgaaggcatgctcgctggcgagatgaagcacgggccgctggccctcgtggacgagaacctccccatcattgtcattgcgactcgcgacgcgtgcttcagcaagcagcagtcggtgatccagcagctcctctcgcgtagggggcgcctgatagtgatgtgctccaggggagatgcctcggctgtgtgccctagcggtgggtcgtgcagagtcattgaagttccacaggttgcagactgtctccagccagtgatcaacataattccattacagttgctcgcgtaccatctgactgttctccggggattcgacgtggaccaaccaaggaatctggcgaagagcgtgaccacgcagtagggagaggtagatgagatgtttgtattgtagttaattgtccttgctcttgaggtggctagtacgtagcataagtattatggtgcgttaaacttgttgttttgtgaacgaaatgcacctctcttttttttaattatggtatattggtgcc

SEQ ID NO: 34174 - protein, 680 aa, Zea mays subsp. mays
MCGIFAYLNYNVSRERRYILEVLFNGLRRLEYRGYDSAGIALDADRQVPSPAPASSSDARPYAGAPPLVFRQEGKIENLVRSVYSEVDEKDVNLDAAFSVHAGIAHTRWATHGVPAPRNSHPQSSGAGDEFLVVHNGIITNYEVLKETLTRHGFTFESDTDTEVIPKLAKFVFDKSHDEQGDVTFSQVVMEVMRQLEGAYALIFKSPHYPNELIACKRGSQLILGVNELSGQQNGKSFHDVKTLTTNGKPKELFFSSDLCAIVEHTKNYLALEDNEIVHIKDGSVSILKFDPHKEKPASVQRALSVLEMEVEQIKKGSYDHFMQKEIHEQPHSLKTTMRGRLKDGGVVLGGLKEYLKTIRRCRRVVFIGCGTSYNAALAARPFVEELTGIPVTMEVASDLLDRQGPIYREDTAVFVSQSGETADTLLALDYALENGALCVGITNTVGSTLSRKTHCGVHINAGCEIGVASTKAYTSQIVAMAMMALAIGSDQISTQARRDSIISGLNNLSSNVSEVLKLDAGMKELASSLIDSESLLVFGRGYNYATALEGALKVKEVALMHSEGMLAGEMKHGPLALVDENLPIIVIATRDACFSKQQSVIQQLLSRRGRLIVMCSRGDASAVCPSGGSCRVIEVPQVADCLQPVINIIPLQLLAYHLTVLRGFDVDQPRNLAKSVTTQ

SEQ ID NO: 34175 - protein, 491 aa, Zea mays subsp. mays
MEVMRQLEGAYALIFKSPHYPNELIACKRGSQLILGVNELSGQQNGKSFHDVKTLTTNGKPKELFFSSDLCAIVEHTKNYLALEDNEIVHIKDGSVSILKFDPHKEKPASVQRALSVLEMEVEQIKKGSYDHFMQKEIHEQPHSLKTTMRGRLKDGGVVLGGLKEYLKTIRRCRRVVFIGCGTSYNAALAARPFVEELTGIPVTMEVASDLLDRQGPIYREDTAVFVSQSGETADTLLALDYALENGALCVGITNTVGSTLSRKTHCGVHINAGCEIGVASTKAYTSQIVAMAMMALAIGSDQISTQARRDSIISGLNNLSSNVSEVLKLDAGMKELASSLIDSESLLVFGRGYNYATALEGALKVKEVALMHSEGMLAGEMKHGPLALVDENLPIIVIATRDACFSKQQSVIQQLLSRRGRLIVMCSRGDASAVCPSGGSCRVIEVPQVADCLQPVINIIPLQLLAYHLTVLRGFDVDQPRNLAKSVTTQ

SEQ ID NO: 34176 - protein, 488 aa, Zea mays subsp. mays
MRQLEGAYALIFKSPHYPNELIACKRGSQLILGVNELSGQQNGKSFHDVKTLTTNGKPKELFFSSDLCAIVEHTKNYLALEDNEIVHIKDGSVSILKFDPHKEKPASVQRALSVLEMEVEQIKKGSYDHFMQKEIHEQPHSLKTTMRGRLKDGGVVLGGLKEYLKTIRRCRRVVFIGCGTSYNAALAARPFVEELTGIPVTMEVASDLLDRQGPIYREDTAVFVSQSGETADTLLALDYALENGALCVGITNTVGSTLSRKTHCGVHINAGCEIGVASTKAYTSQIVAMAMMALAIGSDQISTQARRDSIISGLNNLSSNVSEVLKLDAGMKELASSLIDSESLLVFGRGYNYATALEGALKVKEVALMHSEGMLAGEMKHGPLALVDENLPIIVIATRDACFSKQQSVIQQLLSRRGRLIVMCSRGDASAVCPSGGSCRVIEVPQVADCLQPVINIIPLQLLAYHLTVLRGFDVDQPRNLAKSVTTQ

SEQ ID NO: 34177 - DNA, 1088 bp, Zea mays subsp. mays
agatgccggccctttccttttcgggatctcctcggtgacctagatcggatggacccgccgccggcgacgcgcgcggcgtccaggcggcgggaccgccgacggcgcctgcggcagcggcagcgcgcagctgcagccacgaaaacgagggtcggtgcggccgtgctggccgtggagccgcagagcgcagcagtcacaaccccggtggcttcgaccggccctgctgccacgccggcgtcgaggggcaggaaacggcggaggcctcgtagacggcgtgaccggaacgcgggcgccgctggggtggcggacgaaccaccggctgcgtcccccgttcccgttccagtattccgaaggccttactgcgatgattttctcaacttttgtgctctgaattttgagctaggcatatggtcctcaagaaaaaaagaaaatgttgattcggttgttaatattgttatgagtgaattcaaaccacgcctactgttttgttggtatgtccaggacatgtctaaatgcacattcaccggacataaaacactggagaataagcacaagccattagtgctgaaggaattgagaaaactatggaacgtggaagaacaagatcttccatgggaagtgggggactattcaccttcgaatacattactagtggatgattccccttacaaagctctgcgtaatcctccgcatactgccatttttcctcactcctacagttacttaaactggaatgacgattcgctgggtcccaatggagaccttcgtgtgtatctgcagaacctagccgctgcagataatgttcagcattttgttcgtgataatccgtttggtcaacctttcattactgagagcgatccgcattggaacttctatgctcagattgctgatagagggcgtgcacccttgacatgttgtgcttgaactcccaagggtcgtgcttttttctgggagttctgtggttatccatgatcaaaagatcatgatcagtatacagtgatcttctctgagtagtttgcttgtatccctgtactgaagattacagagtttctgctatgggtttaaattgcaggctctacgaaaggtatcag

SEQ ID NO: 34178 - protein, 306 aa, Zea mays subsp. mays
RCRPFPFRDLLGDLDRMDPPPATRAASRRRDRRRRLRQRQRAAAATKTRVGAAVLAVEPQSAAVTTPVASTGPAATPASRGRKRRRPRRRRDRNAGAAGVADEPPAASPVPVPVFRRPYCDDFLNFCALNFELGIWSSRKKENVDSVVNIVMSEFKPRLLFCWYVQDMSKCTFTGHKTLENKHKPLVLKELRKLWNVEEQDLPWEVGDYSPSNTLLVDDSPYKALRNPPHTAIFPHSYSYLNWNDDSLGPNGDLRVYLQNLAAADNVQHFVRDNPFGQPFITESDPHWNFYAQIADRGRAPLTCCA

SEQ ID NO: 34179 - protein, 290 aa, Zea mays subsp. mays
MDPPPATRAASRRRDRRRRLRQRQRAAAATKTRVGAAVLAVEPQSAAVTTPVASTGPAATPASRGRKRRRPRRRRDRNAGAAGVADEPPAASPVPVPVFRRPYCDDFLNFCALNFELGIWSSRKKENVDSVVNIVMSEFKPRLLFCWYVQDMSKCTFTGHKTLENKHKPLVLKELRKLWNVEEQDLPWEVGDYSPSNTLLVDDSPYKALRNPPHTAIFPHSYSYLNWNDDSLGPNGDLRVYLQNLAAADNVQHFVRDNPFGQPFITESDPHWNFYAQIADRGRAPLTCCA

SEQ ID NO: 34180 - protein, 155 aa, Zea mays subsp. mays
MSEFKPRLLFCWYVQDMSKCTFTGHKTLENKHKPLVLKELRKLWNVEEQDLPWEVGDYSPSNTLLVDDSPYKALRNPPHTAIFPHSYSYLNWNDDSLGPNGDLRVYLQNLAAADNVQHFVRDNPFGQPFITESDPHWNFYAQIADRGRAPLTCCA

SEQ ID NO: 34181 - DNA, 1967 bp, Zea mays subsp. mays
ggcacgagctcccactgcactgctgctccgctgccgctaccctttccctctcccttctcgtcctcggtcctccccaacccatggccacggccaccaccacccactgccccttctcccaccacgctatttatcgcggctgcacgactcctgcccatcaggcgccatagagacgcgtgggaccgaagccgccgatcaagcgctgctcggggcggagcagcggccggcggtggtgagtgctggcagacaggccggcaggtcaggcagagtgaccagctggtgagtcgaagcttgagcggggagctggactttgggggttccggcgggctccggagcggagatggtgctggatctcaatgtagcgtcgccggcggactcgggcacgtcgagctcgtccgtcctcaactccgcggacggcggcttccggttcggcctgctcgggagccccgtcgacgacgacgactgctccggtgagatggcgcctggcgcgtccacggggttcatgacgcggcagctcttcccgtccccgaccccgccggccgagccggagccggagccggtggcggcgccggtgccggtgtggcagccgcagcgcgccgaggatctcggcatggcccagaagccggtggcgccagcgaagaataccaggcgcgggcctaggtcgcggagctcgcagtacaggggcgtcaccttctacaggaggacgggccgctgggaatcgcacatctgggattgcgggaagcaagtctacctaggtggttttgacactgcgcacgcagccgcgagggcatacgatcgagctgcgatcaagttccgcggcctcgacgctgacatcaacttcagtctgagcgactacgaggatgatttgaagcagatgaggaattggaccaaggaggagttcgtgcacatactccggcgccagagcacggggttcgcgaggggaagctccaagtaccgtggcgtgacgctgcacaagtgcggccgctgggaagctaggatggggcaacttcttggcaagaagtacatctatcttgggctctttgacagcgaagttgaggcggcaagggcttatgacagggctgcccttcgcttcaatgggagggaagctgttactaactttgagcctagctcctacaatgcaggagataataacctgcgtgacaccgaaaccgaggcaattgatgatggtgatgccattgatttggatttgcggatttcacagcctaatgtgcaagaccccaaaagggacaataccttagctggcctccagccaacatgtgattcccctgaatcttcaaatacgatggcttctcagccaatgagctcatcatccccttggcccgggtatcaccaaaacccagcagtgtcatttcaccatcagcgcttgtactcgtcagcttgtcatggcttctttccgaaccaccaggtccaggaaaggccggtggagcgaaggcctgagctgggcgcccagccattcccctcatgggcatggcaagcgcagggctcccctcacgtgccgttgcaccactctgcagcatcatcaggattctctaccgccgccggggccaacggcggcatgcccctgccgtctcacccgccggcgcagttcccgactactacaaacccgttcttcttcccctagaccgcttttgacatgacagcttgctgttccggctcagctctcggcgtctgggatggcagctggtcttgcgtgtggcgtctagcagctctggtgatggaagaaagtgattgtgttttgtgtgtgtgtgtgtgagagagagagagagccataataagaagcgacatggctggtctccctctggtatgcgcctgttaggatatgggatatctccatgcatggattgtttccgagacagtagtagtattttgttgtagtcgaccatgcgtgtacatcagtataactggatctttgaagagctgagattttatgactcaacaagcattgacat

SEQ ID NO: 34182 - protein, 433 aa, Zea mays subsp. mays
MVLDLNVASPADSGTSSSSVLNSADGGFRFGLLGSPVDDDDCSGEMAPGASTGFMTRQLFPSPTPPAEPEPEPVAAPVPVWQPQRAEDLGMAQKPVAPAKNTRRGPRSRSSQYRGVTFYRRTGRWESHIWDCGKQVYLGGFDTAHAAARAYDRAAIKFRGLDADINFSLSDYEDDLKQMRNWTKEEFVHILRRQSTGFARGSSKYRGVTLHKCGRWEARMGQLLGKKYIYLGLFDSEVEAARAYDRAALRFNGREAVTNFEPSSYNAGDNNLRDTETEAIDDGDAIDLDLRISQPNVQDPKRDNTLAGLQPTCDSPESSNTMASQPMSSSSPWPGYHQNPAVSFHHQRLYSSACHGFFPNHQVQERPVERRPELGAQPFPSWAWQAQGSPHVPLHHSAASSGFSTAAGANGGMPLPSHPPAQFPTTTNPFFFP

SEQ ID NO: 34183 - protein, 388 aa, Zea mays subsp. mays
MAPGASTGFMTRQLFPSPTPPAEPEPEPVAAPVPVWQPQRAEDLGMAQKPVAPAKNTRRGPRSRSSQYRGVTFYRRTGRWESHIWDCGKQVYLGGFDTAHAAARAYDRAAIKFRGLDADINFSLSDYEDDLKQMRNWTKEEFVHILRRQSTGFARGSSKYRGVTLHKCGRWEARMGQLLGKKYIYLGLFDSEVEAARAYDRAALRFNGREAVTNFEPSSYNAGDNNLRDTETEAIDDGDAIDLDLRISQPNVQDPKRDNTLAGLQPTCDSPESSNTMASQPMSSSSPWPGYHQNPAVSFHHQRLYSSACHGFFPNHQVQERPVERRPELGAQPFPSWAWQAQGSPHVPLHHSAASSGFSTAAGANGGMPLPSHPPAQFPTTTNPFFFP

SEQ ID NO: 34184 - protein, 379 aa, Zea mays subsp. mays
MTRQLFPSPTPPAEPEPEPVAAPVPVWQPQRAEDLGMAQKPVAPAKNTRRGPRSRSSQYRGVTFYRRTGRWESHIWDCGKQVYLGGFDTAHAAARAYDRAAIKFRGLDADINFSLSDYEDDLKQMRNWTKEEFVHILRRQSTGFARGSSKYRGVTLHKCGRWEARMGQLLGKKYIYLGLFDSEVEAARAYDRAALRFNGREAVTNFEPSSYNAGDNNLRDTETEAIDDGDAIDLDLRISQPNVQDPKRDNTLAGLQPTCDSPESSNTMASQPMSSSSPWPGYHQNPAVSFHHQRLYSSACHGFFPNHQVQERPVERRPELGAQPFPSWAWQAQGSPHVPLHHSAASSGFSTAAGANGGMPLPSHPPAQFPTTTNPFFFP

SEQ ID NO: 34185 - DNA, 548 bp, Zea mays subsp. mays
tctgtgacgagttcctcctgagtcagtctcagacctcttgtggaggtggagatgaacctagagagaccaaaccctgcctggctgcttatgcccatctgtcagcagaggacttcaagaaggatttagagtgccagcggttggagcccacagataacacaaaccttgagcttgacaacactgatgagtttcgactcagccaaattgaattttcacaggatagctttatgacatgggcagctgaaaagattactgacgactgacgctgctctagtgcactctcggcaccattttggtacatgaagaaacaactgatctgtttttttgtgggacggcagtgaagtctgcaacaacagtggtctcgcttttgctttgagtagctctggtgcacataaaataatttatatgaaatatgaaaggctgaggaatcatgcggtaccaactgtggagtactgttcagtgtgagattggccttggttgcatcagcttgtacattttgtaatgaatatgctcattttagttggcagaccagttgcttgtttggaattggt

SEQ ID NO: 34186 - protein, 85 aa, Zea mays subsp. mays
CDEFLLSQSQTSCGGGDEPRETKPCLAAYAHLSAEDFKKDLECQRLEPTDNTNLELDNTDEFRLSQIEFSQDSFMTWAAEKITDD

SEQ ID NO: 34187 - DNA, 1311 bp, Zea mays subsp. mays
  misc_feature (1281)..(1281): n is a, c, g, or t
atgacacgccaagcgcgcaattaaccctcactaaagggaacaaaagctggagctccaccgcggtggcggccgctctagaactagtggatcccccgggctgcaggaattcgcacgagaccattacctagaacatcctaatcgaaaaaaaactctggttcttcttttaacgcaagaaagaaagaaagaaaaggggcaggaagaaatcgagcctcactcgatccatcgcctcgccgcagcacacacgaggccggcggcgccatggccatgaagctggacatgtccgcgctcgagaccaacttcgccaacctgaccgcctccgccggcgacgacacgtacttctccgccgaggcccccgacgtgccgtccatggtgctccccatctgcgacgacttcgacggcttccaggcggccaccaaggatatggtgaagaataagaaggggacgaccacgcttgccttcatcttcgacaagggcgtcatcgtcgccgctgattccagggccagcatgggcggttatatatcctcacaaaccgtgaggaaaattattgaaataaatccttacatgctggggacaatggctggaggtgctgctgattgccaattttggcataggaacctaggaaccaagtgtcgtctccatgagctttcaaacaagcgaaggatctctattgctggtgcttccaaactgttggctaacatcctttattcatatcgtgggatgggactgtcgattggtacaatgatcgctggatgggatgagaagggtcctggtttgtactatgttgacagtgagggtgcgcggctcgtggggaacaggttctctgttggctctggttcactgtatgcctatggtatcttggatgatggttaccgcttcagcatgtcagttgaggaagccgccgaattagcgcgacgggctatttatggggcaacattccgtgatgcagcaagtggtggttgtgttagtgtttaccacgttggccctgatggttggacgaagctttctggggatgatgtcggggagctgcactaccactactacccggttcagaaaactccggttgaacaggagatggccgatgcgcctactgcttctgcttaaacctgttgctgagaaaaccttgagcggagccgcatgtatccatgaaccatgaattgtagaagcgccatgtttatgaacgaacttggacatgtttgtctcacaacgttagatcactctttgtgttctgttgattgatatcttaaatttgcgcaattgttgagtccttttgagattttttanatctgtgctatgttgacgccggctgtctgc

SEQ ID NO: 34188 - protein, 280 aa, Zea mays subsp. mays
MAMKLDMSALETNFANLTASAGDDTYFSAEAPDVPSMVLPICDDFDGFQAATKDMVKNKKGTTTLAFIFDKGVIVAADSRASMGGYISSQTVRKIIEINPYMLGTMAGGAADCQFWHRNLGTKCRLHELSNKRRISIAGASKLLANILYSYRGMGLSIGTMIAGWDEKGPGLYYVDSEGARLVGNRFSVGSGSLYAYGILDDGYRFSMSVEEAAELARRAIYGATFRDAASGGCVSVYHVGPDGWTKLSGDDVGELHYHYYPVQKTPVEQEMADAPTASA

SEQ ID NO: 34189 - protein, 278 aa, Zea mays subsp. mays
MKLDMSALETNFANLTASAGDDTYFSAEAPDVPSMVLPICDDFDGFQAATKDMVKNKKGTTTLAFIFDKGVIVAADSRASMGGYISSQTVRKIIEINPYMLGTMAGGAADCQFWHRNLGTKCRLHELSNKRRISIAGASKLLANILYSYRGMGLSIGTMIAGWDEKGPGLYYVDSEGARLVGNRFSVGSGSLYAYGILDDGYRFSMSVEEAAELARRAIYGATFRDAASGGCVSVYHVGPDGWTKLSGDDVGELHYHYYPVQKTPVEQEMADAPTASA

SEQ ID NO: 34190 - protein, 274 aa, Zea mays subsp. mays
MSALETNFANLTASAGDDTYFSAEAPDVPSMVLPICDDFDGFQAATKDMVKNKKGTTTLAFIFDKGVIVAADSRASMGGYISSQTVRKIIEINPYMLGTMAGGAADCQFWHRNLGTKCRLHELSNKRRISIAGASKLLANILYSYRGMGLSIGTMIAGWDEKGPGLYYVDSEGARLVGNRFSVGSGSLYAYGILDDGYRFSMSVEEAAELARRAIYGATFRDAASGGCVSVYHVGPDGWTKLSGDDVGELHYHYYPVQKTPVEQEMADAPTASA

SEQ ID NO: 34191 - DNA, 1164 bp, Zea mays subsp. mays
gcacgagaccattacctagaacatcctaatcgaaaaagtagtacaacggggcagcactgcactgcactgcaactgcgaatttccgtcagcttggagcggtccaagcgccctgcgaagcaaactacgccgatggcttcggcggcggcgtgggagggtccgacggccgcggagctgaagacagcgggggcggaggtgattcccggcggcgtgcgagtgaaggggtgggtcatccagtcccacaaaggccctatcctcaacgccgcctctctgcaacgctttgaagatgaacttcaaacaacacatttacctgagatggtttttggagagagtttcttgtcacttcaacatacacaaactggcatcaaatttcattttaatgcgcttgatgcactcaaggcatggaagaaagaggcactgccacctgttgaggttcctgctgcagcaaaatggaagttcagaagtaagccttctgaccaggttatacttgactacgactatacatttacgacaccatattgtgggagtgatgctgtggttgtgaactctggcactccacaaacaagtttagatggatgcggcactttgtgttgggaggatactaatgatcggattgacattgttgccctttcagcaaaagaacccattcttttctacgacgaggttatcttgtatgaagatgagttagctgacaatggtatctcatttcttactgtgcgagtgagggtaatgccaactggttggtttctgcttttgcgtttttggcttagagttgatggtgtactgatgaggttgagagacactcggttacattgcctgtttggaaacggcgacggagccaagccagtggtacttcgtgagtgctgctggagggaagcaacatttgctactttgtctgcgaaaggatatccttcggactctgcagcgtacgcggacccgaaccttattgcccataagctttcctattgtgacgcagaagacccaaaagctgaaaaatcttacctgactgacacaaaggcgccctaccgcgtgtacatcatgactgtcctgtcctatcgttgccttttgtgtttgccacatgttgtggatgtacgtttctatgacgaaacaccatagtccatttcgcctgggccgaacagagatagctgcttgtcatgtcacgtttgg

SEQ ID NO: 34192 - protein, 370 aa, Zea mays subsp. mays
ARDHYLEHPNRKSSTTGQHCTALQLRISVSLERSKRPAKQTTPMASAAAWEGPTAAELKTAGAEVIPGGVRVKGWVIQSHKGPILNAASLQRFEDELQTTHLPEMVFGESFLSLQHTQTGIKFHFNALDALKAWKKEALPPVEVPAAAKWKFRSKPSDQVILDYDYTFTTPYCGSDAVVVNSGTPQTSLDGCGTLCWEDTNDRIDIVALSAKEPILFYDEVILYEDELADNGISFLTVRVRVMPTGWFLLLRFWLRVDGVLMRLRDTRLHCLFGNGDGAKPVVLRECCWREATFATLSAKGYPSDSAAYADPNLIAHKLSYCDAEDPKAEKSYLTDTKAPYRVYIMTVLSYRCLLCLPHVVDVRFYDETP

SEQ ID NO: 34193 - protein, 327 aa, Zea mays subsp. mays
MASAAAWEGPTAAELKTAGAEVIPGGVRVKGWVIQSHKGPILNAASLQRFEDELQTTHLPEMVFGESFLSLQHTQTGIKFHFNALDALKAWKKEALPPVEVPAAAKWKFRSKPSDQVILDYDYTFTTPYCGSDAVVVNSGTPQTSLDGCGTLCWEDTNDRIDIVALSAKEPILFYDEVILYEDELADNGISFLTVRVRVMPTGWFLLLRFWLRVDGVLMRLRDTRLHCLFGNGDGAKPVVLRECCWREATFATLSAKGYPSDSAAYADPNLIAHKLSYCDAEDPKAEKSYLTDTKAPYRVYIMTVLSYRCLLCLPHVVDVRFYDETP

SEQ ID NO: 34194 - protein, 266 aa, Zea mays subsp. mays
MVFGESFLSLQHTQTGIKFHFNALDALKAWKKEALPPVEVPAAAKWKFRSKPSDQVILDYDYTFTTPYCGSDAVVVNSGTPQTSLDGCGTLCWEDTNDRIDIVALSAKEPILFYDEVILYEDELADNGISFLTVRVRVMPTGWFLLLRFWLRVDGVLMRLRDTRLHCLFGNGDGAKPVVLRECCWREATFATLSAKGYPSDSAAYADPNLIAHKLSYCDAEDPKAEKSYLTDTKAPYRVYIMTVLSYRCLLCLPHVVDVRFYDETP

SEQ ID NO: 34195 - DNA, 2026 bp, Zea mays subsp. mays
  misc_feature (489)..(489): n is a, c, g, or t
agaccattacctagaacatcctaattgaaaagcacgccacagtgtcgtcaagatcgagaagcatacatggacagcaccaacgtggcaagtgcagcgccacggcctcgagcgccatgcagcctccaagccgcactcgtacgcagagccgccgttgtccgcaccaccaccaagaacgcgacgacgagaccacggtcgctgcgcctctcctgcaaggcgggcgacgacgacgacggcgtcgaccgccgcgacgtgctcctcggcctgatggccggcgccggagcggcggctgccgggatcgcgagtaataatacgcacggcagcagcagcgcgctcgcggcgcccgtccagggccccggacctccaggcgtgccgggacgcctgacgtccccggcgacggcagcggaccccaggctgctgcatgacgtaccgcgccggcctggcgccgccggccattatcgacttccagccgccgcgcgcgtcgtcgtcgtngtcctcgccgctccgcgtgcgccccgcggcgcacctggtggacagcgcgtacgtggccaagtacgagagggccgtggcgctcatgagggagcttccggacgatgacccgcgcagctttgcgcagcaggcgcacgtgcactgcgcctactgtaacggcgcgtacggccaggccgggttcccggacctggacttgcagatccacaactgctggctcttcttcccgtggcacaggctttacgtgtacttccatgagaggatcctcggcaagctcatcggcgacgactccttcgcgctgccgttctggaactgggacgcgccaggcggcatgacactgccggcgatctatagcagcgcgtcttcaccgttgtacgacgagagacgcaacacggcgcaccagccaccgtcgtttctcggcctcgacttcagtgacaccgaccccgacgacatgccaagggatctgcaggtcgaccagaatctcaaggtcatgtaccgccagatgatctctggcgccaagaggagggagctgttcatggggcagccgtaccgcgcgggcgacgcggcggacccgggcgccggcaccgtcgagaacgtgccgcacgggccgctccacgtgtgggtgggcgacccgacgcagcccaacggcgaggacatgggcaacttctactccgcggcgcgcgacccggtgttcttcgcgcaccacggcaacatcgaccggctgtggcacgtgtggcgcggcctgagcccccgcaacaccgacttcgccgacgccgactggctggacgccagcttccacttctacgacgaggaggcccggctcgtgcgcgcccgcgtccgcgactgcctcgacccggccgcgctgcgctacgcgtaccaggacgtcgggctgccgtggctggacgccaggccggccaggacggcgggggcgggggcgccggcgcccgccacggacggcgtggtgttcccggcgaggctggacaggaccgtgagggtggccgtggcgcggcccagggtctcacggagccaggaggagaaggacgaggaggaggaggtgctggtcgtcgacggcatccaggtcgcggatcacctgaggtacgtgaagttcgacgtgttcgtgaaccagtgcgcgggcggggacgacagcacggcggcggccgagtgcgcggggagcttcgtgctcacgccgcacgtgatccagcagaaggaggaaggaggaggaggctcgccggtcaagacggcggcgaggtttggcatcaccgacttgctggacgatatcggagctgacggggacgttacgatcgtggtgtcgctcgttccgaggtgcgccggcgacgtggtcaccgtggacggcgtcagtgtcacgtacgttaagtgaaagtagtgccgcgcgcgcgagatgatcaatttatacaccctgatccgtctatatacacgtacggatgcccgtataacaagtgctttgaataatgggtgtctgcttatgcttttgtatctgctcctagcgagtggctgaataatactggtccagactatatgaact

SEQ ID NO: 34196 - protein, 480 aa, Zea mays subsp. mays
  misc_feature (24)..(24): Xaa can be any naturally occurring amino acid
MTYRAGLAPPAIIDFQPPRASSSXSSPLRVRPAAHLVDSAYVAKYERAVALMRELPDDDPRSFAQQAHVHCAYCNGAYGQAGFPDLDLQIHNCWLFFPWHRLYVYFHERILGKLIGDDSFALPFWNWDAPGGMTLPAIYSSASSPLYDERRNTAHQPPSFLGLDFSDTDPDDMPRDLQVDQNLKVMYRQMISGAKRRELFMGQPYRAGDAADPGAGTVENVPHGPLHVWVGDPTQPNGEDMGNFYSAARDPVFFAHHGNIDRLWHVWRGLSPRNTDFADADWLDASFHFYDEEARLVRARVRDCLDPAALRYAYQDVGLPWLDARPARTAGAGAPAPATDGVVFPARLDRTVRVAVARPRVSRSQEEKDEEEEVLVVDGIQVADHLRYVKFDVFVNQCAGGDDSTAAAECAGSFVLTPHVIQQKEEGGGGSPVKTAARFGITDLLDDIGADGDVTIVVSLVPRCAGDVVTVDGVSVTYVK

SEQ ID NO: 34197 - protein, 429 aa, Zea mays subsp. mays
MRELPDDDPRSFAQQAHVHCAYCNGAYGQAGFPDLDLQIHNCWLFFPWHRLYVYFHERILGKLIGDDSFALPFWNWDAPGGMTLPAIYSSASSPLYDERRNTAHQPPSFLGLDFSDTDPDDMPRDLQVDQNLKVMYRQMISGAKRRELFMGQPYRAGDAADPGAGTVENVPHGPLHVWVGDPTQPNGEDMGNFYSAARDPVFFAHHGNIDRLWHVWRGLSPRNTDFADADWLDASFHFYDEEARLVRARVRDCLDPAALRYAYQDVGLPWLDARPARTAGAGAPAPATDGVVFPARLDRTVRVAVARPRVSRSQEEKDEEEEVLVVDGIQVADHLRYVKFDVFVNQCAGGDDSTAAAECAGSFVLTPHVIQQKEEGGGGSPVKTAARFGITDLLDDIGADGDVTIVVSLVPRCAGDVVTVDGVSVTYVK

SEQ ID NO: 34198 - protein, 348 aa, Zea mays subsp. mays
MTLPAIYSSASSPLYDERRNTAHQPPSFLGLDFSDTDPDDMPRDLQVDQNLKVMYRQMISGAKRRELFMGQPYRAGDAADPGAGTVENVPHGPLHVWVGDPTQPNGEDMGNFYSAARDPVFFAHHGNIDRLWHVWRGLSPRNTDFADADWLDASFHFYDEEARLVRARVRDCLDPAALRYAYQDVGLPWLDARPARTAGAGAPAPATDGVVFPARLDRTVRVAVARPRVSRSQEEKDEEEEVLVVDGIQVADHLRYVKFDVFVNQCAGGDDSTAAAECAGSFVLTPHVIQQKEEGGGGSPVKTAARFGITDLLDDIGADGDVTIVVSLVPRCAGDVVTVDGVSVTYVK

SEQ ID NO: 34199 - DNA, 1243 bp, Zea mays subsp. mays
taatccaaaagtcggcgaaaatccctttcaacattcgtgggcggggcggatgacctggagctggaggttcgtggtagcggccgccgccggccatggagaagagaaatcggattctcgacctgcaggacctcctctctgacgcggacttcggcccactactcgcccgacagctactgtctccgttcatgcggcggccacctacctacctcgtagcaagacaccatatcataagtgctgccatggatttgcacctagagctctacattggtcgccggcgccgcggcggaggcgagactcagaactcagaagtaccctcccatgggagtccacttctgtcggcttgatggagcacctgatggatggagaggagctcgcccaacagagtgaatggaacggagcgtgactgtgagagcgggatgggaacggagcggctccgtccggttgatttttttggagcggaatggtccttcctgctgccgcggccgcctcccacttcgactgctcccgcacctttcgttcacgcaagcgcaacctgcttctcccgctggctgtctcggacaccccctccctcctgccacgcatcctccccgcccacgagtctcccccgcaaggccgcaaccggataataaggaagaggaagagaaaccgtgcggtgcggcgaaaggaacagtgaaaaaggaagaatctctgatcgaggttcctgtccggcttgcagaatcttggcggccagccagccatatatggatgtactgctaggttccgggaggttcttggcgcgacggcctcccctcgcgctcgtccctcgctgctctcgaggctccccggacaaaagcggcagcgacaaaggtgaaacctcagctgactgggacaaggcatggtctgccttcaagaagaaagggaagaggaccctgttttctgatttctcaccggacaagtacgtgatctggaacccacggcgcagcgagtatccattgtcagaagaggtcgatccaatcaagagaagtgaaatatctaacttgatgctgtggacaagcccccagttcaccttggtcggggcgattatcatcgtcttgacattgctaatctatacactagttgttcctcctcccaagtaactgcagaggtgcacaactactaggggggtgagctgtaaactagtagtatttcaactggggagtctgtattgtacatttttacgtgtactatggcaactatagcagtattaattcaattgcgatcatgt

SEQ ID NO: 34200 - protein, 124 aa, Zea mays subsp. mays
MDVLLGSGRFLARRPPLALVPRCSRGSPDKSGSDKGETSADWDKAWSAFKKKGKRTLFSDFSPDKYVIWNPRRSEYPLSEEVDPIKRSEISNLMLWTSPQFTLVGAIIIVLTLLIYTLVVPPPK

SEQ ID NO: 34201 - protein, 122 aa, Zea mays subsp. mays
MERSVTVRAGWERSGSVRLIFLERNGPSCCRGRLPLRLLPHLSFTQAQPASPAGCLGHPLPPATHPPRPRVSPARPQPDNKEEEEKPCGAAKGTVKKEESLIEVPVRLAESWRPASHIWMYC

SEQ ID NO: 34202 - protein, 88 aa, Zea mays subsp. mays
MERSSPNRVNGTERDCESGMGTERLRPVDFFGAEWSFLLPRPPPTSTAPAPFVHASATCFSRWLSRTPPPSCHASSPPTSLPRKAATG

SEQ ID NO: 34203 - DNA, 1006 bp, Zea mays subsp. mays
aaacatggaatggtagtgggggggtggtttcggatcgggactccacagcttttggcggcgtattctagtatacaccaaaaaagagaaagaaaagcaccgaaaaactagcaaaccctacctcctctcctcccctcccctcctcggcggcggaatgtccgaccgccgccgcgacaaggagaagccccgcgaccgcgacatcgaccgtcatcgcgaccgagaccgcgacatcgaccgtcatcgcgaccgagaccgcgaccgggaccgggacagggacagggacagggatcgcgagcgagaccaccgccgcgagcgcgagcgcgagcggaagcgctcccgctcccggtccccgtcggcggatcgggaccgctcccaccgccgccactctcattcgcaccgaggccgtccttccccctctcccgacgccggccgccacaagcgccgccgcgaggcgtcccctgcctccgcggaccatcaccataaggaggataagaaggctgccgactctcacgcgacacccggcggaggggacatcgcggccgcggccgctgcggtgggtgacggcgacgtgaatgcggaggaactggagatgatgaagatgatgggcattcccgtcggtttcgactccaccaaggggaagcacgtgcccgacgccgacgtcagcggggtgcgtgccgtcaccaagcgccagccgcgccagtacatgaaccgccgcggcggattcaaccgccctctgccgcctgagcgcaaccgctaaggatgggaaaaggatcatgcgccaacacaaggatgtgctgatttctgggtagcagttactctgttactggacagtgtagtgagcatgtataaaccttgatggctatttaatttgcaaaacactgtagaatgatttcccgttcccttttgtcatcgtttattctgtgggcattccaggaaaacagaatttggtggatcattttgaaactgtggctttacagctttaacatgatgtttctggctttctgcgtgc

SEQ ID NO: 34204 - protein, 200 aa, Zea mays subsp. mays
MSDRRRDKEKPRDRDIDRHRDRDRDIDRHRDRDRDRDRDRDRDRDRERDHRRERERERKRSRSRSPSADRDRSHRRHSHSHRGRPSPSPDAGRHKRRREASPASADHHHKEDKKAADSHATPGGGDIAAAAAAVGDGDVNAEELEMMKMMGIPVGFDSTKGKHVPDADVSGVRAVTKRQPRQYMNRRGGFNRPLPPERNR

SEQ ID NO: 34205 - DNA, 1305 bp, Zea mays subsp. mays
ccattacctagaacatcctaatcgaaaaatccctaatcgccagttcgccaccagcctccgcctctcccctcccactcggccactcccagtgccagccgccgtgcgctcgctcgcgcgcgctctctttctgggacgaccagtgggatatctccaccgccgccttacgccaggtgcggaccttcgccgatctcttcgccagcgaagagcgtccatcagtaaaaatggtggcccttacaaatgaagaggccttggcccatgatgaagatatcatggatgatgttgattctgatgttgaagaatcggactcagaagacgattcaggtgaagaagctcaggataagccttcagacaaagctatatacaacaaggaggccatccttgaaaaacttgaagatattgcctggcccaagaatgtggactggatacacaagctcaccattgagcatgatcagggggaaaaggttgatgtgaatgatgatcttgctcgtgaacttgcgttttacacccaagctttggatggcacaaggcaggcctttgagaagctgcagtcgatgaaggtcaggttcctcaggccaacagattactatgctgagatggtgaagactgatgcacacatgcacaagatcaaggggaggctgctgtcagagaagaagaggatcgaggaggctgaggaacggaggaaggctagagattccaggaagaaagcaaaggaggttcaggctgagaagaagaaggagagggctaagcagaagaaggagcagattgagtcagtcaagaagtggaggaagcagaggcaacaagggggattcaccaagggaaatgatgatgtgccagaccttaattttgaaggagaagaaggatttaaacaatcaaagaaaaggaggcctggtgtttctcctggtgacaggtctggtggtcttgctaaacgaggtaaagaaggaaagaacaggagggcaaaggattccatgtttgggcacggtggtcgtaaagggctgaagaagcaaaacaccgctgagaccactaatgatttcagaagctttaaccaggggggtgggtctcaaaacaagaagagaaagaggttttgaacttttgatggatatagtaagaatttgggtgagtctcaaaaccagaagaggaagaagttttgaacctttgctgttattactatccccgctgtggcattattttgttatggtgtgtgccagaaggaaaaattagcttgtattagtctagagaagcagtccaaacacaaggctttatgttttgctttatctgataatggtcttcttttatcacggaatttag

SEQ ID NO: 34206 - protein, 287 aa, Zea mays subsp. mays
MVALTNEEALAHDEDIMDDVDSDVEESDSEDDSGEEAQDKPSDKAIYNKEAILEKLEDIAWPKNVDWIHKLTIEHDQGEKVDVNDDLARELAFYTQALDGTRQAFEKLQSMKVRFLRPTDYYAEMVKTDAHMHKIKGRLLSEKKRIEEAEERRKARDSRKKAKEVQAEKKKERAKQKKEQIESVKKWRKQRQQGGFTKGNDDVPDLNFEGEEGFKQSKKRRPGVSPGDRSGGLAKRGKEGKNRRAKDSMFGHGGRKGLKKQNTAETTNDFRSFNQGGGSQNKKRKRF

SEQ ID NO: 34207 - protein, 271 aa, Zea mays subsp. mays
MDDVDSDVEESDSEDDSGEEAQDKPSDKAIYNKEAILEKLEDIAWPKNVDWIHKLTIEHDQGEKVDVNDDLARELAFYTQALDGTRQAFEKLQSMKVRFLRPTDYYAEMVKTDAHMHKIKGRLLSEKKRIEEAEERRKARDSRKKAKEVQAEKKKERAKQKKEQIESVKKWRKQRQQGGFTKGNDDVPDLNFEGEEGFKQSKKRRPGVSPGDRSGGLAKRGKEGKNRRAKDSMFGHGGRKGLKKQNTAETTNDFRSFNQGGGSQNKKRKRF

SEQ ID NO: 34208 - protein, 177 aa, Zea mays subsp. mays
MKVRFLRPTDYYAEMVKTDAHMHKIKGRLLSEKKRIEEAEERRKARDSRKKAKEVQAEKKKERAKQKKEQIESVKKWRKQRQQGGFTKGNDDVPDLNFEGEEGFKQSKKRRPGVSPGDRSGGLAKRGKEGKNRRAKDSMFGHGGRKGLKKQNTAETTNDFRSFNQGGGSQNKKRKRF

SEQ ID NO: 34209 - DNA, 2275 bp, Zea mays subsp. mays
aatgtcccttggtcctctctctgacatctcttgtctcctcttcattgcaaatgtttctcttcctctctcccacctctcctctcctctccattgcaaaccttcgggatgaaggttgagagcctgctctgaaacgacgtacgtaaagggaacaaggaaccggagagcgtgcggcgggcttctggattttagagtaggcacctgtcgcttggacgtgcttcggaggagtaggtgtccaaaagttgcctacagtgggtccagaggtcatgatatagactgtcatggaggcagctgcagatgaggagaggccactgattcagtacctggctccagaggatgatgaagcttcctcacgatacactagcgacggaacgctcgatatcaacaatcagcgtgctctgaagaagagcaccgggaactggagagcatgcttcatgattctgggtaccgagttcgccgaatgcctggcattttacgcgaccgcaaagaacctggtcacctacctcacggctgagcttggtgagagcaacatcgatgccgcgacgaacgtgtccacctcgattggcagctgctacctcacgccgctcatcggcgccttcttggccgacacgtactggggaagatacaagacgatgatagtcttcctcttgctctacatcgttgggatgcttactctgacagcgtcggcgtggctccccttggccatggaggacgactcgcctaacaacagcggacttcggcgtgccacagcgtacctggggctctacctcgtttccctaggcacaggaggcatcaagccctgcacggcggccctcggggccgaccagttcgacggcggcgacgcggcggagcgggtcaccaaggcctccttcttcaactggtactacttctgcaccaacatcggctccctgctgtcggggaccgtgctcgtctgggtgcaggaaaatattggatggggagtcgggtttacggtgcagacggtgttcatgctgttcggcctcgccgtgttcgtcgccggtcgcaaggtgtataggtacaagaagctgggcgggagccctctcacaagggtagcccaggtggttgtcgcggcggtgaggaactgccatctcgtgctgcctgatgatacgtcagccctgtaccacgataagcttctaccaactgaaccaaatttcaggattgagtctgccagacaattcagattctttgacaaggctgccataatcaccggcgagaagggtgcagcagcgccgacgagcccttggagactgtgcacggtgtcccaggtggaggagctgaagatgctgctccggttgctgccggtctgggcatccatggtgctcttcttcgccgtcagtgcgcagacggtaaccacgttcattgagcaggctagggtaatggacaaccgcatcggcccgttcatcattcctccggcgtcgatagcgaccttcgacgtgatcagcgtcatggtctgtgtccccgtctacgacgccgtgctggtgcctctggcccggcgtgccactggcaacgaccgcggcctgtcgcagctgcaccggctctccatcgggatcgcgctgtccgtggtcgtcatggtgtacgcggcgctgctcgagggcaggcgcctggccctcgcgcgggccaacatgcccgccatgaacatcgcgtggcaggcgcccatgttcgccgtgcacggcgcggcggcggtcttcgccaccgtcggcgtgctcgagttcttctacgaccagtcgccggacgggatgaagagcctcggcaacgcgctcgcgctgctctccatggcggccgggagctatttcaactcgcttgcgctcagcactgtcggggtgatcacggcgagcggcggggaacgcgggtggctcccggacgacctgaacaagggtcatatggactatttcttctggatgatggccgctctaggaacgctcaacctgctgcacttcttgcactactgcaacagacgatacacaggcaacaacaacaccacttcttgacgtgtgctgtcatgctgtgtgcaccatgtttctcaaaataatagtttgacaatactacactttgtaattattgttgagtttgtgatctaaattctgaagaaggcggccaagttaatgagcgaagcggaggcccgtcgccgggaggctttccctactcattttagggtttcacctctataaatatctttgtaagccgtaggagataattatctcaattgtaaatctcctgcgatctgtaaccacccgaaaatagtgagaagttgttggccggc

SEQ ID NO: 34210 - protein, 574 aa, Zea mays subsp. mays
MEAAADEERPLIQYLAPEDDEASSRYTSDGTLDINNQRALKKSTGNWRACFMILGTEFAECLAFYATAKNLVTYLTAELGESNIDAATNVSTSIGSCYLTPLIGAFLADTYWGRYKTMIVFLLLYIVGMLTLTASAWLPLAMEDDSPNNSGLRRATAYLGLYLVSLGTGGIKPCTAALGADQFDGGDAAERVTKASFFNWYYFCTNIGSLLSGTVLVWVQENIGWGVGFTVQTVFMLFGLAVFVAGRKVYRYKKLGGSPLTRVAQVVVAAVRNCHLVLPDDTSALYHDKLLPTEPNFRIESARQFRFFDKAAIITGEKGAAAPTSPWRLCTVSQVEELKMLLRLLPVWASMVLFFAVSAQTVTTFIEQARVMDNRIGPFIIPPASIATFDVISVMVCVPVYDAVLVPLARRATGNDRGLSQLHRLSIGIALSVVVMVYAALLEGRRLALARANMPAMNIAWQAPMFAVHGAAAVFATVGVLEFFYDQSPDGMKSLGNALALLSMAAGSYFNSLALSTVGVITASGGERGWLPDDLNKGHMDYFFWMMAALGTLNLLHFLHYCNRRYTGNNNTTS

SEQ ID NO: 34211 - protein, 523 aa, Zea mays subsp. mays
MILGTEFAECLAFYATAKNLVTYLTAELGESNIDAATNVSTSIGSCYLTPLIGAFLADTYWGRYKTMIVFLLLYIVGMLTLTASAWLPLAMEDDSPNNSGLRRATAYLGLYLVSLGTGGIKPCTAALGADQFDGGDAAERVTKASFFNWYYFCTNIGSLLSGTVLVWVQENIGWGVGFTVQTVFMLFGLAVFVAGRKVYRYKKLGGSPLTRVAQVVVAAVRNCHLVLPDDTSALYHDKLLPTEPNFRIESARQFRFFDKAAIITGEKGAAAPTSPWRLCTVSQVEELKMLLRLLPVWASMVLFFAVSAQTVTTFIEQARVMDNRIGPFIIPPASIATFDVISVMVCVPVYDAVLVPLARRATGNDRGLSQLHRLSIGIALSVVVMVYAALLEGRRLALARANMPAMNIAWQAPMFAVHGAAAVFATVGVLEFFYDQSPDGMKSLGNALALLSMAAGSYFNSLALSTVGVITASGGERGWLPDDLNKGHMDYFFWMMAALGTLNLLHFLHYCNRRYTGNNNTTS

SEQ ID NO: 34212 - protein, 457 aa, Zea mays subsp. mays
MIVFLLLYIVGMLTLTASAWLPLAMEDDSPNNSGLRRATAYLGLYLVSLGTGGIKPCTAALGADQFDGGDAAERVTKASFFNWYYFCTNIGSLLSGTVLVWVQENIGWGVGFTVQTVFMLFGLAVFVAGRKVYRYKKLGGSPLTRVAQVVVAAVRNCHLVLPDDTSALYHDKLLPTEPNFRIESARQFRFFDKAAIITGEKGAAAPTSPWRLCTVSQVEELKMLLRLLPVWASMVLFFAVSAQTVTTFIEQARVMDNRIGPFIIPPASIATFDVISVMVCVPVYDAVLVPLARRATGNDRGLSQLHRLSIGIALSVVVMVYAALLEGRRLALARANMPAMNIAWQAPMFAVHGAAAVFATVGVLEFFYDQSPDGMKSLGNALALLSMAAGSYFNSLALSTVGVITASGGERGWLPDDLNKGHMDYFFWMMAALGTLNLLHFLHYCNRRYTGNNNTTS

SEQ ID NO: 34213 - DNA, 2473 bp, Zea mays subsp. mays
taatcgaaaactaaacccagaacccagcccgccgcaaccctagccgccgccgccgcgcgccgccggcaccacaccactgccgtcgccacccccatggccgcgccgtcagaggacgcgttgcggcgcgcgctcgcggctcgcaaggctgctgtggacgcgcaagccgaggcgctgaaggcgcttaaggttgaggccggcgccgccgcgcgcaggttgcagcaggcggtcggggcgggcgcgggtggcgccgcgagggaggagctgcggcaggcggtggtgaacacgctggagcggaagctgttctacataccttccttcaagatctaccgcggtgtcgcggggctctacgactacgggccgcccgggtgccgcgttaaggccaacgtgctttccttctggcgccagcactttgttttggaagagaacatgttggaggttgactgcccctgtgtgacgcctgaggttgtcttgaaggcatcaggccatgttgagaagtttactgacctcatggttaaagacgagaagacaggcacatgctaccgtgctgaccacttgttgaaagatttttgcaaggagaagcttgagaaagactttgccttgccccaagagaaggctgatgaatttaagcgtattcttgctattttggatgacctctcagcagaggaacttggtgcaaagattaaggaatacggcattgttgcccctgatacaaagaatccactttctgatccctacccattcaatcttatgttccagacatctattggccccactggtcttagcgtggggtatatgcgaccagagaccgcacagggtatttttgtaaacttcaaggatctgtactattacaatggccaaaagctcccttttgcagctgctcaaattgggcaagcttttagaaatgagatctcgccacgacaaggacttctccgagtgcgtgaattcacattggcagagattgagcattttgtggacccagaggacaaatcacatccaaaatttgttgatgttgctgatttggagttcctgatgtttccaagagagctgcaactctctggggagtcagccaatctaatgaagcttggggaagcagtttcaaagggaactgttaataatgagacacttggttacttcattggaagggtctatcttttcctgacaagcttgggaattgataagggccggttgcgcttcaggcagcatctacctaatgagatggctcattatgctgctgactgttgggatgctgagatagagtgctcgtatgggtggatagagtgtgtgggtattgctgatagatctgcatatgatttgaaagctcacactgacaaaagcggtgtcccacttgttgctcatgaaaaattctccaagcctagagaggttgagaaacttgtcatagttccctcgaagaaagacctggggctggcttttaagggcaaccaaaagatggtcctggaagcattggaggctatgagtgagaaggaagcatttgagatgaaagctgaactagagaccaagggggagacaaattttaaagtgtgcacacttggaaaagacgtggtgattacaaagaagatggtatcaatcagcatggagaagaagctggaacaccagcgagtcttcaccccttcggttgtcgagccgtcattcggcataggacggatcatctactgcttgtttgagcactcgttttacacaaggcctagcaaatcagaagaggaacagctgaatgtctttcggttccctcctcttgtggcccctatcaagtgcaccgtgtttccccttgttaagaatcaagagtttgacgatgctgccaaagtaatcgccaaggcattaacaactgctggtatctcccacattattgacactactgcaatttctattgggaggaggtacgccaggacggatgagatcggtgttccatttgctgtaacagtggattcggcaacgaacgtgacgatccgagagagggacagcaaggagcaggtccgcgtggacatcgacgaggtggcacccatggtgaagcagctgacggaaggccaaagcacatggactgatgtttctgcaaagtatcccgcccatgtcggcccccaaagtgagcaggagtgaagaatcgccgccctgatgtctagtctagccatcgaccgagaaggcgtcgggatgagccgtcttcattctccaattgccgagaagattgtgtggcctaaacataaccgcttttggtattgacattatccagaaaggcagttttttcccctcatacatacatggcacttgctatagcagttggatgttatgaagtctgcagatgtcaccgatgtttttgtttcttttaaatgcccctttcttgatgtattctcacccatacaaaacataccatttgaggtatttctgaactagctgtccttttgtaaggtcagactgggaattgttcagctatctacagtggaattggaaatttcagttacttgtt

SEQ ID NO: 34214 - protein, 671 aa, Zea mays subsp. mays
MAAPSEDALRRALAARKAAVDAQAEALKALKVEAGAAARRLQQAVGAGAGGAAREELRQAVVNTLERKLFYIPSFKIYRGVAGLYDYGPPGCRVKANVLSFWRQHFVLEENMLEVDCPCVTPEVVLKASGHVEKFTDLMVKDEKTGTCYRADHLLKDFCKEKLEKDFALPQEKADEFKRILAILDDLSAEELGAKIKEYGIVAPDTKNPLSDPYPFNLMFQTSIGPTGLSVGYMRPETAQGIFVNFKDLYYYNGQKLPFAAAQIGQAFRNEISPRQGLLRVREFTLAEIEHFVDPEDKSHPKFVDVADLEFLMFPRELQLSGESANLMKLGEAVSKGTVNNETLGYFIGRVYLFLTSLGIDKGRLRFRQHLPNEMAHYAADCWDAEIECSYGWIECVGIADRSAYDLKAHTDKSGVPLVAHEKFSKPREVEKLVIVPSKKDLGLAFKGNQKMVLEALEAMSEKEAFEMKAELETKGETNFKVCTLGKDVVITKKMVSISMEKKLEHQRVFTPSVVEPSFGIGRIIYCLFEHSFYTRPSKSEEEQLNVFRFPPLVAPIKCTVFPLVKNQEFDDAAKVIAKALTTAGISHIIDTTAISIGRRYARTDEIGVPFAVTVDSATNVTIRERDSKEQVRVDIDEVAPMVKQLTEGQSTWTDVSAKYPAHVGPQSEQE

SEQ ID NO: 34215 - protein, 560 aa, Zea mays subsp. mays
MLEVDCPCVTPEVVLKASGHVEKFTDLMVKDEKTGTCYRADHLLKDFCKEKLEKDFALPQEKADEFKRILAILDDLSAEELGAKIKEYGIVAPDTKNPLSDPYPFNLMFQTSIGPTGLSVGYMRPETAQGIFVNFKDLYYYNGQKLPFAAAQIGQAFRNEISPRQGLLRVREFTLAEIEHFVDPEDKSHPKFVDVADLEFLMFPRELQLSGESANLMKLGEAVSKGTVNNETLGYFIGRVYLFLTSLGIDKGRLRFRQHLPNEMAHYAADCWDAEIECSYGWIECVGIADRSAYDLKAHTDKSGVPLVAHEKFSKPREVEKLVIVPSKKDLGLAFKGNQKMVLEALEAMSEKEAFEMKAELETKGETNFKVCTLGKDVVITKKMVSISMEKKLEHQRVFTPSVVEPSFGIGRIIYCLFEHSFYTRPSKSEEEQLNVFRFPPLVAPIKCTVFPLVKNQEFDDAAKVIAKALTTAGISHIIDTTAISIGRRYARTDEIGVPFAVTVDSATNVTIRERDSKEQVRVDIDEVAPMVKQLTEGQSTWTDVSAKYPAHVGPQSEQE

SEQ ID NO: 34216 - protein, 533 aa, Zea mays subsp. mays
MVKDEKTGTCYRADHLLKDFCKEKLEKDFALPQEKADEFKRILAILDDLSAEELGAKIKEYGIVAPDTKNPLSDPYPFNLMFQTSIGPTGLSVGYMRPETAQGIFVNFKDLYYYNGQKLPFAAAQIGQAFRNEISPRQGLLRVREFTLAEIEHFVDPEDKSHPKFVDVADLEFLMFPRELQLSGESANLMKLGEAVSKGTVNNETLGYFIGRVYLFLTSLGIDKGRLRFRQHLPNEMAHYAADCWDAEIECSYGWIECVGIADRSAYDLKAHTDKSGVPLVAHEKFSKPREVEKLVIVPSKKDLGLAFKGNQKMVLEALEAMSEKEAFEMKAELETKGETNFKVCTLGKDVVITKKMVSISMEKKLEHQRVFTPSVVEPSFGIGRIIYCLFEHSFYTRPSKSEEEQLNVFRFPPLVAPIKCTVFPLVKNQEFDDAAKVIAKALTTAGISHIIDTTAISIGRRYARTDEIGVPFAVTVDSATNVTIRERDSKEQVRVDIDEVAPMVKQLTEGQSTWTDVSAKYPAHVGPQSEQE

SEQ ID NO: 34217 - DNA, 612 bp, Zea mays subsp. mays
ccattacctagaacatcctaatcaaaaaataggcaacacataattatgtgttggtatagaccatagcaacgcatatatgaactttttgcaacacatatatgcattgttaaaggggtggttgttttgtagtgtctcatttaaaacttttgatgcatcttttgtgcttactaacaaatcaggcaaggtagttaccaatatgttggggcaaacacaagagtcccaagacttgtgtttgggtacccaaggtgcttgtttctattgtgaaaggacccaaaaccgtttgggtacctaagaacaaggcctaaatttgttttgtagatttatgcatcaaatgggacaagttggataatcgatagcgggtgcacaaaccacatgacaggggagaaaagattgttctcctcatatgagaaaaacaatgatccccaaagagcaatcacattcggggatggaaatcaaagtttggtcaaatgtttgggtaaaattgctatatctcctgaccattccatttctaatgtttttcttgtagattctttagattacaacttgctttctgtttctcaattatgtaaaatgggttacgactgcctttttactgatattggtgttaccgtc

SEQ ID NO: 34218 - protein, 80 aa, Zea mays subsp. mays
MTGEKRLFSSYEKNNDPQRAITFGDGNQSLVKCLGKIAISPDHSISNVFLVDSLDYNLLSVSQLCKMGYDCLFTDIGVTV

SEQ ID NO: 34219 - protein, 71 aa, Zea mays subsp. mays
MNFLQHIYALLKGWLFCSVSFKTFDASFVLTNKSGKVVTNMLGQTQESQDLCLGTQGACFYCERTQNRLGT

SEQ ID NO: 34220 - protein, 40 aa, Zea mays subsp. mays
MRKTMIPKEQSHSGMEIKVWSNVWVKLLYLLTIPFLMFFL

SEQ ID NO: 34221 - DNA, 2258 bp, Zea mays subsp. mays
gcacgagaccattacctagaacatcctaatcgaaaagtacctcgctctctcctgacttcccgccggcctcctcgtataagaaccgacatccgacacgccgccttcgcactcgtcaacctctccgctttgcctccctccctcgcgtccgcgttccctcccgcctccagatctcgatgcggcagcggctcccctgacagcggaggcgacgccggcaccatgtcctcctgcgacgacgaccacgcctcgctcctcagatcccacgctggggcctcgtcgccgtcctgcccctcgccgcgcggttcggcgggacatcagcaccacgccgacgtcgaggcggacgaggccaccgtcaccgcctccccgaggctcgccagcggcggcgggggtgtgcgcggtctcctgcgcaacctcgagcgccgcatgtccgcacgcggatctgggcctgggcgtcgccagcaccagcattatcagcagctcgatcgctccgtggcgatcgagtcgccgccgtctcagcggcagcgggagagagcggcggcgggggatgacgacgagctcggggacggggcgccgcccgagtgggcgctgctgctcatcggctgcctcctcgggctcgccaccggcatctgcgtcgccgcgtttaaccgcggggttcatgtcatccatgaatgggcatgggcagggactcccaacgaaggtgcagcatggctccgcctgcagaagctagctgatacttggcacaggatactgctgatcccggtgactgggggtgtggttgttaggaatgatgcatgggttgctcgatatatttgagcagctaaaaacttgtgaaatcagggcagaggcaaggaatcaactttgttggagccatcttcccaaccataaaggctgtccaagctgctgttaccctagggactggttgttccctgggacctgaaggtcctagtgtggatattggcaaatcgtgtgcaaatgcatgctcagaaatgatggagagtaaccgggaaaggcgtattgcacttgttgctgctggcgctgctgctggcattgcttcaggcttcaatgcagcagttgctgggtgcttctttgccattgaaactgtattaaggcctcttaaagcagaaaattcacctccatttacaactgcaatgataatattggcatctgttatatcatctactgtttcaaatgttttacttggagccagaccagcttttatagtgccagcatatgagctaaaatctgctgccgagctacccctgtaccttatcttaggaatgctatgtggagcggtcagtgtggtatttgatagattggttggatggttttcaagattctttgggcacataaaggaaaagtttgattttcctataatagtgtaccctgctttgggtgggctgggagctggtatcatagctctgaaatatccagggatcttatactggggtttcacaaatgttgaagaaatattgcataccggtaaaagtgcttctgctcctggtatttggttgttaactcaactggcagcggcaaaggtagttgcaactgctctctgcaagggctctgggcttgtgggaggactatatgctccaagcctgatgattggggctgctgttggagctgtttttgggggttcagctgcttatttaataaattcagctttacctggtaatgctgctgttgcacagccacaagcttatgctctggtaagttgcttgcaactcactttccctaatgcgataagtaataatgtgcactagctctgactttctgtaggttggaatggctgctacactagcttcagtctgttcagtcccattgacttcagtactgcttctctttgagctgacaaaggattacaggattttgcttcctctcatgggagcagttgggttggcaatatgggttccttcagtagtaaaccagccaaacgacagtgagccttctgggtttagaacatccagacgaggttattcttcaatgtcaccagaagaaagaaatggtagcttaaggcaaggtgatgttgtggatgatcttgagctcagtattatacaaactgacatgagtaactatggaacttataatgcagaaatgcttctggaagatttgaaggtttgtcagcctctattctggcagatcttactcgtatctggctcttgttatcacgtatagtatatttgattgacatactttgtaacgcttgaattgcaaggctgtatttgtgcttctgtttatgttgtttcatttatttgtaccttttt

SEQ ID NO: 34222 - protein, 269 aa, Zea mays subsp. mays
ARDHYLEHPNRKVPRSLLTSRRPPRIRTDIRHAAFALVNLSALPPSLASAFPPASRSRCGSGSPDSGGDAGTMSSCDDDHASLLRSHAGASSPSCPSPRGSAGHQHHADVEADEATVTASPRLASGGGGVRGLLRNLERRMSARGSGPGRRQHQHYQQLDRSVAIESPPSQRQRERAAAGDDDELGDGAPPEWALLLIGCLLGLATGICVAAFNRGVHVIHEWAWAGTPNEGAAWLRLQKLADTWHRILLIPVTGGVVVRNDAWVARYI

SEQ ID NO: 34223 - protein, 257 aa, Zea mays subsp. mays
MMESNRERRIALVAAGAAAGIASGFNAAVAGCFFAIETVLRPLKAENSPPFTTAMIILASVISSTVSNVLLGARPAFIVPAYELKSAAELPLYLILGMLCGAVSVVFDRLVGWFSRFFGHIKEKFDFPIIVYPALGGLGAGIIALKYPGILYWGFTNVEEILHTGKSASAPGIWLLTQLAAAKVVATALCKGSGLVGGLYAPSLMIGAAVGAVFGGSAAYLINSALPGNAAVAQPQAYALVSCLQLTFPNAISNNVH

SEQ ID NO: 34224 - protein, 256 aa, Zea mays subsp. mays
MESNRERRIALVAAGAAAGIASGFNAAVAGCFFAIETVLRPLKAENSPPFTTAMIILASVISSTVSNVLLGARPAFIVPAYELKSAAELPLYLILGMLCGAVSVVFDRLVGWFSRFFGHIKEKFDFPIIVYPALGGLGAGIIALKYPGILYWGFTNVEEILHTGKSASAPGIWLLTQLAAAKVVATALCKGSGLVGGLYAPSLMIGAAVGAVFGGSAAYLINSALPGNAAVAQPQAYALVSCLQLTFPNAISNNVH

SEQ ID NO: 34225 - protein, 197 aa, Zea mays subsp. mays
MSSCDDDHASLLRSHAGASSPSCPSPRGSAGHQHHADVEADEATVTASPRLASGGGGVRGLLRNLERRMSARGSGPGRRQHQHYQQLDRSVAIESPPSQRQRERAAAGDDDELGDGAPPEWALLLIGCLLGLATGICVAAFNRGVHVIHEWAWAGTPNEGAAWLRLQKLADTWHRILLIPVTGGVVVRNDAWVARYI

SEQ ID NO: 34226 - DNA, 1756 bp, Zea mays subsp. mays
tctcgatccggaaacctctcaaaccctagccgcctcctgcaagtttcagagctcaggaatctgcgccatggcgagtgagacggagaccttcgcatttcaggctgagatcaaccagctgctctcactcatcatcaacaccttctactccaacaaggagatcttcctccgcgagcttatctccaactcttccgatgcgctggacaagatcaggttcgagagtctcactgacaagagcaagctcgatgcgcagcctgagcttttcatccaccttgtcccagacaaggccacgaacacgctctccatcatcgacagcggcatcggcatgaccaagtccgaccttgtcaacaacctcggtaccatcgccaggtccgggaccaaggagttcatggaagcccttgctgccggcgctgatgtgtccatgattggccagttcggcgtcggtttctactctgcctacctcgtcgccgatagagttgtcgtgaccaccaagcacaacgatgacgagcagtacgtgtgggagtcccaagcgggcgggtcgttcactgttactcgtgacacgtcaggggagcagcttggcaggggcactaagatcacactgttcctcaaggacgatcagctggagtaccttgaggagcgtcgcctcaaggatctggtcaagaagcactctgagttcatcagctaccccatctccctgtggactgaaaagacaacagagaaggaaatttctgacgacgaagacgaggaagagaagaaagatgctgaggaaggaaaggttgaggatgttgatgagaaggaagagaaagaaaagaagaaaaagaagatcaaggaggtttctcatgagtggtcattggtcaacaagcagaagcccatatggatgaggaagccagaagaaatcacaaaagaagaatatgctgccttctataagagcttgacaaatgactgggaggagcatctggctgtgaagcacttctctgtggagggtcaactggagttcaaggctgttctctttgttcctaagagggccccctttgatctctttgacaccaagaagaagcaaaacaacatcaagctctatgtgcgcagggtgttcatcatggacaactgcgaagagctgatccctgagtggctgagcttcgttaagggtattgttgactctgaggaccttcccctcaatatctctcgtgagactcttcagcagaacaagatcctgaaggtgatcaggaagaaccttgtgaagaagtgtgttgagctcttctttgagattgctgagaacaaggaggactacaacaagttttacgaggctttctccaagaacctcaagcttggcatccatgaggactcgcagaacaggaccaagatcgccgagcttctgagataccactccaccaagagtggtgatgagctgaccagcctcaaggactacgtgaccaggatgaaggagggacagaatgacatctactatatcactggtgagagcaagaaggcagtggagaactcccccttccttgagaagctgaagaagaggggctatgaggttctgcacatggttgatgccattgacgagtatgctgttggtcagctgctgctcttgatcgtctgtctagatcacagtagtgtgattgtgcagcaagcgaaacttaaattggttgctccgtgtacattaagcctattactgtcccaaagaactcgatgttatctatcggatactggaagtctgtctatcgactgcaacgcttaagcagatatggcctgtttt

SEQ ID NO: 34227 - protein, 578 aa, Zea mays subsp. mays
LDPETSQTLAASCKFQSSGICAMASETETFAFQAEINQLLSLIINTFYSNKEIFLRELISNSSDALDKIRFESLTDKSKLDAQPELFIHLVPDKATNTLSIIDSGIGMTKSDLVNNLGTIARSGTKEFMEALAAGADVSMIGQFGVGFYSAYLVADRVVVTTKHNDDEQYVWESQAGGSFTVTRDTSGEQLGRGTKITLFLKDDQLEYLEERRLKDLVKKHSEFISYPISLWTEKTTEKEISDDEDEEEKKDAEEGKVEDVDEKEEKEKKKKKIKEVSHEWSLVNKQKPIWMRKPEEITKEEYAAFYKSLTNDWEEHLAVKHFSVEGQLEFKAVLFVPKRAPFDLFDTKKKQNNIKLYVRRVFIMDNCEELIPEWLSFVKGIVDSEDLPLNISRETLQQNKILKVIRKNLVKKCVELFFEIAENKEDYNKFYEAFSKNLKLGIHEDSQNRTKIAELLRYHSTKSGDELTSLKDYVTRMKEGQNDIYYITGESKKAVENSPFLEKLKKRGYEVLHMVDAIDEYAVGQLLLLIVCLDHSSVIVQQAKLKLVAPCTLSLLLSQRTRCYLSDTGSLSIDCNA

SEQ ID NO: 34228 - protein, 556 aa, Zea mays subsp. mays
MASETETFAFQAEINQLLSLIINTFYSNKEIFLRELISNSSDALDKIRFESLTDKSKLDAQPELFIHLVPDKATNTLSIIDSGIGMTKSDLVNNLGTIARSGTKEFMEALAAGADVSMIGQFGVGFYSAYLVADRVVVTTKHNDDEQYVWESQAGGSFTVTRDTSGEQLGRGTKITLFLKDDQLEYLEERRLKDLVKKHSEFISYPISLWTEKTTEKEISDDEDEEEKKDAEEGKVEDVDEKEEKEKKKKKIKEVSHEWSLVNKQKPIWMRKPEEITKEEYAAFYKSLTNDWEEHLAVKHFSVEGQLEFKAVLFVPKRAPFDLFDTKKKQNNIKLYVRRVFIMDNCEELIPEWLSFVKGIVDSEDLPLNISRETLQQNKILKVIRKNLVKKCVELFFEIAENKEDYNKFYEAFSKNLKLGIHEDSQNRTKIAELLRYHSTKSGDELTSLKDYVTRMKEGQNDIYYITGESKKAVENSPFLEKLKKRGYEVLHMVDAIDEYAVGQLLLLIVCLDHSSVIVQQAKLKLVAPCTLSLLLSQRTRCYLSDTGSLSIDCNA

SEQ ID NO: 34229 - protein, 471 aa, Zea mays subsp. mays
MTKSDLVNNLGTIARSGTKEFMEALAAGADVSMIGQFGVGFYSAYLVADRVVVTTKHNDDEQYVWESQAGGSFTVTRDTSGEQLGRGTKITLFLKDDQLEYLEERRLKDLVKKHSEFISYPISLWTEKTTEKEISDDEDEEEKKDAEEGKVEDVDEKEEKEKKKKKIKEVSHEWSLVNKQKPIWMRKPEEITKEEYAAFYKSLTNDWEEHLAVKHFSVEGQLEFKAVLFVPKRAPFDLFDTKKKQNNIKLYVRRVFIMDNCEELIPEWLSFVKGIVDSEDLPLNISRETLQQNKILKVIRKNLVKKCVELFFEIAENKEDYNKFYEAFSKNLKLGIHEDSQNRTKIAELLRYHSTKSGDELTSLKDYVTRMKEGQNDIYYITGESKKAVENSPFLEKLKKRGYEVLHMVDAIDEYAVGQLLLLIVCLDHSSVIVQQAKLKLVAPCTLSLLLSQRTRCYLSDTGSLSIDCNA

SEQ ID NO: 34230 - DNA, 1240 bp, Zea mays subsp. mays
aacaacttgggcgcgcgcgcggccgggtagcaaaagctcgcgatctgtgcgcccaccaccgggaggagcgaagatgcggatgagctgcaatggctgccgcgtcctgcgcaagggctgcggcgacgcctgcaccatccgcccctgcctgcagtggatcgaggcccccgaggcgcaggccaacgccaccgtcttcctcgcaaagttctacggccgggcgggcctgctcaacctgctcgccgccgcgcccgacgacggcgtccgccccgcggtcttccgctccctgctctacgaggcgtgcggccgcatcgtcaacccggtctacggctccgtcggcctgctctggtcgcgccagtggcacaggtgcgccgacgccgtcgaggccgtgctcaggggggaccccgtcgtgcaggtcgacgccgggtccgacgccgccgctgccccgccgctgctcgccggcgccaggccgccgccgccggccgccttcgacatccgccacgtccccagggatcccgacgccaccgccgccgacctcctccgcgccggccgcaagaggttcaagcgcgcgggttcgtcttccaacgcctccaaggcgaagcccctgcccctcgagctcgagggcaaggccggcaacaacgaacgcgcgtcgcccagccctcccccgacgcaacaacgagaggcggaggagctgcagccggtgccgatggtcgtcgagccagaacacggcgaggagtccgccggcagccacgaccaccacctgcagctgcaggggtggtcggaggaggacaccgacgtggaggcggcctcacacgtgagccaagccgaggctgagccgccagccagcagccagagccaggtgctggtagcggatcaggaggaagaggaggttgggctcgagctcacgcttgggttcgagcctgtcgtcaggcagcagccgaggtcgtcgcgctgcgacaagagcggcttgagcgcggcatcgagcctcatcggcctgcggctgcagctgccggccgcctaagcacaggcacagctcgcacctaaacgaatagagcagttttgcgaccctgcgcctgcggtgtttgcttaaaaataagcttttggacccccgggtgccaggagacacacagtagccaacttcaaattttctaggttttgtttatctttttcaatttttcttcttgtctttaactgtaaaagttgatggactgcacaattactcaggtagagggggtttggttccccg

SEQ ID NO: 34231 - protein, 337 aa, Zea mays subsp. mays
TTWARARPGSKSSRSVRPPPGGAKMRMSCNGCRVLRKGCGDACTIRPCLQWIEAPEAQANATVFLAKFYGRAGLLNLLAAAPDDGVRPAVFRSLLYEACGRIVNPVYGSVGLLWSRQWHRCADAVEAVLRGDPVVQVDAGSDAAAAPPLLAGARPPPPAAFDIRHVPRDPDATAADLLRAGRKRFKRAGSSSNASKAKPLPLELEGKAGNNERASPSPPPTQQREAEELQPVPMVVEPEHGEESAGSHDHHLQLQGWSEEDTDVEAASHVSQAEAEPPASSQSQVLVADQEEEEVGLELTLGFEPVVRQQPRSSRCDKSGLSAASSLIGLRLQLPAA

SEQ ID NO: 34232 - protein, 313 aa, Zea mays subsp. mays
MRMSCNGCRVLRKGCGDACTIRPCLQWIEAPEAQANATVFLAKFYGRAGLLNLLAAAPDDGVRPAVFRSLLYEACGRIVNPVYGSVGLLWSRQWHRCADAVEAVLRGDPVVQVDAGSDAAAAPPLLAGARPPPPAAFDIRHVPRDPDATAADLLRAGRKRFKRAGSSSNASKAKPLPLELEGKAGNNERASPSPPPTQQREAEELQPVPMVVEPEHGEESAGSHDHHLQLQGWSEEDTDVEAASHVSQAEAEPPASSQSQVLVADQEEEEVGLELTLGFEPVVRQQPRSSRCDKSGLSAASSLIGLRLQLPAA

SEQ ID NO: 34233 - protein, 311 aa, Zea mays subsp. mays
MSCNGCRVLRKGCGDACTIRPCLQWIEAPEAQANATVFLAKFYGRAGLLNLLAAAPDDGVRPAVFRSLLYEACGRIVNPVYGSVGLLWSRQWHRCADAVEAVLRGDPVVQVDAGSDAAAAPPLLAGARPPPPAAFDIRHVPRDPDATAADLLRAGRKRFKRAGSSSNASKAKPLPLELEGKAGNNERASPSPPPTQQREAEELQPVPMVVEPEHGEESAGSHDHHLQLQGWSEEDTDVEAASHVSQAEAEPPASSQSQVLVADQEEEEVGLELTLGFEPVVRQQPRSSRCDKSGLSAASSLIGLRLQLPAA

SEQ ID NO: 34234 - DNA, 685 bp, Zea mays subsp. mays
aggaaggaaatctatccaagcaacaaacttggcattcttgcctgttcttaattattgccaggacaggagaaacaaagatgaggcctcagctgatactcgtcggcactctggctgttctcgccatcctcgcagctctcggcgaaggctcgtcgtcctggccctgctgcaacaactgcggtgcttgcaacaagaagcagccgccggagtgccagtgcaatgacgtgtcggtcaacgggtgccatccggagtgcatgaactgcgtcaaggtcggtgcaggaattcgtcccggcatgggccatggccccgtcgtcacctaccgctgtgacgacgttctcacaaacttctgccagagcagctgcccggaggcgccggcgccataggcgggtggccgggtgtcttcttctgacgtacggcatgggacgccaagtcgagtttgcttctctccagtttcgtcagagaaaagaaataaataaataaataaatgtcgccggccgctctgttcggtgcttgctcttgttcgtcgtccgtgtattagtactctcttttttctttttctttcttgaataaagagccatatgctgcatatgccatgctcaaagcactgttggttggttttggttgtttgatttatgggctaggccctaccgtgaaattttattaaattctataaaaatcttaaaatctc

SEQ ID NO: 34235 - protein, 125 aa, Zea mays subsp. mays
EGNLSKQQTWHSCLFLIIARTGETKMRPQLILVGTLAVLAILAALGEGSSSWPCCNNCGACNKKQPPECQCNDVSVNGCHPECMNCVKVGAGIRPGMGHGPVVTYRCDDVLTNFCQSSCPEAPAP

SEQ ID NO: 34236 - protein, 100 aa, Zea mays subsp. mays
MRPQLILVGTLAVLAILAALGEGSSSWPCCNNCGACNKKQPPECQCNDVSVNGCHPECMNCVKVGAGIRPGMGHGPVVTYRCDDVLTNFCQSSCPEAPAP

SEQ ID NO: 34237 - protein, 72 aa, Zea mays subsp. mays
GRKSIQATNLAFLPVLNYCQDRRNKDEASADTRRHSGCSRHPRSSRRRLVVLALLQQLRCLQQEAAAGVPVQ

SEQ ID NO: 34238 - DNA, 2840 bp, Zea mays subsp. mays
gcacgagaccattacctagaacatcctaatcgaaaaacctgcctccccctcttgtttacccgaggtggcagcgaggcgcctcgctttcctctttcccccccttcgccccgctgcccccaaccaattttcccgatccggcaccgcgcaatgccgctgcagctgatgccgccgcactactatcccgtcctgctgccgctactggttcttgcggctgtggcgggcgtctccgcgggtggtggcggcgacggagatgtcgtggagcggacgtacatcgtgcgggtggacgccgacgcgaagccgtcggtgtacccgacgcacgcacactggtacgaggcggcggtgctggcggccgccggcgacggctcggagtggccggaaggggggccgctgatccacacctactcggcggccttccaggggttctccgcgcggatgtcccccgcggccgccgaggcgctggcgtccgcccccggggtggcggccgtggtgccggagcgcgtgcggcagctcgccaccacgcgctcgccgaggttcctgggcctgctgtcctccccgccctcggcattgctcgcggaatccgacttcggggccgacctggtcatagccatcgtggacaccggcatctcccccgcgcaccgcagcttccacgaccgcgggctgggcccggtcccgggcaggtggcgcgggctgtgcgcgtcgggtcccgggttcccgcccagctcctgcaaccgcaagctcgtcggcgcgcggttcttctccaaggggtacgaggccacctcgggacgcatgaatgagacggcggaggtcaggtccgcgctcgacaccgacgggcacgggacccacaccgcgtccatcgccgcggggaggtacgtgttcccggcgtccacgctcgggtacgcgcgcggcgtggccgccggcatggcgccgaaagcgcgcctggcagcgtacaaggtgtgctgggtgggcggctgcttcgactccgacatcctcgccgccttcgacgccgccgtcgccgacggcgtcgatgtggtctctctcagcgtcggtggcgttgtcgtgccgtactacctggacgccattgccattggggcgttcggcgccaccgaagccggtatcgtcgtctctgcttcggccggcaacggtggtcccggcgggctcacggtgaccaatgtggcgccctggatggccaccgtcggggctggctccatggaccgcgcgttcccggctaacgtgcggctcggcgacgggcaggtgctcgacggcgtgagcgtgtacgggggacccgcgctcgagtccggcaagctgtacgaactggtgtacgctggggcgagcggcgggggtgcctcgtccgcgtccgacggctactcggcgtcgatgtgcctggacggctcgctggacccagccgcggtgcgcggcaagatcgtggtgtgcgaccgcggcgtgaaactcgcgcgccgccaagggcgacgtggtccgccgcgcggggggcgtcgggatggtgttagctaacggggcgttcgacggcgagggccttgtcgccgactgccacgtcctgccggcgaccgccgtcggcgcggccgcgggcgacaggctccgcaagtacatcgcgtcggccaccaagcagaggccggccaccggcaccatcctgttcgagggcacccacctcggcgtgcacccggcgccggtggtggccgcgttctcggcgcgcggcccgaacccgcaatccccggagatcctgaaaccggacctgatagctccaggcctcaacatcctggcggcgtggcccagcggcgtcgggccggccggcatcccctcggacggccgcagcacggagttcaacatcctgtcgggcacgtccatggcctgcccgcacgtgtcgggcctcagcggcgctgctgaaggcggcgcacccgagctggagccccgcggcgatcaagtcggcgctgatgacgaccgcgtacgtgagggacaacagcaacggcacggtcgcggacgagtcgacgggcgcggcggccggcgcgttcgacctgggcgccgggcacgtggacccgatgcgcgccatggacccggggctggtgtacgacatcggcccaagcgactacgtgagcttcctctgcaacctcaactacacggagcggaacatccgcgccgtcacgcggcgcccggcggactgccgcggggcccggcgcgccggccacgcgggcaacctcaactacccgtccctgtccgccacgttcgtggccgccgcgcggcggcggcggcggcggcgagtaggacgcacttcatccggacggtgaccaacgtgggcggcgggagcgcggtgtaccgcgcgtcggtcacggcccccgaggggtgcaacgtgacggtgcagccgcggcggctggcgttccggcgcgacgggcagcggctgagcttcgcggtgcgggtggaggcggcgctcggagggaggatggagcccgggagctcgctggtgcggagcggcgcgctgacgtggagcgacgggcggcacgtcgtccgtagcccgatcgtggtgacggtgcaggcgcctctgcagtgagtgctgtactgaccagctgccccgaccgccacgatgggaggtggagaggagaggacacagtctcagtgttctagcttttctgtactattaaggttgctgttagctgtagaatacgtcgtggaagagctgtatcgttagctactacgtaacgtaagctacactggaaatcatggagccctggagctccgttcttccccatttctttctttctcctcgccttgctgctaccatttgcttctgtattgccggcctccggcgtgcggttttgcacggaatggttttc

SEQ ID NO: 34239 - protein, 502 aa, Zea mays subsp. mays
ARDHYLEHPNRKTCLPLLFTRGGSEAPRFPLSPPSPRCPQPIFPIRHRAMPLQLMPPHYYPVLLPLLVLAAVAGVSAGGGGDGDVVERTYIVRVDADAKPSVYPTHAHWYEAAVLAAAGDGSEWPEGGPLIHTYSAAFQGFSARMSPAAAEALASAPGVAAVVPERVRQLATTRSPRFLGLLSSPPSALLAESDFGADLVIAIVDTGISPAHRSFHDRGLGPVPGRWRGLCASGPGFPPSSCNRKLVGARFFSKGYEATSGRMNETAEVRSALDTDGHGTHTASIAAGRYVFPASTLGYARGVAAGMAPKARLAAYKVCWVGGCFDSDILAAFDAAVADGVDVVSLSVGGVVVPYYLDAIAIGAFGATEAGIVVSASAGNGGPGGLTVTNVAPWMATVGAGSMDRAFPANVRLGDGQVLDGVSVYGGPALESGKLYELVYAGASGGGASSASDGYSASMCLDGSLDPAAVRGKIVVCDRGVKLARRQGRRGPPRGGRRDGVS

SEQ ID NO: 34240 - protein, 453 aa, Zea mays subsp. mays
MPLQLMPPHYYPVLLPLLVLAAVAGVSAGGGGDGDVVERTYIVRVDADAKPSVYPTHAHWYEAAVLAAAGDGSEWPEGGPLIHTYSAAFQGFSARMSPAAAEALASAPGVAAVVPERVRQLATTRSPRFLGLLSSPPSALLAESDFGADLVIAIVDTGISPAHRSFHDRGLGPVPGRWRGLCASGPGFPPSSCNRKLVGARFFSKGYEATSGRMNETAEVRSALDTDGHGTHTASIAAGRYVFPASTLGYARGVAAGMAPKARLAAYKVCWVGGCFDSDILAAFDAAVADGVDVVSLSVGGVVVPYYLDAIAIGAFGATEAGIVVSASAGNGGPGGLTVTNVAPWMATVGAGSMDRAFPANVRLGDGQVLDGVSVYGGPALESGKLYELVYAGASGGGASSASDGYSASMCLDGSLDPAAVRGKIVVCDRGVKLARRQGRRGPPRGGRRDGVS

SEQ ID NO: 34241 - protein, 448 aa, Zea mays subsp. mays
MPPHYYPVLLPLLVLAAVAGVSAGGGGDGDVVERTYIVRVDADAKPSVYPTHAHWYEAAVLAAAGDGSEWPEGGPLIHTYSAAFQGFSARMSPAAAEALASAPGVAAVVPERVRQLATTRSPRFLGLLSSPPSALLAESDFGADLVIAIVDTGISPAHRSFHDRGLGPVPGRWRGLCASGPGFPPSSCNRKLVGARFFSKGYEATSGRMNETAEVRSALDTDGHGTHTASIAAGRYVFPASTLGYARGVAAGMAPKARLAAYKVCWVGGCFDSDILAAFDAAVADGVDVVSLSVGGVVVPYYLDAIAIGAFGATEAGIVVSASAGNGGPGGLTVTNVAPWMATVGAGSMDRAFPANVRLGDGQVLDGVSVYGGPALESGKLYELVYAGASGGGASSASDGYSASMCLDGSLDPAAVRGKIVVCDRGVKLARRQGRRGPPRGGRRDGVS

SEQ ID NO: 34242 - DNA, 1427 bp, Zea mays subsp. mays
  misc_feature (664)..(664): n is a, c, g, or t
  misc_feature (698)..(698): n is a, c, g, or t
  misc_feature (712)..(712): n is a, c, g, or t
  misc_feature (717)..(717): n is a, c, g, or t
  misc_feature (726)..(726): n is a, c, g, or t
  misc_feature (760)..(760): n is a, c, g, or t
  misc_feature (773)..(773): n is a, c, g, or t
  misc_feature (775)..(775): n is a, c, g, or t
  misc_feature (796)..(796): n is a, c, g, or t
  misc_feature (813)..(813): n is a, c, g, or t
tttgacttgttcatgagagccacatttccggtttctggtgctcgggtgaaggtttatttctcatccctgagatcctcttagtaaacattcgtgagtcatgctctgatgacctaaagcaattctgtaggctacagaaaggtttgaagtagcttatcgaacaatcaaggagttggctcttgccggtcctcctggctcaaaaactgtgaaacaagcatcacaacagcttttacctttgtgtgcaaaagcaatgcaagaaaacaacgcagagctcaccagggaggctgttgatgttttcatttggtgcttaactcaaaatgcagagtcgtacaagcagtgggaaagaatttatcttgaaaatattgaagccagtgttgctgtcctgagcaaagttgtgattgattggagggttgtgtcttctaagctcagttctgaagctctcaaggcaacagtgaagaactttaaggctaagaatgaggctgcgctggagtccacaacagatgctggaaagcaggcatctatcaaagaagcagacaagcactgcaaagtgatctttggaaagctgacccgtggcgccacctgcctgaagagcagcctggtggtcatcgcgctcgctgttgctgctagttacgtgctgtctcctggcatggacctcgagaaggtccangcgatggtctcatcgcacctgtcgttctaaacanacctgtccagaatntccanacgtggatntaaattatacgagccatccaaaggggatggctcnctcatcagtgaananagctcagggggtgagaataanagggggataggcgctanaaccgaaagggtacagtttcctgagttgcctttttttatttttcccgcgtctcctcgagcagcagtgcgtgggaggagacgcagtcgactttgcagggagttggttaatcggtagactgatgggtgcgaagaaggtcaagtcaaacggctcaaccagaggattaacacctttgcttttctctttctgcatctgagatgattgcaaacagttttggtttaaaaattaagaatcttgaatcgtattcggtgctgtgtgcttgtcggctaaatgtatctgttgcgttgatatccgattaaattgcgtgtgatgctgtgctcgtgtcagtgtgctgttgtcgaagatctccctttttgcaggtgtgaatgtgatgcctgaaggccttttgaaacatgttccatttttttggacgccggaggtgtgatgtctgatgttggagcgtgaagatcttttgaaatatgttgcatttccagatggtttttggacgagggagatgctggttaatttctgggtttttttatttgaggattcgatctgaatctcaagggactgtatgttatctactgtctcttggtggtgtggatactgtggatgagaaggttttccttcatgcccg

SEQ ID NO: 34243 - protein, 148 aa, Zea mays subsp. mays
  misc_feature (139)..(139): Xaa can be any naturally occurring amino acid
MQENNAELTREAVDVFIWCLTQNAESYKQWERIYLENIEASVAVLSKVVIDWRVVSSKLSSEALKATVKNFKAKNEAALESTTDAGKQASIKEADKHCKVIFGKLTRGATCLKSSLVVIALAVAASYVLSPGMDLEKVXAMVSSHLSF

SEQ ID NO: 34244 - DNA, 1085 bp, Zea mays subsp. mays
gggtgcgggccctcgctgcgcgggcagaatcgctgatatgcccttgggccacgccttccttcttatcccctgcgcctgccctcccctcctgcagcgcccgtcgcctccctttccccttccctccctccctctccccgcgggccgccagaggcaatttcgccctcgattcgaccccgattcgtccgcccgcgaccgggattccctccgccaagcgcggatctgaacgctgcgctccgtgtcgccgctcgaatccgccatgaagggggccaaatccaagggcgccgccaaggccgatgccaagctggcggtgaagagcaagggggcggagaagcccgccaagggcaggaaagggaaggccggcaaggaccccaacaagcctaagagggctcccagcgctttcttcgtgttcatggaggaatttcgcaaggagttcaaggagaagaaccctaagaacaagtctgtcgctgcggtggggaaagctgctggcgacaggtggaaatccctgagcgagtcggacaaggctccctatgtagccaaggctaacaagctcaagctcgagtacaacaaggccatcgctgcctacaacaagggcgagagcactgcagctaagaaggctcctgccaaggaggaagaggaggaagatgaagaggagtctgacaagtccaagtcggaggtcaatgacgaggatgatgaagagggtagtgaggaggatgaagatgatgacgagtgatggagctcctcgagacaatggaccgtgcttcatccaacaatggagcggctacacaaggccccgtggcgatcacaaaaaaggagcctatatccatgtactagaattattcagtttcactccacatcgtgatgttttatttttacttttgtcgtgctataacggatagcgctcctcgttggcgccactggcgggtggttctgcctctggtctggtgtgtttgtgtgtggtcacacttgccagccagcagaggcgcctgcttgtacctagattactgtttccattgtcgtcatcatcggctaacattgtcataatgtcagtttgggtaatgttagattaagtaattattgtgttctgt

SEQ ID NO: 34245 - protein, 157 aa, Zea mays subsp. mays
MKGAKSKGAAKADAKLAVKSKGAEKPAKGRKGKAGKDPNKPKRAPSAFFVFMEEFRKEFKEKNPKNKSVAAVGKAAGDRWKSLSESDKAPYVAKANKLKLEYNKAIAAYNKGESTAAKKAPAKEEEEEDEEESDKSKSEVNDEDDEEGSEEDEDDDE

SEQ ID NO: 34246 - protein, 106 aa, Zea mays subsp. mays
MEEFRKEFKEKNPKNKSVAAVGKAAGDRWKSLSESDKAPYVAKANKLKLEYNKAIAAYNKGESTAAKKAPAKEEEEEDEEESDKSKSEVNDEDDEEGSEEDEDDDE

SEQ ID NO: 34247 - protein, 85 aa, Zea mays subsp. mays
VRALAARAESLICPWATPSFLSPAPALPSCSARRLPFPFPPSLSPRAARGNFALDSTPIRPPATGIPSAKRGSERCAPCRRSNPP

SEQ ID NO: 34248 - DNA, 1054 bp, Zea mays subsp. mays
atgctcctccactggcacactgcccctctaccctgcctgccgtttccatctccatccagttctccgcacccacccacccacccactccagtcctttccccaacccatggccgccgccgccgccgccgccggcacccgggaggagatggtctacatggccaagctagcggagcaggcggagcggtacgaggagatggtcgagttcatggagaaggtcgcggccgccgccgagctcaccgtcgaggagcgcaacctgctctccgtcgcctacaagaacgtcatcggcgcgcgccgcgcctcctggcgcatcgtatcctccatcgagcacaaggaggagacgcggggcgcggcggggcacgccgccgccgccagggggtaccgcgcgcgcgtggaggccgagctctccgggatctgcgcggggatcctgcgcctcctcgacgagcgcctcgtgccggcggcggcggccgtggacgccagggtcttctacctcaagatgaagggggactaccaccgctacctcgccgagttcaagaccggcgccgagcgcaaggacgccgcggactccacgctcgccgcctaccaggccgcgcaggacatcgccgtcaaggagctgccgcccacgcatcccatcaggctcggcctcgccctcaacttctccgtcttctactacgagatcctcagctcgccggaccgcgcctgctcgctggccaagcaggccttcgacgaagctatttcagagctggatagtcttggggaagagtcgtacaaggatagcaccctcatcatgcagcttcttcgtgacaacctcaccttgtggacttctgacatgcaggaggatggtggcgatgaaatgcgggatgcaaacaagcctgacgaggagcagtagtagtcgtcatgccatgccatgccatgcttgtacaaggaccattttcgtgtgtcctttccttcaatcgtcgacctttcgttttgttgttatactgctattgtggaaccctgttactgttactgttagtgtatcctattggcaataatcaaatgtggtatggttgactact

SEQ ID NO: 34249 - protein, 294 aa, Zea mays subsp. mays
MLLHWHTAPLPCLPFPSPSSSPHPPTHPLQSFPQPMAAAAAAAGTREEMVYMAKLAEQAERYEEMVEFMEKVAAAAELTVEERNLLSVAYKNVIGARRASWRIVSSIEHKEETRGAAGHAAAARGYRARVEAELSGICAGILRLLDERLVPAAAAVDARVFYLKMKGDYHRYLAEFKTGAERKDAADSTLAAYQAAQDIAVKELPPTHPIRLGLALNFSVFYYEILSSPDRACSLAKQAFDEAISELDSLGEESYKDSTLIMQLLRDNLTLWTSDMQEDGGDEMRDANKPDEEQ

SEQ ID NO: 34250 - protein, 259 aa, Zea mays subsp. mays
MAAAAAAAGTREEMVYMAKLAEQAERYEEMVEFMEKVAAAAELTVEERNLLSVAYKNVIGARRASWRIVSSIEHKEETRGAAGHAAAARGYRARVEAELSGICAGILRLLDERLVPAAAAVDARVFYLKMKGDYHRYLAEFKTGAERKDAADSTLAAYQAAQDIAVKELPPTHPIRLGLALNFSVFYYEILSSPDRACSLAKQAFDEAISELDSLGEESYKDSTLIMQLLRDNLTLWTSDMQEDGGDEMRDANKPDEEQ

SEQ ID NO: 34251 - protein, 247 aa, Zea mays subsp. mays
APPLAHCPSTLPAVSISIQFSAPTHPPTPVLSPTHGRRRRRRRHPGGDGLHGQASGAGGAVRGDGRVHGEGRGRRRAHRRGAQPALRRLQERHRRAPRLLAHRILHRAQGGDAGRGGARRRRQGVPRARGGRALRDLRGDPAPPRRAPRAGGGGRGRQGLLPQDEGGLPPLPRRVQDRRRAQGRRGLHARRLPGRAGHRRQGAAAHASHQARPRPQLLRLLLRDPQLAGPRLLAGQAGLRRSYFRAG

SEQ ID NO: 34252 - DNA, 886 bp, Zea mays subsp. mays
  misc_feature (340)..(340): n is a, c, g, or t
agacgacacgacaccgcgttcagccgctctagaaccctagctccccgccccgcgagatggccactgccgacggcgagccccagcccgtggccaccgaccccgcccaggtccaggctccggctccggcaccggcaccctacccctccccggccaagcgcaagcccgaggcggatgcggaagccgacgccaacctcgcgccccctaaagccgcgcgtcccgacgtcgacgaggaggccgccgctatggccgaggctgccagggccagtgctcgcgcggctgacaagggtaagggcaagatggtagtcgaggaggaggaggaggaggaggaagacgacagtcnaggagagcagcgacgacgacgagggcggcggcggcggcagcagcagcgatgacgacgagctcgttgaagacccgatggccgaggtagacctcagcaacatcctcccctcgcggacccgccgccgcgcccccccgcagcccggggcgtacctcgtcactccggaggaggctgccgcggaggaggacgacgacgacgctgacgtggttcctgaggaggatgagggagcggagggagaggagagcgattaaggctacctcggcacggactcactaggaatgatgaatggtggcttttggtgctgggtatctgtaccatcctgtgcctggggaccctagtagatgaacgtgctttctgttaggttttgttcgtggatagcctaatcttcattcggcaatcattatgagttgtgcctgtcaccatgatttatatggcatcagtagtagggtgttacttgagggacacacgtttagttctaactttgtagtaaggcttagtatctggtgaacgatcatgattgaacagttaacggttcgcctctgcggctcc

SEQ ID NO: 34253 - protein, 111 aa, Zea mays subsp. mays
  misc_feature (95)..(95): Xaa can be any naturally occurring amino acid
MATADGEPQPVATDPAQVQAPAPAPAPYPSPAKRKPEADAEADANLAPPKAARPDVDEEAAAMAEAARASARAADKGKGKMVVEEEEEEEEDDSXGEQRRRRGRRRRQQQR

SEQ ID NO: 34254 - protein, 100 aa, Zea mays subsp. mays
RRHDTAFSRSRTLAPRPARWPLPTASPSPWPPTPPRSRLRLRHRHPTPPRPSASPRRMRKPTPTSRPLKPRVPTSTRRPPLWPRLPGPVLARLTRVRARW

SEQ ID NO: 34255 - protein, 57 aa, Zea mays subsp. mays
MAEVDLSNILPSRTRRRAPPQPGAYLVTPEEAAAEEDDDDADVVPEEDEGAEGEESD

SEQ ID NO: 34256 - DNA, 670 bp, Zea mays subsp. mays
aagacttcacaagaatctactcgtcgagtcaccaaagataaggctctatcggactcggagtctcggacagcacagcaaagcaagagccgctactcaagtatagtctgacaccggccgaccctgccccaacccaagccatggcggacaacaacaaccggcggaaccacgggcagaccttgctcgccggcgcgggcctgggcctgctcgccgtgaactcgggcctcgccatctaccgcgcgaggggcgacacggccgccgtcctcttcgtcgcggggtcctgcgccaccctgctcctcctcttcgcctgcctccgcgcctacgagcgggcggcgcccgggtcgccggcccgggaccgggcgcggcgcgccgtgtggccgctcgccacgctgctcacgctctcgttcgcctggaaggtggcggcggccatgccttccgccgccgcggccgccctcgtatggggcctggccgtggccaccaccgccggcggcttcgtggcactgtacgtgcagcaggcatgaacacgtgggcgcgggacggactaggcaagcagctgcagacttgcagctcgttcagggatctagatctgggcgccgcgcgcctgtgtagaaatgtacagtgtatttggctagcttttcgattttgtgcatatgtatgtagctgactggctgat

SEQ ID NO: 34257 - protein, 126 aa, Zea mays subsp. mays
MADNNNRRNHGQTLLAGAGLGLLAVNSGLAIYRARGDTAAVLFVAGSCATLLLLFACLRAYERAAPGSPARDRARRAVWPLATLLTLSFAWKVAAAMPSAAAAALVWGLAVATTAGGFVALYVQQA

SEQ ID NO: 34258 - protein, 68 aa, Zea mays subsp. mays
MGPGRGHHRRRLRGTVRAAGMNTWARDGLGKQLQTCSSFRDLDLGAARLCRNVQCIWLAFRFCAYVCS

SEQ ID NO: 34259 - DNA, 1448 bp, Zea mays subsp. mays
gcacgagaccattacctagaacatcctaatcgaaaagtgggtgtcgggcgggccagcagctggacaagcaagcaagcaagcaagccaataatggcgtctcactctcatcggtcccggtctcccacggcgccctgtcccagctgggggcacgcccacgcgccgcggtgccggcggcggctcgtccgggcactgctgctcgtagcggcgctggcgctggcggcggcaggtggtggtggtcgtggctccgcggccgccgccgccgccgccacccagcagaggatcccggccatcttcatgttcggcgactccatcgtggacccgggcaacaacaacaaccggctgacggagggccaaggccaacttcccgccgtacgggcaggacttccccggcggcgtcgccacgggggaggttctccaacggcttggtccccggggacctcctagcttccaagctgggcatcaaggagctgctgccgccgttcatcggcaccgacctgcagctcgaggacctgctcaccggcgtggccttcgcctgcggcggcagtggctacgatccgctcacgtccaagctcgcgacgaccctgtcgagcgccgaccagctccagctgttccaggactacaaggataagctggcggccctggccggggaggaggagatggagcgggtcgtctcgcaggccgtctacttcacggtgatgggggcaaacgacatcgtaaacaactacttcatcctccccatcagacgccaccagtacgacctctcgtcctacgtcgacttcctcgtctcctcggcgatcaacttcacaaggactctgaacgacatgggagctcagaggatagcgttcctcggcgtgccgccactaggatgctgcccgtcacagatcacgctcgcggggagcccgtcgcgccagtgcgatccggcaaggaaccaggcgtcggagctgtacaactccagggtctccaaggagatagagcgcctcaacgcggagcggagcggttctggctccaagttcgtctacgtcgacatatactacaacttgctcgacctcatccagaatccagcttcgtacggtttcaaggacgtgagcgaaggttgctgcggcagcacggtgctgaacgccgccatcttcatcgcgtaccacagcgcgtgccccaacgcgcccgactacatattctgggacggcttccaccccacgcagaaggcctacgacatcgtggtggacaagctcatccagcagaactccaagtacctgatgatgtgaagacgcttgctgctgctgcggctgctgcatggcacgagggctctacctttccccgtacaaacacacagccagctgacgtcgaccattcatggacgactccccagtccccacatggcagtggcatttgccaaatgtacgatacatattaacatataaatatactatacatgcctgtgcgccaatatc

SEQ ID NO: 34260 - protein, 201 aa, Zea mays subsp. mays
MERVVSQAVYFTVMGANDIVNNYFILPIRRHQYDLSSYVDFLVSSAINFTRTLNDMGAQRIAFLGVPPLGCCPSQITLAGSPSRQCDPARNQASELYNSRVSKEIERLNAERSGSGSKFVYVDIYYNLLDLIQNPASYGFKDVSEGCCGSTVLNAAIFIAYHSACPNAPDYIFWDGFHPTQKAYDIVVDKLIQQNSKYLMM

SEQ ID NO: 34261 - protein, 188 aa, Zea mays subsp. mays
MGANDIVNNYFILPIRRHQYDLSSYVDFLVSSAINFTRTLNDMGAQRIAFLGVPPLGCCPSQITLAGSPSRQCDPARNQASELYNSRVSKEIERLNAERSGSGSKFVYVDIYYNLLDLIQNPASYGFKDVSEGCCGSTVLNAAIFIAYHSACPNAPDYIFWDGFHPTQKAYDIVVDKLIQQNSKYLMM

SEQ ID NO: 34262 - protein, 181 aa, Zea mays subsp. mays
MLPVTDHARGEPVAPVRSGKEPGVGAVQLQGLQGDRAPQRGAERFWLQVRLRRHILQLARPHPESSFVRFQGRERRLLRQHGAERRHLHRVPQRVPQRARLHILGRLPPHAEGLRHRGGQAHPAELQVPDDVKTLAAAAAAAWHEGSTFPRTNTQPADVDHSWTTPQSPHGSGICQMYDTY

SEQ ID NO: 34263 - DNA, 1264 bp, Zea mays subsp. mays
  misc_feature (571)..(572): n is a, c, g, or t
  misc_feature (574)..(575): n is a, c, g, or t
  misc_feature (596)..(596): n is a, c, g, or t
  misc_feature (615)..(615): n is a, c, g, or t
  misc_feature (634)..(634): n is a, c, g, or t
  misc_feature (661)..(661): n is a, c, g, or t
  misc_feature (715)..(715): n is a, c, g, or t
  misc_feature (746)..(746): n is a, c, g, or t
agccagccaccaccgcgagaacaagtcgcagccaagagaagtcgtcctcgcgcgcgtctcgatctcccagcgaagctagagcttgccgtgtgccgtgacttccatggagctactccacgccgtcatccatggagctgcgacgacgacgacgaccaccaccaccaccaccacgagcagcagcgccaccgtcaccagcggcgacgagggcgcccacctgccccaggggtgggccaagaagaagcgctcgcggcgccagcgctcagaggaggagaacctcgcgctgtgcctgctcatgctctcccgcggcgaccgccaccgcgtccaggcgccgccgccgccggtcccgtccgcggagttcaggtgctccgtctgcgggaagtccttcggctcctaccaggcgctggggggccacaagaccagccaccgggtcaagctgccgacccctcctgccgctcatgtccagctcccggcaccaccggcagtggccctcttggtggaggcccccgcaccaccaccagtcactgccaccccgcccccgctgccgctagtcgcggtcgccgtcgccgtccgnnanncggccacgtcgtccacctccnacggggcggccgcgggcanagtgcacaggtgcaccatntgccacaaggagttcccgaccggccangcgctcggcggccacaagaggaagcactatgacggaggcgccgcggcggccganacgtccgaggtggggagctccgggaacgaangctccgccgcccgcgcgttcgacctcaacctcccggccgtgccggagttcgccttccggtgcggcgccaagcccggcaagatgtgggacgaggaccaggaggtgcagagccccctcgccttcaagaagccccgcctcctcatgaccgcgtgagcctgagcctgagccgaggcgcggatctgatgttgatccgcacgagacttttttggatgttcggtggaacactattcgttcgttcattcgtgtggcgcccgccagtgctattgtttgatttgttgatgctcttcttgtacagtacagagagagctggtgtgagagatgcgtagtcaccacactcacgcatagtataccatacaatacatatagccatataggtcttcctgttcctgggatctgtatccttagctgtcagtatagtgtagtccatacatacttcgttctcattgcaagagatgattgatggattagttagtgctctgtaacataagcttatttataaatggattaagattactgtgg

SEQ ID NO: 34264 - protein, 264 aa, Zea mays subsp. mays
  misc_feature (156)..(158): Xaa can be any naturally occurring amino acid
  misc_feature (165)..(165): Xaa can be any naturally occurring amino acid
  misc_feature (171)..(171): Xaa can be any naturally occurring amino acid
  misc_feature (177)..(177): Xaa can be any naturally occurring amino acid
  misc_feature (186)..(186): Xaa can be any naturally occurring amino acid
  misc_feature (204)..(204): Xaa can be any naturally occurring amino acid
  misc_feature (215)..(215): Xaa can be any naturally occurring amino acid
MELLHAVIHGAATTTTTTTTTTTSSSATVTSGDEGAHLPQGWAKKKRSRRQRSEEENLALCLLMLSRGDRHRVQAPPPPVPSAEFRCSVCGKSFGSYQALGGHKTSHRVKLPTPPAAHVQLPAPPAVALLVEAPAPPPVTATPPPLPLVAVAVAVXXXATSSTSXGAAAGXVHRCTXCHKEFPTGXALGGHKRKHYDGGAAAAXTSEVGSSGNEXSAARAFDLNLPAVPEFAFRCGAKPGKMWDEDQEVQSPLAFKKPRLLMTA

SEQ ID NO: 34265 - protein, 230 aa, Zea mays subsp. mays
  misc_feature (191)..(192): Xaa can be any naturally occurring amino acid
  misc_feature (199)..(199): Xaa can be any naturally occurring amino acid
  misc_feature (205)..(205): Xaa can be any naturally occurring amino acid
  misc_feature (212)..(212): Xaa can be any naturally occurring amino acid
  misc_feature (221)..(221): Xaa can be any naturally occurring amino acid
SQPPPREQVAAKRSRPRARLDLPAKLELAVCRDFHGATPRRHPWSCDDDDDHHHHHHEQQRHRHQRRRGRPPAPGVGQEEALAAPALRGGEPRAVPAHALPRRPPPRPGAAAAGPVRGVQVLRLREVLRLLPGAGGPQDQPPGQAADPSCRSCPAPGTTGSGPLGGGPRTTTSHCHPAPAAASRGRRRRPXXGHVVHLXRGGRGXSAQVHHXPQGVPDRPXARRPQEEAL

SEQ ID NO: 34266 - protein, 201 aa, Zea mays subsp. mays
  misc_feature (93)..(95): Xaa can be any naturally occurring amino acid
  misc_feature (102)..(102): Xaa can be any naturally occurring amino acid
  misc_feature (108)..(108): Xaa can be any naturally occurring amino acid
  misc_feature (114)..(114): Xaa can be any naturally occurring amino acid
  misc_feature (123)..(123): Xaa can be any naturally occurring amino acid
  misc_feature (141)..(141): Xaa can be any naturally occurring amino acid
  misc_feature (152)..(152): Xaa can be any naturally occurring amino acid
MLSRGDRHRVQAPPPPVPSAEFRCSVCGKSFGSYQALGGHKTSHRVKLPTPPAAHVQLPAPPAVALLVEAPAPPPVTATPPPLPLVAVAVAVXXXATSSTSXGAAAGXVHRCTXCHKEFPTGXALGGHKRKHYDGGAAAAXTSEVGSSGNEXSAARAFDLNLPAVPEFAFRCGAKPGKMWDEDQEVQSPLAFKKPRLLMTA

SEQ ID NO: 34267 - DNA, 1360 bp, Zea mays subsp. mays
aaaaaaaaccctagcagttcggtagtccctctcctctcgaggtattagcagtcgaccggttcctcggagcacgatgaagtttgttgctgcctacctgcttgctgtcctcgctgggaacgccagcccctccgctgacgatttgactgccattctggagtcagttggctgtgaagcttcggggaacggcaataaagggtcacctttcaatggttcctatagatgctgaacctcagccaataattctagcatacattgatctcaatctccagacccttgcagccgctagaatgttgacgccatcggggcctatgggtcaaactcactggggtgatgctgcatcgaacaatccaaatccatctactcactcagctgacgcgcaattgaagcaagagcttgctgctattttcaagaaaattggtgacaagcaaacatgtaccattggcctctatgaactgtatcggataactcagctctacccaaaggttgatatatttgctcagcttcagaatgctagtgaagcgtttagaacctatatcagagatggcctagctcaggtggagaagaatgcagcagctggaagaatgccttccagtcttccattatccacgccgcccccaatagcagcaatacccaatccaaaatttgcaccatcccctgttcacacaaaatcaatcggtaaaacagattataacgaagataatgccagtggtgagacacaacccttcagaggtcaagggtgccatcaccgaccaacaaactgatagataccatacctcaggcacgttggatgctcttagggaaaggatgaaaagcattcaagcggcagctataggtcattttgacggtgctcaggctcggccgttggcaagtatgaacggaagtaatatggtgcatgggggaactcgattggacggtgaaccccaacaacgaagtaatataccacccatggatgagcgagctctatctgggctgcaagcacgaatggagagactaaagagtgggtctatggaattacaatagatacgataacaattctgagaaataccaactattgtagttctttgtaaatttgaggcatagtgatggtgttctttgtagataggtatttgaatgtcggaagaactatatggcacggggtcaacatttcgtaacccatgtgtcaagccattcttgcagagcctttggatgcagttttagataagaggtagccaaatgttttccttgttgctactccaagggctaattagtgttgacacattttgccgtactgtattggttttcctgtggtgtacagcaatagaatttttcattctaaattaactggaaatgttacttgtgaaatatatggtttttgaaatgc

SEQ ID NO: 34268 - protein, 184 aa, Zea mays subsp. mays
MVPIDAEPQPIILAYIDLNLQTLAAARMLTPSGPMGQTHWGDAASNNPNPSTHSADAQLKQELAAIFKKIGDKQTCTIGLYELYRITQLYPKVDIFAQLQNASEAFRTYIRDGLAQVEKNAAAGRMPSSLPLSTPPPIAAIPNPKFAPSPVHTKSIGKTDYNEDNASGETQPFRGQGCHHRPTN

SEQ ID NO: 34269 - protein, 157 aa, Zea mays subsp. mays
MLTPSGPMGQTHWGDAASNNPNPSTHSADAQLKQELAAIFKKIGDKQTCTIGLYELYRITQLYPKVDIFAQLQNASEAFRTYIRDGLAQVEKNAAAGRMPSSLPLSTPPPIAAIPNPKFAPSPVHTKSIGKTDYNEDNASGETQPFRGQGCHHRPTN

SEQ ID NO: 34270 - protein, 150 aa, Zea mays subsp. mays
MGQTHWGDAASNNPNPSTHSADAQLKQELAAIFKKIGDKQTCTIGLYELYRITQLYPKVDIFAQLQNASEAFRTYIRDGLAQVEKNAAAGRMPSSLPLSTPPPIAAIPNPKFAPSPVHTKSIGKTDYNEDNASGETQPFRGQGCHHRPTN

SEQ ID NO: 34271 - DNA, 1619 bp, Zea mays subsp. mays
  misc_feature (1112)..(1112): n is a, c, g, or t
gcacgagaccattacctagaacatcctaatcgaaaaatcaccaccgcattcacatcgaacaacaacaacacaaggcgaggccgagtcgagtagcgcgaccacacacacacaccgcgtcgagtctcacacggcacggcagggcacgcgtcaaggcgatccgttccatgccgccgccgctgccgctgccggaggaggaggaggaggagaagccgctgccgcggcgaaagccagagccgaagccgcctaagcccaagcccaccaagaggcccaggccgattgggccgctgcctcagcgggacggggaccccggcggcggcgtcgccacgtcccctccgctcctcttctgcggcgacggctgctccggcccgtgcgcctacttgccccagtgccagccgccgcctccgccgtcccctggggccaccgtgcgcctccgctcgagccggctcccgaccccgctcgtcgcgctctcggcgtcgctcctcaccgtgtccgcggtcctcctgctcgcgctgctcgtccactgcctggtcgcgcggcggcggcggcggcggcgggcgcaaggcgcgccgctggtccaccacgccgaggcgggagggggccaggttctggctggcgcggtggcgcagcaggccggcgagggggaggacgaggaggccgccggcggcggcgtgcaccacgtgtggtacatacgcaccaagggcctcgacgagcgtgccatctcggcgatcgccgcggtcgtgtacgacgccaagaagcgcggcgccggcgccagctccgacggcggcggcagctgcgcggtgtgcctcgcggagttccgccacggcgagacgctgcgcctgctgccgcgctgcgcccacgccttccaccgcgcctgcatcgacacctggctccgcgcccacgtcaactgcccgctctgccgcgcgcccgtgcaggtcgccgccgccgccgctaaccccaaccccgcaccgggaacgtccgggcgccgggaagagggtaaccctgctgctggcgccgtcatcggtggcgttcaaacacaggaccccgcgcgcggcggcggcggcggcggcggctttcctgaccgggccgtcaggcgggccgcgtcgtccatggcngcgctgccgcggcgggcgtggccggacgtcccgctgcgtgcgccggcgtcgagcagcttccgcgacggcgaggacgacgtgacggggctcggcaagatcaggcggctcctcaagctctcggacgcgctggagatggcgggggtcggggtacaccggtccgcctcgttcggcgccgctacctgccagcgcttgccgccaaggccggggccgtcggcgcccggcgtcagcgccgacgagacgtcatagcgaaccgactgaggccgacgacgaggccatcggtggtagcttggaggcgtgaaggttggggttggtttgccaagtttttgtgtgtgccgggcacgagacatgagaaggtaaaaaatgatatcttttccatgtttcttgtataatcgcttcgtcagcagtaacaagtaaataactcgtgagtctgtgcatgcactgcggagcgtcaggaattgtaagtaagaaagaatccttgacggaagtagtttagtatgggaaatttac

SEQ ID NO: 34272 - protein, 397 aa, Zea mays subsp. mays
  misc_feature (316)..(316): Xaa can be any naturally occurring amino acid
MPPPLPLPEEEEEEKPLPRRKPEPKPPKPKPTKRPRPIGPLPQRDGDPGGGVATSPPLLFCGDGCSGPCAYLPQCQPPPPPSPGATVRLRSSRLPTPLVALSASLLTVSAVLLLALLVHCLVARRRRRRRAQGAPLVHHAEAGGGQVLAGAVAQQAGEGEDEEAAGGGVHHVWYIRTKGLDERAISAIAAVVYDAKKRGAGASSDGGGSCAVCLAEFRHGETLRLLPRCAHAFHRACIDTWLRAHVNCPLCRAPVQVAAAAANPNPAPGTSGRREEGNPAAGAVIGGVQTQDPARGGGGGGGFPDRAVRRAASSMXALPRRAWPDVPLRAPASSSFRDGEDDVTGLGKIRRLLKLSDALEMAGVGVHRSASFGAATCQRLPPRPGPSAPGVSADETS

SEQ ID NO: 34273 - DNA, 1366 bp, Zea mays subsp. mays
ctctttcgttcccgaccaattcgcctggcttgccctcgcccgcccaccgctcgggagccgatacaagacgagggcaatcgatctgttccgaatccgcatgcgcccgcggccgccgccgcccgtcgccacctgaactcgaacccctggccggagcgtgcggcccgcgcccgcctatggacgagtaccagacgcgccggtcgccggcgggcgagcggttcatcggcatgttctcgtcgccgtctacgccctcgtcgtccccgaccgagccttcgttcgtcgctggggacgaactccacgaggacgacttcctcttctcgtcgccggacgccgcggcgccgcagcccgacgggcctaggagcccgggccggggagcgccgcaggggcatctcggtcttcttgccgccctggcgctacacgagggggacaggaagctcctggttcgcggtggccacggcgggggagtggcggccgcggccagcgcggggacgctgctccggcgcaaggcgaccatcgcggcggccgccgcatctgcctcggccacggtggcgtcggggaacgggggcgcgttgtcgcccacccagtccccgacctcctccgcgcgggccatcccggcgaccgcgaagccccagaacgccgggcccgcccggccgtaccaccagtcggcgcccgtgaaggtgcccgtgcgtccactccgaaagccagctacgggccggtgggacgaattcgatgacgacgcggacttcgggcgcggcgacgccgccatgctgccccccgcatgagatggtcgcccgcgcatccgctggtggggctgggcccgccgctccgttctcgatgctcgagggcgccgggcgcacgctcaaaggccgagacctgcggcgtgtgcgcgacgctgtgctcaggcaaaccggattcctcgattgaatccggcaaggtgacgtggttcttgccttttgttcagcaaccgtgtgctcagtcagagtcgaagatgcgttacattaggtatgtgtagtgggttctactgtgtgagcactgagcaaagcgggaaggtaagataacaagattgaatttcccggcttgcaattttggtgttcttggatgtctgcgtgtcatattaccgcaagcttcagcagtaataagaactggtgtcctgtgtgggtctttctctgcgagctctctgtaatccaggagggaagagattttttttgtttccgtcaaggttgtctgttaggcgtagtacatatgaattatcgttatgttagtcgagactaatgctttcagctcttagtgaaagttttgttagttttgtttcttactcttttgttgatggtactgaattacctatggtgatgaaaatatgcattgtttc

SEQ ID NO: 34274 - protein, 258 aa, Zea mays subsp. mays
LSFPTNSPGLPSPAHRSGADTRRGQSICSESACARGRRRPSPPELEPLAGACGPRPPMDEYQTRRSPAGERFIGMFSSPSTPSSSPTEPSFVAGDELHEDDFLFSSPDAAAPQPDGPRSPGRGAPQGHLGLLAALALHEGDRKLLVRGGHGGGVAAAASAGTLLRRKATIAAAAASASATVASGNGGALSPTQSPTSSARAIPATAKPQNAGPARPYHQSAPVKVPVRPLRKPATGRWDEFDDDADFGRGDAAMLPPA

SEQ ID NO: 34275 - protein, 223 aa, Zea mays subsp. mays
LFRSRPIRLACPRPPTAREPIQDEGNRSVPNPHAPAAAAARRHLNSNPWPERAARARLWTSTRRAGRRRASGSSACSRRRLRPRRPRPSLRSSLGTNSTRTTSSSRRRTPRRRSPTGLGARAGERRRGISVFLPPWRYTRGTGSSWFAVATAGEWRPRPARGRCSGARRPSRRPPHLPRPRWRRGTGARCRPPSPRPPPRGPSRRPRSPRTPGPPGRTTSRRP

SEQ ID NO: 34276 - protein, 201 aa, Zea mays subsp. mays
MDEYQTRRSPAGERFIGMFSSPSTPSSSPTEPSFVAGDELHEDDFLFSSPDAAAPQPDGPRSPGRGAPQGHLGLLAALALHEGDRKLLVRGGHGGGVAAAASAGTLLRRKATIAAAAASASATVASGNGGALSPTQSPTSSARAIPATAKPQNAGPARPYHQSAPVKVPVRPLRKPATGRWDEFDDDADFGRGDAAMLPPA

SEQ ID NO: 34277 - DNA, 1614 bp, Zea mays subsp. mays
taatcaaaagcacagcacatcccattcccctcgtctcatctcaagagcgactagagagagagaggaagagaacaagcgataagctcatctcgcacgcaagatgcgggctccaaggggcgcaggcggctgccgcggcggccaggagcatgtggaactgatccctggcatccccgacgacgtggccgtggactgcctggcgcgcgtcccccacgcctcccaccgcgcgatgcgccgggtctgccgcggctggcggagcgccgccgcggcgccggccttcgcgtcggcgcgcgccgcggcgggcgccaacgaggacctcgtgtacctcatgcagttcgggaacccgtccggcgacgacgggcccaaggacggcgacgacgggcccggcagcaccccggcgtacggcgtggcggtgtacaacgtgacgacgggcgagtggcggcgggagcgcggcgcgccccccgtggtgccggtgttcgcgcagtgcgcggcggtggggacccgcgtggccgtgctgggcggctgggacccgcgcagcttcgagcccgtggcggacgtgcacgtgctggacgccgccacggggcggtggcgccgcgccgcgcccatgcggtcggcgcgctccttcttcgcctgcgccgaggccggcggcaagatctacgtggcgggcggccacgacaagcacaagaacgcgctcaagaccgccgaggcgtacgacgccggggccgacgcctgggacccgctgcccgacatgtcggaggagcgcgacgagtgcgacggcatggccaccgtcgccggcgaccgcttcctggccgtcagcggctaccgcacggcgcgccagggtgggttcgagcgcgacgccgagtggttcgacccggcggcgcgcgcgtggcgcaggctcgaccgcgtgcgcgcgccgccctccgccgcgcacgtcgtcgtccgcggccgcgtctggtgcatcgagggcaacgccgtcatggagtggatgggcacccgccgcggctggcgcgaggtcggcccgtacccgccgggcctcaaggccggcaccgcgcgcgccgtctgcgtcggcggcggggagaaggtcgtggtcaccggcgcgctcgacggcgagggcggccgccacgcgctctgggtgttcgacgtcaagaccaagagctggaccgtggtccgcccgccgccggagttcgccggattcgtcttctccgtcgcgtccgtccggatctgaggatctccattttcttcgacccgcccgcggctgcttgtagtagtagtacgtacgtgcactgttttcgtcgttgctggatccgatgaagactcaccccctccaagatctacgtttgcaatggatggatctgcgcatccgctgacttactagtccgccttgccaacaatgagagatacatggaggagcgggagccatgggcggttgtaaaatctgaaaaaaaagtggtgagagtgtgaatttggatctggtggtgagagtgaatttggacgagtgtggtgtttttgtcccgaggtgaaggacacagactgttgtttgttgctcttgtcctacagccatgcttttgccatcgctagccaactgcttactagtaataaaaaccactgtacatacat

SEQ ID NO: 34278 - protein, 373 aa, Zea mays subsp. mays
MRAPRGAGGCRGGQEHVELIPGIPDDVAVDCLARVPHASHRAMRRVCRGWRSAAAAPAFASARAAAGANEDLVYLMQFGNPSGDDGPKDGDDGPGSTPAYGVAVYNVTTGEWRRERGAPPVVPVFAQCAAVGTRVAVLGGWDPRSFEPVADVHVLDAATGRWRRAAPMRSARSFFACAEAGGKIYVAGGHDKHKNALKTAEAYDAGADAWDPLPDMSEERDECDGMATVAGDRFLAVSGYRTARQGGFERDAEWFDPAARAWRRLDRVRAPPSAAHVVVRGRVWCIEGNAVMEWMGTRRGWREVGPYPPGLKAGTARAVCVGGGEKVVVTGALDGEGGRHALWVFDVKTKSWTVVRPPPEFAGFVFSVASVRI

SEQ ID NO: 34279 - protein, 331 aa, Zea mays subsp. mays
MRRVCRGWRSAAAAPAFASARAAAGANEDLVYLMQFGNPSGDDGPKDGDDGPGSTPAYGVAVYNVTTGEWRRERGAPPVVPVFAQCAAVGTRVAVLGGWDPRSFEPVADVHVLDAATGRWRRAAPMRSARSFFACAEAGGKIYVAGGHDKHKNALKTAEAYDAGADAWDPLPDMSEERDECDGMATVAGDRFLAVSGYRTARQGGFERDAEWFDPAARAWRRLDRVRAPPSAAHVVVRGRVWCIEGNAVMEWMGTRRGWREVGPYPPGLKAGTARAVCVGGGEKVVVTGALDGEGGRHALWVFDVKTKSWTVVRPPPEFAGFVFSVASVRI

SEQ ID NO: 34280 - protein, 298 aa, Zea mays subsp. mays
MQFGNPSGDDGPKDGDDGPGSTPAYGVAVYNVTTGEWRRERGAPPVVPVFAQCAAVGTRVAVLGGWDPRSFEPVADVHVLDAATGRWRRAAPMRSARSFFACAEAGGKIYVAGGHDKHKNALKTAEAYDAGADAWDPLPDMSEERDECDGMATVAGDRFLAVSGYRTARQGGFERDAEWFDPAARAWRRLDRVRAPPSAAHVVVRGRVWCIEGNAVMEWMGTRRGWREVGPYPPGLKAGTARAVCVGGGEKVVVTGALDGEGGRHALWVFDVKTKSWTVVRPPPEFAGFVFSVASVRI

SEQ ID NO: 34281 - DNA, 1648 bp, Zea mays subsp. mays
ccgacctcccccttcctctccccctgccgctccccgcgccgagaaggagaaccccagccgccgcgcagcgcgccgcccatggcctcctcgtcggagaacgcggctgtgccgccggaggaggagccccaggccccgccgccgccggacacagagcctaccgaggcggcgcccggcgaggcggaggatgagccgcaaaccctagagcgggcgcaggagctcttcgacaggggttccaaggccatcgaggatgaggacttcgtcgacgccgtagactgtctcagccgagcgctcgagatcagggcttcacattatggagagctcgcaccggagtgtgccagcacatacttcaaatatggatgtgccctgctatacaaagctcaggaggagagtgatgttttgggaaatgttcccaagagcttgccaaatgaagactcagtgaagagtacagctactaaagatgacagtggaacctcaaaggtctctggtaccgatgcggaggatgctgcgtcatcagaaaaagttgatgctgaagaaggtcacaactcaaatggcaaaaatcaggagaatgggaatggtgaagttgagaaagatgatgacgacgtcgacgatgatgagaagatgggagatgaagaggataatgatttggatctttcttggaaaatgttggacattgctagggcaatagttgagaagagccaagataacactatggagaaagtaaaaatatattctgctcttgctgaagtggcaacggaaagagaggacatggacaactcactcagtgactatatgaaagctttatccatgttggagcatttggttgagcctgaccatcgtcgagttgtggaattaaacttccgcatttgtttggtttatgaactagtttccaagatcggagaagcaatttcatactgtgcaaaagcaatttcgctatgcaagtcacgcatacagagcctgaaaagttccaaggatgctttgttggctggtatagatggtgatgcatctgctgctgaagctgaaggaggctcagaaaaatctgccattgaaaaagagctagagcagcttactagcatattgcctgatcttgagaagaagcttgaggacctgtctgaagcaaacccaagcgctgacatggatgagatggtgaaggcaatcgtgtccagggtaactgatgtgatgccaaaagctgcatcttttacttcttcccagatggcaacctcaagcaatggattcgactcctcggttatgtctacggcagcgacaaccggaagctctggaagcaccgtgactgaccttggggttgtaggcagaggcgtcaaacgagctagcatcaagccgatctctgctgaacctgctgctaagaaacctgcacttgattcaccatctcaacaaggtgacagcagcatcaactctgaggttgttcctgcaacgcagactggagacgagtcagtatctaagtaaattacaatttcattagccctactgtaatgttaacttgctggaacatattagctgctatgtaaacgcttaagaagggactgctggggccatagactcatcgtgagctgaccattgaaatgttaaattgctgagatcatcatggcggtaaatcatgtctgctatatcaaatatgcttggtgagatgtgc

SEQ ID NO: 34282 - protein, 486 aa, Zea mays subsp. mays
PTSPFLSPCRSPRREGEPQPPRSAPPMASSSENAAVPPEEEPQAPPPPDTEPTEAAPGEAEDEPQTLERAQELFDRGSKAIEDEDFVDAVDCLSRALEIRASHYGELAPECASTYFKYGCALLYKAQEESDVLGNVPKSLPNEDSVKSTATKDDSGTSKVSGTDAEDAASSEKVDAEEGHNSNGKNQENGNGEVEKDDDDVDDDEKMGDEEDNDLDLSWKMLDIARAIVEKSQDNTMEKVKIYSALAEVATEREDMDNSLSDYMKALSMLEHLVEPDHRRVVELNFRICLVYELVSKIGEAISYCAKAISLCKSRIQSLKSSKDALLAGIDGDASAAEAEGGSEKSAIEKELEQLTSILPDLEKKLEDLSEANPSADMDEMVKAIVSRVTDVMPKAASFTSSQMATSSNGFDSSVMSTAATTGSSGSTVTDLGVVGRGVKRASIKPISAEPAAKKPALDSPSQQGDSSINSEVVPATQTGDESVSK

SEQ ID NO: 34283 - protein, 460 aa, Zea mays subsp. mays
MASSSENAAVPPEEEPQAPPPPDTEPTEAAPGEAEDEPQTLERAQELFDRGSKAIEDEDFVDAVDCLSRALEIRASHYGELAPECASTYFKYGCALLYKAQEESDVLGNVPKSLPNEDSVKSTATKDDSGTSKVSGTDAEDAASSEKVDAEEGHNSNGKNQENGNGEVEKDDDDVDDDEKMGDEEDNDLDLSWKMLDIARAIVEKSQDNTMEKVKIYSALAEVATEREDMDNSLSDYMKALSMLEHLVEPDHRRVVELNFRICLVYELVSKIGEAISYCAKAISLCKSRIQSLKSSKDALLAGIDGDASAAEAEGGSEKSAIEKELEQLTSILPDLEKKLEDLSEANPSADMDEMVKAIVSRVTDVMPKAASFTSSQMATSSNGFDSSVMSTAATTGSSGSTVTDLGVVGRGVKRASIKPISAEPAAKKPALDSPSQQGDSSINSEVVPATQTGDESVSK

SEQ ID NO: 34284 - protein, 280 aa, Zea mays subsp. mays
MGDEEDNDLDLSWKMLDIARAIVEKSQDNTMEKVKIYSALAEVATEREDMDNSLSDYMKALSMLEHLVEPDHRRVVELNFRICLVYELVSKIGEAISYCAKAISLCKSRIQSLKSSKDALLAGIDGDASAAEAEGGSEKSAIEKELEQLTSILPDLEKKLEDLSEANPSADMDEMVKAIVSRVTDVMPKAASFTSSQMATSSNGFDSSVMSTAATTGSSGSTVTDLGVVGRGVKRASIKPISAEPAAKKPALDSPSQQGDSSINSEVVPATQTGDESVSK

SEQ ID NO: 34285 - DNA, 1283 bp, Zea mays subsp. mays
  misc_feature (1035)..(1035): n is a, c, g, or t
  misc_feature (1085)..(1085): n is a, c, g, or t
acccttctttaaccccgccacccagatccagccgcgccgcactccaccacggcccccacaactccaccgctagcagcagccaacagactcccgtcgggatggccgtggcgctcctcctcctgctggtgacgcccgtcgggctgctcgccgcgctcgcgctcctcacgcggccccgggccgcgcgggtcccgctcaaaggccgccacgtcttcatcacgggcgggtccagcggcatcgggctcgccatggccacggccgcggcgcgggagggcgcgcgggtctccatcctggcccgcaacctcgcccgcctcgaggacgcgcgcgccgccatccagcgcgactcgggcagggacgacgtcggcgtccacgcggccgacgtgcgggacgccggcgctcgtcgcgcgcgcgctccaggaggccggccccgtcgacgtcctcgtctgcaaccacggcgtgttcgtgccgcaggagctcgaggggcaggacgtggatgagatcaagtggatggtggacatcaacctcatgggcagcttccacctcatcaaggccgcgcttccggccatgaaggcgcgcacccgcgagacgcgcctccctggctccatcgccatcatgtcctcccaggccggccaggttggtatttatggttacactgcctactcagcgagcaagttcgctcttcgcggattgggtgaggcgttgcagcatgaggtcatcgcggacaacattcatgtctcgttgatattccctcctgacaccgagactccaggattggaagaggagcataagaggaggccggaattgacaaacatcatagcagggtcatccggtggaatgaaggccgacgatgttgccaagaaggctctggacggcatcaaatccgcaaaattcattgtcccctgtaatttcgagggcgcaatgttagccgtagccaccgctggtttatccccgcagagctccccgttaatggcattcctagaagtggttggcgctggactcatgcggtttgcggcaatttgtttccagtggaattggttntccaccatcgagagctattatgccaagaaaaagaagagcgagtgatagcncaaaccacagctggacattattttcctagatcccgtgagagtcaaaagaaacaaataagtcacgtctgacctaatgtaaatgtagcgtggtagtattagagaagttgaagctatcttctttttaatggtttttttcatcagatcatgtctacaatatcagattctgttaaaaacaatggttcgtgagattttgatggc

SEQ ID NO: 34286 - protein, 191 aa, Zea mays subsp. mays
  misc_feature (177)..(177): Xaa can be any naturally occurring amino acid
MVDINLMGSFHLIKAALPAMKARTRETRLPGSIAIMSSQAGQVGIYGYTAYSASKFALRGLGEALQHEVIADNIHVSLIFPPDTETPGLEEEHKRRPELTNIIAGSSGGMKADDVAKKALDGIKSAKFIVPCNFEGAMLAVATAGLSPQSSPLMAFLEVVGAGLMRFAAICFQWNWXSTIESYYAKKKKSE

SEQ ID NO: 34287 - protein, 185 aa, Zea mays subsp. mays
  misc_feature (171)..(171): Xaa can be any naturally occurring amino acid
MGSFHLIKAALPAMKARTRETRLPGSIAIMSSQAGQVGIYGYTAYSASKFALRGLGEALQHEVIADNIHVSLIFPPDTETPGLEEEHKRRPELTNIIAGSSGGMKADDVAKKALDGIKSAKFIVPCNFEGAMLAVATAGLSPQSSPLMAFLEVVGAGLMRFAAICFQWNWXSTIESYYAKKKKSE

SEQ ID NO: 34288 - protein, 172 aa, Zea mays subsp. mays
  misc_feature (158)..(158): Xaa can be any naturally occurring amino acid
MKARTRETRLPGSIAIMSSQAGQVGIYGYTAYSASKFALRGLGEALQHEVIADNIHVSLIFPPDTETPGLEEEHKRRPELTNIIAGSSGGMKADDVAKKALDGIKSAKFIVPCNFEGAMLAVATAGLSPQSSPLMAFLEVVGAGLMRFAAICFQWNWXSTIESYYAKKKKSE

SEQ ID NO: 34289 - DNA, 1157 bp, Zea mays subsp. mays
  misc_feature (100)..(100): n is a, c, g, or t
aaagcccagcacgaccaaaacccagaacctgagaatggcgcagttccttcgcggcaaggccgccgccgccgccaccggggcggcggcgctgcgcgcgtcntctccggcgccatggcggcggacggcctccgcgtcgtaccaccacacgatccaggctgtaccgcgggagacagccggcccgcgcgccgcggcgcgcgagcgccgccacggccgcgtcccggcggtcctgctcacgctcgcgggcgccgcgccagggaacggaattgcccaccggcacctccttaccgccgacaggaggcagctcgcggagatgctcaagcagtcgccctacttcctctccacccccgtccgcctccaggtccgcgcgggcgagcgatccaacgccatcctccacgccggcaccgtcctccccatcaaggtgcatagagatgaaaattctgggaatatactgaatttggtaatggtgaaggcagatgaaggaacaatgctgaaggtggatttgcctgtagagttcaagggagaggatgcttgccctgggttgaagaaaggaggctttttgcagaaaataaggaccagcctggtgtatctctgcccagctgagcacatccctccaaaaattgaggtggacctgacaaatcttgatgtcggagatagggtattgatgcatgacattcccgtccatccatcgctcaagttgctgagtaaaaacgagaccatgcccgtctgcaagatcttggcctcaaagccagacgagtaggaggcgctgcaaatacttcagagctgataacattgtacctttaggtggtacagccctccagcagctccgtccctagttcttggcttgctttttggtcatctgtcccctaggtttcaatgtgatagtggattcagacaagctatgggcttcaagtaaagatacgaaggaacaaaatgaagaaatatcactggagagacattgtctgtaccaaccgctatagaataacatcctttctcattcagtttgggttcagggacacatgacatgtaagacgactatcctttgctgtggcctgggtgaattcattctctaagctactcttgcagcggctcacaattcatcgtcctgactgcatgcattgtactgtcatgattctacgtattgaatgttgtattcatgc

SEQ ID NO: 34290 - protein, 251 aa, Zea mays subsp. mays
  misc_feature (33)..(33): Xaa can be any naturally occurring amino acid
KPSTTKTQNLRMAQFLRGKAAAAATGAAALRAXSPAPWRRTASASYHHTIQAVPRETAGPRAAARERRHGRVPAVLLTLAGAAPGNGIAHRHLLTADRRQLAEMLKQSPYFLSTPVRLQVRAGERSNAILHAGTVLPIKVHRDENSGNILNLVMVKADEGTMLKVDLPVEFKGEDACPGLKKGGFLQKIRTSLVYLCPAEHIPPKIEVDLTNLDVGDRVLMHDIPVHPSLKLLSKNETMPVCKILASKPDE

SEQ ID NO: 34291 - protein, 240 aa, Zea mays subsp. mays
  misc_feature (22)..(22): Xaa can be any naturally occurring amino acid
MAQFLRGKAAAAATGAAALRAXSPAPWRRTASASYHHTIQAVPRETAGPRAAARERRHGRVPAVLLTLAGAAPGNGIAHRHLLTADRRQLAEMLKQSPYFLSTPVRLQVRAGERSNAILHAGTVLPIKVHRDENSGNILNLVMVKADEGTMLKVDLPVEFKGEDACPGLKKGGFLQKIRTSLVYLCPAEHIPPKIEVDLTNLDVGDRVLMHDIPVHPSLKLLSKNETMPVCKILASKPDE

SEQ ID NO: 34292 - protein, 148 aa, Zea mays subsp. mays
MLKQSPYFLSTPVRLQVRAGERSNAILHAGTVLPIKVHRDENSGNILNLVMVKADEGTMLKVDLPVEFKGEDACPGLKKGGFLQKIRTSLVYLCPAEHIPPKIEVDLTNLDVGDRVLMHDIPVHPSLKLLSKNETMPVCKILASKPDE

SEQ ID NO: 34293 - DNA, 1360 bp, Zea mays subsp. mays
ataaattccgaaggcggtcttccgagagcaacagctgctcaggcaggcaggcaggcaggcaccaacagccaacccgacgcaaggaaccaattaaccaccgtcccgctgatgtcgtcggcgacgccagcgcccgcgcgccaccggacgtgccgcacgtactggtgctaccagtgcggccgcgcgctccgcatcatctcctgcccgtccaccgacgtcttctgcccgcgctgcttcggccgcttcctccacgaggaggtcgacccgccgacggcgcgccacgggttcccgccggcgcacttccttccgcacccgttccacccgcagcaccagtacgccggccgtccgcgccgctgggtcatctacggcgaggagccgacgacggtaccaggccgtgcgttccgccagcctgcgccggcacagggacctgccacgcctcctgctcctgcaccggcgctggttggacgacggcgcgtgccttccccgccgccggcgccggtgccgcggcggccgtccacgcccccggccatggaccccggggactacttcatggggccgaacctgaacagcctcatcgaggagctcacgcagaacgacaggccggggccggcgccggcgccaccgtcggcaatcgactcgctcccgacggtgcgggtcgccggggcgcacctgtcggacggctcgcagtgccccgtgtgcaaggaggacttcgagctcggggaggccgcgcggcagctgccgtgcaagcacgtctaccactccgattgcatcgtgccgtggctccgcctgcacaactcctgccccggtctgccgataccagctacctagagccgggtccaacggcagcagccaggccgcacctcgcggcggaagcaacggcaacaacaggaacagggagatggagagagagcccctgacgatggtgcaatgggggccattctcctggctgtttccaccgcgcgggatggacgaccccggggacgcgtgggagcacgggcagcgcggcaggcacgacgcggcggacgccggcgcattctacgcttggtggcgctctctgtttctcatatagatgttctcgtggagtccttatcgcatccaaagatgtacgcctcctacccagtaactatggcgccgttctctcagttcaatgtcaaagatggaagattggtggaagcctgatgccaaaatcagcgtagatgtaaaaatgaaatacgcccactgtaaagacgagtgaattacacatcgttaaagggcacgtaaaacgactgtttggatgatataccatgttaacagtaatttctggaacgcaccgaagacatttctatgtgatgtatctgatacactgaaactctgatgttggtag

SEQ ID NO: 34294 - protein, 303 aa, Zea mays subsp. mays
KFRRRSSESNSCSGRQAGRHQQPTRRKEPINHRPADVVGDASARAPPDVPHVLVLPVRPRAPHHLLPVHRRLLPALLRPLPPRGGRPADGAPRVPAGALPSAPVPPAAPVRRPSAPLGHLRRGADDGTRPCVPPACAGTGTCHASCSCTGAGWTTARAFPAAGAGAAAAVHAPGHGPRGLLHGAEPEQPHRGAHAERQAGAGAGATVGNRLAPDGAGRRGAPVGRLAVPRVQGGLRARGGRAAAAVQARLPLRLHRAVAPPAQLLPRSADTSYLEPGPTAAARPHLAAEATATTGTGRWRESP

SEQ ID NO: 34295 - protein, 274 aa, Zea mays subsp. mays
INSEGGLPRATAAQAGRQAGTNSQPDARNQLTTVPLMSSATPAPARHRTCRTYWCYQCGRALRIISCPSTDVFCPRCFGRFLHEEVDPPTARHGFPPAHFLPHPFHPQHQYAGRPRRWVIYGEEPTTVPGRAFRQPAPAQGPATPPAPAPALVGRRRVPSPPPAPVPRRPSTPPAMDPGDYFMGPNLNSLIEELTQNDRPGPAPAPPSAIDSLPTVRVAGAHLSDGSQCPVCKEDFELGEAARQLPCKHVYHSDCIVPWLRLHNSCPGLPIPAT

SEQ ID NO: 34296 - protein, 238 aa, Zea mays subsp. mays
MSSATPAPARHRTCRTYWCYQCGRALRIISCPSTDVFCPRCFGRFLHEEVDPPTARHGFPPAHFLPHPFHPQHQYAGRPRRWVIYGEEPTTVPGRAFRQPAPAQGPATPPAPAPALVGRRRVPSPPPAPVPRRPSTPPAMDPGDYFMGPNLNSLIEELTQNDRPGPAPAPPSAIDSLPTVRVAGAHLSDGSQCPVCKEDFELGEAARQLPCKHVYHSDCIVPWLRLHNSCPGLPIPAT

SEQ ID NO: 34297 - DNA, 1270 bp, Zea mays subsp. mays
tagaacatcctaatcgaaaatccacctttcccgcaccttgttgcacataaaaattcccacgccccgcacccaacgacctccgcgtccgcccccaaaacccccgcaaaccctagccgccgccagctaggcaaggaatggccgccctcctgcggctcgccgcagcccgatccgccctccccaggcgcgccctcgccccacaccggaggctcgcggcggcggcggcggccgcgatggaggagtggtggtccgactgggagcaggacggcgaggaggaggcgcgcgcctcggcgccggccgccggccttgaccccgccggcgggggccccgggggcgtgcagtgggtcgtcatgggccgccctggcccgcagaagcacgcccacgccgcgcgcctctccgaggtgctcgccgtgccctacatctccatgggcgcgctcctcaggcaggagctcaacccctcctcgcaactctacaggaagattgcaaactctgtgaatgaagggaggcttgtgccggaggacatcatatttgggttgctgacgaagcggcttgaggacggatacaacaagggtgaaaatgggttcattcttgatgggattccacgcacccgtatgcaagctgagattcttgacgagattgtggatgttgatttggttcttaatttcaagtgtgctgatggctgtttcatgaagaagcaatcgagaggcaacatctgcgcccactgtggacagctctttgacgtcagcaattcagcatctacgaactgtagccccagcctcgggagctatacatggcattctcaggcagaacctgctggtgttttaggcctcgaagcctcaaggatggagaggatgcgcacatatgctgagcagaccaagcagctggaagattactacaagaagcagaggaaaattgtggaactgaagacatctgctcgcccggtggagacatggcaggggctcgtagccgccctgcacctccagcatctggactcgcccccgacaccgcacaaactcaccgcgtaaatatcattattaattttgctacctccgagtagagagtctaaaggatcagaattccgatcctgcctgcagcatatctaatatccctatgtttgtgggttctggctcgagagagtcagtcggctgtcttttgttttgttttgttattgttatagataaaggtaagcgattttgcagacacgcttattgtatggttgtaaccgagagttgtggacttgccttggcttgcgagtgtactcgcttatatgctc

SEQ ID NO: 34298 - protein, 295 aa, Zea mays subsp. mays
MAALLRLAAARSALPRRALAPHRRLAAAAAAAMEEWWSDWEQDGEEEARASAPAAGLDPAGGGPGGVQWVVMGRPGPQKHAHAARLSEVLAVPYISMGALLRQELNPSSQLYRKIANSVNEGRLVPEDIIFGLLTKRLEDGYNKGENGFILDGIPRTRMQAEILDEIVDVDLVLNFKCADGCFMKKQSRGNICAHCGQLFDVSNSASTNCSPSLGSYTWHSQAEPAGVLGLEASRMERMRTYAEQTKQLEDYYKKQRKIVELKTSARPVETWQGLVAALHLQHLDSPPTPHKLTA

SEQ ID NO: 34299 - protein, 263 aa, Zea mays subsp. mays
MEEWWSDWEQDGEEEARASAPAAGLDPAGGGPGGVQWVVMGRPGPQKHAHAARLSEVLAVPYISMGALLRQELNPSSQLYRKIANSVNEGRLVPEDIIFGLLTKRLEDGYNKGENGFILDGIPRTRMQAEILDEIVDVDLVLNFKCADGCFMKKQSRGNICAHCGQLFDVSNSASTNCSPSLGSYTWHSQAEPAGVLGLEASRMERMRTYAEQTKQLEDYYKKQRKIVELKTSARPVETWQGLVAALHLQHLDSPPTPHKLTA

SEQ ID NO: 34300 - protein, 224 aa, Zea mays subsp. mays
MGRPGPQKHAHAARLSEVLAVPYISMGALLRQELNPSSQLYRKIANSVNEGRLVPEDIIFGLLTKRLEDGYNKGENGFILDGIPRTRMQAEILDEIVDVDLVLNFKCADGCFMKKQSRGNICAHCGQLFDVSNSASTNCSPSLGSYTWHSQAEPAGVLGLEASRMERMRTYAEQTKQLEDYYKKQRKIVELKTSARPVETWQGLVAALHLQHLDSPPTPHKLTA

SEQ ID NO: 34301 - DNA, 1346 bp, Zea mays subsp. mays
ctgttcctgtgccgtgccggcttggattggaaaataggagggagaagatcaacgccgccgcggtgcggcctgtggagtattaaacaaagatgcgcagagcccggctgcgccggcagctagcagccaacgcgaaacttcagcttccgctccgccgtccccctcccggacccaaacaaacaaaccatcgtcacccaatagccaccggccaactgtcaagcactccttcggtgcttccccatctgcgccccccgatccctccggacccgcgagcgaggccgtcgccggcgcgcgcgagatttgagctgaggccatggagtcaccgttccgggccgacgtggtcaaggacaaggcggcgctggtcaccggcgggggatccggcatctgctttgagatcgccgcccagctcgcgcgccacggcgcgcaggtcgccatcatgggccgccgccgggaggtcctcgacaaggccgtcgccgcgctccggtcccagggcctccgggctgttggtttcgatggagatgtccgcaaccaggaggacgcggccagagtgcttgctgcaacagttgcacattttggcaagctcgacattcttgtgaacggtgcagctggcaacttccttgcttccccggaggatttgacgcccaagggattcagaactgttcttgagatcgacactttgggtacatacacaatgtgctatgaagccctcaagtatctgaaaaagggtgggccaggaaaaggcccgtccactggtggactaatcattaacataagtgcaacactgcattacagtgcttcttggtaccaaatccatgtctctgctgctaaggctggggttgatagcatcacaagatcactggctctggagtggggaacagattatgacattagagtcaacgggattgcacctggaccaattcaagacaccccggggctgaggaagcttgcacctgaagaaatgagcaaggggcttcgagaaatgatgccattgttcaaatttggggagaagcgggacatagcaatggctgcgctctaccttgcttctgatgcaggcaaatatgtaaatgggacaacactggtggtcgatggaggtctttggttaagtcaccctcgccatattcccaaggaggaagttagggagctgtcgaaggtggttgagaagaaggttagggcctctggtgttggtgtaacatctagcaaattgtgatttgcatttgtgtgatctgtagcatcgatcaatatgttattacagaactttattgtctgtgtggctcttgcaatctaattagcgagtttgtttagttgagtaacttggcatatttacagtacatttctttcttctaagttcc

SEQ ID NO: 34302 - protein, 297 aa, Zea mays subsp. mays
MESPFRADVVKDKAALVTGGGSGICFEIAAQLARHGAQVAIMGRRREVLDKAVAALRSQGLRAVGFDGDVRNQEDAARVLAATVAHFGKLDILVNGAAGNFLASPEDLTPKGFRTVLEIDTLGTYTMCYEALKYLKKGGPGKGPSTGGLIINISATLHYSASWYQIHVSAAKAGVDSITRSLALEWGTDYDIRVNGIAPGPIQDTPGLRKLAPEEMSKGLREMMPLFKFGEKRDIAMAALYLASDAGKYVNGTTLVVDGGLWLSHPRHIPKEEVRELSKVVEKKVRASGVGVTSSKL

SEQ ID NO: 34303 - protein, 256 aa, Zea mays subsp. mays
MGRRREVLDKAVAALRSQGLRAVGFDGDVRNQEDAARVLAATVAHFGKLDILVNGAAGNFLASPEDLTPKGFRTVLEIDTLGTYTMCYEALKYLKKGGPGKGPSTGGLIINISATLHYSASWYQIHVSAAKAGVDSITRSLALEWGTDYDIRVNGIAPGPIQDTPGLRKLAPEEMSKGLREMMPLFKFGEKRDIAMAALYLASDAGKYVNGTTLVVDGGLWLSHPRHIPKEEVRELSKVVEKKVRASGVGVTSSKL

SEQ ID NO: 34304 - protein, 171 aa, Zea mays subsp. mays
MCYEALKYLKKGGPGKGPSTGGLIINISATLHYSASWYQIHVSAAKAGVDSITRSLALEWGTDYDIRVNGIAPGPIQDTPGLRKLAPEEMSKGLREMMPLFKFGEKRDIAMAALYLASDAGKYVNGTTLVVDGGLWLSHPRHIPKEEVRELSKVVEKKVRASGVGVTSSKL

SEQ ID NO: 34305 - DNA, 1997 bp, Zea mays subsp. mays
acacgcacttctcgttctcgccgatccagtgccactacactacaatactgctgcgcgctagcggtagcgctcgcactcgcaccacgccaccgctgctgcctgctcctcacagtcctccccgcgctcgcattgcgattcgcgacctagcgcgagggtaccgggggggtggtgcgcgcgcgtgctcggtgatccgggaagcgccgcgagatggccgggggtggaggcggcggtgccgcgccgaagcacgacgacttcacgccgcaccccgtcaaggaccagctccctggggtctcctactgcatcaccagccctcccccgtggcctgaagccgttcttcttgggttccaacattatctggtcatgcttggtaccactgtgatcataccaactgcacttgttccacaaatgggaggaaacaatgaggacaaagcagtggttatccagacattgctgttcgttgcaggtatcaacaccctcctgcagagtttctttggtaccatgttgcctgcagtgatcggcgggtcatacacctttgttctgcctaccatttcgatcatccttgctggacgttatgctaatgaacctaatccacatattaaatttctccgcatcatgcgtgggacacaaggtgcgttgattgtggcttcagccttacagattatagttggcttcagtggcctttggcgtaatgttgccaggtatctgagtccactttcagctgctcctttggtggcactagttggatttggactgtatgagctaggatttccatcggttgccaaatgtgttgagattggtctacctcaactcatccttcttgtgatctttacaatgtacctgccacatgctgttcacatgctgaagtctatcttcaatcgttttgctgtcctgttcactatacccatagtgtggctctatgcatatcttctcactgttggaggagcatacaggaatgcaccaccaaagactcaatttcattgccgcactgaccgttctggattaattggtggcgcaccctggataagaataccatatccctttcagtggggtgctccaacttttgatgcgggtgaagctttcgcgatgatggcagcatcatttgttgctctcgtggagtccactggggccttcattgctgtctctaggtatgctagtgctacaccaatcccaccctctgttcttagccgtggtattggctggcagggcatcggtattcttctggatgggctatttgggactggaaatggatcttctgtatcagttgaaaatgctggtttgctagctttgacacgcgttggtagccgaagggtagtgcagatatcagctggtttcatgatattcttttctattctcgggaaattcggagctgtgttcgcctcaattcctgcacccatctttgcagctatgtattgtatcttctttgcttatgccggttctgctgggatcggcttccttcagttctgtaacctcaacacctttaggaccaagttcatccttgggttctcagttttcatgggcctttctgttcctcaatacttcaatgagtacacatctattgctggttatggtcctgttcacacacattcaagatggttcaacgatatagtgaatgtgatattctcgtccaaggcgtttgttgctggcttcgtggcatatttgctggacaacactattgacaggcatgaagcttcagtcaggagagaccgaggctaccattggtgggacaaattccggtcgtacaggaccgatacaagaagcgaggagttctattccctgccattcaatctgaataagttcttcccatcggtctgagcttttgctgtggttaatgtgagatgctcttgttactctggattctggaactgcccaccccctgttctccggcggtggcaatgtgatctggattttctcggtacatgaaaaaattactgtatattaaaacccgctcagctcgggtttcacctccttcccgtgcttcacgggaatttggcgacatt

SEQ ID NO: 34306 - protein, 534 aa, Zea mays subsp. mays
MAGGGGGGAAPKHDDFTPHPVKDQLPGVSYCITSPPPWPEAVLLGFQHYLVMLGTTVIIPTALVPQMGGNNEDKAVVIQTLLFVAGINTLLQSFFGTMLPAVIGGSYTFVLPTISIILAGRYANEPNPHIKFLRIMRGTQGALIVASALQIIVGFSGLWRNVARYLSPLSAAPLVALVGFGLYELGFPSVAKCVEIGLPQLILLVIFTMYLPHAVHMLKSIFNRFAVLFTIPIVWLYAYLLTVGGAYRNAPPKTQFHCRTDRSGLIGGAPWIRIPYPFQWGAPTFDAGEAFAMMAASFVALVESTGAFIAVSRYASATPIPPSVLSRGIGWQGIGILLDGLFGTGNGSSVSVENAGLLALTRVGSRRVVQISAGFMIFFSILGKFGAVFASIPAPIFAAMYCIFFAYAGSAGIGFLQFCNLNTFRTKFILGFSVFMGLSVPQYFNEYTSIAGYGPVHTHSRWFNDIVNVIFSSKAFVAGFVAYLLDNTIDRHEASVRRDRGYHWWDKFRSYRTDTRSEEFYSLPFNLNKFFPSV

SEQ ID NO: 34307 - protein, 483 aa, Zea mays subsp. mays
MLGTTVIIPTALVPQMGGNNEDKAVVIQTLLFVAGINTLLQSFFGTMLPAVIGGSYTFVLPTISIILAGRYANEPNPHIKFLRIMRGTQGALIVASALQIIVGFSGLWRNVARYLSPLSAAPLVALVGFGLYELGFPSVAKCVEIGLPQLILLVIFTMYLPHAVHMLKSIFNRFAVLFTIPIVWLYAYLLTVGGAYRNAPPKTQFHCRTDRSGLIGGAPWIRIPYPFQWGAPTFDAGEAFAMMAASFVALVESTGAFIAVSRYASATPIPPSVLSRGIGWQGIGILLDGLFGTGNGSSVSVENAGLLALTRVGSRRVVQISAGFMIFFSILGKFGAVFASIPAPIFAAMYCIFFAYAGSAGIGFLQFCNLNTFRTKFILGFSVFMGLSVPQYFNEYTSIAGYGPVHTHSRWFNDIVNVIFSSKAFVAGFVAYLLDNTIDRHEASVRRDRGYHWWDKFRSYRTDTRSEEFYSLPFNLNKFFPSV

SEQ ID NO: 34308 - protein, 468 aa, Zea mays subsp. mays
MGGNNEDKAVVIQTLLFVAGINTLLQSFFGTMLPAVIGGSYTFVLPTISIILAGRYANEPNPHIKFLRIMRGTQGALIVASALQIIVGFSGLWRNVARYLSPLSAAPLVALVGFGLYELGFPSVAKCVEIGLPQLILLVIFTMYLPHAVHMLKSIFNRFAVLFTIPIVWLYAYLLTVGGAYRNAPPKTQFHCRTDRSGLIGGAPWIRIPYPFQWGAPTFDAGEAFAMMAASFVALVESTGAFIAVSRYASATPIPPSVLSRGIGWQGIGILLDGLFGTGNGSSVSVENAGLLALTRVGSRRVVQISAGFMIFFSILGKFGAVFASIPAPIFAAMYCIFFAYAGSAGIGFLQFCNLNTFRTKFILGFSVFMGLSVPQYFNEYTSIAGYGPVHTHSRWFNDIVNVIFSSKAFVAGFVAYLLDNTIDRHEASVRRDRGYHWWDKFRSYRTDTRSEEFYSLPFNLNKFFPSV

SEQ ID NO: 34309 - DNA, 1029 bp, Zea mays subsp. mays
atgaattgctgctgggtgctggccgttgcgggcgaacccgaaaatcacgagcgcgagagatcggagcacggcatgtcggaggagcagttcctcgccgtggcggtggaagccgccaagagcgccggcgagattattcgcaagggattctaccagaccaagaacgtcgagcacaagggccaggtggatttggtgacggagacggacaaggcctgcgaggacctcatcttcaaccacctccggaagcacttcccggaccacaagttcatcggggaggaggagtccgcggcgctcggggccaccgctgacctcaccgacgaccccacctggatcgtcgatcccctcgacgggaccactaatttcgtccatggtttcccatttgtatgtgtctccgttggcctcaccattgggaaaattcccactgtcggagtcgtcttcaaccccatcatgaacgagcttttcacggcggttcgtggaaaaggggctttcctgaatggctctccaattaaagcatcatctcaagatgagttagtgaaggctcttctggtaacagaggctggaaccaatagagacaagaccactgtggatgatacaaccaacagaatcaacaggctactatacaagattcgatccatacggatgtgtggatcattggctttaaacatgtgtggagttgcctgtggtagactagatttgtgttatgagataggatttggtggtccatgggatgttgctgctggtgctgtaattcttcaggaagccggtggccttgtttttgacccaagcggcggagagtttgatttgatgtcgcgaagaatggcaggatcaaacagcttgctgaaggataagttcgtcaaggaactgggggatactaattgaaacaaatgttagtattattcgtggaacagattaagacaataaggttgccccgccgcatggtgattaacttattgtttgggcaacaaaattccatgtaattctgcacctgtacaactatgttggacgcagaacattttattgagttttgtgatt

SEQ ID NO: 34310 - protein, 291 aa, Zea mays subsp. mays
MNCCWVLAVAGEPENHERERSEHGMSEEQFLAVAVEAAKSAGEIIRKGFYQTKNVEHKGQVDLVTETDKACEDLIFNHLRKHFPDHKFIGEEESAALGATADLTDDPTWIVDPLDGTTNFVHGFPFVCVSVGLTIGKIPTVGVVFNPIMNELFTAVRGKGAFLNGSPIKASSQDELVKALLVTEAGTNRDKTTVDDTTNRINRLLYKIRSIRMCGSLALNMCGVACGRLDLCYEIGFGGPWDVAAGAVILQEAGGLVFDPSGGEFDLMSRRMAGSNSLLKDKFVKELGDTN

SEQ ID NO: 34311 - protein, 267 aa, Zea mays subsp. mays
MSEEQFLAVAVEAAKSAGEIIRKGFYQTKNVEHKGQVDLVTETDKACEDLIFNHLRKHFPDHKFIGEEESAALGATADLTDDPTWIVDPLDGTTNFVHGFPFVCVSVGLTIGKIPTVGVVFNPIMNELFTAVRGKGAFLNGSPIKASSQDELVKALLVTEAGTNRDKTTVDDTTNRINRLLYKIRSIRMCGSLALNMCGVACGRLDLCYEIGFGGPWDVAAGAVILQEAGGLVFDPSGGEFDLMSRRMAGSNSLLKDKFVKELGDTN

SEQ ID NO: 34312 - DNA, 1881 bp, Zea mays subsp. mays
gtgccgtcgtgctcgttctcgtccataccctgcttggctcctcagtcctccccaccttccccctggccttaaccagcaattcccatatcgccactcccccaaaacgggagctcagcggcggcggccgcaacccctcccctgaaccctaccccgttctacccggccaccaccccacaacatggccctctcccgccgcctcctcccgctcttcctccgccgcggcgcctccatccccacccgcgctctctccacggctgtcgcacctgcggcggtggcctcggaggaggacgaggcggccgtcaccgtcaagggcgtgcgcatctcgggccgcccgctctacatggacatgcaggcgacgacccccgtcgacccgcgtgtcctcgacgccatgctccccttctacctctctcgctacgggaaccctcactcccgtacccacctctacggctgggagtccgacgccgccgtagaggacgctcgcgcccgcgtcgcctcactcgtcggcgccgacccgcgcgagatcttcttcacctcgggcgccaccgagtgcaacaacatcgccgtcaagggcgtcatgcgcttctaccgcgagcgccgccgccacgtcatcaccacgcagaccgagcacaagtgcgtgctggactcctgcaggtatctgcaacaggagggattcgaggtcacctatctccccgtgcgcaaggacgggctcgtcgacctcgcgcagctcgaggacgccatccgcccggacaccgggctggtgtctgtcatggctgtcaacaacgagatcggcgtcgtccagccgctcgaggagattgggcgcatctgcaaggagaaaggcgtgccgttccacactgatgctgcgcaggcgctggggaagatcccgattgatgtgaacaggatggggattgggctcatgtccttgtccggccacaagatttatggccccaagggcgtgggggccctctaccttcgtcgccgccctcgcatcagggtggaaccacagatgaatggtggtgggcaggagcgtggcatccgcagtgggactgttcctacacctcttgttgttggatttggggctgcctgtgagattgccgctcaagagatggattatgaccacaggcgtgtcagtgctctgcagcagaggctgcttgatggcatacgtgcgcaggtcgatgatgttgtcatcaatggaagtatggagcaccgttacccaggcaatctaaatttgtcatttgcttatgtggaaggggagagcttactgatgggtctgaaggaggtggctgtgtcaagtggtagtgcctgcactagtgccagcttggagccctcatatgtgctgcgggcacttggggtggaggaggatatggcacacacttctattcgtttcggcatgggtcgctttaccactgacgaagaggtggacagagcaattgagcttactgtgcatcaggtgaagaagctccgtgacatgagcccactctatgagatggccaaggctggcattgacctcaagagcatcgagtggtcacaacattgaggcagttttcatgacaaacggtcactcgaaagcgtacacggatcgcatacataggcttatggtgctgctggtgagtacgttcatgtggtgctcctacctctgataggattatcacacttttttagctctcacatggggcccgagtgtattcacgagtgctttcttagttgagtatcttgacttcaaaataaggatacttcaaatacttggtaatgtatcgtctgaaatacagtttgaagtagtattgaagcggtgacaatgatgataacctattttagtgctgacaaaaaatgttgttataatctctagttgttacaattcctgcatatgtatttattgtatgcttg

SEQ ID NO: 34313 - protein, 451 aa, Zea mays subsp. mays
MALSRRLLPLFLRRGASIPTRALSTAVAPAAVASEEDEAAVTVKGVRISGRPLYMDMQATTPVDPRVLDAMLPFYLSRYGNPHSRTHLYGWESDAAVEDARARVASLVGADPREIFFTSGATECNNIAVKGVMRFYRERRRHVITTQTEHKCVLDSCRYLQQEGFEVTYLPVRKDGLVDLAQLEDAIRPDTGLVSVMAVNNEIGVVQPLEEIGRICKEKGVPFHTDAAQALGKIPIDVNRMGIGLMSLSGHKIYGPKGVGALYLRRRPRIRVEPQMNGGGQERGIRSGTVPTPLVVGFGAACEIAAQEMDYDHRRVSALQQRLLDGIRAQVDDVVINGSMEHRYPGNLNLSFAYVEGESLLMGLKEVAVSSGSACTSASLEPSYVLRALGVEEDMAHTSIRFGMGRFTTDEEVDRAIELTVHQVKKLRDMSPLYEMAKAGIDLKSIEWSQH

SEQ ID NO: 34314 - protein, 397 aa, Zea mays subsp. mays
MDMQATTPVDPRVLDAMLPFYLSRYGNPHSRTHLYGWESDAAVEDARARVASLVGADPREIFFTSGATECNNIAVKGVMRFYRERRRHVITTQTEHKCVLDSCRYLQQEGFEVTYLPVRKDGLVDLAQLEDAIRPDTGLVSVMAVNNEIGVVQPLEEIGRICKEKGVPFHTDAAQALGKIPIDVNRMGIGLMSLSGHKIYGPKGVGALYLRRRPRIRVEPQMNGGGQERGIRSGTVPTPLVVGFGAACEIAAQEMDYDHRRVSALQQRLLDGIRAQVDDVVINGSMEHRYPGNLNLSFAYVEGESLLMGLKEVAVSSGSACTSASLEPSYVLRALGVEEDMAHTSIRFGMGRFTTDEEVDRAIELTVHQVKKLRDMSPLYEMAKAGIDLKSIEWSQH

SEQ ID NO: 34315 - protein, 395 aa, Zea mays subsp. mays
MQATTPVDPRVLDAMLPFYLSRYGNPHSRTHLYGWESDAAVEDARARVASLVGADPREIFFTSGATECNNIAVKGVMRFYRERRRHVITTQTEHKCVLDSCRYLQQEGFEVTYLPVRKDGLVDLAQLEDAIRPDTGLVSVMAVNNEIGVVQPLEEIGRICKEKGVPFHTDAAQALGKIPIDVNRMGIGLMSLSGHKIYGPKGVGALYLRRRPRIRVEPQMNGGGQERGIRSGTVPTPLVVGFGAACEIAAQEMDYDHRRVSALQQRLLDGIRAQVDDVVINGSMEHRYPGNLNLSFAYVEGESLLMGLKEVAVSSGSACTSASLEPSYVLRALGVEEDMAHTSIRFGMGRFTTDEEVDRAIELTVHQVKKLRDMSPLYEMAKAGIDLKSIEWSQH

SEQ ID NO: 34316 - DNA, 1097 bp, Zea mays subsp. mays
gacctcacttgatccgctcccttcgccgcgacgacgttcctacgcagctgcggtcgacgcgcgcacggcagctcgctcgctagctgatcacgacagctcgctcggctcgaccgaatggcgccgcggctgctggcgtgcttcgggcgcggcgtcgcggcggcgccggacgacgcgactggcgagggccagctggaggcgccccccgctggcccggtgctggtggagctgttcgggtcgcaggggtgcggggcgtcgcccgaggcggacgccgtggcggcgcggctggcgcaggactccgggtccggggacggcgccgtcgtggtgctggcgttccacgtcgactactgggactaccgcgggtggaaggaccccttcgcgtccagcgcctggaccgtgcgccagaaggcctacgtggaggcgctccgcctcgacacgctcttcacgccgcaggtcgtcctgcagggccgcgcgcactgcgtcggcaccgaccaggacgcgctcgcgctggccgtccgcgacgccccgcgctaccccgcgcccgccatcaaggtcacgttccagcggccgagccccgcaacactgcaggcgtcgttcacgggcaccctgcgcagccgcgtggagggcccaggcggcgcgagcgtgctggtggcgctgtacgagagcgggctggtgaccgactgcgggcgcggcgagaacaagggcaagtcgctgctcaacgaccacgtggtgcgccgtctcgagaaggtggccgccgtgcgggagggcgcctcgccgaagaagaccgtgtcgggcaccgtccagttcccgctctgggacggctttcgcgccaccaagtgcggcctcgtgctcttcgtccagaacgccgcgctgcaggtgctcgacgtccagcacttcgacctgcctgacaacgtctgagctcgtgacgcggtggggcgcgcgcgcgttccgcgttggctgcctccctgcggcgggcgtcacattctttgtatcactgtatgtagtacatcactggatggtatttagatggaaaacctgagtattctttatctccacgtatgttcttgttctgcattatggcaatggatcttctgttttgc

SEQ ID NO: 34317 - protein, 266 aa, Zea mays subsp. mays
MAPRLLACFGRGVAAAPDDATGEGQLEAPPAGPVLVELFGSQGCGASPEADAVAARLAQDSGSGDGAVVVLAFHVDYWDYRGWKDPFASSAWTVRQKAYVEALRLDTLFTPQVVLQGRAHCVGTDQDALALAVRDAPRYPAPAIKVTFQRPSPATLQASFTGTLRSRVEGPGGASVLVALYESGLVTDCGRGENKGKSLLNDHVVRRLEKVAAVREGASPKKTVSGTVQFPLWDGFRATKCGLVLFVQNAALQVLDVQHFDLPDNV

SEQ ID NO: 34318 - protein, 223 aa, Zea mays subsp. mays
TSLDPLPSPRRRSYAAAVDARTAARSLADHDSSLGSTEWRRGCWRASGAASRRRRTTRLARASWRRPPLARCWWSCSGRRGAGRRPRRTPWRRGWRRTPGPGTAPSWCWRSTSTTGTTAGGRTPSRPAPGPCARRPTWRRSASTRSSRRRSSCRAARTASAPTRTRSRWPSATPRATPRPPSRSRSSGRAPQHCRRRSRAPCAAAWRAQAARACWWRCTRAGW

SEQ ID NO: 34319 - DNA, 1135 bp, Zea mays subsp. mays
gtacgacaggctgtaccgaggttcagttcggtagtgtagttgtaggttgcgatcgcgaggcggctgctggcggcggtcgccatagtagtcgtggccgccgcgctcgcgtgcggcgcgggcgcgcagctctcggcggggttctactcgtcgagctgccccgccgtgcacagcatcgtgcgccaggccatgtcgcaggccgtcacgaacaacacgcgcagcgccgccgccgtgctccgcgtcttcttccacgactgcttcgtcaatggctgcgacgcctcgctgctgctggacgacacgcccacgacgcccggcgagaagggcgccggccccaacgccggcggctccaccgtcggcttcgacctcatcgacaccatcaaggcgcaggtcgaggccgcctgccccgccaccgtctcctgcgccgacatcctggcgctcaccgcgcgcgacggcgtcaacctgctcggcggcccgagctgggccgtgccgctgggccggcgcgacgcgacgttccccaacagcacgggcgcggcgacggacctcccgggcccggactccgacctggccggcctggtggccgggttcgccgccaagggcctgagcccgcgcgacctcgcggcgctgtcgggcgcgcacacggtggggatggcgcgctgcgccagcttccgcacccgcgtctactgcgacgacaacgtgagcccggcgttcgccgcgcagcagcgccaggcctgcccgtcggccgacgccgacgacgcgctcgcgccgctcgactcgctcacccccgaccagttcgacaacggctactaccggagcctcatggccggcgccggcctgctgcactcggaccaggagctcttcagcaacggcgcactcgactcgctcgtgcgcctctacggcaccaacgccgacgccttctcgtcggacttcgccgcgtccatggtcaagctcggcaacatcggcccgctcacgggttccgcgggggaggtcaggctcaactgcaggacggtgaattcgaattcgtgacttcaggacggtgaatgccaccatttttaattctttttccctacaaggagttgtagaatttgcattccttcaacgatttcgaatttcgaatttgctgtgagtcagctgaagtggc

SEQ ID NO: 34320 - protein, 343 aa, Zea mays subsp. mays
TTGCTEVQFGSVVVGCDREAAAGGGRHSSRGRRARVRRGRAALGGVLLVELPRRAQHRAPGHVAGRHEQHAQRRRRAPRLLPRLLRQWLRRLAAAGRHAHDARREGRRPQRRRLHRRLRPHRHHQGAGRGRLPRHRLLRRHPGAHRARRRQPARRPELGRAAGPARRDVPQQHGRGDGPPGPGLRPGRPGGRVRRQGPEPARPRGAVGRAHGGDGALRQLPHPRLLRRQREPGVRRAAAPGLPVGRRRRRARAARLAHPRPVRQRLLPEPHGRRRPAALGPGALQQRRTRLARAPLRHQRRRLLVGLRRVHGQARQHRPAHGFRGGGQAQLQDGEFEFVTSGR

SEQ ID NO: 34321 - protein, 277 aa, Zea mays subsp. mays
MSQAVTNNTRSAAAVLRVFFHDCFVNGCDASLLLDDTPTTPGEKGAGPNAGGSTVGFDLIDTIKAQVEAACPATVSCADILALTARDGVNLLGGPSWAVPLGRRDATFPNSTGAATDLPGPDSDLAGLVAGFAAKGLSPRDLAALSGAHTVGMARCASFRTRVYCDDNVSPAFAAQQRQACPSADADDALAPLDSLTPDQFDNGYYRSLMAGAGLLHSDQELFSNGALDSLVRLYGTNADAFSSDFAASMVKLGNIGPLTGSAGEVRLNCRTVNSNS

SEQ ID NO: 34322 - DNA, 807 bp, Zea mays subsp. mays
acacaggcaacaagcgcccagcgccccttcacatcaccacatccacgttcctccgtttcacggccatgtcgagcagcgccagcaagaagcaggcccaggcccagaaggccgggcggaggcccccggcggtgtcgtcggccgcggccgcggccgcggacgcggagatgcagagggtgttctcgcgcatcgacgcggacggcgacgggcggatctcgccgtcggagctggcggcggtgtcgcgcgccatctccccgccggcgagctcctcgcacgggcggcgcgaggtggcggccatgatggaggagctggacacggaccgcgacggcttcgtggacctgggcgagttcagggcgttccacgcgcgcggcggcggcgtcgtcgccgccgctgtcatcgccgccgccgccccggtttccttcgtaagcccgtcgtcctccgtccgcgactctgcgcgagaagcgagagtatggacacccaagtgaagcttgctgttgtggtgaaggtgatgggaaggaccggctccaggggtcaggttacccaggtcagagtgaagttcttggatgaccagaaccgtctcatcatgaggaacgtcaagggaccggttcgcgagggagacatcctcacactgctcgagtctgagagggaggctaggaggctgcgttgaggcggaatagtgtcttggtagttttcgtatggagttggatgtcatctaattgtgctatgtttgtcaaactttggtatgaccttcaaaacacctgccttgtatgattatttgtgagcctggtgataagattgcagtttggtttt

SEQ ID NO: 34323 - protein, 220 aa, Zea mays subsp. mays
HRQQAPSAPSHHHIHVPPFHGHVEQRQQEAGPGPEGRAEAPGGVVGRGRGRGRGDAEGVLAHRRGRRRADLAVGAGGGVARHLPAGELLARAARGGGHDGGAGHGPRRLRGPGRVQGVPRARRRRRRRRCHRRRRPGFLRKPVVLRPRLCARSESMDTQVKLAVVVKVMGRTGSRGQVTQVRVKFLDDQNRLIMRNVKGPVREGDILTLLESEREARRLR

SEQ ID NO: 34324 - protein, 159 aa, Zea mays subsp. mays
TGNKRPAPLHITTSTFLRFTAMSSSASKKQAQAQKAGRRPPAVSSAAAAAADAEMQRVFSRIDADGDGRISPSELAAVSRAISPPASSSHGRREVAAMMEELDTDRDGFVDLGEFRAFHARGGGVVAAAVIAAAAPVSFVSPSSSVRDSAREARVWTPK

SEQ ID NO: 34325 - protein, 138 aa, Zea mays subsp. mays
MSSSASKKQAQAQKAGRRPPAVSSAAAAAADAEMQRVFSRIDADGDGRISPSELAAVSRAISPPASSSHGRREVAAMMEELDTDRDGFVDLGEFRAFHARGGGVVAAAVIAAAAPVSFVSPSSSVRDSAREARVWTPK

SEQ ID NO: 34326 - DNA, 563 bp, Zea mays subsp. mays
  misc_feature (459)..(459): n is a, c, g, or t
aacatcctaatcgaaaaagttcccaccacttcaccataaccagatcaacccggcgcaaggagcacgaacaggaaccgtccagcggagcaaaggcacccgcagccgcaggccatggacgatgacatcgacagctcctgctccaccccgttcgccagcgcgccgtccagcccgggacgtccccaggccctcggcggcggtggcggctacttcttcagcgcgccggccagccccatccaccacctcctcctctcgacctcgtgctccgcctccgcgacccccagctccggtgttcgtgggtgcgggggcgacgcggagttcgagttcggtgggcctggcgggcccatgatctccgccgacgagctcttccacaacggccagatccggccgctcaccctgcccccactcccggatctcgaccccggaagcgacgacaacgagggccgcgcgccgacgcgcggncgcgacctcacgccccggagcgcgtccgtgcaccggcgcgcgcggtccatgtccccactccgcagcgcgtcaccgcggctcaagctgatcaatgcgctcgtcgt

SEQ ID NO: 34327 - protein, 150 aa, Zea mays subsp. mays
  misc_feature (116)..(116): Xaa can be any naturally occurring amino acid
MDDDIDSSCSTPFASAPSSPGRPQALGGGGGYFFSAPASPIHHLLLSTSCSASATPSSGVRGCGGDAEFEFGGPGGPMISADELFHNGQIRPLTLPPLPDLDPGSDDNEGRAPTRXRDLTPRSASVHRRARSMSPLRSASPRLKLINALV

SEQ ID NO: 34328 - protein, 75 aa, Zea mays subsp. mays
MTSTAPAPPRSPARRPARDVPRPSAAVAATSSARRPAPSTTSSSRPRAPPPRPPAPVFVGAGATRSSSSVGLAGP

SEQ ID NO: 34329 - DNA, 1050 bp, Zea mays subsp. mays
ctcgcgccgcttgctttgtccgttgtcgcagagcgaggaagcacgcagagagtgagtaaaaaagaaagagagggatgccaatggagaggtcggtgtcgtgcgcggagaggggcagcacgttcggcggcggggcggcggtggacgtccggagctacagcgcctcctacgcgaggccccagccgcggccgccgacgtccagggtgcagcgcgccaggagcgtgagcgcgtggacgcgcccggcgccgccgcccgtgcagcggaccgggagcaccaagagcggcgccgccgcggcccgccccaccccggggctcaacctgcgctcgtacagcgcctcctacgcggcctcctacgggcccagccttgtcggcggcggcggcggcggcggtggcggcggggagctgaagcgctccggcagcgtcaccaactggacctccgccaaccgccgctccgtcaacctcagggggtacacgccgtccttcgccgcgctggacgacaccgccgcggcggtcccggcgcccaggaaggtgcaggcggtgatggacgacgccgagctgcagcggaggaagcgcctggtcgtgtacaagacctacgacgtcgaggggaaggtccgggagtcggtgcgccgcggcgtgaactggatcaagggcaagtgctccagcgtggtgtacggctggtggtgatcgctagctccatcgtccgcctagcccaccccgccaccggccgatctctccgccgttccggtccatcagagtggtactactacctatgagttgagcttttcttggtgcacgcccaccgtacctcctcttgtttcttctcccttgatcagagttaggattttttttttttttgttttatctttaggggatggatttggtggtatgtagaatgagtagtcgagcttctcttggggatttgtgagggtggggaggttgggtggtggtgacatggatgttgggatgtgtcctcctttgtacagatgagatatatcatctttccagcctacttgctagtatctggtctatgtaaatatatgtgctgcatatatag

SEQ ID NO: 34330 - protein, 201 aa, Zea mays subsp. mays
MPMERSVSCAERGSTFGGGAAVDVRSYSASYARPQPRPPTSRVQRARSVSAWTRPAPPPVQRTGSTKSGAAAARPTPGLNLRSYSASYAASYGPSLVGGGGGGGGGGELKRSGSVTNWTSANRRSVNLRGYTPSFAALDDTAAAVPAPRKVQAVMDDAELQRRKRLVVYKTYDVEGKVRESVRRGVNWIKGKCSSVVYGWW

SEQ ID NO: 34331 - protein, 199 aa, Zea mays subsp. mays
MERSVSCAERGSTFGGGAAVDVRSYSASYARPQPRPPTSRVQRARSVSAWTRPAPPPVQRTGSTKSGAAAARPTPGLNLRSYSASYAASYGPSLVGGGGGGGGGGELKRSGSVTNWTSANRRSVNLRGYTPSFAALDDTAAAVPAPRKVQAVMDDAELQRRKRLVVYKTYDVEGKVRESVRRGVNWIKGKCSSVVYGWW

SEQ ID NO: 34332 - DNA, 528 bp, Zea mays subsp. mays
  misc_feature (102)..(102): n is a, c, g, or t
ttcacttccatgcttggtccaagggcctgaaaactggaatgtactatctacgcacacgagctgctgctgatgcgatcaagttcacagtggataccacgcttntgaaggagaatgggaacggggttagcgatggaaagcccgcggaggaagacgtagacgctaaaatggcacagatggtctgttctttgaacaaccgggaagagtgcctggcgtgtggaagctagattggagattccatctggacactgcacttcgtgatttgtgaacacagcattacatacagccggctgatgattggagctcagtaaccagaacgaagtctgtgatgtaggtcgagttggaagttcccataatgggaatagcttgtacctaaataatgctacggcgctacctctggtctgtattgctctaaggtgtttgtgctgctgccattgtactgtaaatatctaccagcgtcaacgttgtcgatgtgctctaagatacagtatgttttaaccgtgctacactctttgcattggatcgaacatg

SEQ ID NO: 34333 - protein, 73 aa, Zea mays subsp. mays
  misc_feature (34)..(34): Xaa can be any naturally occurring amino acid
HFHAWSKGLKTGMYYLRTRAAADAIKFTVDTTLXKENGNGVSDGKPAEEDVDAKMAQMVCSLNNREECLACGS

SEQ ID NO: 34334 - protein, 61 aa, Zea mays subsp. mays
  misc_feature (22)..(22): Xaa can be any naturally occurring amino acid
MYYLRTRAAADAIKFTVDTTLXKENGNGVSDGKPAEEDVDAKMAQMVCSLNNREECLACGS

SEQ ID NO: 34335 - DNA, 993 bp, Zea mays subsp. mays
aatcactccccacgcgattcgatcctctcgccggcccaggcatcgtagaatccccccaccgaaaaaatcaacgggcatacaaagagcgcgtgcgcactgcgcagtgcttggaataggtgggtcgaacttcgaaggggttcgaggacttcagctatggcatctgtgggacgtgcaggacgaggagggaaaggagatggagggaagggagaagggtcgctggctcgcagggcgtggaggcagtacctgctccagctccagcaacatcctctccgcacaaagatgatcacggcggggtgcctcgccggcgtcagtgactccgtggcgcagaagctctctgggttccagaagattgagaaacgcagactcctgctcaagatgctctttggttttgcatatggtggcccatttggacatttcttgcacaaaattttggattacatcttccaagggaagaaggataccaaaaccatagcaaagaaggtgttattggagcaagtgacatcttctccctggaataacatattgttcttgttctattatggatatgttgttgagaggaggcctttgaaggaggtgacgaccagggtgaagaaacaatacccttctgtgcaactcagcgcttggatgttttggccgatagttggttggataaaccaccagtacatgcctttacaattccgagtgatcttccacagctttgtcgcatgttgttgggggattttcctgaaccttcgtgcaagggctatgtctctgaagcaggcctagatggtttagaaggaacgtatagcagcaaagctcctgcccggtgctaactaaagcagccgaagaaggaggatgctggaagctgtatcctgcacggttacaaaaaccgttgtttatttcctggtagtagtcggtttatttgaatgtcaacgcatgcgaagacagattatgctttttgtaaaaaaaaattgtgatgggagcaaagtatggtgaattcggttagctttgagg

SEQ ID NO: 34336 - protein, 203 aa, Zea mays subsp. mays
MASVGRAGRGGKGDGGKGEGSLARRAWRQYLLQLQQHPLRTKMITAGCLAGVSDSVAQKLSGFQKIEKRRLLLKMLFGFAYGGPFGHFLHKILDYIFQGKKDTKTIAKKVLLEQVTSSPWNNILFLFYYGYVVERRPLKEVTTRVKKQYPSVQLSAWMFWPIVGWINHQYMPLQFRVIFHSFVACCWGIFLNLRARAMSLKQA

SEQ ID NO: 34337 - protein, 161 aa, Zea mays subsp. mays
MITAGCLAGVSDSVAQKLSGFQKIEKRRLLLKMLFGFAYGGPFGHFLHKILDYIFQGKKDTKTIAKKVLLEQVTSSPWNNILFLFYYGYVVERRPLKEVTTRVKKQYPSVQLSAWMFWPIVGWINHQYMPLQFRVIFHSFVACCWGIFLNLRARAMSLKQA

SEQ ID NO: 34338 - protein, 129 aa, Zea mays subsp. mays
MLFGFAYGGPFGHFLHKILDYIFQGKKDTKTIAKKVLLEQVTSSPWNNILFLFYYGYVVERRPLKEVTTRVKKQYPSVQLSAWMFWPIVGWINHQYMPLQFRVIFHSFVACCWGIFLNLRARAMSLKQA

SEQ ID NO: 34339 - DNA, 1901 bp, Zea mays subsp. mays
gcaaaaatggcaaaggctctcctaggtggcctatcggcgatcctcgtcgtggcggtggtcgtcggtgtggtcgccaccgtcacccgctccggcaagaaggccggcgacaacttcacggtcccgggggaggcttcccttgccaacgtccggcaagtcggtcaagtccctgtgcgcgcccaccctgtacaaggagtcgtgcgagaagacgttgtcccaggccaccaatggcaccgagaaccccaaggaggtgttccacagcgtggccaaggtggcgctggagtcggtccagacggcggtcgagcagtccaagtcgatcggcgaggccaaggcagcgactccatgaccgagagcgcgcgcgaggactgcaagaagctcctggaggacgctgccgacgacctgaggggcatgctcgagatggccggcggtgacatcaaggtgctgttcagtcggtccgacgacctcgagacctggctcacgggcgtcatgacgttcatggacacctgcgtcgacggcttcgtcgacgagaagctcaaggccgacatgcactccgtcgtgcgcaacgccaccgagctcagcagcaacgcgctggccatcaccaacagcctcggcgggatcctgaagaagatggacctcggcatgttcagcaaggactcgcgccgccgactgctgtcgtcggagcaggatgagaagggctggcccgtgtggatgcggtcgccggagaggaagctgctggcatcgggcaaccagcccaagccgaacgcgatcgtggccaaggacggcagcgggcagttcaagagcatccagcaggccgtggacgccgtgcccaaaggccatcaggggaggtacgtcatctacgtgaaggccggcctctacgacgagatcgtcatggtccccaaggacaaggtcaacatcttcatgtacggcgacgggcctaagcaaagccgcgtgaccggccgcaagagcttcgccgacggcatcaccaccatgaagaccgccaccttctccgtcgaggcgtccgggttcatctgcaagaacatggggttccacaacacggccggcgcggagcggcaccaggcggtggcgctccgggtgcagggggacctcgcggcgttctacaactgccggttcgacgcgttccaggacacgctgtacgtgcagccgcggcggcagttcttccgcaactgcgtggtctccggcaccatcgacttcatcttcggcaactcggcggcggtgttccagaactgcctcatcatcacgcggcggcccatggacaaccagcagaactcggtgacggcgcacgggccgaccgaccccaacatgaagtccgggctcgtcatccagaactgccgcctggtgcccgaccagaagctgttcccggaccgcttcaagatcccctcgtacctgggccgcccctggaaggagttctcgcgcctcgtcatcatggagagcaccatcgccgacttcgtcaagccagaggggtacatgccctggaacggcgacttcgccctcaagacgctctactacgccgagtacaacaaccgcgggcccggcgccggcaccagcaagagggtcaactggcccggcttccacgtcatcggacggaaggaggccgagccgttcaccgccgggccgttcatcgacggcgccatgtggctcaagtacaccggcgcgccgcacatacttggtttcaagttctagaggccgcatgcgatggcatacatcacatcatatatagtgaggtggcatacgcgcgcgcgcacacacacatgtttgtgtgtatgtacaaggactgagacttgcaaacagaggggtcgcagaacaggagggctgacatttgtacctttaccgtttgcattcctttggctgtttctcctggtgaaactcgaaaaagtcttttggag

SEQ ID NO: 34340 - protein, 565 aa, Zea mays subsp. mays
AKMAKALLGGLSAILVVAVVVGVVATVTRSGKKAGDNFTVPGEASLANVRQVGQVPVRAHPVQGVVREDVVPGHQWHREPQGGVPQRGQGGAGVGPDGGRAVQVDRRGQGSDSMTESAREDCKKLLEDAADDLRGMLEMAGGDIKVLFSRSDDLETWLTGVMTFMDTCVDGFVDEKLKADMHSVVRNATELSSNALAITNSLGGILKKMDLGMFSKDSRRRLLSSEQDEKGWPVWMRSPERKLLASGNQPKPNAIVAKDGSGQFKSIQQAVDAVPKGHQGRYVIYVKAGLYDEIVMVPKDKVNIFMYGDGPKQSRVTGRKSFADGITTMKTATFSVEASGFICKNMGFHNTAGAERHQAVALRVQGDLAAFYNCRFDAFQDTLYVQPRRQFFRNCVVSGTIDFIFGNSAAVFQNCLIITRRPMDNQQNSVTAHGPTDPNMKSGLVIQNCRLVPDQKLFPDRFKIPSYLGRPWKEFSRLVIMESTIADFVKPEGYMPWNGDFALKTLYYAEYNNRGPGAGTSKRVNWPGFHVIGRKEAEPFTAGPFIDGAMWLKYTGAPHILGFKF

SEQ ID NO: 34341 - protein, 563 aa, Zea mays subsp. mays
MAKALLGGLSAILVVAVVVGVVATVTRSGKKAGDNFTVPGEASLANVRQVGQVPVRAHPVQGVVREDVVPGHQWHREPQGGVPQRGQGGAGVGPDGGRAVQVDRRGQGSDSMTESAREDCKKLLEDAADDLRGMLEMAGGDIKVLFSRSDDLETWLTGVMTFMDTCVDGFVDEKLKADMHSVVRNATELSSNALAITNSLGGILKKMDLGMFSKDSRRRLLSSEQDEKGWPVWMRSPERKLLASGNQPKPNAIVAKDGSGQFKSIQQAVDAVPKGHQGRYVIYVKAGLYDEIVMVPKDKVNIFMYGDGPKQSRVTGRKSFADGITTMKTATFSVEASGFICKNMGFHNTAGAERHQAVALRVQGDLAAFYNCRFDAFQDTLYVQPRRQFFRNCVVSGTIDFIFGNSAAVFQNCLIITRRPMDNQQNSVTAHGPTDPNMKSGLVIQNCRLVPDQKLFPDRFKIPSYLGRPWKEFSRLVIMESTIADFVKPEGYMPWNGDFALKTLYYAEYNNRGPGAGTSKRVNWPGFHVIGRKEAEPFTAGPFIDGAMWLKYTGAPHILGFKF

SEQ ID NO: 34342 - protein, 452 aa, Zea mays subsp. mays
MTESAREDCKKLLEDAADDLRGMLEMAGGDIKVLFSRSDDLETWLTGVMTFMDTCVDGFVDEKLKADMHSVVRNATELSSNALAITNSLGGILKKMDLGMFSKDSRRRLLSSEQDEKGWPVWMRSPERKLLASGNQPKPNAIVAKDGSGQFKSIQQAVDAVPKGHQGRYVIYVKAGLYDEIVMVPKDKVNIFMYGDGPKQSRVTGRKSFADGITTMKTATFSVEASGFICKNMGFHNTAGAERHQAVALRVQGDLAAFYNCRFDAFQDTLYVQPRRQFFRNCVVSGTIDFIFGNSAAVFQNCLIITRRPMDNQQNSVTAHGPTDPNMKSGLVIQNCRLVPDQKLFPDRFKIPSYLGRPWKEFSRLVIMESTIADFVKPEGYMPWNGDFALKTLYYAEYNNRGPGAGTSKRVNWPGFHVIGRKEAEPFTAGPFIDGAMWLKYTGAPHILGFKF

SEQ ID NO: 34343 - DNA, 2576 bp, Zea mays subsp. mays
gaacacttcgccgcccccctcccgcctcccgctgttctctgcctcccacccccacgccgccgtcccatcaccgccgctgggatgaagaaccctgacttcgccgcagacaaagcgctcgccaaggacttcctgtccaatttcaccggccctcacggcgagcccaagtacctgaacatcctgcaagatgtcgcgaacaggaagatacgcgcggtccagatcgagctggacgacctattccactataaggatgtcgacgaggagttcttgcagcgtgtcaccgagaacacgcggcgctacatcggcatcttcgcggaggccatggacgagatcatgccggagcccacagaggcgtagcaccgtcgacgaggaccaggacatcctgatgacgcagcgtgtggatgagggggccgacggcggcgcggacggcacggacccgctacagaaaatgccaccagagatcaaacggttctttgaggtttacatcaaggcattctcaaaggtgactccactcaccattcggcaagtgaaggcatccaacattggtcagcttgtgaaaatatctgggattgttactcgctgctcggatgtgaagcccttgatgcaggttgctgtttatacatgtgaagaatgtggcttcgagatataccaggaagtgactgctagagtgtttatgcccctcattgaatgtccatctcaacgatgcaagctgaacaaagcgaagggaaatctaatccttcaactgcgtgcgtcaaagtttttgaaatttcaggaggtaaagcttcaagagttagcagagcacgtaccaaagggccacattcctcgtgctctgactgttcatctaagaggagagctgactagaaaggttgcacctggagatgtggttgagatgtcgggtatttttctccctatgccatactacgggtttagagcgatgcgcgcaggattagttgctgatacttacttggaagcaatgtctcacccacttcaagaaaaaatatgaggagtatgatctaaaaggtgatgaacaagaacaaattgaccgattggctgaggacggtgatatctacagtaagctggcaaggtccttggcacctgaaatatttggccatgaagatgtcaaaaaggcactgctgttactacttgttggtgcaccccatcggaagctcgcagatggcatgaagatcagaggagacctgcatatatgcatgatgggagatcctggtgttgcaaagagtcaacttctgaagcatattatcaatgttgcaccaagaggagtgtacaccactggacgtgggagcagtggtgttggacttaccgctgcagtccagaaagatccagtaacaaatgagtttgtcctcgaaggtggagcactggtactggcagatatgggcatttgtgctatagatgagtttgacaagatggaagagtcagacaggacagcgattcatgaggtaatggagcagcaaacagttagcattgccaaggctggcatcaccacctctcttaatgcgagaactgcaattctggctgctgcaaatccagcatggggaaggtatgatatgaggagaaccccagcagaaaatataaatctacctccagctcttctgtctcgtttcgacctcctttggttaatcctggatcgtgcagacatggaaactgatcttgaaatggcaagacacgttgttcatgtgcatcaaaatcttgaatcaccagcgctggggttcacaccacttgagccatctgtactcagagcatacatatctgctgctagaagagtcattccttctgttcctagagagctcgaggaatacattgcaactgcatattccagcatccgccaagaggaggcgaagtcaaatgcaccaacctcctacacaactatcagaacacttttgagcatactccgtatctctattgccttggcaagactgaggttctcagaaactgtggctcagagcgatgtcgacgaagcactgcgactgatgcaaatgtccaagtactcattatactcagatgaccgccagcggtctggccttgatgcaatatctgacatatattccatcctgagagacgaagctgctaggacgagcagcatggatgtgagatacgctcacgctcttaacttgatctccagaaagggatacagcgaggctcaattgaaggaatgcttggaggaatacgcttccctgaatgtgtggcagatccatccaagcacatttgacatccacttcattgatgcctgatgcagaagccgatgccgatcacctaacatttcatcatgatccaaggatttgaagaccttcgactgaagcctaacaagatttaaaagttttctagtgatagtgaacgacagcccatttcttgatggcaatgatgtaatgctgagaagcctatctcaattgcactagtagaaacaatctcaattgtactagtagaaccattcttgtatgacttgtgagtagcttgtttttatattttctgacatttttccacacttgatagtgaagtagatgtaacttgcgtgtttcttgtttgcttgttataaatcaatacgacacaaagtagatcaaatatgt

SEQ ID NO: 34344 - protein, 355 aa, Zea mays subsp. mays
MKIRGDLHICMMGDPGVAKSQLLKHIINVAPRGVYTTGRGSSGVGLTAAVQKDPVTNEFVLEGGALVLADMGICAIDEFDKMEESDRTAIHEVMEQQTVSIAKAGITTSLNARTAILAAANPAWGRYDMRRTPAENINLPPALLSRFDLLWLILDRADMETDLEMARHVVHVHQNLESPALGFTPLEPSVLRAYISAARRVIPSVPRELEEYIATAYSSIRQEEAKSNAPTSYTTIRTLLSILRISIALARLRFSETVAQSDVDEALRLMQMSKYSLYSDDRQRSGLDAISDIYSILRDEAARTSSMDVRYAHALNLISRKGYSEAQLKECLEEYASLNVWQIHPSTFDIHFIDA

SEQ ID NO: 34345 - protein, 345 aa, Zea mays subsp. mays
MMGDPGVAKSQLLKHIINVAPRGVYTTGRGSSGVGLTAAVQKDPVTNEFVLEGGALVLADMGICAIDEFDKMEESDRTAIHEVMEQQTVSIAKAGITTSLNARTAILAAANPAWGRYDMRRTPAENINLPPALLSRFDLLWLILDRADMETDLEMARHVVHVHQNLESPALGFTPLEPSVLRAYISAARRVIPSVPRELEEYIATAYSSIRQEEAKSNAPTSYTTIRTLLSILRISIALARLRFSETVAQSDVDEALRLMQMSKYSLYSDDRQRSGLDAISDIYSILRDEAARTSSMDVRYAHALNLISRKGYSEAQLKECLEEYASLNVWQIHPSTFDIHFIDA

SEQ ID NO: 34346 - protein, 344 aa, Zea mays subsp. mays
MGDPGVAKSQLLKHIINVAPRGVYTTGRGSSGVGLTAAVQKDPVTNEFVLEGGALVLADMGICAIDEFDKMEESDRTAIHEVMEQQTVSIAKAGITTSLNARTAILAAANPAWGRYDMRRTPAENINLPPALLSRFDLLWLILDRADMETDLEMARHVVHVHQNLESPALGFTPLEPSVLRAYISAARRVIPSVPRELEEYIATAYSSIRQEEAKSNAPTSYTTIRTLLSILRISIALARLRFSETVAQSDVDEALRLMQMSKYSLYSDDRQRSGLDAISDIYSILRDEAARTSSMDVRYAHALNLISRKGYSEAQLKECLEEYASLNVWQIHPSTFDIHFIDA

SEQ ID NO: 34347 - DNA, 1053 bp, Zea mays subsp. mays
acatcctaatcaaaaaagactactcacaggtctcacttgaagctctaacagcaagccatggcaggacgagtagcggacaaagacccagagctgaaggtgctcggcgtgtggtcgagcccgttcgttatcagggcccgcgtcgcgctaaacctcaagggcctggcctaccgatacgtggaggacaacctggacagcaagagcgagctcctcctcgcctccaaccccgtgcacgggaaggtgccggtgctcctccacgacggcaggcccgtctgcgagtcccgggtcatcgtggagtatatcgacgaggccttcccggccagcggcccctgcctcctccccgccgacccgtaccgccgcgcggtcgaccgcttctgggcctcctacgtcgacgacaagctctttcccacctggatacccgtctacaacggcaggacgagcgaggacagggtcgcggcggcgaggcaggtcgtggccgtgctggagaagtttgagcgggcgttcgatgagtgctccgggggcaaggcgttcttcggcggggacgctgctggcctcgtggacgtcgtgctaggcggcttcctcgggtggctgcgcgcgtctgaggtgatgtgtggcgtgagggtcatcgaccccgccaagacgccgctgctggcggcgtgggcggaccggttcgccgcgctcgacggcgtcagggaggtgatacctgacgtgcagaggctgctggagtataacaagattaggcgagctcgtcgtgggctgccgtaggtgctgggccttgggccatctatctgccaccatgtgatcagtcaactctaagcaggagactttgacaaggttgaagttagtttatgacggtggccaatctaattaggatgctcatgctttaagctaggagtgccattagttttcctgttgaaaggcatgtttggttcctctttcctactgaaagagtttgtaatataatctatgatgctttgagtttgagaaaagaactatgaataaaacatggatatcttccgatatttcagttcaaaaacaatggaatgcttttgttct

SEQ ID NO: 34348 - protein, 234 aa, Zea mays subsp. mays
MAGRVADKDPELKVLGVWSSPFVIRARVALNLKGLAYRYVEDNLDSKSELLLASNPVHGKVPVLLHDGRPVCESRVIVEYIDEAFPASGPCLLPADPYRRAVDRFWASYVDDKLFPTWIPVYNGRTSEDRVAAARQVVAVLEKFERAFDECSGGKAFFGGDAAGLVDVVLGGFLGWLRASEVMCGVRVIDPAKTPLLAAWADRFAALDGVREVIPDVQRLLEYNKIRRARRGLP

SEQ ID NO: 34349 - protein, 162 aa, Zea mays subsp. mays
ILIKKDYSQVSLEALTASHGRTSSGQRPRAEGARRVVEPVRYQGPRRAKPQGPGLPIRGGQPGQQERAPPRLQPRAREGAGAPPRRQARLRVPGHRGVYRRGLPGQRPLPPPRRPVPPRGRPLLGLLRRRQALSHLDTRLQRQDERGQGRGGEAGRGRAGEV

SEQ ID NO: 34350 - DNA, 1772 bp, Zea mays subsp. mays
ccattacctagaacatcctaatcgaaaaactactcgatggaaccagcaacatgggccgcgttcctcggcattgccctttgcgcagcggcagcgctcttccttttgcgtggccggcgcccggtctacaaccccccgccgggccccaagccatggccgatcatcggcaaccttaacctcatgggcgagctgccccaccgctccatgaacgagctctccaagcggtacggtccgctcatgcagctctggttcgggtcgttgcctgttgtcgtcggcgcgtccgccgagatggcaaagctcttcctcaagaccaacgacgcggcgttctccgaccggccgaggttcgcagtcggcaagtacaccgcgtacgactgctccggccttctgtgggctccttttgagccgtacctgcgccaggcacgcaggatctgcgccaccgagctcttcagcgccacgcggctcgagtccttcgagcacatccgcgacgaggaggtgcgcgtgatgctccgacagctgcgccaagcggctgggcgcaccgtgcggcttagggactacctgcagatgttggcgctcggcgtgatctcgcgcatagttctgggcaagaagtacgtcatggaggaggcggcggacggtgagggggactcagcgccggcgataacgcctgccgagttcagggagatggtggacgagttcttcgcgcttcacggtgcgtttaacattggtgattatatcccttggctagattggctggacctgcagggctacgttgctaggatgaagagaatgaaggcgaggtttggtcgattcctggaacgagtcttggacgtgcacaacgagcggcgactacgcgagggagggaactttgtggcaaaggatatgttggacgtgctgctgcagctggccgatgacactagtcttgaagtccagctcagcagggacaatgttaaggctatcacacaggacctaatcatcgcaggcacggatagtaatgcaaacacgctggagtgggctgtctcggagctcctcaagaaccctaagatcttagccaaggccatggaggagctgaaccatgtcatagggccggaccgactggtgacggaaagcgacctccctcgcctcccctacatcgaggctgtgctcaaggagaccatgcgcgtgcaccctgccgcgccgatgctggcaccccacgtggcccgcgaggacacatccgtggacggatacgacgtgctcgctggcacggtcttgttcatcaacgtgtgggcaatcggccgcgaccctggactgtgggacgcgccggaggagttccggccggagcggttcgtcgagagcaagatcgacgtgaggggccatgacttccagctgctgccgttcggctctggccggcgaatgtgccccgggatcaacctcgcgctaaaggtgatggctttgagtcttgccaatctgctacacggcttcgagtggaggcttccggacggcgtgacggcagaggagctgagcatggatgaggccttcaagctcgcggtaccgcgtaaattcccgctcatggtcgtggccgagcccaggttgccagctcgcctgtatactggcgcttgatgccagtacgtgtcttcggttgttggcatgcgtggagtatagcacatgattttcagctcttggaactttgttttaataaaacacaaatatatgtgttatgttggttagatgaatgtgaatataaagttgacaacctaggtaattcgaacccctattggtatataattttactttatttttgc

SEQ ID NO: 34351 - protein, 517 aa, Zea mays subsp. mays
MEPATWAAFLGIALCAAAALFLLRGRRPVYNPPPGPKPWPIIGNLNLMGELPHRSMNELSKRYGPLMQLWFGSLPVVVGASAEMAKLFLKTNDAAFSDRPRFAVGKYTAYDCSGLLWAPFEPYLRQARRICATELFSATRLESFEHIRDEEVRVMLRQLRQAAGRTVRLRDYLQMLALGVISRIVLGKKYVMEEAADGEGDSAPAITPAEFREMVDEFFALHGAFNIGDYIPWLDWLDLQGYVARMKRMKARFGRFLERVLDVHNERRLREGGNFVAKDMLDVLLQLADDTSLEVQLSRDNVKAITQDLIIAGTDSNANTLEWAVSELLKNPKILAKAMEELNHVIGPDRLVTESDLPRLPYIEAVLKETMRVHPAAPMLAPHVAREDTSVDGYDVLAGTVLFINVWAIGRDPGLWDAPEEFRPERFVESKIDVRGHDFQLLPFGSGRRMCPGINLALKVMALSLANLLHGFEWRLPDGVTAEELSMDEAFKLAVPRKFPLMVVAEPRLPARLYTGA

SEQ ID NO: 34352 - protein, 470 aa, Zea mays subsp. mays
MGELPHRSMNELSKRYGPLMQLWFGSLPVVVGASAEMAKLFLKTNDAAFSDRPRFAVGKYTAYDCSGLLWAPFEPYLRQARRICATELFSATRLESFEHIRDEEVRVMLRQLRQAAGRTVRLRDYLQMLALGVISRIVLGKKYVMEEAADGEGDSAPAITPAEFREMVDEFFALHGAFNIGDYIPWLDWLDLQGYVARMKRMKARFGRFLERVLDVHNERRLREGGNFVAKDMLDVLLQLADDTSLEVQLSRDNVKAITQDLIIAGTDSNANTLEWAVSELLKNPKILAKAMEELNHVIGPDRLVTESDLPRLPYIEAVLKETMRVHPAAPMLAPHVAREDTSVDGYDVLAGTVLFINVWAIGRDPGLWDAPEEFRPERFVESKIDVRGHDFQLLPFGSGRRMCPGINLALKVMALSLANLLHGFEWRLPDGVTAEELSMDEAFKLAVPRKFPLMVVAEPRLPARLYTGA

SEQ ID NO: 34353 - protein, 462 aa, Zea mays subsp. mays
MNELSKRYGPLMQLWFGSLPVVVGASAEMAKLFLKTNDAAFSDRPRFAVGKYTAYDCSGLLWAPFEPYLRQARRICATELFSATRLESFEHIRDEEVRVMLRQLRQAAGRTVRLRDYLQMLALGVISRIVLGKKYVMEEAADGEGDSAPAITPAEFREMVDEFFALHGAFNIGDYIPWLDWLDLQGYVARMKRMKARFGRFLERVLDVHNERRLREGGNFVAKDMLDVLLQLADDTSLEVQLSRDNVKAITQDLIIAGTDSNANTLEWAVSELLKNPKILAKAMEELNHVIGPDRLVTESDLPRLPYIEAVLKETMRVHPAAPMLAPHVAREDTSVDGYDVLAGTVLFINVWAIGRDPGLWDAPEEFRPERFVESKIDVRGHDFQLLPFGSGRRMCPGINLALKVMALSLANLLHGFEWRLPDGVTAEELSMDEAFKLAVPRKFPLMVVAEPRLPARLYTGA

SEQ ID NO: 34354 - DNA, 1841 bp, Zea mays subsp. mays
  misc_feature (58)..(58): n is a, c, g, or t
  misc_feature (796)..(796): n is a, c, g, or t
cgctctagaactagtggatcccccgggctgcaggaattcgcacgagaccattacctanaacatcctaatcgaaaaaccaatcgtcctcgcattatccatccatcatcgactaatccagtgtacgtcgttagttgttactcaagagatcaataccgcaacaatggccgggggttttgccgtctccaagtccggcgccgacggccgggagttcaagggcaggatcacctggtacgtctggatgtgcggcatcgtcgcggccaccagtggcctcatgttcggctacgacgtcggcatctctggtggggtgacggccatggacgacttcctggagctcttcttcccgtcggtgtacgcgcgcaagcaccgcgccagggagaacaactactgcaagttcgacgaccagcggctgcagctcttcacgtcgtcgctgtacctggcggcgctggtggccagcttcgtggcgtcgcgcgcgtgctcgcggttcgggcgcaagcgcacgatgcaggcggcgtcggtcttcttcctggccggcacggcgctgtgcgcgtccgccaccaacatcgccatgctcatcgtgggccgcgtctgccttgtcgtcggcgtcggcttcggcaaccaggcggcgccgctgttcctgtccgagatcgcgccggcgcacgtccgtggcgcgctcaacatcctcttccagctcaacgtcaccgtcggcatcctcatcgccagcgtcgtcaactacttcgcgtcgcgcgcgcacccgctcggctggcgctacgcgctgggcggcgcggcggcgcccgcngccgtgctgttcctcggctcgctcgccatcaccgagacgcccacgagcctggtggagcgcggccgcaccgacgccggccgccggacgctggagaagatccgcggcaccgccgacgtgggcgccgagttcgacgagatccgggccgcgtgcgaccttgcccgcgcgctcggcgaggaggagaagccataccgccggctgatgcgccccgagagccgcccgccgctggtgatcgcgatcgccatgcaggtgttccagcagttcacgggcatcaacgcgctcatgttctacgcgccggtgctgttccagaccatgggcttcgagaccgacggctccctgctgtcggccgtggtcacgggcagcgtcaacgtcgtgtctaccgtcgtgtccatcgtcctcgtcgacagagtcggccgccgcaagctcctgctggaggcgtgcgcgcagatgctggtggcgcagacggccgtgggcgcgatcatgctggtgcatgtgcgggccaacaacaaccccagccagtcgtgggcggtggccatcgtcgtgctcatctgcgtctacgtgtcaagcttcgcctggtcctggggcccgctcgggtggctcatcccgtcggagacgttcccgctggagacgcgcacggccggcttctcgttcgccgtcagctccaacatgctcttcaccttcctcatcgcgcaggcgttcctgtccatgatgtgctccatgcgcgccttcatcttcttcttcttcgccgcctggatcgtggtcatggctatcttcgtcctcacgctgctgccggagaccaaaggcgtgtccatcgacgagatggtggaccgggtctggcgccgccactggttctggaagaggtgcttcgccgacgactacgacgcggccagggtctatgacaactgctagtgctaggcacacacgccgccggggattagttttttttttgtcattgtaattagaaatcggcctgattaattgatttcgttgctatgacatttaaattgatgtcgttgcaatcagcaggcaaaactatatagtatatgag

SEQ ID NO: 34355 - protein, 566 aa, Zea mays subsp. mays
  misc_feature (19)..(19): Xaa can be any naturally occurring amino acid
  misc_feature (265)..(265): Xaa can be any naturally occurring amino acid
ALELVDPPGCRNSHETITXNILIEKPIVLALSIHHRLIQCTSLVVTQEINTATMAGGFAVSKSGADGREFKGRITWYVWMCGIVAATSGLMFGYDVGISGGVTAMDDFLELFFPSVYARKHRARENNYCKFDDQRLQLFTSSLYLAALVASFVASRACSRFGRKRTMQAASVFFLAGTALCASATNIAMLIVGRVCLVVGVGFGNQAAPLFLSEIAPAHVRGALNILFQLNVTVGILIASVVNYFASRAHPLGWRYALGGAAAPXAVLFLGSLAITETPTSLVERGRTDAGRRTLEKIRGTADVGAEFDEIRAACDLARALGEEEKPYRRLMRPESRPPLVIAIAMQVFQQFTGINALMFYAPVLFQTMGFETDGSLLSAVVTGSVNVVSTVVSIVLVDRVGRRKLLLEACAQMLVAQTAVGAIMLVHVRANNNPSQSWAVAIVVLICVYVSSFAWSWGPLGWLIPSETFPLETRTAGFSFAVSSNMLFTFLIAQAFLSMMCSMRAFIFFFFAAWIVVMAIFVLTLLPETKGVSIDEMVDRVWRRHWFWKRCFADDYDAARVYDNC

SEQ ID NO: 34356 - protein, 563 aa, Zea mays subsp. mays
  misc_feature (20)..(20): Xaa can be any naturally occurring amino acid
  misc_feature (266)..(266): Xaa can be any naturally occurring amino acid
RSRTSGSPGLQEFARDHYLXHPNRKTNRPRIIHPSSTNPVYVVSCYSRDQYRNNGRGFCRLQVRRRRPGVQGQDHLVRLDVRHRRGHQWPHVRLRRRHLWWGDGHGRLPGALLPVGVRAQAPRQGEQLLQVRRPAAAALHVVAVPGGAGGQLRGVARVLAVRAQAHDAGGVGLLPGRHGAVRVRHQHRHAHRGPRLPCRRRRLRQPGGAAVPVRDRAGARPWRAQHPLPAQRHRRHPHRQRRQLLRVARAPARLALRAGRRGGARXRAVPRLARHHRDAHEPGGARPHRRRPPDAGEDPRHRRRGRRVRRDPGRVRPCPRARRGGEAIPPADAPREPPAAGDRDRHAGVPAVHGHQRAHVLRAGAVPDHGLRDRRLPAVGRGHGQRQRRVYRRVHRPRRQSRPPQAPAGGVRADAGGADGRGRDHAGACAGQQQPQPVVGGGHRRAHLRLRVKLRLVLGPARVAHPVGDVPAGDAHGRLLVRRQLQHALHLPHRAGVPVHDVLHARLHLLLLRRLDRGHGYLRPHAAAGDQRRVHRRDGGPGLAPPLVLEEVLRRRLRRGQGL

SEQ ID NO: 34357 - protein, 513 aa, Zea mays subsp. mays
  misc_feature (212)..(212): Xaa can be any naturally occurring amino acid
MAGGFAVSKSGADGREFKGRITWYVWMCGIVAATSGLMFGYDVGISGGVTAMDDFLELFFPSVYARKHRARENNYCKFDDQRLQLFTSSLYLAALVASFVASRACSRFGRKRTMQAASVFFLAGTALCASATNIAMLIVGRVCLVVGVGFGNQAAPLFLSEIAPAHVRGALNILFQLNVTVGILIASVVNYFASRAHPLGWRYALGGAAAPXAVLFLGSLAITETPTSLVERGRTDAGRRTLEKIRGTADVGAEFDEIRAACDLARALGEEEKPYRRLMRPESRPPLVIAIAMQVFQQFTGINALMFYAPVLFQTMGFETDGSLLSAVVTGSVNVVSTVVSIVLVDRVGRRKLLLEACAQMLVAQTAVGAIMLVHVRANNNPSQSWAVAIVVLICVYVSSFAWSWGPLGWLIPSETFPLETRTAGFSFAVSSNMLFTFLIAQAFLSMMCSMRAFIFFFFAAWIVVMAIFVLTLLPETKGVSIDEMVDRVWRRHWFWKRCFADDYDAARVYDNC

SEQ ID NO: 34358 - DNA, 1073 bp, Zea mays subsp. mays
agatgggcatgtgcagaagcacaatggtgactttaaggatttggcttgataaaaaggaagcgaaaagacagcttcgtcagagatagagctctagtcctacgggagttgcactctgctgcacagcgcgagtcttgcattgggcaacaagaaattctggaaagagagaacctaccaagagctgagacgtctattcatggaatcgtgacaaacatcgatggttgcagctttctctttccagaaagacctgatctgaagtctgtagtgcttaaagagcaaccattctctttgcagagggaaacatcgatgaacaaaccatttttcatgctgttgacattaaatttcagtgatggttgcagctgtttgagctcctcaattggatggcctgttgattttcagaagcgaaaagacagcttcgtcagagatagagctctagtcctacgggagttgtactctgctgcacagcgcgagtcttgcattgggcaacaagaaattctggaaagagagaacctaccaagagctgagacgtctattcatggaatcgtgacaaacatcgttaggtatgacactgaagatgaaaagttggctccacccaagaatgatttgatgaatcacagccgcagcaaccctgcaaaacggcacgtggaaggcactgattgccactcgtcattgccaaagaaactgaagtactttttgaaagacaagaagctgaactgctaaaagtgtaaaaccgtagaaggtagatagagaatgctgtaggtttgtttattttggttattagacgagttatacgtagcatagatgcatgggaagttcgcatgctaaggttgaactcttctgctgcataggaaagttggctgacttcttatattatgcgagcctagcttaggtacctcctgtggggagaagcgattgcaatacatggtagcatgttgtagagctcctcaccccagttagtcagtgactgatgatggtatcctcttaccagtcctctggtggtatcatcttttgttcacggaggtcgatgaagtactgcctccgataaaaaaaagacgcttttgacattattgctcccc

SEQ ID NO: 34359 - protein, 137 aa, Zea mays subsp. mays
MNKPFFMLLTLNFSDGCSCLSSSIGWPVDFQKRKDSFVRDRALVLRELYSAAQRESCIGQQEILERENLPRAETSIHGIVTNIVRYDTEDEKLAPPKNDLMNHSRSNPAKRHVEGTDCHSSLPKKLKYFLKDKKLNC

SEQ ID NO: 34360 - protein, 131 aa, Zea mays subsp. mays
MLLTLNFSDGCSCLSSSIGWPVDFQKRKDSFVRDRALVLRELYSAAQRESCIGQQEILERENLPRAETSIHGIVTNIVRYDTEDEKLAPPKNDLMNHSRSNPAKRHVEGTDCHSSLPKKLKYFLKDKKLNC

SEQ ID NO: 34361 - DNA, 494 bp, Zea mays subsp. mays
ctatctccctgtttaatcaatccttcaagcgcaagctgcctcctcctcgtcgtccggtcgtgagaagggatggcgggccgtggcaaggctatcggcgctggcgccgcgaagaaggcaacgtcgaggagctccaaggccggactccagttccccgtcggcaggattgctaggttcctcaaggcgggcaagtaccgctgagcgcgtcggcgccggcgcccccgtgtacctcgccgccgtcctgcgagtacctcgcggctgaggtttgtgccccgcttcgttttctttcccctctccttgttgcgattcgcttcgggtccgcgtcgctgcggtctcggatctggttgttttgccgtggaggattgttcctggatctgaaatgagtcgcggcattgtacttcataaaaagtctcaatacatttcccgattccaattgcttcgattgcacatctatgcatcctgtaatttaccaactaatttgaacagacttggcactg

SEQ ID NO: 34362 - protein, 55 aa, Zea mays subsp. mays
ISLFNQSFKRKLPPPRRPVVRRDGGPWQGYRRWRREEGNVEELQGRTPVPRRQDC

SEQ ID NO: 34363 - protein, 42 aa, Zea mays subsp. mays
MAGRGKAIGAGAAKKATSRSSKAGLQFPVGRIARFLKAGKYR

SEQ ID NO: 34364 - protein, 39 aa, Zea mays subsp. mays
MSRGIVLHKKSQYISRFQLLRLHIYASCNLPTNLNRLGT

SEQ ID NO: 34365 - DNA, 1642 bp, Zea mays subsp. mays
  misc_feature (113)..(113): n is a, c, g, or t
cgcaattaaccctcactaaagggaacaaaagctggagctccaccgcggtggcggccgctctagaactagtggatcccccgggctgcaggaattcgcacgagaccattacctanaacatcctaatcgaaaaacgacacgcccttgtatccgacagcgaatctccactggcactactgctccgagcccgagacgaataatggcgggggcggcagcggcggcagtagctgtgctggtgctcgccgcggcgcacggcgcgctctgcgggtgctgggaccaccgccgcgcagcgccagcgccgtcgccgtcctgggaccaccgcgggacgaacagcacggcggcgctggagggttgcgggtgcgagccgtcgccgccgccgccgtggaggttcaggaacgacaagctgagggcgctgtacccggtgatccaggcgttcaagcagacgatcacgtgcgacccgctgggcgtgacggcgacgtggacgggcacggagctctgcgacagcttcttcaacaacggcagcaccaccacgtactacaggggattctactgcgactacccgccggacgcgccgggcgtgctgacggtggcgtccatcgacttcaacgggttcgggctgtgcgcgccgtcgctggccgggttcatcgacgcgttcccggacctggcgctgttccacgccaactccaacaacttctccggcgacgtgccggacctgacccagctgcgctacttctacgagctggacctgtccaacaacaacttctcgggcgcgttcccggaggccgtggtgccgctgggcgggctgctgttcctggacctccgcttcaaccggtacgcgggggaggtgccagcgccggtgttcgcgctcacggtggaggcgctcttcctcaacaacaacggctttggcgggcggatcccggacacgctcggcagcacgggcgcgcagtacctggtggtggccaacaaccagttcacgggccccatcccgcgctccatctacaacgcgtcggccacgctgtcggaggtgctgttcctcaacaaccgcctgtccgggtgcctcccctacgagatcgggctggtggaggggctggccgtgttcgacgccggcgggaacgagatcacggggcccgtgccgctgtcgttcggctgcctccgcgacgtggaggagctcaacctggcggggaaccagctgtacgggcaggtgcccgacgtggtgtgcctgctggcgcggacggggaagctgcagaacctgtcgctgtcggacaacttcttccactcggtggggcaccactgcatggagctggtgcgcagccgtgtcctggacgtgcggcgcaactgcattctggggttccccgaccagcggcccccgctcgagtgcgccgccttctacgtcgaccccagcaagcactgccccttcatcccgcacatcccctgcgagctgcctgggtacacggcgcacggccatcctcaccaaggccatgggggtgggaactgatccatggccacccatggtgatttggtagcctttttggggggaggaataagttccactgctgcattcatgacactgggtggggctcgaaaaactccatccgtgacaaataatattatccttttaataagaggtactagttatttacagcgt

SEQ ID NO: 34366 - protein, 431 aa, Zea mays subsp. mays
MAGAAAAAVAVLVLAAAHGALCGCWDHRRAAPAPSPSWDHRGTNSTAALEGCGCEPSPPPPWRFRNDKLRALYPVIQAFKQTITCDPLGVTATWTGTELCDSFFNNGSTTTYYRGFYCDYPPDAPGVLTVASIDFNGFGLCAPSLAGFIDAFPDLALFHANSNNFSGDVPDLTQLRYFYELDLSNNNFSGAFPEAVVPLGGLLFLDLRFNRYAGEVPAPVFALTVEALFLNNNGFGGRIPDTLGSTGAQYLVVANNQFTGPIPRSIYNASATLSEVLFLNNRLSGCLPYEIGLVEGLAVFDAGGNEITGPVPLSFGCLRDVEELNLAGNQLYGQVPDVVCLLARTGKLQNLSLSDNFFHSVGHHCMELVRSRVLDVRRNCILGFPDQRPPLECAAFYVDPSKHCPFIPHIPCELPGYTAHGHPHQGHGGGN

SEQ ID NO: 34367 - DNA, 1209 bp, Zea mays subsp. mays
  misc_feature (105)..(105): n is a, c, g, or t
  misc_feature (259)..(260): n is a, c, g, or t
  misc_feature (287)..(288): n is a, c, g, or t
  misc_feature (292)..(293): n is a, c, g, or t
aacacaagtcaagtcggagcccgcaggtgtcgacacccgcgccgggagccggaagaagggtggggggtgagctgtggaccatgagcgcgtaccgggcgagccccntgcggcctgccgcgcatcggcctgggcacggcggtgcagggcccgcggccggaccccgtccgcgccgcggtgctgcgcgccatccagctcggctaccgccacttcgacacggccgcgcactacgccaccgaggcgcccatcggggaggccgccnncgaggccgtgcgcacggggctcgtcgnntccnncgaggacctcttcgtcacgtccaaggtctggtgcgccgacgcgcaccgggacagggtgctcccggccctccgccggacgctcagcaatctccagatggaatacgtggacctgtacatggtgcactggcccgtgaccatgaaggccgggaggttcacggcccccttcacgcccgaggacttcgagccgttcgacatgcgggccgtgtgggaggccatggaggagtgccaccgcctgggcctggccaaggccatcggcgtgtgcaacttctcctgcaagaagctcgagaccctgctctccttcgccaccatccctcccgtggtcaatcaggttgagatcaacccggtgtggcagcagcggaagctgagggagttctgcagggcgaagggcatccagctatgcgcctactcgcccctgggcgccaagggcacgcactggggcagcgactcggtgatggactccggcgtcctgcacgagatcgccaagtccaagggcaagaccgtggcacaggtgtgcctgaggtgggtgtacgagcagggcgactgcctgatcgtgaagagcttcgacgaggggcggatgaaggagaacctggacatcgtggactgggagctgagcgaggaggagaggcagcgcatcagcaagatcccccagcggaagatcaaccagggccgtcgctacgtctccgagcacgggccctacaagtccttcgaggagctatgggacggccgagatatgatatgagtaaacgttacgtcggcgccccgctaggcggctgccttgcgtgacggagcaacgagctccccgtcgttgacagtgagcggctgctttgtgtggttttatgtcgtgccatctgtgcaacaaaaagtgatgcttagtgtcacactatgtgtgaaataaattaaaaaggattttctggtt

SEQ ID NO: 34368 - protein, 214 aa, Zea mays subsp. mays
MEYVDLYMVHWPVTMKAGRFTAPFTPEDFEPFDMRAVWEAMEECHRLGLAKAIGVCNFSCKKLETLLSFATIPPVVNQVEINPVWQQRKLREFCRAKGIQLCAYSPLGAKGTHWGSDSVMDSGVLHEIAKSKGKTVAQVCLRWVYEQGDCLIVKSFDEGRMKENLDIVDWELSEEERQRISKIPQRKINQGRRYVSEHGPYKSFEELWDGRDMI

SEQ ID NO: 34369 - protein, 207 aa, Zea mays subsp. mays
MVHWPVTMKAGRFTAPFTPEDFEPFDMRAVWEAMEECHRLGLAKAIGVCNFSCKKLETLLSFATIPPVVNQVEINPVWQQRKLREFCRAKGIQLCAYSPLGAKGTHWGSDSVMDSGVLHEIAKSKGKTVAQVCLRWVYEQGDCLIVKSFDEGRMKENLDIVDWELSEEERQRISKIPQRKINQGRRYVSEHGPYKSFEELWDGRDMI

SEQ ID NO: 34370 - protein, 207 aa, Zea mays subsp. mays
  misc_feature (35)..(35): Xaa can be any naturally occurring amino acid
  misc_feature (86)..(86): Xaa can be any naturally occurring amino acid
  misc_feature (95)..(97): Xaa can be any naturally occurring amino acid
HKSSRSPQVSTPAPGAGRRVGGELWTMSAYRASPXRPAAHRPGHGGAGPAAGPRPRRGAARHPARLPPLRHGRALRHRGAHRGGRXRGRAHGARXXXRGPLRHVQGLVRRRAPGQGAPGPPPDAQQSPDGIRGPVHGALARDHEGREVHGPLHARGLRAVRHAGRVGGHGGVPPPGPGQGHRRVQLLLQEARDPALLRHHPSRGQSG

SEQ ID NO: 34371 - DNA, 850 bp, Zea mays subsp. mays
aaagggttccaacgatacaggatcgcaccacagcaatattgcccctcgctcgtttctcattcagcgcccgtacagccaccactctcaaccgagccatatccaaagttctcaacatcgcttcgtgcagcctgcatcggtcgacgagggctgcacgaacgatggggtccgcctccgcctcagtgacgacaaccagcctgctggcgctggcgctggcagcgctggctttcgtctccagggccgcggcgcagggcaacggctgttccagcgtgatgatgaccctggccccgtgcatggacttcatctccagcaaggcgtcggagccggggatctcctgctgctcggtgctggccggagtcgtgcagaccgacccccgctgcctctgcatggtactggacggcactgccacgtccttcggcatcgccatcaaccagaccagggcgctggagctccccggcgtctgcaaggtcaaggcgccgccgctcagccagtgcacaggcgtccctgcggcacctgcaccgacgcctcccgacgagccagcagcggcagctgaggaagaagccgacgcagctgcagatgccccttcagcaaatggagcctcaagctccacaaactcaaagaatgcagcgagcttactgcttctcatctgcgcattgctgtatgccttctaataagtggtgatacaacttcgctggccatgtcaccgtgcaggaattaggtctttccctgagtcctgactatgtacttacccatgattctcggcaaattttttgtatggtatggtatgggtttctgatgtgccacatcaaacaacattgcttttcgccaaatgagaaagatcagttctcgcccg

SEQ ID NO: 34372 - protein, 221 aa, Zea mays subsp. mays
RVPTIQDRTTAILPLARFSFSARTATTLNRAISKVLNIASCSLHRSTRAARTMGSASASVTTTSLLALALAALAFVSRAAAQGNGCSSVMMTLAPCMDFISSKASEPGISCCSVLAGVVQTDPRCLCMVLDGTATSFGIAINQTRALELPGVCKVKAPPLSQCTGVPAAPAPTPPDEPAAAAEEEADAAADAPSANGASSSTNSKNAASLLLLICALLYAF

SEQ ID NO: 34373 - protein, 182 aa, Zea mays subsp. mays
KGSNDTGSHHSNIAPRSFLIQRPYSHHSQPSHIQSSQHRFVQPASVDEGCTNDGVRLRLSDDNQPAGAGAGSAGFRLQGRGAGQRLFQRDDDPGPVHGLHLQQGVGAGDLLLLGAGRSRADRPPLPLHGTGRHCHVLRHRHQPDQGAGAPRRLQGQGAAAQPVHRRPCGTCTDASRRASSGS

SEQ ID NO: 34374 - protein, 169 aa, Zea mays subsp. mays
MGSASASVTTTSLLALALAALAFVSRAAAQGNGCSSVMMTLAPCMDFISSKASEPGISCCSVLAGVVQTDPRCLCMVLDGTATSFGIAINQTRALELPGVCKVKAPPLSQCTGVPAAPAPTPPDEPAAAAEEEADAAADAPSANGASSSTNSKNAASLLLLICALLYAF

SEQ ID NO: 34375 - DNA, 378 bp, Zea mays subsp. mays
tatatatatatatatatatatatatatatatatatatatatatatatatatatatatatatatacacgtatatttatttataaccattaagaaaaaaacatactaatctcatgctataccttattattaacccggtccattcgactgctccaatgcgctactcgcgttattagtatatatgttctgtgaagcaggccaaattatgtcaaatgagtagctagtacatgtacgtaatatgatcgtcagtgtatttattttgatctttcagtatgatgaatgcactttgctctttttatccaaaatgtaatgctatttgtaattaagtatgtaacgcaagaaccattatgctatttatgctggaggccggaatatttcctt

SEQ ID NO: 34376 - protein, 34 aa, Zea mays subsp. mays
IYIYIYIYIYIYIYIYIYIYIHVYLFITIKKKTY

SEQ ID NO: 34377 - protein, 34 aa, Zea mays subsp. mays
MHFALFIQNVMLFVIKYVTQEPLCYLCWRPEYFL

SEQ ID NO: 34378 - DNA, 726 bp, Zea mays subsp. mays
  misc_feature (234)..(234): n is a, c, g, or t
  misc_feature (281)..(281): n is a, c, g, or t
acatcatcgatgcccctcacgatgatcccgtgcaggcggctgttagaaaccgatgctatgctcagacgtgcagggagaaagaagagaaaggttggttgctttgcttgcaccagcagctggcacgcagagcaactggtacactatcttttatttagtgccatcacgtccttcttatccgattggccttccattccttctataaataccggccggcgccgaagagccaaccaagancaccgacgcgtacacagtccattattgccgtctcccttttgcgtganaaagaaagagagcgagaagagcagtcgccatgtctggcatcatccacaagatcgaggagaagctccacatggggggcgaccacaagaataaggaggaggagcaccacaagaaggccgaggagcaccacaagaaggaggagggggagcaccacaagaaggacggcggggagcacaaggaaggcatcgtggagaagatcaaggacaagatcaccggcgagcacggcgacaagtccggcgaccacaaggaaaagaaggacaagaaaaagaagaagcacggcgagggccacgaccacgacggcggccacagtagcagcagcagcgacagcgactgagatctggtgtcgcagcacaggtgcaacacatgtatgcttgctggatggaggattcataccagctgatgctgatgtagtgtttcactggtgtcatgcatgtatcgtgctattat

SEQ ID NO: 34379 - protein, 123 aa, Zea mays subsp. mays
  misc_feature (78)..(78): Xaa can be any naturally occurring amino acid
  misc_feature (94)..(94): Xaa can be any naturally occurring amino acid
TSSMPLTMIPCRRLLETDAMLRRAGRKKRKVGCFACTSSWHAEQLVHYLLFSAITSFLSDWPSIPSINTGRRRRANQXHRRVHSPLLPSPFCVXKKESEKSSRHVWHHPQDRGEAPHGGRPQE

SEQ ID NO: 34380 - protein, 120 aa, Zea mays subsp. mays
  misc_feature (75)..(75): Xaa can be any naturally occurring amino acid
  misc_feature (91)..(91): Xaa can be any naturally occurring amino acid
MPLTMIPCRRLLETDAMLRRAGRKKRKVGCFACTSSWHAEQLVHYLLFSAITSFLSDWPSIPSINTGRRRRANQXHRRVHSPLLPSPFCVXKKESEKSSRHVWHHPQDRGEAPHGGRPQE

SEQ ID NO: 34381 - protein, 116 aa, Zea mays subsp. mays
  misc_feature (71)..(71): Xaa can be any naturally occurring amino acid
  misc_feature (87)..(87): Xaa can be any naturally occurring amino acid
MIPCRRLLETDAMLRRAGRKKRKVGCFACTSSWHAEQLVHYLLFSAITSFLSDWPSIPSINTGRRRRANQXHRRVHSPLLPSPFCVXKKESEKSSRHVWHHPQDRGEAPHGGRPQE

SEQ ID NO: 34382 - protein, 100 aa, Zea mays subsp. mays
MSGIIHKIEEKLHMGGDHKNKEEEHHKKAEEHHKKEEGEHHKKDGGEHKEGIVEKIKDKITGEHGDKSGDHKEKKDKKKKKHGEGHDHDGGHSSSSSDSD

SEQ ID NO: 34383 - DNA, 1295 bp, Zea mays subsp. mays
gcccctcgacggcgcccgcgcccgcccgctgccaggtcgacggctgcaacgttgacctcaccgacgtcaagcccgcctactactgccgccacaaggtgtgcaaaatgcactccaaggagccccgcgtcctcgtcaacggcctcgagcagcgcttctgccagcagtgcagcaggttccaccagctgcctgaattcgaccagctaaagaagagctgccgcaaacgcctcgcaggccacaacgagcgccggaggaggccgccgcctggaccccttgcgtcacgatacggccgtcacgctgcgtcgctcggcgagcccggcaggctcagaagcttcatgctggatttctcgtacccgagggtctcaagcgccatgaggggtgggtttccggcggtgaggcccggtggtgaaagggtgcctggcggtatccagtggcaagcgggcttggatcctcgtcaccaccaaggcgcggtcgcgggatacggcgcccactatgggagcgagggtggtagctcgtcgtcggcgaggccgccggtgttccctggcccggagctgcccccaggtggatgccttgcaggagtccccgcggactccagctgtgctctctctcttctgtcaactcagccatgggatgctgcccacagccacagccacagccacgctgcgccaacagcgggtttcgacggcggcagccctgtggcgccctccctcatggcggcgagtagctacatcgcgccgagcccctggaccgagaccgactcctggggccacgaaggcgggcggagcgtgcctcagctgccacctgacgacgtccccctcggcgaggtgcactccggctcgagcagccaccacggccagttctcaggtgagctcgagctcgccctgcagggaaacaggccagcgccagggtcggcggcaccgccagcgccgcgcaataatcagggctccgcgggcacgttcgaccaggctggcaacacgatggactggtcgctctaggccgggggccgaaataaagcgcagcagatcctagccgcgcagggagatggaggaggctgaaagtctgatgctgcacgctgcttgcttagcttagagcatccagcatgataagagtgatgaactgatgcggtgtcaggagactagtttattctgtgcttcaccatgaactcgtctgtcgcggcgtctatgtagacagacgtcacggcagacgtccgtggtttgaagttaccagtatgcttgtcgtggactttgctcgcgatgcattaatctcattgttcaccatccagaaatctcatgttctct

SEQ ID NO: 34384 - protein, 329 aa, Zea mays subsp. mays
PSTAPAPARCQVDGCNVDLTDVKPAYYCRHKVCKMHSKEPRVLVNGLEQRFCQQCSRFHQLPEFDQLKKSCRKRLAGHNERRRRPPPGPLASRYGRHAASLGEPGRLRSFMLDFSYPRVSSAMRGGFPAVRPGGERVPGGIQWQAGLDPRHHQGAVAGYGAHYGSEGGSSSSARPPVFPGPELPPGGCLAGVPADSSCALSLLSTQPWDAAHSHSHSHAAPTAGFDGGSPVAPSLMAASSYIAPSPWTETDSWGHEGGRSVPQLPPDDVPLGEVHSGSSSHHGQFSGELELALQGNRPAPGSAAPPAPRNNQGSAGTFDQAGNTMDWSL

SEQ ID NO: 34385 - protein, 295 aa, Zea mays subsp. mays
MHSKEPRVLVNGLEQRFCQQCSRFHQLPEFDQLKKSCRKRLAGHNERRRRPPPGPLASRYGRHAASLGEPGRLRSFMLDFSYPRVSSAMRGGFPAVRPGGERVPGGIQWQAGLDPRHHQGAVAGYGAHYGSEGGSSSSARPPVFPGPELPPGGCLAGVPADSSCALSLLSTQPWDAAHSHSHSHAAPTAGFDGGSPVAPSLMAASSYIAPSPWTETDSWGHEGGRSVPQLPPDDVPLGEVHSGSSSHHGQFSGELELALQGNRPAPGSAAPPAPRNNQGSAGTFDQAGNTMDWSL

SEQ ID NO: 34386 - protein, 219 aa, Zea mays subsp. mays
MLDFSYPRVSSAMRGGFPAVRPGGERVPGGIQWQAGLDPRHHQGAVAGYGAHYGSEGGSSSSARPPVFPGPELPPGGCLAGVPADSSCALSLLSTQPWDAAHSHSHSHAAPTAGFDGGSPVAPSLMAASSYIAPSPWTETDSWGHEGGRSVPQLPPDDVPLGEVHSGSSSHHGQFSGELELALQGNRPAPGSAAPPAPRNNQGSAGTFDQAGNTMDWSL

SEQ ID NO: 34387 - DNA, 701 bp, Zea mays subsp. mays
tttgaatagtctggcagcaaatgttccgaaggctattgtgctgtgccaagtggagaaagcaaaggaagacatgcttaaccagctatacagctcgataagcgggcaaagcaacgctaagattgaagagcttcttcaagaggatcataatgctaagcgcagaagggagaagtaccaaaaacaatcatctctcctgtcaaaacttactcgtcaactcagtatccatgacaacagggcatctgtttcctcgtattctaatgacagcactgaagttgagagccctcgaacaccaagccgctcaggtgaggactggaggtctgcctttgattcatcttcaaatgggcctgttgctacaagcacaaacagtgaatcaaggtcgagaagtgctgatggtcgcagccggcgctatgagaacggggatgtgagctcaggtgccaactctggcagccggcgcacaccgaaccggttgccaccagcaccgccaaaatactaatcgtgctgattggtattcatgaacattatgtattcttgcctggcacacgccccttgcttgtcatatgggttattggagcgtatttcagatcggccgctagagattgtgttgtagtggagtctggtgattgcgtgaacattgtgttcgcaggtcgctgcgactcagatgagttgtttatagaaatatataggtaaccatggtctctatcttt

SEQ ID NO: 34388 - protein, 162 aa, Zea mays subsp. mays
LNSLAANVPKAIVLCQVEKAKEDMLNQLYSSISGQSNAKIEELLQEDHNAKRRREKYQKQSSLLSKLTRQLSIHDNRASVSSYSNDSTEVESPRTPSRSGEDWRSAFDSSSNGPVATSTNSESRSRSADGRSRRYENGDVSSGANSGSRRTPNRLPPAPPKY

SEQ ID NO: 34389 - protein, 139 aa, Zea mays subsp. mays
MLNQLYSSISGQSNAKIEELLQEDHNAKRRREKYQKQSSLLSKLTRQLSIHDNRASVSSYSNDSTEVESPRTPSRSGEDWRSAFDSSSNGPVATSTNSESRSRSADGRSRRYENGDVSSGANSGSRRTPNRLPPAPPKY

SEQ ID NO: 34390 - protein, 91 aa, Zea mays subsp. mays
MLSAEGRSTKNNHLSCQNLLVNSVSMTTGHLFPRILMTALKLRALEHQAAQVRTGGLPLIHLQMGLLLQAQTVNQGREVLMVAAGAMRTGM

SEQ ID NO: 34391 - DNA, 1630 bp, Zea mays subsp. mays
  misc_feature (60)..(61): n is a, c, g, or t
aataatggccggcgcccaagaagctggcgacgccctggtcatcagccgtgcgcgcggcgnntgctggtgttcccgctgcccttccagggccacatcgacccgatgctgcacctggcgggcgtgctccacgcgcggggcctcgcggtgaccgtgctccacacgcgcttcaacgcgttggaccccgcgcggcacccggagttccagttcgtggccgtccccgacggcacgcccgccgacgtcgccgccatggggaggatcatcgacatcatcctggccatgaacgccgccatggaggcgtcgccggccgtcggggaggcgctgcgggcgtccgcggtcgcggggcaggacgggcggccccgcgcctcgtgcctcttcgtcgacgccaacctcctcgccgtgcacagggcggccagggcgctcggactgcccacgctggtgctgcgcaccgggagcgccgcctgcctcggctgcttcctggcctaccccatgctccacgaaaagggctatctgcctccgcaagagtcgcagctgtgcacgccggtgccggagctgccaccactccgagtgaaggacctgatctactcgaagcacagcgaccacgagctgatgcgcaaagtcctcgcccggggcagcgaaacagtgagagattgctccggcgtcgtcatcaacacagccgaggcactggaggcagccgagctagggaggctccgcgacgagctggtccacctcccggtggtgctcgccgccggcccactccacaagctctcctcctccaggggcgccgggagcagcttgctcgccccggaccacagctgcatcgagtggctggacgcgcagcggcccgggtcggtgctgtacgtgagcttcgggagcctggcggccatggactcgagcgagctccgggaggtggcatggggtctggcggagtgcggccaccccttcctatgggtcgtccggcccaacatggtacgaggctgcgacgtcgacagcgcgcggcagctgccggatggtttcgaggacgccgtcaagggcagaggcgtggtggtccgctgggccccgcagcaggaggtgctggcccaccgcgcagtgggtgggttctggagccactgcgggtggaactcgactctggaggcggtcagcgagggggtcccgatgatctgcaggccggacgccgtggaccagatgatgaacacgaggtacttgcaggacgtctggggcgtcggcttcgagctccaaggggagctggagagggggaagatcaaggacgcggttaggaagttgatgggtgagcgggagggagctgagatgagaagagcagcgcaagagctttgcgcgaaactagcaggctgcttggagagcactgggtcttctcaggttgccattgacaagttggttagctacattctgtctctgtgaatcttctgttctatggcgtatgtgtgttccgctgggttagcattggcagcagcttaacagctggtactcttatatggacaattattcctgtcaattatatgtagtgttctctttctctagctattttttaatttctctacacaccagcttctgatttcgttttaccgccttccatatcggagatattataaacctgactccctttcaagctctc

SEQ ID NO: 34392 - protein, 471 aa, Zea mays subsp. mays
  misc_feature (20)..(21): Xaa can be any naturally occurring amino acid
NNGRRPRSWRRPGHQPCARXXLVFPLPFQGHIDPMLHLAGVLHARGLAVTVLHTRFNALDPARHPEFQFVAVPDGTPADVAAMGRIIDIILAMNAAMEASPAVGEALRASAVAGQDGRPRASCLFVDANLLAVHRAARALGLPTLVLRTGSAACLGCFLAYPMLHEKGYLPPQESQLCTPVPELPPLRVKDLIYSKHSDHELMRKVLARGSETVRDCSGVVINTAEALEAAELGRLRDELVHLPVVLAAGPLHKLSSSRGAGSSLLAPDHSCIEWLDAQRPGSVLYVSFGSLAAMDSSELREVAWGLAECGHPFLWVVRPNMVRGCDVDSARQLPDGFEDAVKGRGVVVRWAPQQEVLAHRAVGGFWSHCGWNSTLEAVSEGVPMICRPDAVDQMMNTRYLQDVWGVGFELQGELERGKIKDAVRKLMGEREGAEMRRAAQELCAKLAGCLESTGSSQVAIDKLVSYILSL

SEQ ID NO: 34393 - protein, 437 aa, Zea mays subsp. mays
MLHLAGVLHARGLAVTVLHTRFNALDPARHPEFQFVAVPDGTPADVAAMGRIIDIILAMNAAMEASPAVGEALRASAVAGQDGRPRASCLFVDANLLAVHRAARALGLPTLVLRTGSAACLGCFLAYPMLHEKGYLPPQESQLCTPVPELPPLRVKDLIYSKHSDHELMRKVLARGSETVRDCSGVVINTAEALEAAELGRLRDELVHLPVVLAAGPLHKLSSSRGAGSSLLAPDHSCIEWLDAQRPGSVLYVSFGSLAAMDSSELREVAWGLAECGHPFLWVVRPNMVRGCDVDSARQLPDGFEDAVKGRGVVVRWAPQQEVLAHRAVGGFWSHCGWNSTLEAVSEGVPMICRPDAVDQMMNTRYLQDVWGVGFELQGELERGKIKDAVRKLMGEREGAEMRRAAQELCAKLAGCLESTGSSQVAIDKLVSYILSL

SEQ ID NO: 34394 - protein, 389 aa, Zea mays subsp. mays
MGRIIDIILAMNAAMEASPAVGEALRASAVAGQDGRPRASCLFVDANLLAVHRAARALGLPTLVLRTGSAACLGCFLAYPMLHEKGYLPPQESQLCTPVPELPPLRVKDLIYSKHSDHELMRKVLARGSETVRDCSGVVINTAEALEAAELGRLRDELVHLPVVLAAGPLHKLSSSRGAGSSLLAPDHSCIEWLDAQRPGSVLYVSFGSLAAMDSSELREVAWGLAECGHPFLWVVRPNMVRGCDVDSARQLPDGFEDAVKGRGVVVRWAPQQEVLAHRAVGGFWSHCGWNSTLEAVSEGVPMICRPDAVDQMMNTRYLQDVWGVGFELQGELERGKIKDAVRKLMGEREGAEMRRAAQELCAKLAGCLESTGSSQVAIDKLVSYILSL

SEQ ID NO: 34395 - DNA, 1152 bp, Zea mays subsp. mays
  misc_feature (1091)..(1091): n is a, c, g, or t
  misc_feature (1093)..(1093): n is a, c, g, or t
  misc_feature (1106)..(1106): n is a, c, g, or t
agaccgtgcgacccgttaaaaataataacgcgtccgctcccctctcgagtcccttgccccacccaagtacccaactcgagcggtggagcctcgcgtgtgtctaaaaatagcgcccgaatcgcggcggcagccacatcgagtaatttatcgagtcaggtgagagggcggagcagatctcgccggccggggccatgggtgctgccggcgcgatccggcgggcggcggcgtcggtggtcgacagggcgtgcgcggggacgcggggcttccgccgcgcgctggcgcggttcgcgccgcggccgtcggcgttcggccccgccgcagacgcggaggccgcggcggtgcgcgccgtgcggaacctccggaccttccggttccagtacgccgtcctgcagtgggtgctgctgctggcgtccctggcgccgcggcaccgggcctccgtcgtcttcctcatggcggcgtccaagggcctcctcgtctacggcggcctcctcaaggcgttccccaactcggcgctgctccggaggctcctcgaccgccgcctcgtggccgccgtgttcgtcgcgctcgtgctcgccgacatcgtcgccgcgggcgccgtcgccaacctcctggccgcgctcgccgcgggcgtccccgtcatcgtcctccacgcgtccttccgcgtccgcgacgatctcgaggcgccctcgccggacgcggcggcggcggccgagaacggcaaggaggacgaggcgtcggcggtcgtcgagaagaaggaggacggcgacgtcgaggcggggcccacgcggcggtccatggcggcggcaccaagatcacccaaatgaggaatttactagtaatacgagctagtgaaaaccatacgtttttcgtaggtttttaatttaactactggccccgttgtcatggaacataggaacaattcgtggtcaaacctgtcttcctgcctgcttgttgattcatactttgagcctaggattttttttttggagaagttcaatcagtagaatgtagtggtagctgtgacagacattgaacgtggaattgaggattaatacttataggggactcagttgtgaagtcctctattcatncnccttgagtgtatnatctaatctaacacacataaagcatgctccactgatcgattcggtc

SEQ ID NO: 34396 - protein, 282 aa, Zea mays subsp. mays
RPCDPLKIITRPLPSRVPCPTQVPNSSGGASRVSKNSARIAAAATSSNLSSQVRGRSRSRRPGPWVLPARSGGRRRRWSTGRARGRGASAARWRGSRRGRRRSAPPQTRRPRRCAPCGTSGPSGSSTPSCSGCCCWRPWRRGTGPPSSSSWRRPRASSSTAASSRRSPTRRCSGGSSTAASWPPCSSRSCSPTSSPRAPSPTSWPRSPRASPSSSSTRPSASATISRRPRRTRRRRPRTARRTRRRRSSRRRRTATSRRGPRGGPWRRHQDHPNEEFTSNTS

SEQ ID NO: 34397 - protein, 210 aa, Zea mays subsp. mays
MGAAGAIRRAAASVVDRACAGTRGFRRALARFAPRPSAFGPAADAEAAAVRAVRNLRTFRFQYAVLQWVLLLASLAPRHRASVVFLMAASKGLLVYGGLLKAFPNSALLRRLLDRRLVAAVFVALVLADIVAAGAVANLLAALAAGVPVIVLHASFRVRDDLEAPSPDAAAAAENGKEDEASAVVEKKEDGDVEAGPTRRSMAAAPRSPK

SEQ ID NO: 34398 - DNA, 654 bp, Zea mays subsp. mays
  misc_feature (63)..(63): n is a, c, g, or t
ccacacggtagtaccccgctagctaaaagacaacatgtgtaaaaaggaggaagagcgtggcgntgaggtggcggcggcggggatggaggaggaggcgctgacggaggcctcgtcgatcggcgtggcgtcgtccgacagctcctccatcggcgagaactccgcgtccgacaaggagggcagcgacggggtggaggaggtggtggaaggcaaggcgcaagggctcggcatgatggggctggccacgctgcagtccttggacgacgatgccctgcccatcaaggtacgcagccatggtttttcttgaggcagagatgtcatggaatgtgttgatctcacctagccagctggaccgcaaggctatcatcgtgcgtcttctggaggatgtcacgaacaggagggcttccaaagagcatggctactatgttgccgttaatcagctgaaggcgatatctgaaggaaaagtgcgtgaactaactggagatgtcatgttcccagtctcgtttacctgcatcacacagaagccggtgaagggtgaggtcatggttggccacgtggacaggatcctcaagcatggcgtgttcatctggtttgtggatgaatttgcatctgtcataatatcaactcttcctctgagcatgttcatgtatctcctat

SEQ ID NO: 34399 - protein, 130 aa, Zea mays subsp. mays
MPCPSRYAAMVFLEAEMSWNVLISPSQLDRKAIIVRLLEDVTNRRASKEHGYYVAVNQLKAISEGKVRELTGDVMFPVSFTCITQKPVKGEVMVGHVDRILKHGVFIWFVDEFASVIISTLPLSMFMYLL

SEQ ID NO: 34400 - protein, 121 aa, Zea mays subsp. mays
MVFLEAEMSWNVLISPSQLDRKAIIVRLLEDVTNRRASKEHGYYVAVNQLKAISEGKVRELTGDVMFPVSFTCITQKPVKGEVMVGHVDRILKHGVFIWFVDEFASVIISTLPLSMFMYLL

SEQ ID NO: 34401 - protein, 114 aa, Zea mays subsp. mays
MSWNVLISPSQLDRKAIIVRLLEDVTNRRASKEHGYYVAVNQLKAISEGKVRELTGDVMFPVSFTCITQKPVKGEVMVGHVDRILKHGVFIWFVDEFASVIISTLPLSMFMYLL

SEQ ID NO: 34402 - DNA, 787 bp, Zea mays subsp. mays
  misc_feature (148)..(148): n is a, c, g, or t
  misc_feature (153)..(153): n is a, c, g, or t
  misc_feature (274)..(274): n is a, c, g, or t
  misc_feature (276)..(276): n is a, c, g, or t
  misc_feature (416)..(416): n is a, c, g, or t
cttgggttaagctctagtgctagatcgttcgttttggtctgcactctgcacagtgcacagacccttcccccgtgttcccgaatcccgaatcgcgacccaaacagagaggccaggagcggaggactatggccgtagccagacatggcgnccgcngctaccgcctcctcctgcgggcccgttggcagcccgccggctcgggggcgcggtgcatccacgagggcccggacaccatcgaggagctgctggaccggcacctcgtgaagaagcccgcggngngcccggacgaggagtcggcggaggcgcggcggcggctgacgagctcccggcgggaggcgctggccctgtaccgggacatcctccgggcggcgcggctcttcgcgtggaccgacgaccgcggggtgccgtggcgggaggtntgcgcgccaacgccaggcgcgagttcgaggatgcccgcggggagcgcgacccggaggtggtggcgcgcctcctcatcggcggccgcgacgccgtgcaacaggcgctcgaccgccttgccgacgcctcacgccgcgcgatcgagaccgaggaggccaagcgccgtggcggagcgtagatttggagtcgggtattccaaacttacgcgtcatgtgctagcatttgcttaatcttgttgtaagcgacgatctctaattctcaatgtctggtataaaaatggtttcaaggattaggctagctcaagcagtactactatgcatgtttgatttttcacttcacaagaatctgagagagaaacacttcaatttcttgc

SEQ ID NO: 34403 - protein, 172 aa, Zea mays subsp. mays
  misc_feature (8)..(8): Xaa can be any naturally occurring amino acid
  misc_feature (10)..(10): Xaa can be any naturally occurring amino acid
  misc_feature (50)..(51): Xaa can be any naturally occurring amino acid
  misc_feature (97)..(97): Xaa can be any naturally occurring amino acid
MAVARHGXRXYRLLLRARWQPAGSGARCIHEGPDTIEELLDRHLVKKPAXXPDEESAEARRRLTSSRREALALYRDILRAARLFAWTDDRGVPWREXCAPTPGASSRMPAGSATRRWWRASSSAAATPCNRRSTALPTPHAARSRPRRPSAVAERRFGVGYSKLTRHVLAFA

SEQ ID NO: 34404 - DNA, 897 bp, Zea mays subsp. mays
  misc_feature (535)..(535): n is a, c, g, or t
  misc_feature (537)..(537): n is a, c, g, or t
gcacgagaccattacctagaacatcctaatcgaaaaagttcatccacgacgcaccgaccagcaatggccacgttcctgggaagctcaccggcgctcctcgcccgtcccatcgccaagccccacatctcctgcgcgcagacaccgcgcccgccaagcgcccagaaccagccgccgtccagcgagcaaccgcaagcacaaacacagcagcagtccgtgcaagcgcagccacagcaggcggcggcgaggccgaagcgcgcgggcggcgcggactccacggactgggtggcctcgtcgctgacgcggcggttcgggatcggcgcggggctggcgtgggccggctttctggccgtcggcgtcgtgtccgagcagctcaagacccgcttcgaggtcgcgcagcagcaggccaacaccaaggacgtggaacaggagcaggaggtcgtcctgcccaacggggtccggtactacgagatgcgcgtcggcggcggcgacgtcccgcggccgggcgacctggtggtgatcgacctgcagggccggntngcgggcagtggcggcggcggggaggcgttcgtggacacgttcggcgacggcaagcggccgctggcgctggtgatgggctcccggccgtacaccaggggcatgtgcgagggcgtcgagtacgcgctgcgctccatgagggccggcggcaagcggcgggttgtcgtcccgccgggcctcgggttcggcgacgacggcgccgacttcggggaggagcacgtccaggtcccacccggcgcgacgctcgagtacatcgtgcaggtcgacagggtgtccatcgcgccggcgtgaggcggcagtagatagatcgcagtcctgtggtgttctgatcattattttatggctcggctcggttctttctgt

SEQ ID NO: 34405 - protein, 274 aa, Zea mays subsp. mays
  misc_feature (179)..(179): Xaa can be any naturally occurring amino acid
ARDHYLEHPNRKSSSTTHRPAMATFLGSSPALLARPIAKPHISCAQTPRPPSAQNQPPSSEQPQAQTQQQSVQAQPQQAAARPKRAGGADSTDWVASSLTRRFGIGAGLAWAGFLAVGVVSEQLKTRFEVAQQQANTKDVEQEQEVVLPNGVRYYEMRVGGGDVPRPGDLVVIDLQGRXAGSGGGGEAFVDTFGDGKRPLALVMGSRPYTRGMCEGVEYALRSMRAGGKRRVVVPPGLGFGDDGADFGEEHVQVPPGATLEYIVQVDRVSIAPA

SEQ ID NO: 34406 - protein, 253 aa, Zea mays subsp. mays
  misc_feature (158)..(158): Xaa can be any naturally occurring amino acid
MATFLGSSPALLARPIAKPHISCAQTPRPPSAQNQPPSSEQPQAQTQQQSVQAQPQQAAARPKRAGGADSTDWVASSLTRRFGIGAGLAWAGFLAVGVVSEQLKTRFEVAQQQANTKDVEQEQEVVLPNGVRYYEMRVGGGDVPRPGDLVVIDLQGRXAGSGGGGEAFVDTFGDGKRPLALVMGSRPYTRGMCEGVEYALRSMRAGGKRRVVVPPGLGFGDDGADFGEEHVQVPPGATLEYIVQVDRVSIAPA

SEQ ID NO: 34407 - DNA, 832 bp, Zea mays subsp. mays
tagaacatcctaatcaaaaagtcaagtttaggaaaggaagcaccggagcaggcgaaacggcgccgacgacaatggcagcaacaagggcttccccggtgcttcttttgctgctgctcaccgtccagctgagcttgctcttccgcctccccgactccccctccaccctcgccctcgccctcgccctcgccgcggaaccagaccaacagaacgccaagcagcatcgccagcccgcgctgctggtgcagtcgacgtgcaactccaccagcttctacgacctctgcatcgccgcgctcgccgccgaccccgccagctccaccgccgacgtcccgggcctgggcggcatcgccgtgtccgccgccgcaaacaacgcctccggcacggccgccttcctcggcaacgccagcgacgccgcggccaccccgcaggcggaccgcgcgctcctccgcgcctgcgccggcaagtacgccgccgcccgcgacgcgctcgtgcaggcgcgcgcgtccctcgccgagcaggcctacgactacgccttcgtgcacgtgagcgccgccggcgagtaccccgcggtgtgccgcacgctgttccggcgccggcagcagcagcagcgtggggcgagtaggactgcgtacccagcggaactggccaagagggaggaggcgctgcggcgcctgtgcaccatcgccctcgacatcatctccctgctgcaaaaccaggagacctactagctccatgcatctcaattctcaactctcacagaaatgcagttgtcagtcggttagtcgatcttgttgatgcacaagagtagtaaaatggaccggagcaatgaacattg

SEQ ID NO: 34408 - protein, 240 aa, Zea mays subsp. mays
EHPNQKVKFRKGSTGAGETAPTTMAATRASPVLLLLLLTVQLSLLFRLPDSPSTLALALALAAEPDQQNAKQHRQPALLVQSTCNSTSFYDLCIAALAADPASSTADVPGLGGIAVSAAANNASGTAAFLGNASDAAATPQADRALLRACAGKYAAARDALVQARASLAEQAYDYAFVHVSAAGEYPAVCRTLFRRRQQQQRGASRTAYPAELAKREEALRRLCTIALDIISLLQNQETY

SEQ ID NO: 34409 - protein, 217 aa, Zea mays subsp. mays
MAATRASPVLLLLLLTVQLSLLFRLPDSPSTLALALALAAEPDQQNAKQHRQPALLVQSTCNSTSFYDLCIAALAADPASSTADVPGLGGIAVSAAANNASGTAAFLGNASDAAATPQADRALLRACAGKYAAARDALVQARASLAEQAYDYAFVHVSAAGEYPAVCRTLFRRRQQQQRGASRTAYPAELAKREEALRRLCTIALDIISLLQNQETY

SEQ ID NO: 34410 - DNA, 1171 bp, Zea mays subsp. mays
aaatgttttgtgacgattatccccgcaccgtccagagtactctaacccacaagttgaggccgccctgcagcccatcagacgaggacgcgcgcgtgtataaaagctgactggactcccagcgtctgtcagcgaagccgaagcagcagccaattcgctcgagttcagatcgagcgcgcgccaagcaagtcttccggccggccgcgaagagcgcaatcaagcaagacaagatggtgaagctcgccttcggaagcgtcggcgactccttcagcgccacctccatcaaggcctacgtggccgagttcatcgccaccctcctcttcgtcttcgccggcgtcggttccgccatcgcctacgggcaactgacgaatggcggcgcgctggacccggcgggcctggtggcgatcgcgatcgcgcacgcgctggcgctgttcgtgggcgtgtccgtcgcggcgaacatctcgggcggccacctgaacccggccgtgacgttcgggctggccgtgggcggccacatcaccatcctgacgggcgtcttctactgggtggcccagctgctgggcgccaccgtggcgtgcctgctcctcgggttcgtcacccacggcaaggccatcccgacgcacgccgtcgcgggcatcagcgagctggaaggcgtcgtgttcgaggtcgtcatcaccttcgcgctcgtctacaccgtgtacgccaccgccgccgaccccaagaagggctcgctcggcaccatcgcgcccatcgccatcggcttcatcgtcggcgccaacatcctcgccgcggggcccttcagcggcggctccatgaaccccgcccgctccttcggccccgccgtcgccgcgggcgacttcgccggaaactgggtctactgggtcggcccgctcgtcggcggcggcctcgctggcctcgtctacggcgacgtcttcattggcggctcctaccagcaggtcgcggaccaggactacgcctaatttattcaccactccatctccgctctggatgaatggattcaaaaccgtcgtcgtttgcttttgctcctcgccacgttcaattaatggttgtgtatgcatgtatgtgccaatatgatgtgcctttgccctggtccattcatttccctttcttttttcggggtgaaatagatgtaaagatctcgtcttgcctgccg

SEQ ID NO: 34411 - protein, 249 aa, Zea mays subsp. mays
MVKLAFGSVGDSFSATSIKAYVAEFIATLLFVFAGVGSAIAYGQLTNGGALDPAGLVAIAIAHALALFVGVSVAANISGGHLNPAVTFGLAVGGHITILTGVFYWVAQLLGATVACLLLGFVTHGKAIPTHAVAGISELEGVVFEVVITFALVYTVYATAADPKKGSLGTIAPIAIGFIVGANILAAGPFSGGSMNPARSFGPAVAAGDFAGNWVYWVGPLVGGGLAGLVYGDVFIGGSYQQVADQDYA

SEQ ID NO: 34412 - DNA, 979 bp, Zea mays subsp. mays
cccgcgcctactccactgactccagcgctctgtccgacggccgcagcgatgccccaaccccgccgcatccccggtaccggtgcccggcgccgccactcgccgccggcggaggaatatcctcccgtcgtcgtcgtcgtcgtcttcttcgtcgtcctcctcctcctccttctctgccacggcgatccgcacgtccgcctccggcgcctcctcctcgtcctcctccgccccgcccttctcgccggcgccctcgccgttccaccaccgcttcctctccccgctgcgcgcctccgcggtgcccttctcctgggagcaccgcccgggcatccccaagacgcccgcgcggcgcgccagcggcagcaaggccaagacgccggcggcgctgcccctcccgccctccctcctctccagcaaggtcagcgccgtcgacgggaccttctcctccgccgacggctacctcgtcgtcccgcccgacgccaaggcgaggcggcggcgcaggcggccgccggcgctggccgcctctctcaccgactggctcgccgtgctcagcctctaccggtcgtgcacgcggtcccgcgactgcctcgcccgcacgccgccgctgcgcccccgcgctccggcgccggcgaaggcccgtctcgtcgatcggctcaccactcaccagtgagccaggtccgcgcgtgtccggtgctcccggtccttcgccgggtgttgcggttgcggattgagaatgtgagtaggattaatcacgcctggctagctttgacactgtaattaaggtggtttcccccgccccatgtttgttccagccaataataattggttcatccggacttgatgccgctgatgatagcctgctagtgatgcgtttgcatgccggtgaggtgagtaagcttgtctcaccgttaattaggttgtaagcttgttcgctgattggtgagtaagacacagttagtgtcaattatgaaaaagaccacttgcg

SEQ ID NO: 34413 - protein, 256 aa, Zea mays subsp. mays
PAPTPLTPALCPTAAAMPQPRRIPGTGARRRHSPPAEEYPPVVVVVVFFVVLLLLLLCHGDPHVRLRRLLLVLLRPALLAGALAVPPPLPLPAARLRGALLLGAPPGHPQDARAARQRQQGQDAGGAAPPALPPLQQGQRRRRDLLLRRRLPRRPARRQGEAAAQAAAGAGRLSHRLARRAQPLPVVHAVPRLPRPHAAAAPPRSGAGEGPSRRSAHHSPVSQVRACPVLPVLRRVLRLRIENVSRINHAWLALTL

SEQ ID NO: 34414 - protein, 240 aa, Zea mays subsp. mays
MPQPRRIPGTGARRRHSPPAEEYPPVVVVVVFFVVLLLLLLCHGDPHVRLRRLLLVLLRPALLAGALAVPPPLPLPAARLRGALLLGAPPGHPQDARAARQRQQGQDAGGAAPPALPPLQQGQRRRRDLLLRRRLPRRPARRQGEAAAQAAAGAGRLSHRLARRAQPLPVVHAVPRLPRPHAAAAPPRSGAGEGPSRRSAHHSPVSQVRACPVLPVLRRVLRLRIENVSRINHAWLALTL

SEQ ID NO: 34415 - protein, 240 aa, Zea mays subsp. mays
RAYSTDSSALSDGRSDAPTPPHPRYRCPAPPLAAGGGISSRRRRRRLLRRPPPPPSLPRRSARPPPAPPPRPPPPRPSRRRPRRSTTASSPRCAPPRCPSPGSTARASPRRPRGAPAAARPRRRRRCPSRPPSSPARSAPSTGPSPPPTATSSSRPTPRRGGGAGGRRRWPPLSPTGSPCSASTGRARGPATASPARRRCAPALRRRRRPVSSIGSPLTSEPGPRVSGAPGPSPGVAVAD

SEQ ID NO: 34416 - DNA, 982 bp, Zea mays subsp. mays
aacacataacacatcgactcgatcgtcgagcgagcgctaacattacaacaacaacaacaatggacatggacctcaccttccctgccacctcgacggcgccgcccgagccgccggctgccgtcgcaggcccactcccggcggcggcggcagcgtgccgcgagctcccgtccccccggttcgcggtcgtcgccagatcgccgccgcccttgtcccctcctccccctcccgccgccgcgccgccgccggtgaccagcagcggagcacccacgctcaccgccgtggcgccgccggcgggggcgggaggcgacgccacggaggaggacaggatggacctgctgtgggaggacttcaacgaggagctggcgcgggccggctcctgctgctgccgcgccgccgccggcggcgggccgtggccggcgtcggactccgagtcggagcccgcggcggcccgcgggtgcgcgccggtgctgcggccctcgtcccgggccggcgccgtccggcactgccgccgccgcgccgggacgtgggctctgctcatgcggatcttcaggaggctcttcgtcgtcgagaaagaccgtcgtctccaggcgccagcgccaccgcgccgctgccaaggcgagggcgcgctgacgcgacgaccacgcacgcttgcgctgcgcagccaggcaggcaggcagttgccatttgcctcccacgaatgtaatgatgtgctcagcgtgagctcggcaaggggaagaagaaccatgcatgcgttgcttgcttcctatgcgatcgtacggtctactagtaagttacgtattatactgctatgataatccattagacacgggagtgaggaggtctgctcttgatgctgtaaataaatagggtttcagtgttgttcatcgtcagcagatacagagaaattagagcagtgccatagcaatgtcgtcattaaatctcttcattctcccactgtaaattaataatttatttattactc

SEQ ID NO: 34417 - protein, 269 aa, Zea mays subsp. mays
HITHRLDRRASANITTTTTMDMDLTFPATSTAPPEPPAAVAGPLPAAAAACRELPSPRFAVVARSPPPLSPPPPPAAAPPPVTSSGAPTLTAVAPPAGAGGDATEEDRMDLLWEDFNEELARAGSCCCRAAAGGGPWPASDSESEPAAARGCAPVLRPSSRAGAVRHCRRRAGTWALLMRIFRRLFVVEKDRRLQAPAPPRRCQGEGALTRRPRTLALRSQAGRQLPFASHECNDVLSVSSARGRRTMHALLASYAIVRSTSKLRIILL

SEQ ID NO: 34418 - protein, 250 aa, Zea mays subsp. mays
MDMDLTFPATSTAPPEPPAAVAGPLPAAAAACRELPSPRFAVVARSPPPLSPPPPPAAAPPPVTSSGAPTLTAVAPPAGAGGDATEEDRMDLLWEDFNEELARAGSCCCRAAAGGGPWPASDSESEPAAARGCAPVLRPSSRAGAVRHCRRRAGTWALLMRIFRRLFVVEKDRRLQAPAPPRRCQGEGALTRRPRTLALRSQAGRQLPFASHECNDVLSVSSARGRRTMHALLASYAIVRSTSKLRIILL

SEQ ID NO: 34419 - protein, 248 aa, Zea mays subsp. mays
MDLTFPATSTAPPEPPAAVAGPLPAAAAACRELPSPRFAVVARSPPPLSPPPPPAAAPPPVTSSGAPTLTAVAPPAGAGGDATEEDRMDLLWEDFNEELARAGSCCCRAAAGGGPWPASDSESEPAAARGCAPVLRPSSRAGAVRHCRRRAGTWALLMRIFRRLFVVEKDRRLQAPAPPRRCQGEGALTRRPRTLALRSQAGRQLPFASHECNDVLSVSSARGRRTMHALLASYAIVRSTSKLRIILL

SEQ ID NO: 34420 - DNA, 1116 bp, Zea mays subsp. mays
gaatgagaccagttgccctctgccccaggcaaagctgcagctgcagctgccacagcggtgaccacgcacgctgcaccgcaccgcaccgacgggtgagacctgctgtgtccaccaaccgtgagcccagcaggcgaccgacgacgctagcttagactaggaaccaacaatggccacgcgccacctgctcctcctcctgctcgccgcgctgctcccggcggcggccacggcggacccggacgcggtgcaggactactgcgtgccggacacgggcggcgggcgcgggcgcgggcgggccgtggatctagcgctgctcccgtcctacccgtgcaggagccccgccaacctgacggcggcggacttcgccttcgcgggcgtgcgcgccgcgggcaacttctccgcggacacggggttcgcgggggtgtcggtgacccccgcgcagttcccggcgctgcacaccctcggcgtgtccttcgcgcgcgccgacctgtccgcggcgggcggggtcaacccgccgcactaccacccgcgcgccaccgagacggcgctggtcctggccggccgcgtctacgcgggattcgtcgactcgggcggccgcgtcttcgccaaggtgctcgagaaaggggaggtcatggtgttcccgcgcgccatggtgcacttccagatgaacgtcggcgacgagccggccacggtgtacggcaccttcaacagcgagaaccccggcatcgtgcgcatcccggcgaccgtgttcgggtccgggatcaaggacgccgtcctcgagagggcgttcggcctcgagccggaggagctccgccggctccagaagaggttcgggcctcctcccaagaccaagacggcggagatggacgattgatcggaagatcaggcactcgcgatcaagggggacatgattaattgattagttatattaagagcagcagactttgtgatctctggaatatatctccttccatttgttaatgtctgtatgaattatttggcggtggacggtggttatcatggaccgataatgccggtacgtacagatgggatgggcatgtggggttaggtgtcacattcaattgtctacgagatgtttatgggtttatatatattgtt

SEQ ID NO: 34421 - protein, 234 aa, Zea mays subsp. mays
MATRHLLLLLLAALLPAAATADPDAVQDYCVPDTGGGRGRGRAVDLALLPSYPCRSPANLTAADFAFAGVRAAGNFSADTGFAGVSVTPAQFPALHTLGVSFARADLSAAGGVNPPHYHPRATETALVLAGRVYAGFVDSGGRVFAKVLEKGEVMVFPRAMVHFQMNVGDEPATVYGTFNSENPGIVRIPATVFGSGIKDAVLERAFGLEPEELRRLQKRFGPPPKTKTAEMDD

SEQ ID NO: 34422 - DNA, 693 bp, Zea mays subsp. mays
  misc_feature (538)..(538): n is a, c, g, or t
  misc_feature (585)..(585): n is a, c, g, or t
  misc_feature (655)..(655): n is a, c, g, or t
acgctagtcgcccaaactacgcaaccgatatattccccagcacccccgttccagccgtccaaccgagacaccgcgtgcgaaccaagcagaccccagcagaagaagcgaagtcgtcgccggagcaggaggaagagcgagcagcaagatgtcgtggcaggcgtacgtcgatgaccacctgctgtgcgacatcgaaggccagcacctcagcgccgccgccatcgtcggccacgacggcagcgtctgggcacagtccgagaacttccccgagttaaagcctgaggaggttgctgggatgataaaggactttgatgaacctggaactcttgcaccaactggtctttttgttggaggtacgaagtacatggtgatccaaggtgaacctggagttgtcatccgaggaaagaagggcactggaggcattactatcaagaaaactggcatgtccttgattatcggtatctatgatgagccaatgactccagggcaatgcaatatggtggtggagaggctcggcgattacctgatcgaacagggcttntaagtttgtcataatgctattttggtcattgggcacttaagtttgcncctcatttggttctgtaatatgtgggcttgtgcatgtgcttggcgtattgcatgcagtgaataatttatnttcgcgttgggttggtgacaatgttgggaacggatttg

SEQ ID NO: 34423 - protein, 131 aa, Zea mays subsp. mays
  misc_feature (131)..(131): Xaa can be any naturally occurring amino acid
MSWQAYVDDHLLCDIEGQHLSAAAIVGHDGSVWAQSENFPELKPEEVAGMIKDFDEPGTLAPTGLFVGGTKYMVIQGEPGVVIRGKKGTGGITIKKTGMSLIIGIYDEPMTPGQCNMVVERLGDYLIEQGX

SEQ ID NO: 34424 - protein, 89 aa, Zea mays subsp. mays
ASRPNYATDIFPSTPVPAVQPRHRVRTKQTPAEEAKSSPEQEEERAARCRGRRTSMTTCCATSKASTSAPPPSSATTAASGHSPRTSPS

SEQ ID NO: 34425 - protein, 82 aa, Zea mays subsp. mays
  misc_feature (82)..(82): Xaa can be any naturally occurring amino acid
MIKDFDEPGTLAPTGLFVGGTKYMVIQGEPGVVIRGKKGTGGITIKKTGMSLIIGIYDEPMTPGQCNMVVERLGDYLIEQGX

SEQ ID NO: 34426 - DNA, 849 bp, Zea mays subsp. mays
  misc_feature (197)..(197): n is a, c, g, or t
acgatctctatttcccatttccgggcggctcccgttctccacctcaattattgcccacccatccccgctccctcctctcctctcctcccgtcccacccatctcctcgcaccagcgccgggggaatggcggccgcgctgtggacgctggtggtggcggtggccctgtcggcggcgctggcctcgaaccgccccgtggngcgggcggcgacggcggcggcggaggcggcgaacgaggtgctccgcgcgcaccagctgccggggggcctgctgccggcggggatcacggcgttccggcacgacgccgccacgggagcgttcgaggcccggctggacgcgccctgcacggcgcgcttcgaggtcggcctccgctacaacgccaccgtctccggggtcatcagccccggccagatcgcccgacatctccggcgtcgccgcgcaggacctcttcatgtggttccccgtccacgacatcaaggtcgacatcccctcctccggcgtcatctacttcaacgtcggcgtcgtcaagaagcacctcccgctcgccgtcttcgacgcgccgccggcttgcacgcccgacccgctcctgcagcggctggaggacgtgggcgagggcggattggccgtggtgggcgccgcggcgtcccggcgatgatgggtggaggagacggaggagggttcgacggcgccggcgagccaggatcacgagcgcagttttgagaggagaacgggcgatcgccggccttcttcgatgcacatagatagcgtgggcatttccatctgttttctttttctgcttcctactagtggctacactagtaaccaacctcgtctatcattgttcgtttcgcc

SEQ ID NO: 34427 - protein, 251 aa, Zea mays subsp. mays
  misc_feature (65)..(65): Xaa can be any naturally occurring amino acid
DLYFPFPGGSRSPPQLLPTHPRSLLSSPPVPPISSHQRRGNGGRAVDAGGGGGPVGGAGLEPPRXAGGDGGGGGGERGAPRAPAAGGPAAGGDHGVPARRRHGSVRGPAGRALHGALRGRPPLQRHRLRGHQPRPDRPTSPASPRRTSSCGSPSTTSRSTSPPPASSTSTSASSRSTSRSPSSTRRRLARPTRSCSGWRTWARADWPWWAPRRPGDDGWRRRRRVRRRRRARITSAVLRGERAIAGLLRCT

SEQ ID NO: 34428 - protein, 238 aa, Zea mays subsp. mays
  misc_feature (66)..(66): Xaa can be any naturally occurring amino acid
TISISHFRAAPVLHLNYCPPIPAPSSPLLPSHPSPRTSAGGMAAALWTLVVAVALSAALASNRPVXRAATAAAEAANEVLRAHQLPGGLLPAGITAFRHDAATGAFEARLDAPCTARFEVGLRYNATVSGVISPGQIARHLRRRRAGPLHVVPRPRHQGRHPLLRRHLLQRRRRQEAPPARRLRRAAGLHARPAPAAAGGRGRGRIGRGGRRGVPAMMGGGDGGGFDGAGEPGSRAQF

SEQ ID NO: 34429 - protein, 216 aa, Zea mays subsp. mays
  misc_feature (66)..(66): Xaa can be any naturally occurring amino acid
RSLFPISGRLPFSTSIIAHPSPLPPLLSSRPTHLLAPAPGEWRPRCGRWWWRWPCRRRWPRTAPWXGRRRRRRRRRTRCSARTSCRGACCRRGSRRSGTTPPRERSRPGWTRPARRASRSASATTPPSPGSSAPARSPDISGVAAQDLFMWFPVHDIKVDIPSSGVIYFNVGVVKKHLPLAVFDAPPACTPDPLLQRLEDVGEGGLAVVGAAASRR

SEQ ID NO: 34430 - protein, 197 aa, Zea mays subsp. mays
  misc_feature (25)..(25): Xaa can be any naturally occurring amino acid
MAAALWTLVVAVALSAALASNRPVXRAATAAAEAANEVLRAHQLPGGLLPAGITAFRHDAATGAFEARLDAPCTARFEVGLRYNATVSGVISPGQIARHLRRRRAGPLHVVPRPRHQGRHPLLRRHLLQRRRRQEAPPARRLRRAAGLHARPAPAAAGGRGRGRIGRGGRRGVPAMMGGGDGGGFDGAGEPGSRAQF

SEQ ID NO: 34431 - DNA, 1234 bp, Zea mays subsp. mays
gtaccacactgccgcatttttttctctctccccctcctctcgcgctccgacgactggtcgccgccgctgccccaacgccaggtgctagggtcttcggcggcgaccagaatttaacaggaatatcaaagatggacctatgcaatctctgcggtgacaatctccactgagtttctgaccaaaaccagacatttctgtaacttgatgaccaagcatacgaggaacaaaaaaaagttcatctcatcagcttagatcctcgcatcacaggaaaccctaaagtagttccagattttttaaaaaaatccagcaagataccatttgcagcgatagagaaatatgcatggacagaggcaacttgtccagtatgcatggaattcccacacaacgctgttcttctactctgttcatcacatggcaatggctattgcccatatatttgtgcttccagctaccaacactcaaactgtcttgatcagcctgtggagtcatgcagaaaagaagcctctgaggacccagatgcaatagagcttgcgtgtcccctttgccgtggtgaggtcaagtgttataccttggttgacccagctcggaagcagctgaatcacaagaagaggagctccatggaagatggttgttcatacatggttacatacatagagctctgaaagcatgtccaaaagaaacacccttctgcaaacccacgagctgtggaccccttacatgcttacagatggaagagacttttatttcggctgcttcagaagcagttcggctggctgcaactctataactactaagtattgtcgcatgaactaaagaatctacagccgcagccataaaaagtctagctggtctgttcaagtacttcagaggtgatgcgaaggtttatttctctcatgctgcagtttgaggagcttgtggctccttcgcgagagggtggtgaccgtcatggcgctaccattgacgattcactgcaaagtgccaatgcagaatccactgatctatatgatctctggtcctctcgccgaaatgtgagaatctgtgttgatcctgcaggcaatcttgcatgaatccctgacttgctccccctgccgataagccgattcacaattactgacctgacaaagcgatagtagcctccatctgttctcaggggatgctcaatggtaatcttgaaatgaaacagactgttaagctttgatggatttattcagtaacagtgataatggctggttgaatg

SEQ ID NO: 34432 - protein, 97 aa, Zea mays subsp. mays
MEFPHNAVLLLCSSHGNGYCPYICASSYQHSNCLDQPVESCRKEASEDPDAIELACPLCRGEVKCYTLVDPARKQLNHKKRSSMEDGCSYMVTYIEL

SEQ ID NO: 34433 - protein, 64 aa, Zea mays subsp. mays
MRRFISLMLQFEELVAPSREGGDRHGATIDDSLQSANAESTDLYDLWSSRRNVRICVDPAGNLA

SEQ ID NO: 34434 - protein, 62 aa, Zea mays subsp. mays
MHGQRQLVQYAWNSHTTLFFYSVHHMAMAIAHIFVLPATNTQTVLISLWSHAEKKPLRTQMQ

SEQ ID NO: 34435 - DNA, 1227 bp, Zea mays subsp. mays
tccgatcacaacaaagctgaaggttcacacatcttctatgcgtctgaccaccgtaagaaaaaagaaattaacagtgcagcttctgatcggccggccgttttgaactgcacacaaatctccaccaccgtgctcatgatcttgtgttgtgggctgtggcatccgacggcggagggtggagaggagaaacaattacgacggcggcggcctcctcctgctcctcctccaccgacggcaggctgggctcccacgtcctcccgactcccctgatgagctccatcggcagctggggcaccgggctactacggtctctccgccgcctccctttccgcctcttcttcttgttccccttctttgtccttgtcttctcctgctttctctcggccggctcatcgtcgtctttgctcggcctcggctccatggcgagcccctgttccactggcactagctccctggagcggcactcggaccaccggtccctggacacgaagtattccctcgcgctgcacgacggcatggaggtagtagtactagtagtaccgtcaccctccgcggccgcctcgccttccgacgacgacaccaccgccgcgccgtcgccttcttcttcttcttcgtcgtcgtcgtcctcctccacgtcgtcgtcagcgaaggcgccgattgagctctcggggatcttctgcttcagcctgacgacggtgctctcggggagcagcaggaacttctggcccgggaagagcggctcgagcgggcggacgacggcgccgtgcgggttgcggaacacgtccgggtgcgcgaggcagagccccggcgggtggttccggatgacggtgcaggccagcaccacgctcgggtacacctccaccacgccgccccgcatcaccacccgcaccaccgcctccttcctcgccgccaccgacgacgagctgctcagctccattgacacgcccagcgtcggcggcggcggattcttcttcttcttcttcttcggcatgccgatggcggcccggagcgcgcgccgcaccgacttgcccagcggcaacgtggcgcaggacggctgatgcacgccgtcgctgcgcggcatgtcgatcgatgtatgactcactggatgtctggataacaaaccaaatcgaagcacagaataaatagcatgcagtggcagtgcagagaagaagggaaggtggctggatgctatgcgtgttttgtcagctagtagtttcttgtttgcgttcg

SEQ ID NO: 34436 - protein, 262 aa, Zea mays subsp. mays
MSSIGSWGTGLLRSLRRLPFRLFFLFPFFVLVFSCFLSAGSSSSLLGLGSMASPCSTGTSSLERHSDHRSLDTKYSLALHDGMEVVVLVVPSPSAAASPSDDDTTAAPSPSSSSSSSSSSSTSSSAKAPIELSGIFCFSLTTVLSGSSRNFWPGKSGSSGRTTAPCGLRNTSGCARQSPGGWFRMTVQASTTLGYTSTTPPRITTRTTASFLAATDDELLSSIDTPSVGGGGFFFFFFFGMPMAARSARRTDLPSGNVAQDG

SEQ ID NO: 34437 - protein, 212 aa, Zea mays subsp. mays
MASPCSTGTSSLERHSDHRSLDTKYSLALHDGMEVVVLVVPSPSAAASPSDDDTTAAPSPSSSSSSSSSSSTSSSAKAPIELSGIFCFSLTTVLSGSSRNFWPGKSGSSGRTTAPCGLRNTSGCARQSPGGWFRMTVQASTTLGYTSTTPPRITTRTTASFLAATDDELLSSIDTPSVGGGGFFFFFFFGMPMAARSARRTDLPSGNVAQDG

SEQ ID NO: 34438 - protein, 180 aa, Zea mays subsp. mays
MEVVVLVVPSPSAAASPSDDDTTAAPSPSSSSSSSSSSSTSSSAKAPIELSGIFCFSLTTVLSGSSRNFWPGKSGSSGRTTAPCGLRNTSGCARQSPGGWFRMTVQASTTLGYTSTTPPRITTRTTASFLAATDDELLSSIDTPSVGGGGFFFFFFFGMPMAARSARRTDLPSGNVAQDG

SEQ ID NO: 34439 - DNA, 941 bp, Zea mays subsp. mays
ctctcactatcctttctcaatcttgttccttgcaacaaccgccggtcgcgcctcacgcccgccccgccggtgcccccgcccgccggcgcacgcccccacccgccgcgggtcctccccgcaccgccagcgcccccgtccgccagtcggccgctgcgcccctcaccgccccacccaaccgcgcccctcgtcggttcgtgctcgtggccatggcggtggcgaaggtcaaatcggtcgccctctccgtcagtcacaagtgttggaacatcttggccgccggttgggaagcccacctcaacactgtcaaggctgacaacaagggaagcaagaatgagatttacacatcgagggtgcactacatgatccacaagggcacgccctacttgattgtccccgagaacgacatgcacaacattaacattataattgatgagcgggggtctcttgcagtattcagtccgattcgtggccgagttccgagcttattaaagccatcgaagacacctcctcgtgttggtatgactggtgatgttctgcgcttgaaaaactcaaagtgcttatatggaggtgctccaaaaggccctcagctaagagagctggagcgtggtgctgacattcttgtcgcaactcctgggagattaaatgacattttggaaatgaatagagtgagcctgcaccaagtatcatatctggtccttgatgaagctgaccgtatgctcagcaaatatcattagtacaagtatattagacccctccagctaccttaccgacgcatgaacgagaagacgggttagactttgtcgaagccctcttcgccagtggaggtatcgaccatcactcgtcactgtaacccgatggtgatcggcgatcgtgagcttccatgttattgtgttatgatacttgagacttttattatgactatgtataagatactgtctcttatt

SEQ ID NO: 34440 - protein, 242 aa, Zea mays subsp. mays
LTILSQSCSLQQPPVAPHARPAGAPARRRTPPPAAGPPRTASAPVRQSAAAPLTAPPNRAPRRFVLVAMAVAKVKSVALSVSHKCWNILAAGWEAHLNTVKADNKGSKNEIYTSRVHYMIHKGTPYLIVPENDMHNINIIIDERGSLAVFSPIRGRVPSLLKPSKTPPRVGMTGDVLRLKNSKCLYGGAPKGPQLRELERGADILVATPGRLNDILEMNRVSLHQVSYLVLDEADRMLSKYH

SEQ ID NO: 34441 - protein, 174 aa, Zea mays subsp. mays
MAVAKVKSVALSVSHKCWNILAAGWEAHLNTVKADNKGSKNEIYTSRVHYMIHKGTPYLIVPENDMHNINIIIDERGSLAVFSPIRGRVPSLLKPSKTPPRVGMTGDVLRLKNSKCLYGGAPKGPQLRELERGADILVATPGRLNDILEMNRVSLHQVSYLVLDEADRMLSKYH

SEQ ID NO: 34442 - protein, 124 aa, Zea mays subsp. mays
MIHKGTPYLIVPENDMHNINIIIDERGSLAVFSPIRGRVPSLLKPSKTPPRVGMTGDVLRLKNSKCLYGGAPKGPQLRELERGADILVATPGRLNDILEMNRVSLHQVSYLVLDEADRMLSKYH

SEQ ID NO: 34443 - DNA, 754 bp, Zea mays subsp. mays
agcgccaacggccaacctcacgcagtcccgccgcatcgaatggcatccctccggcttgtggcaacgctagcgccctccggtcctccgccgccacctcgacgtaagcagcggagaccgtcctccgcagtccgtctgacaggtgggatgggcctggcggcagctgctgccgtggcggcggccgcggccgcctcaccaccggcgctcgccgcgctgtccgagccggcgaacgcgctctcgctgcccacctgggccgtccacgtctccagcgtcgccgagtgggtgacggcgatgtggctggtttgggactacggcgagaagacggggctcaagggttggaaaggcctctcgtgggggatggttccacttctaggtggagcaatgtgtgcttgcacgtggcatttcttctacaattcagagtctcttgaagttcttgtagcccttcaaggtgctctgacagtgattggtaacataacaatgtgcatagctgcataccgcatcttcaaagcatcccaggaaggctcaaaaacttcgtaggctgcaagattggatcttacagccggtttggcaaggtgatgagatatggagcttgcgtttctctgacatggatgagaatggagaactatttgattgttgtttttttttttggcccattagataaaagtttattggaaaggacaacctttcacagcaatatgcatcctctgctgtagtattatttctcaggggccaagataaaagacaatgtctggaactc

SEQ ID NO: 34444 - protein, 177 aa, Zea mays subsp. mays
SANGQPHAVPPHRMASLRLVATLAPSGPPPPPRRKQRRPSSAVRLTGGMGLAAAAAVAAAAAASPPALAALSEPANALSLPTWAVHVSSVAEWVTAMWLVWDYGEKTGLKGWKGLSWGMVPLLGGAMCACTWHFFYNSESLEVLVALQGALTVIGNITMCIAAYRIFKASQEGSKTS

SEQ ID NO: 34445 - protein, 164 aa, Zea mays subsp. mays
MASLRLVATLAPSGPPPPPRRKQRRPSSAVRLTGGMGLAAAAAVAAAAAASPPALAALSEPANALSLPTWAVHVSSVAEWVTAMWLVWDYGEKTGLKGWKGLSWGMVPLLGGAMCACTWHFFYNSESLEVLVALQGALTVIGNITMCIAAYRIFKASQEGSKTS

SEQ ID NO: 34446 - protein, 129 aa, Zea mays subsp. mays
MGLAAAAAVAAAAAASPPALAALSEPANALSLPTWAVHVSSVAEWVTAMWLVWDYGEKTGLKGWKGLSWGMVPLLGGAMCACTWHFFYNSESLEVLVALQGALTVIGNITMCIAAYRIFKASQEGSKTS

SEQ ID NO: 34447 - DNA, 544 bp, Zea mays subsp. mays
atgatgatccaggtggcaacctttgctgtaaactacatgggccacccatttaatcagagcatatcggagaacaagcccttcaagtacgcattgtatggagcggttgctttcttcacagtgatcacatcagatatgttcagggatttgaatgactacatgaagcttgagcccttgccggagggaatgcgtggcaagttgatgttgtgggctattctaatgttttgtggttgctacggatgggagtggctcctgcgatgggtgttcccagggaagatgccggcgtgggagaagcgtcagaaacaggcagttgcaaacttggagaaaaagcgcgactagaatccttttttattatttgcactttattctttaccttttgctgctgcccattggttacttggcagtacatactgatcatgttttgtcatagttgcattctaatctgtagcctaggggatttttttggagtgtaggccctaaatgataggaggatacacagggtcggcactttgcatactgatcagcaggattattaaaactttcagtt

SEQ ID NO: 34448 - protein, 111 aa, Zea mays subsp. mays
MMIQVATFAVNYMGHPFNQSISENKPFKYALYGAVAFFTVITSDMFRDLNDYMKLEPLPEGMRGKLMLWAILMFCGCYGWEWLLRWVFPGKMPAWEKRQKQAVANLEKKRD

SEQ ID NO: 34449 - protein, 110 aa, Zea mays subsp. mays
MIQVATFAVNYMGHPFNQSISENKPFKYALYGAVAFFTVITSDMFRDLNDYMKLEPLPEGMRGKLMLWAILMFCGCYGWEWLLRWVFPGKMPAWEKRQKQAVANLEKKRD

SEQ ID NO: 34450 - protein, 99 aa, Zea mays subsp. mays
MGHPFNQSISENKPFKYALYGAVAFFTVITSDMFRDLNDYMKLEPLPEGMRGKLMLWAILMFCGCYGWEWLLRWVFPGKMPAWEKRQKQAVANLEKKRD

SEQ ID NO: 34451 - DNA, 801 bp, Zea mays subsp. mays
agtcatggtggatggttctcatctacttttaggggataacatcttatacacaaagagcatatcttccttggctcatgcaaaaggtttacttgtggaagctgagttgggtaggctctcaggctctgaagatggcatgaccgttgaagaatatgaagcaagatttactgatgttgcccaggctgaggaatttattgatgagacaagcattgatgctctagcagtttgcattggaaatgttcatggaaaatatccacctagtggaccaaaccttaaattcgacttgctaaaggaccttcgtgcattaacattaaagaaaggagttagcttggtcctccatggagcatctggtctatctcatgagctcgtaaaggagtgcatagacttgggcgtgagaaaattcaatgtgaacaccgaggttcggaacagctacctggcgtccctcagaaagccagaaaaggacttgattcaggtgatggcgtctgctaaagaggcaatgaaagctgttgtagcagagaagctgcgcctgtttggatcgtgtgggaaagcctgagcgaagtacttgcgttgcgccggcaacatgcagtacaagaccgactgcatcatcgggttcgtgatgctgctgctactgtgcagttgcttacagttacagctcattgcgttgaacagctgaagtggttattgtactttgcagtgtagcgcaactaaggctaattcataaatcgtaataatgtatgtatgctgccccgctgtaaaaatgctccgtcgttaataaatgccatcgcgcttgctgtgcctttgttt

SEQ ID NO: 34452 - protein, 182 aa, Zea mays subsp. mays
VMVDGSHLLLGDNILYTKSISSLAHAKGLLVEAELGRLSGSEDGMTVEEYEARFTDVAQAEEFIDETSIDALAVCIGNVHGKYPPSGPNLKFDLLKDLRALTLKKGVSLVLHGASGLSHELVKECIDLGVRKFNVNTEVRNSYLASLRKPEKDLIQVMASAKEAMKAVVAEKLRLFGSCGKA

SEQ ID NO: 34453 - protein, 181 aa, Zea mays subsp. mays
MVDGSHLLLGDNILYTKSISSLAHAKGLLVEAELGRLSGSEDGMTVEEYEARFTDVAQAEEFIDETSIDALAVCIGNVHGKYPPSGPNLKFDLLKDLRALTLKKGVSLVLHGASGLSHELVKECIDLGVRKFNVNTEVRNSYLASLRKPEKDLIQVMASAKEAMKAVVAEKLRLFGSCGKA

SEQ ID NO: 34454 - protein, 138 aa, Zea mays subsp. mays
MTVEEYEARFTDVAQAEEFIDETSIDALAVCIGNVHGKYPPSGPNLKFDLLKDLRALTLKKGVSLVLHGASGLSHELVKECIDLGVRKFNVNTEVRNSYLASLRKPEKDLIQVMASAKEAMKAVVAEKLRLFGSCGKA

SEQ ID NO: 34455 - DNA, 700 bp, Zea mays subsp. mays
aatgaggggcagcgagatgttgaccgccgcggggggcaccggcacggccccgtccacggcctcctcctcgtcggcagcggcggcggacctggttgccggagccgggggctcgggcgccatcggcgtgggcgaaggaggcggcaacttccccctcgccgtcgctctcctcgccttcgcctgcgccaacttcatcaacctcctctccatctggttaaaagagaagaggtgggatgcaaggaaatttcttacttcagctggagtcatgtcatctctttctgcaactgtggggagcttggccgttgctgtgggtcaacgagaaggcgcagatagctctgcatttgccctcgcattggtttttgctgcagttgtaatgtatgatgcatcaggaattagatggcacacaggccgccaagctgcgttgttaaatcaaatagtctgtgaattcccagcagaacatccaatcatttcaacctttaggccactacgggaacctcttggacacagcccacttcaggtttttgcaggagcacttgttggctgtgcagtcgcttatttcatgggaaagtctgtatgaggaatgagctaggatttgcattgtacacgaatcctattgaccttaatatataaatcttcttgtaaaaaaaattctctttgtacatgtttgcctgtcataaatgtcagaattttcttttctgtttgc

SEQ ID NO: 34456 - protein, 190 aa, Zea mays subsp. mays
MRGSEMLTAAGGTGTAPSTASSSSAAAADLVAGAGGSGAIGVGEGGGNFPLAVALLAFACANFINLLSIWLKEKRWDARKFLTSAGVMSSLSATVGSLAVAVGQREGADSSAFALALVFAAVVMYDASGIRWHTGRQAALLNQIVCEFPAEHPIISTFRPLREPLGHSPLQVFAGALVGCAVAYFMGKSV

SEQ ID NO: 34457 - protein, 185 aa, Zea mays subsp. mays
MLTAAGGTGTAPSTASSSSAAAADLVAGAGGSGAIGVGEGGGNFPLAVALLAFACANFINLLSIWLKEKRWDARKFLTSAGVMSSLSATVGSLAVAVGQREGADSSAFALALVFAAVVMYDASGIRWHTGRQAALLNQIVCEFPAEHPIISTFRPLREPLGHSPLQVFAGALVGCAVAYFMGKSV

SEQ ID NO: 34458 - protein, 109 aa, Zea mays subsp. mays
NEGQRDVDRRGGHRHGPVHGLLLVGSGGGPGCRSRGLGRHRRGRRRRQLPPRRRSPRLRLRQLHQPPLHLVKREEVGCKEISYFSWSHVISFCNCGELGRCCGSTRRRR

SEQ ID NO: 34459 - DNA, 1166 bp, Zea mays subsp. mays
atatcaaatcttaaaatttgtctcctttcccacaagtcccgagagcagccgcgaagagagatcccgcgctcaaccaccgattctcggccgcggcctccctcggctcctccttgatcccttcctccttccattggtggtcgccggggacggggagcgaagaagcctcccttccttccctccgttggtcgccgggaggagtgaagaagcctcccttcctcttcccctccggtggtcgccaaagacggggagcgaagaagcctgttttcctccttccgtccggtggtcgccagggacgaggagcaaagatgttctatggggccatggtgtgggatccgtggctgatcgtgtcgcagatcgtatgcctgcagtgcctctactacttgtcgctgggcgtcgccatggcgctgctcgtcggcacccgcgtcccgcgactcaccctcctctacctcttcgacttctccacgctcaccccgcgcacccccacaggttggtgcgccatcgcatcattcctcctcgccgccgtcactggagctgggttcatgctttatgtgattgagcgagccaaaaagtgcctggactttgcagcaacactctacataatccatctcttcatgtgcattgtttatggtggatggccagcttcagttacatggtgggttcttaatataactggtttggcaaccatggctctcctgggtgaatacctatgcatccggcgggagttgaaagaaattccaatatcacggcttcgtgcaagtgtttaagctcacatgctaaaagattataggtgatttcaaatggtgttatcccaggaggtgcttgttaatatgttccttaaggaatacagtgactcacaatgaatgctttattctgtgatttccaatggatacttctcaaacttcgcatagagcgttcatctgatgcccaacctcccagttgaccatgatgaactgattgatcctagaggttccaccaacggaaatggcagctcactttctaaatcctacattcaacaagtcctcccttgccccttataaaaaagagttcctggcctgcctctcatgaaagaaaacttcctcccttgcctaagttctagctacagtttgctgcttgataatgtacgactagataccaacatgtgcattcttcagtaatatattgttctt

SEQ ID NO: 34460 - protein, 184 aa, Zea mays subsp. mays
YQILKFVSFPTSPESSREERSRAQPPILGRGLPRLLLDPFLLPLVVAGDGERRSLPSFPPLVAGRSEEASLPLPLRWSPKTGSEEACFPPSVRWSPGTRSKDVLWGHGVGSVADRVADRMPAVPLLLVAGRRHGAARRHPRPATHPPLPLRLLHAHPAHPHRLVRHRIIPPRRRHWSWVHALCD

SEQ ID NO: 34461 - protein, 152 aa, Zea mays subsp. mays
MFYGAMVWDPWLIVSQIVCLQCLYYLSLGVAMALLVGTRVPRLTLLYLFDFSTLTPRTPTGWCAIASFLLAAVTGAGFMLYVIERAKKCLDFAATLYIIHLFMCIVYGGWPASVTWWVLNITGLATMALLGEYLCIRRELKEIPISRLRASV

SEQ ID NO: 34462 - protein, 147 aa, Zea mays subsp. mays
MVWDPWLIVSQIVCLQCLYYLSLGVAMALLVGTRVPRLTLLYLFDFSTLTPRTPTGWCAIASFLLAAVTGAGFMLYVIERAKKCLDFAATLYIIHLFMCIVYGGWPASVTWWVLNITGLATMALLGEYLCIRRELKEIPISRLRASV

SEQ ID NO: 34463 - DNA, 960 bp, Zea mays subsp. mays
tccccctccccacctattttatggtgtgagcgtcagccgtcagcactcaccaagatccaacagacacttcttcaatccactagactagctaagcgcgccatggcaaagttcgctcttggtcaccaccgcgaggcctccgacgccggctgcgtccgtgccgtcctcgccgagctcatcctcaccttcctcttcgtcttcgccggcgttggctccgccatggcaacagggaagctggccggcggcggcggggacacggtagtgggcctgacggcggtggcgctggcgcacacgctggtggtggccgtcatggtgtcagcggggctgcacgtctccggcggccacatcaacccggccgtgacgctgggcctcgccgccacgggccgcatcacgctgttccgctccgcgctctacgtggccgcccagctgctcggctccacgctcgcctgcctcctcctcgctttcctcgcagttgccgacagcggcgtgcccgtgcacgcgctgggcgccggcgtcggcgcgctccggggcgtgctcatggaggccgtgctcaccttctcgctgctcttcgcggtctacgccaccgtcgtcgacccgcgccgcgccgtcggcggcatgggcccgctgctggtgggcctggtcgtcggcgccaacgtgctcgccggcgggcccttctccggcgcgtccatgaaccccgcgcgctccttcggccccgcgctcgtggctggggtgtgggccgaccactgggtctactgggtcgggcctcttatcggtgggccgctcgctgggctggtctatgacggcctcttcatggcccagggcggacacgaaccgcttcccagggatgacaccgacttctaggcagtaggtgtgtgttctcctgaataatttgaattgaaaacacatgtattgaagcctctaatgtttcggtttcgattcgaatggaatggaagcagcagtatc

SEQ ID NO: 34464 - protein, 285 aa, Zea mays subsp. mays
SPSPPILWCERQPSALTKIQQTLLQSTRLAKRAMAKFALGHHREASDAGCVRAVLAELILTFLFVFAGVGSAMATGKLAGGGGDTVVGLTAVALAHTLVVAVMVSAGLHVSGGHINPAVTLGLAATGRITLFRSALYVAAQLLGSTLACLLLAFLAVADSGVPVHALGAGVGALRGVLMEAVLTFSLLFAVYATVVDPRRAVGGMGPLLVGLVVGANVLAGGPFSGASMNPARSFGPALVAGVWADHWVYWVGPLIGGPLAGLVYDGLFMAQGGHEPLPRDDTDF

SEQ ID NO: 34465 - protein, 252 aa, Zea mays subsp. mays
MAKFALGHHREASDAGCVRAVLAELILTFLFVFAGVGSAMATGKLAGGGGDTVVGLTAVALAHTLVVAVMVSAGLHVSGGHINPAVTLGLAATGRITLFRSALYVAAQLLGSTLACLLLAFLAVADSGVPVHALGAGVGALRGVLMEAVLTFSLLFAVYATVVDPRRAVGGMGPLLVGLVVGANVLAGGPFSGASMNPARSFGPALVAGVWADHWVYWVGPLIGGPLAGLVYDGLFMAQGGHEPLPRDDTDF

SEQ ID NO: 34466 - protein, 213 aa, Zea mays subsp. mays
MATGKLAGGGGDTVVGLTAVALAHTLVVAVMVSAGLHVSGGHINPAVTLGLAATGRITLFRSALYVAAQLLGSTLACLLLAFLAVADSGVPVHALGAGVGALRGVLMEAVLTFSLLFAVYATVVDPRRAVGGMGPLLVGLVVGANVLAGGPFSGASMNPARSFGPALVAGVWADHWVYWVGPLIGGPLAGLVYDGLFMAQGGHEPLPRDDTDF

SEQ ID NO: 34467 - DNA, 1170 bp, Zea mays subsp. mays
acacctgaggctgcggcctttgtgccatccaggggtcgtcgtcgtcactctctccctctcgccctcgccatcgccctcgcggtctcgccgcggcataaacaaaacaagcaaagcaaggcaaaggcaaaggcaaaaccccacctcctcgctccgcacctcgtcgtctgcttttcctcggtgcggaacacaagcccctgccgcctccattaccgggctgtgcctgtgcgaggctgcgagcgtggtggctgtgtctggctttgcggcggcggcggtgatggtggtggagatggacggaggcgtgggagtagcagcaggaggaggaggaggagcgcagacgccggcgccggcgccgccgcggcggtggcgcttggcggacgagcggtgcgacctgcgcgccatggagacggactacgtgcggcggttccaccggcacgagccccgcgaccaccagtgctcctccgccgtcgccaagcacatcaaggcgcctgtccaccttgtctggtccctggtgaggcggttcgaccagccacagctcttcaagcccttcgtgagccggtgtgagatgaaggggaacatcgagatcggtagcgtcagggaggtcaacgtcaagtccgggctgccggccacaagaagcacggagaggctcgagctgttagacgacgacgagcgcattctcagcgtcaggttcgttggaggcgatcacaggctgcagaactactcctccatcctcaccgtccacccggaggtcatcgacggccggccagggacgctcgtcatcgagtccttcgtcgtcgacgtccccgacggcaacaccaaggacgagacctgctacttcgtggaggcgctgctcaagtgcaacctccggtcactcgcggaggtgtccgagggccaggtcatcatggaccagacggagccccttgaccggtgaataatgagtcggaccattatattgcattgcattctgtgtacgcgtagacctgttctccaatgcatggagcccctaggttcttgggaaactgctatgccgcgttcaaagtcaagttctttttcccccctccttgcgattgtgttttgctgttcttctctggcgttgtatgtcgcagagggagaagtgcagagtatgatgtgcttgatgaaaattgaaagaaaaaaaaagaatttagaactgcg

SEQ ID NO: 34468 - protein, 308 aa, Zea mays subsp. mays
HLRLRPLCHPGVVVVTLSLSPSPSPSRSRRGINKTSKARQRQRQNPTSSLRTSSSAFPRCGTQAPAASITGLCLCEAASVVAVSGFAAAAVMVVEMDGGVGVAAGGGGGAQTPAPAPPRRWRLADERCDLRAMETDYVRRFHRHEPRDHQCSSAVAKHIKAPVHLVWSLVRRFDQPQLFKPFVSRCEMKGNIEIGSVREVNVKSGLPATRSTERLELLDDDERILSVRFVGGDHRLQNYSSILTVHPEVIDGRPGTLVIESFVVDVPDGNTKDETCYFVEALLKCNLRSLAEVSEGQVIMDQTEPLDR

SEQ ID NO: 34469 - protein, 217 aa, Zea mays subsp. mays
MVVEMDGGVGVAAGGGGGAQTPAPAPPRRWRLADERCDLRAMETDYVRRFHRHEPRDHQCSSAVAKHIKAPVHLVWSLVRRFDQPQLFKPFVSRCEMKGNIEIGSVREVNVKSGLPATRSTERLELLDDDERILSVRFVGGDHRLQNYSSILTVHPEVIDGRPGTLVIESFVVDVPDGNTKDETCYFVEALLKCNLRSLAEVSEGQVIMDQTEPLDR

SEQ ID NO: 34470 - protein, 213 aa, Zea mays subsp. mays
MDGGVGVAAGGGGGAQTPAPAPPRRWRLADERCDLRAMETDYVRRFHRHEPRDHQCSSAVAKHIKAPVHLVWSLVRRFDQPQLFKPFVSRCEMKGNIEIGSVREVNVKSGLPATRSTERLELLDDDERILSVRFVGGDHRLQNYSSILTVHPEVIDGRPGTLVIESFVVDVPDGNTKDETCYFVEALLKCNLRSLAEVSEGQVIMDQTEPLDR

SEQ ID NO: 34471 - DNA, 1233 bp, Zea mays subsp. mays
gattcgattcaaaatccacgtatccaaatcgcaaggccacacccacacctccctcctcccctccacccagagcgagcccgcccgcccgcatcggatcacatcgcgccggagcctgacgccgtgccgtcaacgaatccatgggacccacgccgccgcacacggacgacactagggttgcgcagctcccgctccccggcggcgccgaagattacgtgcgcgactccatccacgcctccctgggcctccccgtctccgatcgctccctccgcctcaagctcctcgcctccgaggagcagcgccaccgcctccaggaccacgtcttctcgctcgaggaagacctccgcgcagcccagcgccgcatcgacctcctcaaggccgaggccgccatgaacgccgccggcctccgccgctgcgtcgaggaaaaggaggccgtggccgccgcatacgccgacctctccgacaagagcagcaaggagtgtcggctctacgagcgggacctcgagcgcgccatggagtcctgtgacgacctcgccagggagaacgacgacctccgcgcacgcctaaaccagaacacagatttggcagcattgatggtgcaagtgcaagaactacataaggaaaaggagattctgaagatgaatcttgatacggcggaggcagaggtcgtgacactgagtgaggacaacagggctcttgatgaagagatcaaaaggctgctgagtttgttggagaaggagcgacagcgccggtctgaaagaaagaaatctgccagtacatccaccaagaacaagcgcaagtcgtctagcttgagggatggcaacacagctggcagggctcttgatttcggctgtgcagattcttcaaggcatccattgtccccattgccccacaactccccagactacagggcgcacaagaagtgaaggcaagaaccaacaaaccaaccattcagagcatttccagattaccttgtgcgcaacgcgagtgttgcatcatgccgctaatgatctgattcaaatatggtccctgctaattttctttctttcctgtttcggttgctgcgatgtttttagaccaggagcaaatttatcagcaaatgtatgcttgcttcgcttgcattctattacattggtagaggttgctgttgtttttgtgatggttcttaaagaaatgagaaggcacatggtttgtttatggcttgatgtatcatgtatgatatgaaagcagcttctc

SEQ ID NO: 34472 - protein, 261 aa, Zea mays subsp. mays
MGPTPPHTDDTRVAQLPLPGGAEDYVRDSIHASLGLPVSDRSLRLKLLASEEQRHRLQDHVFSLEEDLRAAQRRIDLLKAEAAMNAAGLRRCVEEKEAVAAAYADLSDKSSKECRLYERDLERAMESCDDLARENDDLRARLNQNTDLAALMVQVQELHKEKEILKMNLDTAEAEVVTLSEDNRALDEEIKRLLSLLEKERQRRSERKKSASTSTKNKRKSSSLRDGNTAGRALDFGCADSSRHPLSPLPHNSPDYRAHKK

SEQ ID NO: 34473 - protein, 178 aa, Zea mays subsp. mays
MNAAGLRRCVEEKEAVAAAYADLSDKSSKECRLYERDLERAMESCDDLARENDDLRARLNQNTDLAALMVQVQELHKEKEILKMNLDTAEAEVVTLSEDNRALDEEIKRLLSLLEKERQRRSERKKSASTSTKNKRKSSSLRDGNTAGRALDFGCADSSRHPLSPLPHNSPDYRAHKK

SEQ ID NO: 34474 - protein, 137 aa, Zea mays subsp. mays
MESCDDLARENDDLRARLNQNTDLAALMVQVQELHKEKEILKMNLDTAEAEVVTLSEDNRALDEEIKRLLSLLEKERQRRSERKKSASTSTKNKRKSSSLRDGNTAGRALDFGCADSSRHPLSPLPHNSPDYRAHKK

SEQ ID NO: 34475 - DNA, 1021 bp, Zea mays subsp. mays
aatccacccttcccctttctcttcgtctccgtccgctcccggcatcgtcccctcttccccgtctcgcggtcgccgcccacgggcttcgattgatcttcttccggtgctggtggcaggtggacggatcgtgtccttgcttggccgcccacagcagcgatggacgacggggacctggacttctccaacccggacacgtacctgtgcccggcgctcggcactgacccgcccagcagctgctccatggacagctacttcgacgagatcctcaaggacacggagcaccacgcctgcacgcacacccacacctgcaacccgccggtgcacgacctatcgcacacccacacctgcgtccacgtccacaccaagatcgtcgcggcctcgcccggcgacgacactgccgactcgccgtccgagaacaacaccaacggcagcggcggcaacggcagcaacgccgcctccaagaagcgcccctcggggaaccgcgccgccgtcaggaagtaccgggagaagaagaaggcccacaccgcgtcgctggaggaggaggtggtccatctcagggcgctcaaccagcagctcgtgaagaagctccagagccacgccgcgctcgaggcggaggtggccaggctccgctgcctgctcgtcgacatcaggggcaggatcgagggggagattggcgcgtttccgtaccagaggccgccgccagcggccaagaacgtcgacctcgtgtccggtgttgaccaaggagggttccttgccggggctgctgcccaggttaccagttcctgtgatttcagatgcaacgatcaaatgtactgcagccctggaatgcagggcgctgttggcggccaggtgttgggacaaggtgcctgtgatgtctcgagtatccaatgcgttggaagcaccaggtctgcgtccactaagctacctgtctgcggggggatggatgcagtacctgctgcctgcttgccaaatgttcaaaacaagtgatggtacataactttcgtttccctgctatgctttt

SEQ ID NO: 34476 - protein, 276 aa, Zea mays subsp. mays
MDDGDLDFSNPDTYLCPALGTDPPSSCSMDSYFDEILKDTEHHACTHTHTCNPPVHDLSHTHTCVHVHTKIVAASPGDDTADSPSENNTNGSGGNGSNAASKKRPSGNRAAVRKYREKKKAHTASLEEEVVHLRALNQQLVKKLQSHAALEAEVARLRCLLVDIRGRIEGEIGAFPYQRPPPAAKNVDLVSGVDQGGFLAGAAAQVTSSCDFRCNDQMYCSPGMQGAVGGQVLGQGACDVSSIQCVGSTRSASTKLPVCGGMDAVPAACLPNVQNK

SEQ ID NO: 34477 - protein, 248 aa, Zea mays subsp. mays
MDSYFDEILKDTEHHACTHTHTCNPPVHDLSHTHTCVHVHTKIVAASPGDDTADSPSENNTNGSGGNGSNAASKKRPSGNRAAVRKYREKKKAHTASLEEEVVHLRALNQQLVKKLQSHAALEAEVARLRCLLVDIRGRIEGEIGAFPYQRPPPAAKNVDLVSGVDQGGFLAGAAAQVTSSCDFRCNDQMYCSPGMQGAVGGQVLGQGACDVSSIQCVGSTRSASTKLPVCGGMDAVPAACLPNVQNK

SEQ ID NO: 34478 - protein, 192 aa, Zea mays subsp. mays
IHPSPFSSSPSAPGIVPSSPSRGRRPRASIDLLPVLVAGGRIVSLLGRPQQRWTTGTWTSPTRTRTCARRSALTRPAAAPWTATSTRSSRTRSTTPARTPTPATRRCTTYRTPTPASTSTPRSSRPRPATTLPTRRPRTTPTAAAATAATPPPRSAPRGTAPPSGSTGRRRRPTPRRWRRRWSISGRSTSSS

SEQ ID NO: 34479 - DNA, 706 bp, Zea mays subsp. mays
gacgacgactttctagtctctctcctcccgcctccgagtccgacccgtccgagaaaacaaaacaaaccaaaagaagaaaagaaaggcgacgacgagggagggaaggctcgccgcgagatctgggggagctcccattcccaggatgcacgacttctgcttcaccatcccctacgggttcgccgtgctggccggcggcgtgctgggctacctccgccgcggcagcaccgcctccctggcggggggcgccggcgccggcgcgctcctcctcctcgcgggcttcgtcagcctcaaggccttccagaagcgccgcaactcctacgtcgccctcgcgctcgagacgctttgtgcattagccttaacttacgttatggggcaaagattcctcgagacttcgaagattatgccagctggtgccgttgctggtctcagtgccgtgatgtccgcattttatctgttcaaaattgcaacgggcggcaaccacatcccaccaccaaagaaagagtaaaccaggctttaacttgtaaattatgtttgattgatctcgaagaagactacgagcgatttgtgttgtctagttgcatggtaacttcagggactaacatcttcttccccatttgtaattcggttagaatgtaccatggtttgtgaacaatgtaaaagaaataaagatgtgattcacggaaatgaatatgatgtttactgaggt

SEQ ID NO: 34480 - protein, 215 aa, Zea mays subsp. mays
DDDFLVSLLPPPSPTRPRKQNKPKEEKKGDDEGGKARREIWGSSHSQDARLLLHHPLRVRRAGRRRAGLPPPRQHRLPGGGRRRRRAPPPRGLRQPQGLPEAPQLLRRPRARDALCISLNLRYGAKIPRDFEDYASWCRCWSQCRDVRILSVQNCNGRQPHPTTKERVNQALTCKLCLIDLEEDYERFVLSSCMVTSGTNIFFPICNSVRMYHGL

SEQ ID NO: 34481 - protein, 120 aa, Zea mays subsp. mays
MHDFCFTIPYGFAVLAGGVLGYLRRGSTASLAGGAGAGALLLLAGFVSLKAFQKRRNSYVALALETLCALALTYVMGQRFLETSKIMPAGAVAGLSAVMSAFYLFKIATGGNHIPPPKKE

SEQ ID NO: 34482 - protein, 116 aa, Zea mays subsp. mays
RRLSSLSPPASESDPSEKTKQTKRRKERRRRGREGSPRDLGELPFPGCTTSASPSPTGSPCWPAACWATSAAAAPPPWRGAPAPARSSSSRASSASRPSRSAATPTSPSRSRRFVH

SEQ ID NO: 34483 - DNA, 1787 bp, Zea mays subsp. mays
cctcccctcccctccctgctcctctaccccttcctctcccggcgaccagctggcctctcctttgttgaggcgagagacccccacccgatccggcgatggacgccgcgtccaggccgcctccgccccacggagcaggggtccgcgtccgcgccccgctggtggagtctgtctcctgctactgcagattagatacaggccttaaaactgttgttgaggccaggaagtttgttcctggcgcgaaaatgtgcatgcaacctgaagtcaaacaaaacaagcgcaagtcaaggggctcaaaaaaggaaaggtgcaggactcaagcaccacttttacctggccttcctgatgatcttgctattgcctgccttatacgagttcctcgacttgaacagcccaaactcaggatggtttgcaaaagatggaaccgtcttttgtctgggaattacttttactccttgcgtaagaaaattggagtggcagaagaatgggtgtatgtctttaaaagggaccgtgaagggaagatatcctggtatgcctttgatccactccaccagctatggaagtcactcccaccagttccacaagagtattcagaagcattgggctttgggtgtgccgttctgagtggttgctatctgtacttgtttggcgggaaagatcctttgaggggttctatgaggcgtgttgtattctacaatgctcgtacaaacaaatggcaccgggctccggatatgatgaggaaacgtcacttttttggttcttgtgtaataaacaattgtctctatgttgctggaggagagtgtgaaggaatacagagaacactgcagtctgcggaagtttatgatccaaataggaacagatgggcctgtgttactgaaatgaacaatgggatggtgcctttcattggagttgtatatgatggcaagtggttcttaaaggggctagattcccatcgccaagtaactagtgaggtctacttaccatcatccaatacatggtcagcaattgatgatgagatggtcacaggctggcggaacccaagtatttctttcaatggccgtctctattcagctgactgccgggatggctgcaagcttagagtctatgatgagaacacaggaacatggacaaggttcatggacagcaagcaccacttgggcagctcacgtgcctttgaagctgcagctttggtgtcactaaatgggaaactctgtgtcatcaggaacaacatgagcataactcttgttgatgtctccaacccaacaatgagtgttgagacagatagtgcgcgcatgtgggaaactgttgttcggaagggccagcacaggtcgtttgtggcgaacttatggtcgagcattgcaggacggaacttaaagagtcacattatccattgccatgtgctgcaagtttgagggcaggttttgttagtgggaacatgatcaagttttttaagaagcaaaaggttcagatcagtgacagaaccctccatttcgaaggtagtaaggtttcattgcagaatcgcggggaaaaaggtcattggcgtgccactgctgcccccaaagtcccaaatagttatttgctctcttccagaactgaaaattccaattactttctggcaacatttgaagactcttatcattaatggataaggtttttcagattttgagtgcaaaccagaaagtgagtaggaacttccctagtgtaatgacattttccccttgctggcaggctgggaaatgtgtttggtggatatattggtctcttatcatatttatctatctttgcattgt

SEQ ID NO: 34484 - protein, 437 aa, Zea mays subsp. mays
MDAASRPPPPHGAGVRVRAPLVESVSCYCRLDTGLKTVVEARKFVPGAKMCMQPEVKQNKRKSRGSKKERCRTQAPLLPGLPDDLAIACLIRVPRLEQPKLRMVCKRWNRLLSGNYFYSLRKKIGVAEEWVYVFKRDREGKISWYAFDPLHQLWKSLPPVPQEYSEALGFGCAVLSGCYLYLFGGKDPLRGSMRRVVFYNARTNKWHRAPDMMRKRHFFGSCVINNCLYVAGGECEGIQRTLQSAEVYDPNRNRWACVTEMNNGMVPFIGVVYDGKWFLKGLDSHRQVTSEVYLPSSNTWSAIDDEMVTGWRNPSISFNGRLYSADCRDGCKLRVYDENTGTWTRFMDSKHHLGSSRAFEAAALVSLNGKLCVIRNNMSITLVDVSNPTMSVETDSARMWETVVRKGQHRSFVANLWSSIAGRNLKSHIIHCHVLQV

SEQ ID NO: 34485 - protein, 388 aa, Zea mays subsp. mays
MCMQPEVKQNKRKSRGSKKERCRTQAPLLPGLPDDLAIACLIRVPRLEQPKLRMVCKRWNRLLSGNYFYSLRKKIGVAEEWVYVFKRDREGKISWYAFDPLHQLWKSLPPVPQEYSEALGFGCAVLSGCYLYLFGGKDPLRGSMRRVVFYNARTNKWHRAPDMMRKRHFFGSCVINNCLYVAGGECEGIQRTLQSAEVYDPNRNRWACVTEMNNGMVPFIGVVYDGKWFLKGLDSHRQVTSEVYLPSSNTWSAIDDEMVTGWRNPSISFNGRLYSADCRDGCKLRVYDENTGTWTRFMDSKHHLGSSRAFEAAALVSLNGKLCVIRNNMSITLVDVSNPTMSVETDSARMWETVVRKGQHRSFVANLWSSIAGRNLKSHIIHCHVLQV

SEQ ID NO: 34486 - protein, 386 aa, Zea mays subsp. mays
MQPEVKQNKRKSRGSKKERCRTQAPLLPGLPDDLAIACLIRVPRLEQPKLRMVCKRWNRLLSGNYFYSLRKKIGVAEEWVYVFKRDREGKISWYAFDPLHQLWKSLPPVPQEYSEALGFGCAVLSGCYLYLFGGKDPLRGSMRRVVFYNARTNKWHRAPDMMRKRHFFGSCVINNCLYVAGGECEGIQRTLQSAEVYDPNRNRWACVTEMNNGMVPFIGVVYDGKWFLKGLDSHRQVTSEVYLPSSNTWSAIDDEMVTGWRNPSISFNGRLYSADCRDGCKLRVYDENTGTWTRFMDSKHHLGSSRAFEAAALVSLNGKLCVIRNNMSITLVDVSNPTMSVETDSARMWETVVRKGQHRSFVANLWSSIAGRNLKSHIIHCHVLQV

SEQ ID NO: 34487 - DNA, 904 bp, Zea mays subsp. mays
taatcgaaaacatgaaaaatgaggagaatcagacagatgctgtgcaaggtggccatgaaggtctagatgagctggttaggagaaaagaagaaaatgacaagagtaatatttctcggggtaggacagaagtgaaacgacacatggtacagcaccttgagacggagatcgagaaattatccatccgttccagccctcttggtaaagacagacagtacagtaggtactggtttttcaagcgtgaaggaagactttttgttgaaactgcagattccagagaatggggttactacagcactaaggaagagcttgatgcgctcatggactcattgaatgtcaaaggtataagggagagagctttgaaacggcaactagagaagttctatagtaagataagtaatgccctagagaaacgatcaaaagacatcgcaaacaagacgttacttgaagagggtgtgctgcgccgttccacacgtgtccgggcccagccaaaggacaatccgtccatggcattcctcaagtatgtcaacaagtggagggataactgaggtactctgagctatgtaggcttttgctcggttaggtcgttgcagtgactcgccatactcatggctggtttactgacacctcattagctagtgaaacctgtatcagaacctacttttcttctctctctttttttttaaattttaacttagctttcatgtgtgttcacaaatgaacccctcccccccctccgtaattgaactatgctaggctttaccgtttttagaacagtggccaaattttttgcatggatgatgtaaacgtgacaaggccggtgtggagatgcttcgatctgcaagggtgggccgcgggccaatgttggggatttttgacttaatactactgccttgaattttttagc

SEQ ID NO: 34488 - protein, 180 aa, Zea mays subsp. mays
IENMKNEENQTDAVQGGHEGLDELVRRKEENDKSNISRGRTEVKRHMVQHLETEIEKLSIRSSPLGKDRQYSRYWFFKREGRLFVETADSREWGYYSTKEELDALMDSLNVKGIRERALKRQLEKFYSKISNALEKRSKDIANKTLLEEGVLRRSTRVRAQPKDNPSMAFLKYVNKWRDN

SEQ ID NO: 34489 - protein, 177 aa, Zea mays subsp. mays
MKNEENQTDAVQGGHEGLDELVRRKEENDKSNISRGRTEVKRHMVQHLETEIEKLSIRSSPLGKDRQYSRYWFFKREGRLFVETADSREWGYYSTKEELDALMDSLNVKGIRERALKRQLEKFYSKISNALEKRSKDIANKTLLEEGVLRRSTRVRAQPKDNPSMAFLKYVNKWRDN

SEQ ID NO: 34490 - protein, 134 aa, Zea mays subsp. mays
MVQHLETEIEKLSIRSSPLGKDRQYSRYWFFKREGRLFVETADSREWGYYSTKEELDALMDSLNVKGIRERALKRQLEKFYSKISNALEKRSKDIANKTLLEEGVLRRSTRVRAQPKDNPSMAFLKYVNKWRDN

SEQ ID NO: 34491 - DNA, 826 bp, Zea mays subsp. mays
aatgcagaggtcgcgttgacggcacaggaagcagcagcagagcaggccaggaacaagaacagcaatgaactcgccgccgggcgacgacggcggcggcagcgcgcacggcttattcgggtcgggcggcatccgcgggttcggctacggcgtcggcgtgtccatcggcatcctcctggtggccaccaccatcgcgctcgccatctacttctgcacgcgcacctccatgcccgtgtccgccgccgcgccagcgccgccgcggcagggcggcgacgccgggcggggcatcgacgaggccacgctcgaggcgttcccggcggtggcctacgcggaggcgaggaaggcggcggcgaaccaggcgtgctgctgccccgtctgcctcgagtgctacggcgacggcgacgtggtccgggtgctccccgactgcggccacctgttccaccgcgcctgcgtggacccctggctccggcagcgccccacgtgcccggtctgccgcacgtcgccgctgcccagccccatgcccacgccgctcgccgaggtcacgccgctggcgtccgcgcggccgtcgtgagggctgtttctgttttctctctcgcgcgttcgtgtgtctggcctctgctgctgcactctgattgcttcgtgccttcgtcccttgtgccgtttcatttctacgtacacagcacggtgtgtgatcagcgcgcgaatcagtttggttaggacttaggagtttcagaatttgttccttttgaggagtgtaaatctgggtacatagtagggtagctaagatgttattttgtctctcaagattatgaaattcgatcactttggc

SEQ ID NO: 34492 - protein, 237 aa, Zea mays subsp. mays
NAEVALTAQEAAAEQARNKNSNELAAGRRRRRQRARLIRVGRHPRVRLRRRRVHRHPPGGHHHRARHLLLHAHLHARVRRRASAAAAGRRRRAGHRRGHARGVPGGGLRGGEEGGGEPGVLLPRLPRVLRRRRRGPGAPRLRPPVPPRLRGPLAPAAPHVPGLPHVAAAQPHAHAARRGHAAGVRAAVVRAVSVFSLARSCVWPLLLHSDCFVPSSLVPFHFYVHSTVCDQRANQFG

SEQ ID NO: 34493 - protein, 167 aa, Zea mays subsp. mays
MNSPPGDDGGGSAHGLFGSGGIRGFGYGVGVSIGILLVATTIALAIYFCTRTSMPVSAAAPAPPRQGGDAGRGIDEATLEAFPAVAYAEARKAAANQACCCPVCLECYGDGDVVRVLPDCGHLFHRACVDPWLRQRPTCPVCRTSPLPSPMPTPLAEVTPLASARPS

SEQ ID NO: 34494 - DNA, 923 bp, Zea mays subsp. mays
acaacagcgcatagctccgccgcttcgcaagctagctagcaagaacatctcgatcgatcgatcgatcgagcggctctaattaacttgcttccgattcgacctttggtcctcgggctagctagcatctctgatcgcgcctcgcaagtcgcaagcaagcaagaacacacctatcgatcggtatatacgtgggcagcgggcagcatggaggtggaaccggaggcggtcagctgcgagtgctgcggcctggaggaggagtgcacgggcgactacatcggcggcgtgcgggcctacttcgggggcaggtggctgtgcggcctgtgctcggaggccgccaagtacgaggccggcaaggagtgcgcccgccgcggagcctcagccgccgcggcgccgcccgacgtggaggaggccgtgcgcgcgcacatggccatctgccgcacgctcaagggcggcggcgggcccgcgggccgcgtcgccgagggcatgcgccagatgctgcgcaccgcgttcttggaagaaggccgcgtcgtcgtctgccgcgtcgccgaggggacccgcggccggtcaccaccgcgcctcgccggtgtccgtcgggccctgatacggttcggtggtcgcgctgcgggcgggccggggccggggccggggccgaggcgcgtgcagcagccctggcttcgctcgcggtcctttcgtctcgtcgacggcttgtacgcgccctctaggacggcaccggctggccggtacgtaccggcattcttgcctactagctagatcgccgtgtgggtcttcgtagcttctatgtaacttttcgtttttgatccattccagtatatatgtatatatatatgtaaggatcgatcggaccaatcaagcctttgatatgatggcttagtttgattaatcgaggaatcaaaaggcgtttatgc

SEQ ID NO: 34495 - protein, 188 aa, Zea mays subsp. mays
MEVEPEAVSCECCGLEEECTGDYIGGVRAYFGGRWLCGLCSEAAKYEAGKECARRGASAAAAPPDVEEAVRAHMAICRTLKGGGGPAGRVAEGMRQMLRTAFLEEGRVVVCRVAEGTRGRSPPRLAGVRRALIRFGGRAAGGPGPGPGPRRVQQPWLRSRSFRLVDGLYAPSRTAPAGRYVPAFLPTS

SEQ ID NO: 34496 - protein, 115 aa, Zea mays subsp. mays
MAICRTLKGGGGPAGRVAEGMRQMLRTAFLEEGRVVVCRVAEGTRGRSPPRLAGVRRALIRFGGRAAGGPGPGPGPRRVQQPWLRSRSFRLVDGLYAPSRTAPAGRYVPAFLPTS

SEQ ID NO: 34497 - protein, 95 aa, Zea mays subsp. mays
MRQMLRTAFLEEGRVVVCRVAEGTRGRSPPRLAGVRRALIRFGGRAAGGPGPGPGPRRVQQPWLRSRSFRLVDGLYAPSRTAPAGRYVPAFLPTS

SEQ ID NO: 34498 - DNA, 1024 bp, Zea mays subsp. mays
  misc_feature (122)..(122): n is a, c, g, or t
  misc_feature (419)..(419): n is a, c, g, or t
  misc_feature (434)..(434): n is a, c, g, or t
  misc_feature (757)..(757): n is a, c, g, or t
atcagtagctagctgttcgaagctttcagccgagcaccatcgtcacagtcagtagtagctaagcatatttctttctccgagtgatttgcgctgagcgatcagttcatccagagcgagcggantgaagctgagctgagcgagcttgcgtcgttgcttgagagaccctgccatggcttcccaccaggacaaggctagctaccaggccggcgaaaccaaggcccgcaccgaggagaagaccgggcaggcggtgggggcgaccaaggacacggcgcaacgccaaggaccgggcggcggacgcggcggggcacgcggcgggcaagggccaggacgccaaggaggccaccaagcagaaggcgtccgacaccggcagctacctgggcaagaagaccgacgaggccaagcacaaggccggcgagacnacggaggcgaccaancagaaggccggcgagacgacggaggcgaccaagcagaaggccggcgagacgacggaggccgccaggcagaaggcagccgacgccatggaggcagccaagcagaaggccgccgaggccgggcagtacgccaaggacaccgccgtctccggcaaggacaagtccggtggcgtcatccagcaggccactgagcaggtgaagagcgcggcggcgggcgccaaggacgcggtgatgagcacgctggggatgggcggggacgacaagcagggcgacgccaacaccaacaccaacactaacaccaacaccaacaccaacaaggacacctntaccatcaccagggatcactagacgcatgtatgcacacgcacttggtccgatcctgtcgtccgtgaccctgtttgcttgtttcgcgagtccagtatgggttttgtgcatgttcccagtgtcatggtttccttttctacgaatttggtgttgtaattttgatttgcaggtacgttgctgtgttttttctgcgtcatcaagtgtctgtaaacgagtcgggcgggtttgagtgtcctttgttgtgataataaagttggtaaatcgtaatt

SEQ ID NO: 34499 - protein, 150 aa, Zea mays subsp. mays
  misc_feature (84)..(84): Xaa can be any naturally occurring amino acid
  misc_feature (89)..(89): Xaa can be any naturally occurring amino acid
MASHQDKASYQAGETKARTEEKTGQAVGATKDTAQRQGPGGGRGGARGGQGPGRQGGHQAEGVRHRQLPGQEDRRGQAQGRRDXGGDQXEGRRDDGGDQAEGRRDDGGRQAEGSRRHGGSQAEGRRGRAVRQGHRRLRQGQVRWRHPAGH

SEQ ID NO: 34500 - protein, 86 aa, Zea mays subsp. mays
  misc_feature (80)..(80): Xaa can be any naturally occurring amino acid
MEAAKQKAAEAGQYAKDTAVSGKDKSGGVIQQATEQVKSAAAGAKDAVMSTLGMGGDDKQGDANTNTNTNTNTNTNKDTXTITRDH

SEQ ID NO: 34501 - DNA, 870 bp, Zea mays subsp. mays
acccaccacgtcgtcgacgccgacgcgtcgccaacggaaacttctcaaagcgccgacggggttccacggcgcccgtaatttcaaccgtccccaccgccgcgggctcctcctgacggaccccgaaggtcgccgtgactcccgcccctcgccggcgacgtccggcatgccgtcctcccgcctcttccgcctcttcctcctcgcgacgctctcgctcctcctcgcgcaaaccctagcctcctctgcccccgtgcccgccgccgcgtcggcgtcggcggagtccaccgacccctgcgcggccgccgtagctgacggggaagctgacgttccgctgtgccccgtgcggtgcttccgcccagacccggtctgcggcgccgacggggtcacgtactggtgcggctgccccgaggcgacctgcgcgggcgcccgcgtggcgcgacgcggctactgcgaggtcggcgccggctccggctccgcgcccgtctcgggccaggcgctgctgctcgtccacatcgtctggctcttcgtgctcggcgccgccgtcctcctcggtttcctctgatgcgcctctcgcgttcccgcagttgtattcccctcccccatattctttgtcccgatcttctgttggttcttgtcttcttgttgtgctgttgatggctgaggaattgcgatgtaacgatttagttgtaattttgagaggatccgtctagagatgtaacccggttcttcgtcagatctgtcgggttcagctgtgctcaacacttcgaagcagagctgcgatgattggttgtcaaatgttgtaggttgaggtcatgtaaaacagttgtaaattcctcattaacgaatcgcattgatcagattgttttgttgtcc

SEQ ID NO: 34502 - protein, 185 aa, Zea mays subsp. mays
PTTSSTPTRRQRKLLKAPTGFHGARNFNRPHRRGLLLTDPEGRRDSRPSPATSGMPSSRLFRLFLLATLSLLLAQTLASSAPVPAAASASAESTDPCAAAVADGEADVPLCPVRCFRPDPVCGADGVTYWCGCPEATCAGARVARRGYCEVGAGSGSAPVSGQALLLVHIVWLFVLGAAVLLGFL

SEQ ID NO: 34503 - protein, 131 aa, Zea mays subsp. mays
MPSSRLFRLFLLATLSLLLAQTLASSAPVPAAASASAESTDPCAAAVADGEADVPLCPVRCFRPDPVCGADGVTYWCGCPEATCAGARVARRGYCEVGAGSGSAPVSGQALLLVHIVWLFVLGAAVLLGFL

SEQ ID NO: 34504 - DNA, 1176 bp, Zea mays subsp. mays
atcgaagatcgatgtgaatccgtggaagggagggcggaggagaaggaagaagaggggtcgaggccgaatccgccggtgagaaggggagcgatggcgaggctggcggtggccgcgagggcgttctccgctgcggcctccggcggcggcgtgtccttggtgcagggggcgtcccgggggatcggcctcgagttcgtgcggcagctgctgcgcagaagcgatggaggccgcgtcgtcgctacgtgccgcacgccgggttccgcggccgagctccagaagctcagggaggagcacgcgcccgggcgcctcaccgtgctgccgctcgacgtcaccgacgagagcaccatagaggcagctgcggcctcaatcacggagacccacggttctcttgaccttctgatcaactccgccggcatcctctcgatcccgaacgtgatacagccagagactacgctaagcaaggttcagaagtcgtccctgatgctggcatacgaggtgaacgcagtcggccctatcctagtgatcaagcacatgtggcctctgctgaagatcggaggccgctccgagactaggagagggttcgcgcttgttgcaaacatgagcgctcgagtcagctccataggagacaacgctctgggtggctggcatgcgtacagagcttctaaaacagcgctgaatcagttgaccaagacagtgtcggtggagttcggcaggaaggacaacatcgcctgcgtcctgctgcatcctggaaccgtggacaccgacctctcgaggccgtttcagaggaatgtccccgagggtaaactcttcacgagggagttctctgtgcagaggcttctctccgtcatcgacagcgtcaagaaaggcgacaacggcaagttcttcgcgtgggatggccaagaaatcccttggtgaacggtcatcgtaactcgcttgagtctatagcacagcacacagcagtcaacaacgcccctggttttaatccaacgttgtttttttttcaacaagccaagcgaacagatgcattatttctagctaaagggtcctctttttgtgttatcaccgacctaaagttcaagatgttttttttcttcttctaagtgttgaaatattagacatttttaaatcaaattctgaatataaatcatgactaaatcaaaagaactgaagtataaagcc

SEQ ID NO: 34505 - protein, 303 aa, Zea mays subsp. mays
IEDRCESVEGRAEEKEEEGSRPNPPVRRGAMARLAVAARAFSAAASGGGVSLVQGASRGIGLEFVRQLLRRSDGGRVVATCRTPGSAAELQKLREEHAPGRLTVLPLDVTDESTIEAAAASITETHGSLDLLINSAGILSIPNVIQPETTLSKVQKSSLMLAYEVNAVGPILVIKHMWPLLKIGGRSETRRGFALVANMSARVSSIGDNALGGWHAYRASKTALNQLTKTVSVEFGRKDNIACVLLHPGTVDTDLSRPFQRNVPEGKLFTREFSVQRLLSVIDSVKKGDNGKFFAWDGQEIPW

SEQ ID NO: 34506 - protein, 273 aa, Zea mays subsp. mays
MARLAVAARAFSAAASGGGVSLVQGASRGIGLEFVRQLLRRSDGGRVVATCRTPGSAAELQKLREEHAPGRLTVLPLDVTDESTIEAAAASITETHGSLDLLINSAGILSIPNVIQPETTLSKVQKSSLMLAYEVNAVGPILVIKHMWPLLKIGGRSETRRGFALVANMSARVSSIGDNALGGWHAYRASKTALNQLTKTVSVEFGRKDNIACVLLHPGTVDTDLSRPFQRNVPEGKLFTREFSVQRLLSVIDSVKKGDNGKFFAWDGQEIPW

SEQ ID NO: 34507 - DNA, 810 bp, Zea mays subsp. mays
aatccccacaacaccagaatccgcgaatcacagacgcgtctatctcagcttgctgcactgcactaccctgccctgccatcatatcgtacgtgagcccggccgagcgagagcgagggagaggcatggctgctccgaagctcgcgacgctgggcgctggccgtgctcctggcggcgaccgtggtggctcccccggccgcggtgcgcgcgggcgatgtcgtgctccaccgtgtacagcacggctgatgccgtgccctgccgttcgtccagatgggcgggggccatgccggccccagccgtgctgcggcggcatccgcagcctgctgcagcaggccaacaacacccccgaccgccgcactatctgcggctgcctcaagaacgtcgccaacggcgccaacgggagcggcacctacatcagccgcgccgccgcgctgcccagcaagtgcggcgtcgccctgccgtacaagatcagcaccaacgttaactgcaacacgattaattaagtgatgaggcgtcctgtgcgcgtccgggcgaggaatgcatgcatggcgctggcggagagtaataaaataatgctactggtattttaagctatatcgaggtgtgcctgtctctagtcatttattatggtgtttaggaatggtctacacagttcgtaacggtgtatcgtggatgcatgttgccgcgagcagagtacgtaggcatgaaccgatgtgtgcgcttctgtctgtttactctctctatgtagtaatgtgtgggtgctttgatccagatgtattcgctcgtgagtcgtggaagtagatcgtttcagtg

SEQ ID NO: 34508 - protein, 165 aa, Zea mays subsp. mays
SPQHQNPRITDASISACCTALPCPAIISYVSPAERERGRGMAAPKLATLGAGRAPGGDRGGSPGRGARGRCRAPPCTARLMPCPAVRPDGRGPCRPQPCCGGIRSLLQQANNTPDRRTICGCLKNVANGANGSGTYISRAAALPSKCGVALPYKISTNVNCNTIN

SEQ ID NO: 34509 - protein, 159 aa, Zea mays subsp. mays
IPTTPESANHRRVYLSLLHCTTLPCHHIVREPGRARARERHGCSEARDAGRWPCSWRRPWWLPRPRCARAMSCSTVYSTADAVPCRSSRWAGAMPAPAVLRRHPQPAAAGQQHPRPPHYLRLPQERRQRRQRERHLHQPRRRAAQQVRRRPAVQDQHQR

SEQ ID NO: 34510 - protein, 125 aa, Zea mays subsp. mays
MAAPKLATLGAGRAPGGDRGGSPGRGARGRCRAPPCTARLMPCPAVRPDGRGPCRPQPCCGGIRSLLQQANNTPDRRTICGCLKNVANGANGSGTYISRAAALPSKCGVALPYKISTNVNCNTIN

SEQ ID NO: 34511 - DNA, 832 bp, Zea mays subsp. mays
agtgttgcagataaggttttggattgagcgaagcataggctcgacttgaaccaagaacaaggtacgtaggagcaacccaaagaatctgttgcttctgcattgcagaggtagtagcaaggatcagcaatgcctccccctccgccgcctcttcacaagtgctgctcgtcgccgtcactgcctaagctgcagcgacctgcggaaagcaggcacaagcctatctagcaggcggtggagccaggctgcggatcaccaggagagcccacgccgcctccctcctcctcctcggcctggcgggcgctgcggtgccggcgccggtcagggcggcggaggacgacgggagcagcggaggggagggcgtcctcggcgccatcaagtccatcttcgatcccaacgagacgaccaaggccgggaaggtgctgcccaaggcgtacctcaaggcggccagggaggtggtgcgcacgctccgcgagtcgctggaggaggacgacggtggcgacatggccaggttccgccgcaacgccgacgccgccaaggagtccatcagggcgttcctgggcgggtggagaggccagcaggccgtcaccgacgaggagtcgtacgtcgcgctggagaaggcgatcaggtcgctggccgagttctactccaaggcagggccgtccgcctcgcttccacaggacgtcaagaacaagatcctcgatgacctcagcgccgcagacgcctacctgtagattttgcttctcctcagggacattgtattgcattgcatgcaacgcacatctcagacgatgatatggtttcgctctagtataatgacccgcaaaagctttccttc

SEQ ID NO: 34512 - protein, 76 aa, Zea mays subsp. mays
MARFRRNADAAKESIRAFLGGWRGQQAVTDEESYVALEKAIRSLAEFYSKAGPSASLPQDVKNKILDDLSAADAYL

SEQ ID NO: 34513 - DNA, 954 bp, Zea mays subsp. mays
aggcaagtttgtcaggcaaccgagcaagttcgggagggactccatttttcttctgacgttcaccccgagtgggcgaccgccgccgccgccgccgccccacgccaggtgcacagatcttcgtcgggcccttggccggcgacgaacgcccagcagattatcgggtatacatgcgcacaaccatgtcctttaccgggtccgcccctgccaatgatccctgcctcgccaagatcctgtccaagcaaggggacaacaaagttctctttgcggacaaggtattaaagttcacccaatctggaaagatgaaaagacgcatcctagtgatcacagactttgctctataccttgttgaccccgaggccaacatattgaagaggaggatagcacttgcagctgtggataagctatgcattagcaacctcagtgataacttctttgcgatcattgtgccgactgagtacgattgtttaatggccagcactagaaagaaggaaattgttgatgtcattgttaaggctatcaagagcacatctgagtatgaacctgaggtggcttcgtctaacaggtttgagtatcatgcagctgctgaagttattaaggtggttgaatttgaggaagtcgatggaggcacgaaaaccaggatcacgaacagggagaaatcatgattcagatctcatggatgggtggtttcctgtaaactgtatagccttgtttttcatggatgggtggttttttatcttcacatgtcacgtgtagtgtgtaccgcaacctcaatgtcagttcttttttgttttgctctgtattattttactagaaaactgcatggcgctggcgtcccccattcgcatcgagcccatgactttgtcgatgccctgtaactggacaggatcatgcaattgtttgcctgccctgctgaacccctggaacattgttaagcttgacattcgagatagttcc

SEQ ID NO: 34514 - protein, 164 aa, Zea mays subsp. mays
MRTTMSFTGSAPANDPCLAKILSKQGDNKVLFADKVLKFTQSGKMKRRILVITDFALYLVDPEANILKRRIALAAVDKLCISNLSDNFFAIIVPTEYDCLMASTRKKEIVDVIVKAIKSTSEYEPEVASSNRFEYHAAAEVIKVVEFEEVDGGTKTRITNREKS

SEQ ID NO: 34515 - protein, 160 aa, Zea mays subsp. mays
MSFTGSAPANDPCLAKILSKQGDNKVLFADKVLKFTQSGKMKRRILVITDFALYLVDPEANILKRRIALAAVDKLCISNLSDNFFAIIVPTEYDCLMASTRKKEIVDVIVKAIKSTSEYEPEVASSNRFEYHAAAEVIKVVEFEEVDGGTKTRITNREKS

SEQ ID NO: 34516 - protein, 120 aa, Zea mays subsp. mays
MKRRILVITDFALYLVDPEANILKRRIALAAVDKLCISNLSDNFFAIIVPTEYDCLMASTRKKEIVDVIVKAIKSTSEYEPEVASSNRFEYHAAAEVIKVVEFEEVDGGTKTRITNREKS

SEQ ID NO: 34517 - DNA, 622 bp, Zea mays subsp. mays
atccagaaccgaaaaaaaaaactctgcggagattgaccgaccaccaccaccgcctgcgttcccgcgccgccaccgccatggctgccgctgccccccatgcatactcctccctcgtgcctgtttcggctgcgcggcctctctccggaagcacagtttctttcggtgcttcgtgccacaagtggaggaaggttccggcatggcgactccactgtgttactgaagacgaagcagaggaagtcaaagattttggagtcaatatggcactatccatgctaaaattttacaaacgagaaatatcacctttactaccttcaagctgccgatatgtaccaacttgcagtgagtactctatgcaggcgtacaaacgatatggtgttgtaaagggttccatcttgactgcttggcgcctttgccgttgtaatcctcttggtggatatgggtatgatcctccaaaatggtttggcgaggaagatgtacctctgcaatagtaatgcctagtaattgaaagtacaggcattgtaattcttcagatccagacttgcagcagtttttatgtaatttactgaaactaaacccagaaacacaaggataaaattctgcaatatctatgcacctctgaagg

SEQ ID NO: 34518 - protein, 161 aa, Zea mays subsp. mays
PEPKKKTLRRLTDHHHRLRSRAATAMAAAAPHAYSSLVPVSAARPLSGSTVSFGASCHKWRKVPAWRLHCVTEDEAEEVKDFGVNMALSMLKFYKREISPLLPSSCRYVPTCSEYSMQAYKRYGVVKGSILTAWRLCRCNPLGGYGYDPPKWFGEEDVPLQ

SEQ ID NO: 34519 - protein, 136 aa, Zea mays subsp. mays
MAAAAPHAYSSLVPVSAARPLSGSTVSFGASCHKWRKVPAWRLHCVTEDEAEEVKDFGVNMALSMLKFYKREISPLLPSSCRYVPTCSEYSMQAYKRYGVVKGSILTAWRLCRCNPLGGYGYDPPKWFGEEDVPLQ

SEQ ID NO: 34520 - DNA, 554 bp, Zea mays subsp. mays
acgcgagaaggcagggggagagaaaatggcgtatttgtcccgcacagccgccgccgtcgccgtcgccgtgaggtcggcggtccgctccgcacctctcactggccgcgtcctcggagcgccactgccttcccttgcctcgccttccgctgcccggtccgcccgaatcctccgcaggacggcggccgcggcgtcggcggggctggagactctaatgccgctgcacagcgcggtggcggccgcgcggcttaggtcctgcatcgccgtcgactcctcgtgctggagctcgctctcgcaaggtttaaacaagcgcatctgatcatggctaggagctgagcacagaagagaagtgaggacaacgagttagaacgaagtcatctcttttgcagatatttgtaacatgtactactttggttgttgctctatgtgtttgctcatgtcttcaatggagcatgcaaaatagttccttgtaacttgcttggctcttattttcagtttggtcatgagctatgctgaaggaaaaaacttgtacttgtaataaaaaaacacttcagttt

SEQ ID NO: 34521 - protein, 104 aa, Zea mays subsp. mays
REKAGGEKMAYLSRTAAAVAVAVRSAVRSAPLTGRVLGAPLPSLASPSAARSARILRRTAAAASAGLETLMPLHSAVAAARLRSCIAVDSSCWSSLSQGLNKRI

SEQ ID NO: 34522 - protein, 96 aa, Zea mays subsp. mays
MAYLSRTAAAVAVAVRSAVRSAPLTGRVLGAPLPSLASPSAARSARILRRTAAAASAGLETLMPLHSAVAAARLRSCIAVDSSCWSSLSQGLNKRI

SEQ ID NO: 34523 - protein, 82 aa, Zea mays subsp. mays
TREGRGRENGVFVPHSRRRRRRREVGGPLRTSHWPRPRSATAFPCLAFRCPVRPNPPQDGGRGVGGAGDSNAAAQRGGGRAA

SEQ ID NO: 34524 - DNA, 924 bp, Zea mays subsp. mays
  misc_feature (586)..(586): n is a, c, g, or t
  misc_feature (595)..(595): n is a, c, g, or t
  misc_feature (645)..(646): n is a, c, g, or t
agacacaccagtggtctggtactctggtcgcgccgatagctgccgctgaacgtctgaacccaccaccgcgacagcgcgcagcggctcggacgacggccatggcgaaccgtccgtcgcgctcgcgcctgctggtcctggcgctcgcagtcgcagcgctactagccaccacgcgcgtggaagcctccacgccaacgccaacgccggcgccggcgccggggccgtcggcggactgcacggacgcgctgctggggctggcggggtgcctgggctacgtgcaggaggggagcacgtcggcggcgcccgacccgtcctgctgctcggggctcagggacgtggtgcgcggggaggtggcctgcctctgccagctcttccagggcggccaggacttcggcctctcgctcaacatgaccagggccctgcagctgcccgccgcgtgcaaggtcaagacgccgcccgtcagcaagtgccacgttccggctccctcgtccggggccccagacttcgggcagtcgccgacgccgtcgccgtcaaccccttcgggatcacaggcagcaacccggagccagaccagcgcgctccagcgccntccccagcngttccgccgctgccggcctctcggcaccaccacgggccttcaccttcctnntgccgcgactctgttggtgtaccggatcttgtgagctgggctcactcacccgagttcatgcgctccgcccgtaccaccttacccccagtctgaccacaaatcatgtaccgagatatgtatcttgtgagcgtttccgtttcgttttagtagcactgcttttgaacctgcggctgttcatggatttcgctgccgctgagtaagtacatcacgatgttcatttgaagggctcgcagcttactgagggccgtgttcaaatatacttatacaaccttatagtg

SEQ ID NO: 34525 - protein, 225 aa, Zea mays subsp. mays
  misc_feature (195)..(195): Xaa can be any naturally occurring amino acid
  misc_feature (198)..(198): Xaa can be any naturally occurring amino acid
  misc_feature (215)..(215): Xaa can be any naturally occurring amino acid
THQWSGTLVAPIAAAERLNPPPRQRAAARTTAMANRPSRSRLLVLALAVAALLATTRVEASTPTPTPAPAPGPSADCTDALLGLAGCLGYVQEGSTSAAPDPSCCSGLRDVVRGEVACLCQLFQGGQDFGLSLNMTRALQLPAACKVKTPPVSKCHVPAPSSGAPDFGQSPTPSPSTPSGSQAATRSQTSALQRXPQXFRRCRPLGTTTGLHLPXAATLLVYRIL

SEQ ID NO: 34526 - protein, 193 aa, Zea mays subsp. mays
  misc_feature (163)..(163): Xaa can be any naturally occurring amino acid
  misc_feature (166)..(166): Xaa can be any naturally occurring amino acid
  misc_feature (183)..(183): Xaa can be any naturally occurring amino acid
MANRPSRSRLLVLALAVAALLATTRVEASTPTPTPAPAPGPSADCTDALLGLAGCLGYVQEGSTSAAPDPSCCSGLRDVVRGEVACLCQLFQGGQDFGLSLNMTRALQLPAACKVKTPPVSKCHVPAPSSGAPDFGQSPTPSPSTPSGSQAATRSQTSALQRXPQXFRRCRPLGTTTGLHLPXAATLLVYRIL

SEQ ID NO: 34527 - DNA, 832 bp, Zea mays subsp. mays
aatcaatccggcgagtggccgagtggggtaggttgtgtgcggcatgacgaccacgcgcgaccgtggcgccggcggcggatcggcgtcgagggtcggtgacggggacgtcgacctgggcgagggctgggactggggcgccatcccgcggctcctctcctccgcctgcctcttcctctgctccggaggctgttttggttgctgcgataagactgtaaagcaactgggtgaactgtccagaaacttgatcacccaggaccaaattaccattggagagccattttggagcacaaccaccatcgaggttgaaccagcagatctcagtggtgttacttcagtcaatacatctaacttggcctctggaactggtagcagtcataaccttcctggacttggtaataatggacttgttctgtgggaacatacaaggcaggagtggactgaaactagaagtctgcggctgaaggtgaagcaggttcgtgaaccagtattgagttggaatgcagcatatgagagtctgcttggatcaaataagccatttcctcaacccattcctcttcatgagatggtcgatttccttgtggacatctgggagcaggaggggctgtatgactagcgcaaatgatttcatgggataacatctgggataacacatagttgttcctcaagagaggggaaaaagaatgacatagagggtgtaggcttgggatgtggtgatgagttggcctgtcatacttgtttttgtcaatggaggcctgctgtacttgcagaatacagagctgtggttgtaagcttgtaagaagtcctgatactaatagtggctttgtttaatttg

SEQ ID NO: 34528 - protein, 189 aa, Zea mays subsp. mays
MTTTRDRGAGGGSASRVGDGDVDLGEGWDWGAIPRLLSSACLFLCSGGCFGCCDKTVKQLGELSRNLITQDQITIGEPFWSTTTIEVEPADLSGVTSVNTSNLASGTGSSHNLPGLGNNGLVLWEHTRQEWTETRSLRLKVKQVREPVLSWNAAYESLLGSNKPFPQPIPLHEMVDFLVDIWEQEGLYD

SEQ ID NO: 34529 - DNA, 593 bp, Zea mays subsp. mays
  misc_feature (328)..(328): n is a, c, g, or t
  misc_feature (402)..(402): n is a, c, g, or t
  misc_feature (438)..(438): n is a, c, g, or t
aaaaaacctactgacgagctcgccatggcctccctctcctctgccgccgtcaccgccccttccttcgccgcaccagcgccagcccgcgccgtggtcagaaggaggtccttcaccgtgcgcgcctctctccgcaaggccaccggcaccgccgccgtggcaatggctgccagcgccctgcttgccggcggtgccatggcccaggaggtgctgctgggcgcaggcgacggcgggctcgtcttcgagcccagccagttcaccgtcaaggccggcgacaccatcacattcaagaacaacgccggcttcccgcacaacgtcgtcttcgacgaanacgaggtgccgagcggcgtcgacgccaccaagatctcgcaggaggagtacctcaacgcgccaggcgagacctantccgtcaccctcaccgtgccgggaacctacggcttntactgcgagccgcatcaaggagccggaatggtcggcaagatcaccgtcaactaattaagctagctatcgatcgatatccattcatgtattagctgttgcttcctgctttgtactccgccgatctgtccatctctacatgttttcgtcttccccct

SEQ ID NO: 34530 - protein, 164 aa, Zea mays subsp. mays
  misc_feature (109)..(109): Xaa can be any naturally occurring amino acid
  misc_feature (134)..(134): Xaa can be any naturally occurring amino acid
  misc_feature (146)..(146): Xaa can be any naturally occurring amino acid
KNLLTSSPWPPSPLPPSPPLPSPHQRQPAPWSEGGPSPCAPLSARPPAPPPWQWLPAPCLPAVPWPRRCCWAQATAGSSSSPASSPSRPATPSHSRTTPASRTTSSSTXTRCRAASTPPRSRRRSTSTRQARPXPSPSPCREPTAXTASRIKEPEWSARSPSTN

SEQ ID NO: 34531 - protein, 163 aa, Zea mays subsp. mays
  misc_feature (110)..(110): Xaa can be any naturally occurring amino acid
  misc_feature (134)..(134): Xaa can be any naturally occurring amino acid
  misc_feature (146)..(146): Xaa can be any naturally occurring amino acid
KKPTDELAMASLSSAAVTAPSFAAPAPARAVVRRRSFTVRASLRKATGTAAVAMAASALLAGGAMAQEVLLGAGDGGLVFEPSQFTVKAGDTITFKNNAGFPHNVVFDEXEVPSGVDATKISQEEYLNAPGETXSVTLTVPGTYGXYCEPHQGAGMVGKITVN

SEQ ID NO: 34532 - protein, 155 aa, Zea mays subsp. mays
  misc_feature (102)..(102): Xaa can be any naturally occurring amino acid
  misc_feature (126)..(126): Xaa can be any naturally occurring amino acid
  misc_feature (138)..(138): Xaa can be any naturally occurring amino acid
MASLSSAAVTAPSFAAPAPARAVVRRRSFTVRASLRKATGTAAVAMAASALLAGGAMAQEVLLGAGDGGLVFEPSQFTVKAGDTITFKNNAGFPHNVVFDEXEVPSGVDATKISQEEYLNAPGETXSVTLTVPGTYGXYCEPHQGAGMVGKITVN

SEQ ID NO: 34533 - DNA, 1370 bp, Zea mays subsp. mays
aaagttaacctctcgtgctcgggcactttctttttccttcccccctgtgcgctcggccgcctccgccgctgcctcgctccctccgcgcccaccacggaggcgcacgcgcgggcgcagcgtccctcgcgtgcctcgccttccgcactgctctgtccgcccgcctggctcctgcctcctcctcctcctcctcctctagggttagggcacgcgtcgcgggggcccgtggcgcccggcgcaatgcggaggccgtcgggggccggcgtgccgagccgccgccgccgcgcgatccaggtgctcgtggcggtctccctcgcctacgcggtcgccgtgctgctcctcgagtcgcccctcgtgtccacgtcgctgcccggggcgggggcgtccgccgcggcgtcgcggaagctccacctcgacggcgcgtgggagggcgcgggacgagcagcgccggcgcgccccgcgaagcacccgcacagggagaccctctcggcggacgcggggcggggacgggcgcgccggttggcggggatcgtctctggcctcgagctccgccacctcaactccacccgctccggctcgctccgcaaggtcgccgcggaggccgccgagtcaggggcccgcgtgttctccgacctggaggctctagcgacggccttgactttctcgggcgattcgtcaggggaggaggaggagaagagcaagtgcccgcactcgatcgtcctcagcggcgacgagttccgggagagggggcgggcggtggagctgccgtgcgggctcacgctgggttcgtatatcacggtcgccgcgacgccgcacgaggcgcaccctgagcgggatcctaagatcacgctgctcagggagggggaagagccgatcatggtgtcgcagttcatgatggagctgcaggggctcaagacggtggacggcgaggatccgcccaggattctccacttcaacccccgcctccgcggcgactggagcggcaagccggtgatcgagcagaacacctgctaccgcatgcagtggggcactccgctccgctgcgatggctggaggtcccgtgccgacgaggagactgtggatgggttggccaagtgtgagaagtggattcgggatgatgaagggcggtccgaggagtcgaaaacatcatggtggctgaaccggctcattggccgtacgaagaccgtctccgttgattggccatacccattcgtggagaaccacctgtttgttctaactctcactgctggattggaaggttaccatgtgaatgttgatggacggcatgtgacatcatttccataccgcactgtaagtggctctcgcttgtacatgaatggatggggaatgcaatgcaatattaatattggtgc

SEQ ID NO: 34534 - protein, 456 aa, Zea mays subsp. mays
KVNLSCSGTFFFLPPCALGRLRRCLAPSAPTTEAHARAQRPSRASPSALLCPPAWLLPPPPPPPLGLGHASRGPVAPGAMRRPSGAGVPSRRRRAIQVLVAVSLAYAVAVLLLESPLVSTSLPGAGASAAASRKLHLDGAWEGAGRAAPARPAKHPHRETLSADAGRGRARRLAGIVSGLELRHLNSTRSGSLRKVAAEAAESGARVFSDLEALATALTFSGDSSGEEEEKSKCPHSIVLSGDEFRERGRAVELPCGLTLGSYITVAATPHEAHPERDPKITLLREGEEPIMVSQFMMELQGLKTVDGEDPPRILHFNPRLRGDWSGKPVIEQNTCYRMQWGTPLRCDGWRSRADEETVDGLAKCEKWIRDDEGRSEESKTSWWLNRLIGRTKTVSVDWPYPFVENHLFVLTLTAGLEGYHVNVDGRHVTSFPYRTVSGSRLYMNGWGMQCNINIG

SEQ ID NO: 34535 - protein, 377 aa, Zea mays subsp. mays
MRRPSGAGVPSRRRRAIQVLVAVSLAYAVAVLLLESPLVSTSLPGAGASAAASRKLHLDGAWEGAGRAAPARPAKHPHRETLSADAGRGRARRLAGIVSGLELRHLNSTRSGSLRKVAAEAAESGARVFSDLEALATALTFSGDSSGEEEEKSKCPHSIVLSGDEFRERGRAVELPCGLTLGSYITVAATPHEAHPERDPKITLLREGEEPIMVSQFMMELQGLKTVDGEDPPRILHFNPRLRGDWSGKPVIEQNTCYRMQWGTPLRCDGWRSRADEETVDGLAKCEKWIRDDEGRSEESKTSWWLNRLIGRTKTVSVDWPYPFVENHLFVLTLTAGLEGYHVNVDGRHVTSFPYRTVSGSRLYMNGWGMQCNINIG

SEQ ID NO: 34536 - DNA, 956 bp, Zea mays subsp. mays
aaggcattagtagagcgtttttgcagccaggtaggccgcgaacgcgacgagaagcccggccggaagcatcttgcaagttgcaaccagcagccccaccggcgcggcgccgcgcggtccgcacggtggcgtagcagtagcgcttggggttggcctcgagcacgctgcgcgctccgccgagcccgggcctcatcatggagcggcggcaggtgagcgcgcacacggcgccgccgaggaaggcgacggccaggagcgcgagcgccagcgtggcgtacaccgcgcagccgcggccgcgcacgagccacgctgccgcgtcgcccagcagcttctcggcggcgacgtccgggagcttctggaccaccgcggtggccagccaggcgtagaggccgcggaggagcttggccgccgtctggaggcagggccccgaggcgtcggccgcggagctcaccgccgcggcgcccgccgggaggttgtcgacggcgacggccagccaggcccacaggtagctcgtgagccatgccaccgaggctctcgacgcctcgacgacggcgtccctcgtcacggccgccgggagcgtctcggtggcaatggcccttgccgcttcgagcgcgcccgtgacgacggccgagaggttggcgatgaggatggccatggatagtggctggctcgcttgcttgctttggcctctgctctctggtttgctctctctggtctctgccttccgatccaaatggctgcgcctgcgctagtgagtgaagcttaaagtcgaacgtgcgacggagaggttaaggcggtaaaagggaaaccatatgctacgatgccccgaaagccgcttgcttagccatgctgtgttgcgcatgtgattgcagtagtgcacacctctgctacctgctttcaccggacgctttctgtaggataaacggccattgcattatctactaaacccagcatccagatct

SEQ ID NO: 34537 - protein, 69 aa, Zea mays subsp. mays
KALVERFCSQVGRERDEKPGRKHLASCNQQPHRRGAARSARWRSSSAWGWPRARCALRRARASSWSGGR

SEQ ID NO: 34538 - protein, 62 aa, Zea mays subsp. mays
MERRQVSAHTAPPRKATARSASASVAYTAQPRPRTSHAAASPSSFSAATSGSFWTTAVASQA

SEQ ID NO: 34539 - protein, 53 aa, Zea mays subsp. mays
MALAASSAPVTTAERLAMRMAMDSGWLACLLWPLLSGLLSLVSAFRSKWLRLR

SEQ ID NO: 34540 - DNA, 579 bp, Zea mays subsp. mays
  misc_feature (296)..(296): n is a, c, g, or t
cattcaatccggccgggccgcgcgcacgcgcaccaccggcacgcacatcaaatctcagccttcacccctctcacactgtcttcactcggttcgagcaaggggggcagcgagcgaagcggtaggtagcagcagtgtacgtgctgccgccaagctagtgccaatggcgagggcggtggcgatgctcgtggccctggcgctggtcgtggtggtggcggtggcgagcgcgggcggggcggcggcgcagcagtgcagcgcggcgcagctggcggcgtgcgccccggcgatcatcagcgggntcgccgcccacggcgtcgtgctgctccaacctgcgcgcgcaggagccgtgcttctgccagtacgcgcgcaacccggcgtacagcagctacatcaacagccccaacgcccgccgcacgctcgcctcctgcggcatcgccgtcccgagctgctaggcgctatagctccgcgtggtgtgggtgaataaaagatgcatgcatgtcgatctgtgcctactgttatcgtgtttgtgcctcgtgtgtaatatgaacaatatatatattatttaccaagagcggttgtgtc

SEQ ID NO: 34541 - protein, 159 aa, Zea mays subsp. mays
  misc_feature (99)..(99): Xaa can be any naturally occurring amino acid
IQSGRAARTRTTGTHIKSQPSPLSHCLHSVRARGAASEAVGSSSVRAAAKLVPMARAVAMLVALALVVVVAVASAGGAAAQQCSAAQLAACAPAIISGXAAHGVVLLQPARAGAVLLPVRAQPGVQQLHQQPQRPPHARLLRHRRPELLGAIAPRGVGE

SEQ ID NO: 34542 - protein, 106 aa, Zea mays subsp. mays
  misc_feature (46)..(46): Xaa can be any naturally occurring amino acid
MARAVAMLVALALVVVVAVASAGGAAAQQCSAAQLAACAPAIISGXAAHGVVLLQPARAGAVLLPVRAQPGVQQLHQQPQRPPHARLLRHRRPELLGAIAPRGVGE

SEQ ID NO: 34543 - protein, 100 aa, Zea mays subsp. mays
  misc_feature (40)..(40): Xaa can be any naturally occurring amino acid
MLVALALVVVVAVASAGGAAAQQCSAAQLAACAPAIISGXAAHGVVLLQPARAGAVLLPVRAQPGVQQLHQQPQRPPHARLLRHRRPELLGAIAPRGVGE

SEQ ID NO: 34544 - DNA, 1154 bp, Zea mays subsp. mays
attgcctatcaaccgctactcacgccgtactgtctgatcggcaacacctcgtgtacacgtaggcccggagatatggcggcatcgccggtggccatcggcacggcggtgttccagcgggggccactccgcgtggaggcgaggcacgtcgactacagccaggtccccagcgtgcccaagccgctcatggtggtcgcccccaccgacgccggcgtctaccccgtggccgtcttcctgcacggctgcaacacggtcaacagctggtatgagagcctcctgtcgcacgtcgcgtcccacgggttcatcgccgtggcgccccagctctactgcgtgacgctcaacatgaacgacttgaaggacatcgacgccaccaggcaggtcaccgcctggctcgccgacaagcagcaaggcctggcgcacgtgctcgccaacatcctccagctccacggcgtgaggccggacctctccaggctggcgctggccggccacagccgcggcggcgacacggctttcgccgtggcactcgggctcggacccgccgcctcggacgacgacgacaacaacgcagacgcaggcacatcgccggcggcgttgccactcaagttctccgcgctgatcggcgtggaccccgtggcggggctatccaagcaggcgcaggtggagccgaaggtgctgaccttccggccccggtccctcgacccggggatgccggcgctggtcgtcggcacggggctcggccccaagcacgtgggcgggccgccgtgcgcccccgcgggcgtcaaccacgccgagttctacgacgagtgcgcgccgccgcggtaccacgtcgtgctgagggactacgggcacatggacatgctggacgacgacggcgtgccctacgtcatcaacaactgcatgtgcatgaggaacaccaaggacaccaaggacctcgccaggagggccatcgggggagccgtggtggcgttcctcagggccacgctggaggacgacgacgaggatctcaaggtcgtgctcgagaaccgccctggcctctcgccggcggtgctggacccagttgggcatgacttggcttgaatagcaaggctggcggagtgtgctacattgtcgctccttatttacacacacataccacatgtttcttttccattttgtgc

SEQ ID NO: 34545 - protein, 357 aa, Zea mays subsp. mays
IAYQPLLTPYCLIGNTSCTRRPGDMAASPVAIGTAVFQRGPLRVEARHVDYSQVPSVPKPLMVVAPTDAGVYPVAVFLHGCNTVNSWYESLLSHVASHGFIAVAPQLYCVTLNMNDLKDIDATRQVTAWLADKQQGLAHVLANILQLHGVRPDLSRLALAGHSRGGDTAFAVALGLGPAASDDDDNNADAGTSPAALPLKFSALIGVDPVAGLSKQAQVEPKVLTFRPRSLDPGMPALVVGTGLGPKHVGGPPCAPAGVNHAEFYDECAPPRYHVVLRDYGHMDMLDDDGVPYVINNCMCMRNTKDTKDLARRAIGGAVVAFLRATLEDDDEDLKVVLENRPGLSPAVLDPVGHDLA

SEQ ID NO: 34546 - protein, 333 aa, Zea mays subsp. mays
MAASPVAIGTAVFQRGPLRVEARHVDYSQVPSVPKPLMVVAPTDAGVYPVAVFLHGCNTVNSWYESLLSHVASHGFIAVAPQLYCVTLNMNDLKDIDATRQVTAWLADKQQGLAHVLANILQLHGVRPDLSRLALAGHSRGGDTAFAVALGLGPAASDDDDNNADAGTSPAALPLKFSALIGVDPVAGLSKQAQVEPKVLTFRPRSLDPGMPALVVGTGLGPKHVGGPPCAPAGVNHAEFYDECAPPRYHVVLRDYGHMDMLDDDGVPYVINNCMCMRNTKDTKDLARRAIGGAVVAFLRATLEDDDEDLKVVLENRPGLSPAVLDPVGHDLA

SEQ ID NO: 34547 - protein, 296 aa, Zea mays subsp. mays
MVVAPTDAGVYPVAVFLHGCNTVNSWYESLLSHVASHGFIAVAPQLYCVTLNMNDLKDIDATRQVTAWLADKQQGLAHVLANILQLHGVRPDLSRLALAGHSRGGDTAFAVALGLGPAASDDDDNNADAGTSPAALPLKFSALIGVDPVAGLSKQAQVEPKVLTFRPRSLDPGMPALVVGTGLGPKHVGGPPCAPAGVNHAEFYDECAPPRYHVVLRDYGHMDMLDDDGVPYVINNCMCMRNTKDTKDLARRAIGGAVVAFLRATLEDDDEDLKVVLENRPGLSPAVLDPVGHDLA

SEQ ID NO: 34548 - DNA, 759 bp, Zea mays subsp. mays
agagctttgcctgggccaagcagcctttgttccttcgaaaccctgcctggctcgcttttggtagcccacgcgaaccgggccgcttttcagccctccgctcctgcgtcctccccttccactcgtatacaaccacccacctgagccgcacccacgctcaccgtacctcctccgaatccgccgaccgccggcgagcccctcctcctccacgacacgcgcttccccggctatcatggattcagatccatcatcacagaacccaacagatatgactgcatttgtccagaacctccttggacagatgcaaacaaggttcgagtccatgtcgcagaacattgtgtcaaagatagatgaaatgggaaccaagattgatgagctcgagcagagcatcaacgatctcaaagctgagatgggcactgagaccccggtcaagaagcctgatgagccaaagcctgctgactctgcctaacttgggtgtaacccagagattgttgtgtgaagatttgatgatggtgtgacaaatttcagcagtacgtgatcgtatctgttttcatgagtcctggcagttatgtagacacgaacccatcgtatgaaagatgaatccatgtttgggctctccagacatcaacgcatgttcttagcttttctgtcatctttcggcaactatttgtttgtttgactggtataagatgttatgcaacatctactccatttgaagtaattgtcttgtgtagagcaatctgctgctgcttgtttgctgcc

SEQ ID NO: 34549 - protein, 88 aa, Zea mays subsp. mays
SFAWAKQPLFLRNPAWLAFGSPREPGRFSALRSCVLPFHSYTTTHLSRTHAHRTSSESADRRRAPPPPRHALPRLSWIQIHHHRTQQI

SEQ ID NO: 34550 - protein, 78 aa, Zea mays subsp. mays
MDSDPSSQNPTDMTAFVQNLLGQMQTRFESMSQNIVSKIDEMGTKIDELEQSINDLKAEMGTETPVKKPDEPKPADSA

SEQ ID NO: 34551 - protein, 66 aa, Zea mays subsp. mays
MTAFVQNLLGQMQTRFESMSQNIVSKIDEMGTKIDELEQSINDLKAEMGTETPVKKPDEPKPADSA

SEQ ID NO: 34552 - DNA, 817 bp, Zea mays subsp. mays
  misc_feature (319)..(320): n is a, c, g, or t
  misc_feature (449)..(449): n is a, c, g, or t
cagatcacacacaccaccaaaggccaaagcgggacgggagccacagagatagctagcaagaaaccacagatggcggcgatacgggcggccacccaggcggcggcgacggtgctactgctcgcggcgctggtgctggcggcgggaccgggcggggcgcgggcgcagtcggcgtcgccgtcgagccagtgcacgtcggcgctggtgagcctgtcgccgtgcctcagctacatctccgggaacgtgtcggcggcgccgccgtcgtgctgcgcgcagctgggcaaggtggtgcagtcggacccgcagtgcctgtgcgtggcgnncagcgcggacccggcgtcgctgggcctcaccgtcaaccgcacccgcgcgctgggcctccccgacgcatgcaaggtcacgacgcccgacgtcagcagctgcaagggcggcgccgccgccgcggggggagncctgtggcgacgcccgcggggcagacggcgccggccacggggtccaagacgacgcccgccacgtcgtccgtgcccggtgccgccgcgtcgccgccgggctcggctgcccgtctcgtcgccggcttcttcgtcgccgcggccgtcgtcgctggcttcgccgcgtgatccgaagctagcttcggtaccgtttgcgcgtaggaatcgcagcggagtttgtgttgtttgtttcatcggtggtggtggtgcatttgtgattcgttcagtggccgtgagagagagccgtctcttattcatcgatcgactcgattcgtcacagcaatcgcgcatcgctctgaataaagacatcgcctgtctcggttttttctttc

SEQ ID NO: 34553 - protein, 272 aa, Zea mays subsp. mays
  misc_feature (107)..(107): Xaa can be any naturally occurring amino acid
  misc_feature (150)..(150): Xaa can be any naturally occurring amino acid
QITHTTKGQSGTGATEIASKKPQMAAIRAATQAAATVLLLAALVLAAGPGGARAQSASPSSQCTSALVSLSPCLSYISGNVSAAPPSCCAQLGKVVQSDPQCLCVAXSADPASLGLTVNRTRALGLPDACKVTTPDVSSCKGGAAAAGGXLWRRPRGRRRRPRGPRRRPPRRPCPVPPRRRRARLPVSSPASSSPRPSSLASPRDPKLASVPFARRNRSGVCVVCFIGGGGAFVIRSVAVRESRLLFIDRLDSSQQSRIALNKDIACLGFFF

SEQ ID NO: 34554 - protein, 249 aa, Zea mays subsp. mays
  misc_feature (84)..(84): Xaa can be any naturally occurring amino acid
  misc_feature (127)..(127): Xaa can be any naturally occurring amino acid
MAAIRAATQAAATVLLLAALVLAAGPGGARAQSASPSSQCTSALVSLSPCLSYISGNVSAAPPSCCAQLGKVVQSDPQCLCVAXSADPASLGLTVNRTRALGLPDACKVTTPDVSSCKGGAAAAGGXLWRRPRGRRRRPRGPRRRPPRRPCPVPPRRRRARLPVSSPASSSPRPSSLASPRDPKLASVPFARRNRSGVCVVCFIGGGGAFVIRSVAVRESRLLFIDRLDSSQQSRIALNKDIACLGFFF

SEQ ID NO: 34555 - DNA, 943 bp, Zea mays subsp. mays
gtgactgtgatctatactataaggtgaacaagatctctttgtctactgtagttgcagcaccagcagcagcagcagaagagcagcgcctgagctccagcaataatggccgagaagggcgtgaaggtgttggggatgtgggcgagccccatggtgatcagggtggagtgggcgctgcggctgaagggcgtcgagtacgagtacgtcgacgaggacctcgccaacaagagcgccgacctgctccgccacaacccggtgaccaagaaggtgcccgtgctcgtccacgacggcaagccggtcgcggagtccaccatcatcgtggagtacatcgacgaggtctggaagggcggctaccccatcatgccgggcgacccctacgagcgcgcccaggcgaggttctgggccaggttcgcggaagacaagtgcaacgctgctctgtacccgatcttcaccgcgaccggcgaggcgcagcgcaaggcggtgcacgaggcccagcagtgcctcaagaccctggagacggccttggaggggaagaagttcttcggcggcgacgccgtgggctacctcgacatcgtcgtcgggtggttcgcgcactggctccccgtcatcgaggaggtgaccggcgccagcgtcgtcacccacgaggagctgccgctgatgaaggcctggttcggtcggttcctcgcccttgacgtggtgaaggcggccctgcccgacagggacaggctcctcgccgccaacaaggcccgccgtgagcagctcctctccgcgtagatatggctagtaattctggagcagctagtttcaccgccgacgctcatatattgctgaataaggactggttgcacttttgcacgttgtgcagtgcagcccgaggtttggatgacctctgcccctctgttccatttcagaatggtagtcccataataatgcatatacatcatgc

SEQ ID NO: 34556 - protein, 228 aa, Zea mays subsp. mays
DCDLYYKVNKISLSTVVAAPAAAAEEQRLSSSNNGREGREGVGDVGEPHGDQGGVGAAAEGRRVRVRRRGPRQQERRPAPPQPGDQEGARARPRRQAGRGVHHHRGVHRRGLEGRLPHHAGRPLRARPGEVLGQVRGRQVQRCSVPDLHRDRRGAAQGGARGPAVPQDPGDGLGGEEVLRRRRRGLPRHRRRVVRALAPRHRGGDRRQRRHPRGAAADEGLVRSVPRP

SEQ ID NO: 34557 - protein, 222 aa, Zea mays subsp. mays
MAEKGVKVLGMWASPMVIRVEWALRLKGVEYEYVDEDLANKSADLLRHNPVTKKVPVLVHDGKPVAESTIIVEYIDEVWKGGYPIMPGDPYERAQARFWARFAEDKCNAALYPIFTATGEAQRKAVHEAQQCLKTLETALEGKKFFGGDAVGYLDIVVGWFAHWLPVIEEVTGASVVTHEELPLMKAWFGRFLALDVVKAALPDRDRLLAANKARREQLLSA

SEQ ID NO: 34558 - protein, 212 aa, Zea mays subsp. mays
MWASPMVIRVEWALRLKGVEYEYVDEDLANKSADLLRHNPVTKKVPVLVHDGKPVAESTIIVEYIDEVWKGGYPIMPGDPYERAQARFWARFAEDKCNAALYPIFTATGEAQRKAVHEAQQCLKTLETALEGKKFFGGDAVGYLDIVVGWFAHWLPVIEEVTGASVVTHEELPLMKAWFGRFLALDVVKAALPDRDRLLAANKARREQLLSA

SEQ ID NO: 34559 - DNA, 836 bp, Zea mays subsp. mays
agaaaaagaaaaagaaaagccaaaggcaaaggcaaaggaatcccaatcaggcaagcaaaaggaagaaccagctgctgcggccggagatgtcgtcgcagctgatcgaggagcaccggtcgggcgcggaggtgcacgtcgggcacgagctgtgcgagcgcaagtcgcgcgagttcatggtggagctgggcctccccgacgggctcctcccgctgcccagcctggacgaggtgggctacaaccggtcgacggggttcgtgtggctgcggcaggccgccggcctgacccacaccttcggctccatcggcaagcaggtgtggtacgacagggaggtgacggcgttcgtggagcccgggcggatgcacggcctcgccggggtgaagagcaaggagctcctcatctgggtcaccatctccgagatcgtcctcagcccctccggcaccaagatcgtgttccgcacccccgcggggctcggccgcgccttccctgtcaccgccttccagctcgagcccgcggcggcggagggggaccacaaggaggaggccgaggacgccgccgccgcggccgccaactgatctgctctagcttccggcggcggcggccgtgcgtgggctgctcgatccggtagtggcagtggctttgtgagacagtcgagtcgattgtggtttcccctcctccgccatgtgcgtgtagtggatgatgatgcaggaataaacggtgtccctggatccagaactcacggttcgatccatccagtttatctcatgcttgtgtatctctatgtatgcattgcctgtttgttcgctggaatctactacttgcagcggcctcgtctcttc

SEQ ID NO: 34560 - protein, 207 aa, Zea mays subsp. mays
EKEKEKPKAKAKESQSGKQKEEPAAAAGDVVAADRGAPVGRGGARRARAVRAQVARVHGGAGPPRRAPPAAQPGRGGLQPVDGVRVAAAGRRPDPHLRLHRQAGVVRQGGDGVRGARADARPRRGEEQGAPHLGHHLRDRPQPLRHQDRVPHPRGARPRLPCHRLPARARGGGGGPQGGGRGRRRRGRQLICSSFRRRRPCVGCSIR

SEQ ID NO: 34561 - protein, 189 aa, Zea mays subsp. mays
KKKKKSQRQRQRNPNQASKRKNQLLRPEMSSQLIEEHRSGAEVHVGHELCERKSREFMVELGLPDGLLPLPSLDEVGYNRSTGFVWLRQAAGLTHTFGSIGKQVWYDREVTAFVEPGRMHGLAGVKSKELLIWVTISEIVLSPSGTKIVFRTPAGLGRAFPVTAFQLEPAAAEGDHKEEAEDAAAAAAN

SEQ ID NO: 34562 - protein, 161 aa, Zea mays subsp. mays
MSSQLIEEHRSGAEVHVGHELCERKSREFMVELGLPDGLLPLPSLDEVGYNRSTGFVWLRQAAGLTHTFGSIGKQVWYDREVTAFVEPGRMHGLAGVKSKELLIWVTISEIVLSPSGTKIVFRTPAGLGRAFPVTAFQLEPAAAEGDHKEEAEDAAAAAAN

SEQ ID NO: 34563 - DNA, 576 bp, Zea mays subsp. mays
ttgtagaactgtgggcgaagcaaggcaggctcattaggatgcacgagcaagcatcagcgatcgtcaggtatgagctaagtcgaatatcagctggtgtgttcattgcacttggtaaaggaaaagtgcagtgtcgtggtgacgtacgaagcctcctctttcatggatggttcagcacaatgttgttggattttggctggcttcagcgctgccccaaaggtctcgacctaagatcgttggaggagaatttagggcgaggccttttaaccctccctctcaggcagcagcaatgtttgttcgaggaatggttccagttctatgcgaccaaaggacccgagtgtccgaaccttattagagctttccaggtatggtggagaaggtctttcattagatcattggtagaacctcaaaactaagtttttccttgatgtactagtatgttgcgtgtatgatttgtaaaattgcaactgttctgatgacccttaaaaatgttttttcgtttgtagtttagttcttcccattgtatgtgaatagctggatgaatttgcttgaggataacatctgcggcgtggagtatgt

SEQ ID NO: 34564 - protein, 136 aa, Zea mays subsp. mays
VELWAKQGRLIRMHEQASAIVRYELSRISAGVFIALGKGKVQCRGDVRSLLFHGWFSTMLLDFGWLQRCPKGLDLRSLEENLGRGLLTLPLRQQQCLFEEWFQFYATKGPECPNLIRAFQVWWRRSFIRSLVEPQN

SEQ ID NO: 34565 - protein, 124 aa, Zea mays subsp. mays
MHEQASAIVRYELSRISAGVFIALGKGKVQCRGDVRSLLFHGWFSTMLLDFGWLQRCPKGLDLRSLEENLGRGLLTLPLRQQQCLFEEWFQFYATKGPECPNLIRAFQVWWRRSFIRSLVEPQN

SEQ ID NO: 34566 - protein, 78 aa, Zea mays subsp. mays
MLLDFGWLQRCPKGLDLRSLEENLGRGLLTLPLRQQQCLFEEWFQFYATKGPECPNLIRAFQVWWRRSFIRSLVEPQN

SEQ ID NO: 34567 - DNA, 956 bp, Zea mays subsp. mays
aaacatactccgtttccgaatccgttccaccattgcctattgccccatcctccccgctagggttttgccagcatggccgccgccgccgcccggaggctcctctcccgccgcgcctcctcgtcctccctctccgcgctcctccgtcgcggcgctgtcccggagcagtcgctggtgttgcgcccggctgttgtcgcggcggcctcccgcctcggcttccagcgcgggatggcgcgggcggcctggcggggacggctacgtctcgacgcggtctggcgcgggcggggaccgcgcgcccatggccacggagatggcgccgctgttccccgggtgcgactacgagcattggctcatcgtgatggacaagcccggcggggagggcgccagcaagcagcagatgattgactgctacatccagaccctcgccaaggtccttggaagcgaggaggaggcgaagaagaagatctacaacgtctcgtgcgagcgctacttcgggtttgggtgcgagatcgatgaggagacatctaacaagctcgaggggctccctggtgttctctttgtgctcccggattcgtatgttgatgctgaatacaaggactacggagctgaactcttcgtcaacggtgagattgttcagaggacccccgagaggcagaggagggtggagcccgtgccacagagggcagcagacaggccgaggtacaatgacagaacccgctacgcacgcaggagggagaaccagcgatgaactttgcgataaaatcataaaaaataccacagcaacaagtcccaggtggtttcagctctggaattcaaggatcaccgagtatcgcctgtattaaattggcaatctcactttacgtgcagtctagagtatcgtttctatgtgctcagcttggacgtattgtattctgtaattacagctacttggagatttggaaggacctggcttgcaacgt

SEQ ID NO: 34568 - protein, 247 aa, Zea mays subsp. mays
NILRFRIRSTIAYCPILPARVLPAWPPPPPGGSSPAAPPRPPSPRSSVAALSRSSRWCCARLLSRRPPASASSAGWRGRPGGDGYVSTRSGAGGDRAPMATEMAPLFPGCDYEHWLIVMDKPGGEGASKQQMIDCYIQTLAKVLGSEEEAKKKIYNVSCERYFGFGCEIDEETSNKLEGLPGVLFVLPDSYVDAEYKDYGAELFVNGEIVQRTPERQRRVEPVPQRAADRPRYNDRTRYARRRENQR

SEQ ID NO: 34569 - protein, 149 aa, Zea mays subsp. mays
MATEMAPLFPGCDYEHWLIVMDKPGGEGASKQQMIDCYIQTLAKVLGSEEEAKKKIYNVSCERYFGFGCEIDEETSNKLEGLPGVLFVLPDSYVDAEYKDYGAELFVNGEIVQRTPERQRRVEPVPQRAADRPRYNDRTRYARRRENQR

SEQ ID NO: 34570 - protein, 145 aa, Zea mays subsp. mays
MAPLFPGCDYEHWLIVMDKPGGEGASKQQMIDCYIQTLAKVLGSEEEAKKKIYNVSCERYFGFGCEIDEETSNKLEGLPGVLFVLPDSYVDAEYKDYGAELFVNGEIVQRTPERQRRVEPVPQRAADRPRYNDRTRYARRRENQR

SEQ ID NO: 34571 - DNA, 1689 bp, Zea mays subsp. mays
  misc_feature (54)..(54): n is a, c, g, or t
  misc_feature (106)..(106): n is a, c, g, or t
acagttgttgaaccttgagactactagctagagagacaaatatccaggccgaangagaagaggtctgagcgaggagacgacgcccgcgccatggcaggcgccagcnccaccaacggcggaggcaacggcggaggcgggaaggtggtcagcatgccgctgcagtacttctgcgtgctggcggcggtggtggtggccgtgatggtgctgtcgctgtcgttcatgtcgccggcggccatggtggccgtccgccagaacctcagctccgtggcggccgcccccggtggcagcagcaacagcaccggcggcggcgccggagcgggaggcgccgccggcctggccgaggcgtcaccgccggcgggctggaaggagaaggagcaggcgcggcggccgcccgtggtgctgttcaacttcggcgactccaactccgacaccggaggcgtggcggcggccggcgggatacggatcatgccgccggagggccgcacctacttccaccaccccacgggccggctctccgacggccgcgtcatcatcgactttatctgtgagagtctgggcacgcgtgaactgaacccatacctcaggggaattggttcggactacagcaacggcgtcaacttcgccatggcaggctcgacggtgacccacggcgtctctccctactccttgaacgtccaggtcgaccagttcggtctacttcaggcacaggtccccttgagatgttcgaacgaggactggaaggcccggtgagcaaggaggggtttgagagcgctctgtacatgatggacatcggccacaacgacatggttggtgtggcgcacacaccgtccgatcagtgggacaagaagatcacagagatcgtcggcgaggtcagacaagccatctcgatcctgtacgacaacggagcgaggaagttctggatccacggcacgggcgccctggggtgcctgccggcgctggtggtgcaggagacgaagggcgagcaggacaagcacggctgcctcgccggcgtcaacagggccgccaaggcgttcaacaggaagctcagccagctctgcgacgacctccgcttccacctcaagggcgccaccgtcgtctacaccgacatgttcgccatcaagtacgacttcgtcgccaaccacaccaaatacgggatcgagtggccgttcatggtgtgctgtggcaacggcgggccgccgtacaacatgaagcagggaagacccggctgtggcgacctgtgcccaccggaggcgaaggtggtcagctgggatggcgtgcacttcacggatttcggcagcggccttgctgccaagcttgcgatgagcggggagtactccaagcccagggtgaagctggcaagcttgatccatggcggatccaagaaaacgtcagactcttgatgcggaccattgaccgagtcgtgacctttggatccacatctatggaatggaagatgggtagcggtgaagaattggagggatatcttgcaccaggctgtttcttgacgaagattgactccttgtacacactacacagaactactacagaaggcaaagtagcactgggaatgctcagttacaagcttaagttaatttgctgtctttttattttgggattttgtgctgcagagtacagagattttgtaccttgatgtacgtgtaactatttatgatagttcttacaagctcc

SEQ ID NO: 34572 - protein, 226 aa, Zea mays subsp. mays
MFERGLEGPVSKEGFESALYMMDIGHNDMVGVAHTPSDQWDKKITEIVGEVRQAISILYDNGARKFWIHGTGALGCLPALVVQETKGEQDKHGCLAGVNRAAKAFNRKLSQLCDDLRFHLKGATVVYTDMFAIKYDFVANHTKYGIEWPFMVCCGNGGPPYNMKQGRPGCGDLCPPEAKVVSWDGVHFTDFGSGLAAKLAMSGEYSKPRVKLASLIHGGSKKTSDS

SEQ ID NO: 34573 - protein, 219 aa, Zea mays subsp. mays
  misc_feature (6)..(6): Xaa can be any naturally occurring amino acid
MAGASXTNGGGNGGGGKVVSMPLQYFCVLAAVVVAVMVLSLSFMSPAAMVAVRQNLSSVAAAPGGSSNSTGGGAGAGGAAGLAEASPPAGWKEKEQARRPPVVLFNFGDSNSDTGGVAAAGGIRIMPPEGRTYFHHPTGRLSDGRVIIDFICESLGTRELNPYLRGIGSDYSNGVNFAMAGSTVTHGVSPYSLNVQVDQFGLLQAQVPLRCSNEDWKAR

SEQ ID NO: 34574 - protein, 206 aa, Zea mays subsp. mays
MMDIGHNDMVGVAHTPSDQWDKKITEIVGEVRQAISILYDNGARKFWIHGTGALGCLPALVVQETKGEQDKHGCLAGVNRAAKAFNRKLSQLCDDLRFHLKGATVVYTDMFAIKYDFVANHTKYGIEWPFMVCCGNGGPPYNMKQGRPGCGDLCPPEAKVVSWDGVHFTDFGSGLAAKLAMSGEYSKPRVKLASLIHGGSKKTSDS

SEQ ID NO: 34575 - DNA, 1817 bp, Zea mays subsp. mays
  misc_feature (80)..(80): n is a, c, g, or t
gaccgagccggacccagacccactcgctcctccgcccccgccgcaatggaggagccggcggcggcctcctgccctggagncgcgcggcgacctgcgctcggcgcttcccttcctccccgtcgtcctccgcggcggcgcactcttctggccgccggccgcgcaggagtcgctccgggcgctcgcgctcggccccgacgtcagccgcgtcgcctcgggggacgttctcgccgacgcgctcactgacctccgcctcgcgctcgccctgcccgcgctgcccccgcgcgctgccgacggcctggcgctcttcttcgacgacctcctttcacgcgcccaggcgcggggctggttctccgaggtcgtccccaacctcgcacgcctcctcctccgcctccccaccctgctcgaggaccactacgccaaggctggccacggcgcctccgggctccgcgtcatggcgtcgcaggacgcgggcgtcgtgctcctcagccaggagctcgtcgccgcgctgctcacctgcgcgctcttctgcctcttccccacggccggtagggcccaggcgtgccttcccaccataaatttcgatggcctgttcgcgccgctgattcacaatgcgaggcaaagccaggagcagaaagtgaggtgccttgttcactatttcgagagggtgactgattctatgcctactggtttagtttcgtttgaacgcaaagttcttccccgccgagcgctctctgatggcgttccctatcctgacatccatgcgtgggtggcatctagtgcaccactctgccaattcacgtaggtattttcatcaggtttcatagaagatgaagaacaagaagcccttcaagttgactttgcaaataaatatttggggggaggtgccctttcctggggttgtgtgcaggaagagatccgcttcatgataaaccccgaattgattgtgggtatgctattcttgtcttgtatggaagataacgaggctatagaaatctttggtgcagaacggttctcacagtatatgggttatggttcctcctttcgctttgtcggtgactatttagataccaaaccctttgattcgatgggcagacggagaactaggattgtggctatcgatgctttggactgtccagctaggttacactatgaatctggctgtctcctaagggaagtgaacaaggcattttgtggatttttcgatcaatcgaaacaccatctctatgcgaagcttttccaggatttgcacaacaaggatgacttttcaagcatcaattccagtgagtacgtaggagtttcaacaggaaactggggttgtggtgcttttggtggaaaccctgaaatcaagagcatgattcagtggattgctgcatcacaggctcttcgcccttttgttaattactacacttttgaggacgtgtctctgcaaagattagaggaggtgatccagtggatacgacttcatggctggacggtcggcgagttgtggcatatgctcatggagtactcatctcagaggctgggaggagaaacgcacaagggctttttggtttgggttgcttcccagcgacaggcccaagaatcaagtgcattacatgtccgaatagcaatagacccggtttttgtgagacgcgcagctctcctagggctgatttgatgattagggatccacaggggaggaattcccttgcaattcaatttttaatagcaagaggatttcttcccctcgggatcccggtcaccaaatcagctcttaggagtgtgtgcatgaacgaagttattgctgacaaaaaaaatgaaataaagataaaatcgcc

SEQ ID NO: 34576 - protein, 266 aa, Zea mays subsp. mays
  misc_feature (27)..(27): Xaa can be any naturally occurring amino acid
TEPDPDPLAPPPPPQWRSRRRPPALEXRGDLRSALPFLPVVLRGGALFWPPAAQESLRALALGPDVSRVASGDVLADALTDLRLALALPALPPRAADGLALFFDDLLSRAQARGWFSEVVPNLARLLLRLPTLLEDHYAKAGHGASGLRVMASQDAGVVLLSQELVAALLTCALFCLFPTAGRAQACLPTINFDGLFAPLIHNARQSQEQKVRCLVHYFERVTDSMPTGLVSFERKVLPRRALSDGVPYPDIHAWVASSAPLCQFT

SEQ ID NO: 34577 - protein, 244 aa, Zea mays subsp. mays
MINPELIVGMLFLSCMEDNEAIEIFGAERFSQYMGYGSSFRFVGDYLDTKPFDSMGRRRTRIVAIDALDCPARLHYESGCLLREVNKAFCGFFDQSKHHLYAKLFQDLHNKDDFSSINSSEYVGVSTGNWGCGAFGGNPEIKSMIQWIAASQALRPFVNYYTFEDVSLQRLEEVIQWIRLHGWTVGELWHMLMEYSSQRLGGETHKGFLVWVASQRQAQESSALHVRIAIDPVFVRRAALLGLI

SEQ ID NO: 34578 - protein, 235 aa, Zea mays subsp. mays
MLFLSCMEDNEAIEIFGAERFSQYMGYGSSFRFVGDYLDTKPFDSMGRRRTRIVAIDALDCPARLHYESGCLLREVNKAFCGFFDQSKHHLYAKLFQDLHNKDDFSSINSSEYVGVSTGNWGCGAFGGNPEIKSMIQWIAASQALRPFVNYYTFEDVSLQRLEEVIQWIRLHGWTVGELWHMLMEYSSQRLGGETHKGFLVWVASQRQAQESSALHVRIAIDPVFVRRAALLGLI

SEQ ID NO: 34579 - DNA, 1531 bp, Zea mays subsp. mays
  misc_feature (110)..(113): n is a, c, g, or t
  misc_feature (604)..(604): n is a, c, g, or t
  misc_feature (621)..(624): n is a, c, g, or t
  misc_feature (626)..(627): n is a, c, g, or t
  misc_feature (698)..(699): n is a, c, g, or t
  misc_feature (703)..(703): n is a, c, g, or t
ctctcaactctcgtttcgccggagtatttagcttgcttcagggagcacgtggcggtggaagcttccctaggggtggcggaggcggtggtggtgcttggttgatgtcgatnnnncgcaggtctgctgtgactcggccgtagcggcgacggcggcaccggtggttggtgcggaggcggaggccagggccagggcgcgcgccgagaggcggagccgggccggagagtctggggcgtggaagcacgcggtggccgctggcacggccgatgctacgaggaagcggagtctcggggcaggggagctgctggtggcgcggaagcacggggcggcgtcggtggccggccgcaggagggagatggaggatgccgtgtccgtgcgcgacgcgttctgcgcggagggcacggccgacggcgggaggcgcgacttctacggagtgttcgacggccacggctgctcgcacgtggccgaggcgtgccgggaccggatgcacgagctggtcgccgaggagctcgccgccaccgccgccgacagctcagtctccgcggcggcggcctggaccgtggcgatggaacgcagcttcgcgcggatggacgccgaggtgacgtcngccggcgggcgcgccgnnnncnncagaagcagcacctgccgctgcgacgcgcacaggtgcgaccacgtgggctccacggccgtggtggccgtcnnggangagcacagcgtcattgtggccaactgcggcgacagccgcgccgtgctctgccgtggggacggcgcgccgccgctgccgctgtcgtcggaccacaagcccgaccgccccgacgagctggagcgcatcgagtccgccggcgggcgcgtcatcttctgggagggcgcgcgcgttctgggcgtcctcgccatgtcccgcgccgtcggggacggatacctgaagccgtacgtgtcgtccgttcccgaggtgacggtgaccgaccggtccgacggcgacgagtgcctcatcctgggcagcgacgggctctgggacgtggtgagcaacgaggccgcgtgcgaggtggcgcgcgcctgcctccgcaggggccgggccaagtggtgtgccgaggccgccgcgttgctcaccaagctggccctcgcgaggagaagctccgacaacgtctcggtggtcgtcatcgatctccggaggaggaatcactagttctgtgcagttgtcagctagtactagtactccctccgaaggatggctggtcgcacaagggatttcgcgggggtgcctaattgggttttttttcttccattttcattcaaaaagtttttttttttttttgctgtactctccctgaatcaaaaagttcagaggagcccttagattaattattgtggtagagccggaatttggtccggataccattcggagaggtggtcgcgtagaaaaaactcagaggagagacggtctcacaagaaaatcagtctgtgtattgtatcatctagacatctaatgaaatagcaaccgaaacaaacaccacctccggtgtctggatgttctcgc

SEQ ID NO: 34580 - protein, 275 aa, Zea mays subsp. mays
  misc_feature (84)..(84): Xaa can be any naturally occurring amino acid
  misc_feature (90)..(92): Xaa can be any naturally occurring amino acid
  misc_feature (116)..(117): Xaa can be any naturally occurring amino acid
MEDAVSVRDAFCAEGTADGGRRDFYGVFDGHGCSHVAEACRDRMHELVAEELAATAADSSVSAAAAWTVAMERSFARMDAEVTXAGGRAXXXRSSTCRCDAHRCDHVGSTAVVAVXXEHSVIVANCGDSRAVLCRGDGAPPLPLSSDHKPDRPDELERIESAGGRVIFWEGARVLGVLAMSRAVGDGYLKPYVSSVPEVTVTDRSDGDECLILGSDGLWDVVSNEAACEVARACLRRGRAKWCAEAAALLTKLALARRSSDNVSVVVIDLRRRNH

SEQ ID NO: 34581 - protein, 232 aa, Zea mays subsp. mays
  misc_feature (41)..(41): Xaa can be any naturally occurring amino acid
  misc_feature (47)..(49): Xaa can be any naturally occurring amino acid
  misc_feature (73)..(74): Xaa can be any naturally occurring amino acid
MHELVAEELAATAADSSVSAAAAWTVAMERSFARMDAEVTXAGGRAXXXRSSTCRCDAHRCDHVGSTAVVAVXXEHSVIVANCGDSRAVLCRGDGAPPLPLSSDHKPDRPDELERIESAGGRVIFWEGARVLGVLAMSRAVGDGYLKPYVSSVPEVTVTDRSDGDECLILGSDGLWDVVSNEAACEVARACLRRGRAKWCAEAAALLTKLALARRSSDNVSVVVIDLRRRNH

SEQ ID NO: 34582 - protein, 205 aa, Zea mays subsp. mays
  misc_feature (14)..(14): Xaa can be any naturally occurring amino acid
  misc_feature (20)..(22): Xaa can be any naturally occurring amino acid
  misc_feature (46)..(47): Xaa can be any naturally occurring amino acid
MERSFARMDAEVTXAGGRAXXXRSSTCRCDAHRCDHVGSTAVVAVXXEHSVIVANCGDSRAVLCRGDGAPPLPLSSDHKPDRPDELERIESAGGRVIFWEGARVLGVLAMSRAVGDGYLKPYVSSVPEVTVTDRSDGDECLILGSDGLWDVVSNEAACEVARACLRRGRAKWCAEAAALLTKLALARRSSDNVSVVVIDLRRRNH

SEQ ID NO: 34583 - DNA, 1615 bp, Zea mays subsp. mays
  misc_feature (976)..(976): n is a, c, g, or t
  misc_feature (1036)..(1037): n is a, c, g, or t
  misc_feature (1040)..(1041): n is a, c, g, or t
  misc_feature (1148)..(1148): n is a, c, g, or t
  misc_feature (1173)..(1174): n is a, c, g, or t
gtcccttagttgtaccatcgtgtccttttcctcctacctcctccttggctggccctcttccccgtcttcctccctcttccttcgtctctccgtttcaagccctaccgacaggcatttgcttctgctccagtgatcagccccctcccctcctggcctcctctccacccggccaaaaactgatctttttttttcggttctggtaccatagctattagtagtcgtagcggctaacttgcaagccgattgtctctagcacgcaagtgtttttccctcccctgagattggtgggtgatcgagagttcgagacagtgtacacatacatactctgctcgtctgctgaggatcgatcgcttggtctcgttgttgcgtagataggtactagaggactatagctactagtaggactaggagaggatccgagggagagagagcaaggccaagatgatgcgcgcgaaccgggagcagagagtggccttctcgtcgacgaaggaggccgccgcggtgcccaaggaggaggtgtgggaggtccggcccggcgggatgctggtgcagaagcggagccccgacgcggacccgccccccggcggcgcgcccgtgcccaccatccgcgtcaaggtcaagttcaacggcgtctaccacgagatctacatcaactcccaggcatccttcggcgagctcaagaagctgctgtcggagaagacgggcctgcacccggacgaccagaaggtggtgtacaaggacaaggagagggactccaaggcgttcctggacatggccggcgtcaaggaccgctccaagatggtcatgctcgaggaccccgccgccaaggccaagcgcctcctcgaggagcgccggaccggcaaggccgagcgcgccgccaaggccatcgcccgcgccgccctcgacgtcgacaagctcgcaaccaaggtgtcggcgctggagacgatcgtgagcaagggcggcaaggtcgtggacncggacgtggtgacgctgaccgaggcgctgatgaacgagctggtgaagctggactccgtcnncgnngaaggggaggtgaaggcggcgcggcgggcgcaggagaagcgggtgcagaagtacgtggagacgctggacgccatccgcgccaagaacaaggcggcggcggcggcggngccggccaaggcccgctagcggcannaacaaggcgcggccgccgcgcccgcccccggcttcggcgcacgcgcatcagagccagcagcagcgccggcagttccagccgccggcgccggtgtcgcagacccagacggcgagctgggagacgttcgacctcctgtcgtcagtgccgtcgacgtcggcggcccccgtgacgaccatggcccccgcgaccagcaccacgccgtccccgcgcttcgactgggagctcttctagatggctcctcaaggcgccagcctgccacacccccctggcctggcccccatctctcgccacttgtgtgcctgtccattggctcggccagtaccttctcctgttcgccttggccatggtgcatgtcaatcgccattgtttctttctttctttccttcccgctctctttattctgtcattcttgctgtcctttgagcgattgaaagtctgtgt

SEQ ID NO: 34584 - protein, 241 aa, Zea mays subsp. mays
  misc_feature (179)..(179): Xaa can be any naturally occurring amino acid
  misc_feature (199)..(200): Xaa can be any naturally occurring amino acid
  misc_feature (236)..(236): Xaa can be any naturally occurring amino acid
MMRANREQRVAFSSTKEAAAVPKEEVWEVRPGGMLVQKRSPDADPPPGGAPVPTIRVKVKFNGVYHEIYINSQASFGELKKLLSEKTGLHPDDQKVVYKDKERDSKAFLDMAGVKDRSKMVMLEDPAAKAKRLLEERRTGKAERAAKAIARAALDVDKLATKVSALETIVSKGGKVVDXDVVTLTEALMNELVKLDSVXXEGEVKAARRAQEKRVQKYVETLDAIRAKNKAAAAAXPAKAR

SEQ ID NO: 34585 - protein, 240 aa, Zea mays subsp. mays
  misc_feature (178)..(178): Xaa can be any naturally occurring amino acid
  misc_feature (198)..(199): Xaa can be any naturally occurring amino acid
  misc_feature (235)..(235): Xaa can be any naturally occurring amino acid
MRANREQRVAFSSTKEAAAVPKEEVWEVRPGGMLVQKRSPDADPPPGGAPVPTIRVKVKFNGVYHEIYINSQASFGELKKLLSEKTGLHPDDQKVVYKDKERDSKAFLDMAGVKDRSKMVMLEDPAAKAKRLLEERRTGKAERAAKAIARAALDVDKLATKVSALETIVSKGGKVVDXDVVTLTEALMNELVKLDSVXXEGEVKAARRAQEKRVQKYVETLDAIRAKNKAAAAAXPAKAR

SEQ ID NO: 34586 - protein, 208 aa, Zea mays subsp. mays
  misc_feature (146)..(146): Xaa can be any naturally occurring amino acid
  misc_feature (166)..(167): Xaa can be any naturally occurring amino acid
  misc_feature (203)..(203): Xaa can be any naturally occurring amino acid
MLVQKRSPDADPPPGGAPVPTIRVKVKFNGVYHEIYINSQASFGELKKLLSEKTGLHPDDQKVVYKDKERDSKAFLDMAGVKDRSKMVMLEDPAAKAKRLLEERRTGKAERAAKAIARAALDVDKLATKVSALETIVSKGGKVVDXDVVTLTEALMNELVKLDSVXXEGEVKAARRAQEKRVQKYVETLDAIRAKNKAAAAAXPAKAR

SEQ ID NO: 34587 - DNA, 1238 bp, Zea mays subsp. mays
  misc_feature (1225)..(1225): n is a, c, g, or t
acgacacccaacggcagctgcagcacagcagaggaaggcaggaaggaagaagatatcagaccagtgtgaagccaagccagcgcgtctctctctctctctctctggtcgcttggtcggtccatcggaggatcagctcggcggtggccatggcaatggcgcagcaagcgagcctcccctgctcgactgccaccacatggagagagctcacgaacacgagctggagggacgacgactacaggcggatggtgatggcgtacctgatcgaggcggtgtacctgctggagctggagcggcaggagcgccgggacgcggcggcggtggcgcagcagtggtggaagccgttccacttccgcctggcgcacgagctggtggacgaccgcgacggctccgtgttcggcgccgtcttcgagcgcgaccaccacggcgccaggccggggccggggccgagcccgagcggcgcgcccagcgccgtcatcgcgttccggggcacgctgctgcgcgcgcccaccatccgccgcgacgtcgaggacgagctccgcctgctggcacgcaacagcctgcggggctccgccaggctggcgcgcgccgcgcaggcgctgcgcgccaccatcgaccgcttcggctccgagaacgtctgcgtctgcggccactccctgggcgccggcttcgcgcgccaggtcgtccggacgctcgtggcctcctcctcctcctcctcctcctcgccgcggcaaccgcgccagcaggccgccgccttcgccgccgcgacgctcgagtcccacctcttcaacgcgccctacctgtcgctgcccatgggcgtcaggagcgtggtcaggacggcggactgcctggtcaaggcgctccgctccggcgtcgccaccgtcggcaagtggcacggcaaggcgctccggaacgtggcctacgccagctgcgtcctcggatacaccaggctcgagagcaccaggaagttgtgaggatcgatcggatcgaatgcctccgccacctcgcgtcctcctcgatgctgcctctggcttcaacggttgaaccgtcctgccagtgccagccaaactgtatctatgctcgatcaccttgtagtaggaagtactcggaaattaattcaattctagcaggagacgaataaagcatctgaccggaggatgcaaggccttgcgtgcatatgctttgctttgcttttgtacaatctttttaaatgtgaattacagtagcnctaagttgatctc

SEQ ID NO: 34588 - protein, 378 aa, Zea mays subsp. mays
RHPTAAAAQQRKAGRKKISDQCEAKPARLSLSLSGRLVGPSEDQLGGGHGNGAASEPPLLDCHHMERAHEHELEGRRLQADGDGVPDRGGVPAGAGAAGAPGRGGGGAAVVEAVPLPPGARAGGRPRRLRVRRRLRARPPRRQAGAGAEPERRAQRRHRVPGHAAARAHHPPRRRGRAPPAGTQQPAGLRQAGARRAGAARHHRPLRLRERLRLRPLPGRRLRAPGRPDARGLLLLLLLLAAATAPAGRRLRRRDARVPPLQRALPVAAHGRQERGQDGGLPGQGAPLRRRHRRQVARQGAPERGLRQLRPRIHQAREHQEVVRIDRIECLRHLASSSMLPLASTVEPSCQCQPNCIYARSPCSRKYSEINSILAGDE

SEQ ID NO: 34589 - protein, 322 aa, Zea mays subsp. mays
DTQRQLQHSRGRQEGRRYQTSVKPSQRVSLSLSLVAWSVHRRISSAVAMAMAQQASLPCSTATTWRELTNTSWRDDDYRRMVMAYLIEAVYLLELERQERRDAAAVAQQWWKPFHFRLAHELVDDRDGSVFGAVFERDHHGARPGPGPSPSGAPSAVIAFRGTLLRAPTIRRDVEDELRLLARNSLRGSARLARAAQALRATIDRFGSENVCVCGHSLGAGFARQVVRTLVASSSSSSSSPRQPRQQAAAFAAATLESHLFNAPYLSLPMGVRSVVRTADCLVKALRSGVATVGKWHGKALRNVAYASCVLGYTRLESTRKL

SEQ ID NO: 34590 - protein, 314 aa, Zea mays subsp. mays
MERAHEHELEGRRLQADGDGVPDRGGVPAGAGAAGAPGRGGGGAAVVEAVPLPPGARAGGRPRRLRVRRRLRARPPRRQAGAGAEPERRAQRRHRVPGHAAARAHHPPRRRGRAPPAGTQQPAGLRQAGARRAGAARHHRPLRLRERLRLRPLPGRRLRAPGRPDARGLLLLLLLLAAATAPAGRRLRRRDARVPPLQRALPVAAHGRQERGQDGGLPGQGAPLRRRHRRQVARQGAPERGLRQLRPRIHQAREHQEVVRIDRIECLRHLASSSMLPLASTVEPSCQCQPNCIYARSPCSRKYSEINSILAGDE

SEQ ID NO: 34591 - protein, 274 aa, Zea mays subsp. mays
MAMAQQASLPCSTATTWRELTNTSWRDDDYRRMVMAYLIEAVYLLELERQERRDAAAVAQQWWKPFHFRLAHELVDDRDGSVFGAVFERDHHGARPGPGPSPSGAPSAVIAFRGTLLRAPTIRRDVEDELRLLARNSLRGSARLARAAQALRATIDRFGSENVCVCGHSLGAGFARQVVRTLVASSSSSSSSPRQPRQQAAAFAAATLESHLFNAPYLSLPMGVRSVVRTADCLVKALRSGVATVGKWHGKALRNVAYASCVLGYTRLESTRKL

SEQ ID NO: 34592 - DNA, 1417 bp, Zea mays subsp. mays
gcacgagaccattacctagaacatcctaatcgaaaattggcctcaatccctgaagtgcctgccaccacgccgcgccgcgcccgcgatacaacgacttcctgcagtcctgcgctgcgcccctcctttccgcctccacgctgccgacgtccaccacacagcacggtcgagtcacccgatccctccatggcggcggcggtggcggcggtcgcggctgccacgacggcggaggacgaggcgcgcctgctgcgtctggaggagcaggcggagcacggcgggcggcggcgcctgggactacctctgcctcgcccgccggctccgcgcccgccgccccgcccacgtcctccgcgtcggcctcgctctcctcaacaacgcctccgctcgctccggtctcgcctcagaacagtggacgctctacgagcaggtggccacggcggccatggattgccagcgtctcgatgtggcaaaggactgtattggagtcctttcaaagcaatttcctgacagcacccgggttgcccggctagaagctcttctgtttgaagcgaaaagtgaatgggctgaagctgaaagagcttacacacaaatcctggaaatcaatccatttgaccagattgtccacaagaggaaaattgctattgcaaaagcacaaggcaatatgtcgctagcgattggttatctcaataagtatctggaattatttatggcagatcatgatgcctggagagaacttgctgaaacatatgtttccttacaaatgtacaagcaagctgccttttgttatgaggagctaatattatcccaaccaactattccactctatcatatagcctatgctgaggttctgtacactatgggtggcttggaaaatcttcagacagctaagaagtactatgcatcaacaatccagttgactggaggcaagaatacaagagccctctttggtgtatgtctgtgtacttcggcaatcaatcagttgaccaaaggaaggaataaagaggaagagggctcggagctgcagagattggctgcagaagtactgctgaataattacaagcagcaggctccatcaaagggcgccccttatcagcagcttgttaaagaacatgaaactcagctgataccaactagctctacacattcagaatgtcctgattcgatagatagttaagttaaattgatgtggcataatgcttgttttttttttgtggcactggcaccaacattgtgcaatggttaaaaagtaggtgctcccaatgccatgggttgtgtacactacacctgtttgcttgcagagaaatatgcatgacttctttttcattggatgttctattatagatcacaataaaccccggccattgtacttcagcacaaacaaaactttgaatcagtcgctggtgaagttgtacctgttgatttt

SEQ ID NO: 34593 - protein, 243 aa, Zea mays subsp. mays
MDCQRLDVAKDCIGVLSKQFPDSTRVARLEALLFEAKSEWAEAERAYTQILEINPFDQIVHKRKIAIAKAQGNMSLAIGYLNKYLELFMADHDAWRELAETYVSLQMYKQAAFCYEELILSQPTIPLYHIAYAEVLYTMGGLENLQTAKKYYASTIQLTGGKNTRALFGVCLCTSAINQLTKGRNKEEEGSELQRLAAEVLLNNYKQQAPSKGAPYQQLVKEHETQLIPTSSTHSECPDSIDS

SEQ ID NO: 34594 - protein, 170 aa, Zea mays subsp. mays
MSLAIGYLNKYLELFMADHDAWRELAETYVSLQMYKQAAFCYEELILSQPTIPLYHIAYAEVLYTMGGLENLQTAKKYYASTIQLTGGKNTRALFGVCLCTSAINQLTKGRNKEEEGSELQRLAAEVLLNNYKQQAPSKGAPYQQLVKEHETQLIPTSSTHSECPDSIDS

SEQ ID NO: 34595 - protein, 166 aa, Zea mays subsp. mays
ARDHYLEHPNRKLASIPEVPATTPRRARDTTTSCSPALRPSFPPPRCRRPPHSTVESPDPSMAAAVAAVAAATTAEDEARLLRLEEQAEHGGRRRLGLPLPRPPAPRPPPRPRPPRRPRSPQQRLRSLRSRLRTVDALRAGGHGGHGLPASRCGKGLYWSPFKAIS

SEQ ID NO: 34596 - DNA, 202 bp, Zea mays subsp. mays
atcgaaaaacgccgccgcacctccgcccgccaccttcttcccggctccagcgatgtcgggggcgatcgggggcgccgaggtccacggcttccggggcgcagcggcgcagctcccgcggtcccgggtgctcgggaggccgatccgggtggcgccacccgccgcggcccggccgggcggtgcgtccgcgggtagcatacgcgcc

SEQ ID NO: 34597 - protein, 67 aa, Zea mays subsp. mays
SKNAAAPPPATFFPAPAMSGAIGGAEVHGFRGAAAQLPRSRVLGRPIRVAPPAAARPGGASAGSIRA

SEQ ID NO: 34598 - protein, 66 aa, Zea mays subsp. mays
RKTPPHLRPPPSSRLQRCRGRSGAPRSTASGAQRRSSRGPGCSGGRSGWRHPPRPGRAVRPRVAYA

SEQ ID NO: 34599 - protein, 63 aa, Zea mays subsp. mays
IEKRRRTSARHLLPGSSDVGGDRGRRGPRLPGRSGAAPAVPGAREADPGGATRRGPAGRCVRG

SEQ ID NO: 34600 - protein, 50 aa, Zea mays subsp. mays
MSGAIGGAEVHGFRGAAAQLPRSRVLGRPIRVAPPAAARPGGASAGSIRA

SEQ ID NO: 34601 - DNA, 728 bp, Zea mays subsp. mays
  misc_feature (391)..(391): n is a, c, g, or t
  misc_feature (472)..(472): n is a, c, g, or t
accaagtaccaactgcccgagacaagaacaactccaattcccatctctcactacggcaacactttgcgagctgagccatcaaagctcggggcggatggcggggcggcggcagatcaagaaggagtgggtgcaggcggcggcggacgcggcgtcgtggtgcgtggcgctgtcgctggtggcgatgctggtggtgctgtgcacgctgggcgccggggaaggcggcggcgccggcgcgccggtggtggtggtgcgcggcgcggcgctgtcggcgcggccgtgcgaggagatctacgtggtggcggagggcgagacgctgcacagcatcagcgacaagtgcggcgaccctctcatcctggagcggaacccgcacgtgcacgaccccgacgacgtnttccccggcctcgtcatccggatcacgccgtccaagcccaggtagatcgatggcgatccatcggtcgtcgtgaaccaaacngaatgccgttgctgacttgctgcggtgtcgtcaagccccctctgcatgatgccgcgtacgtactacggtgtgcagactgcactgcagagggagcgtagcgatgcaagaggacgccatatgtactgttaagtatgcatgaacagcgtgtagcaagaagctctggacgaggcctccagcctcctgtgtgtaaattgtaagggacgccgcgctagtgcttcaagtgaatgaagagataaaattgttggcttattttttt

SEQ ID NO: 34602 - protein, 189 aa, Zea mays subsp. mays
  misc_feature (131)..(131): Xaa can be any naturally occurring amino acid
  misc_feature (158)..(158): Xaa can be any naturally occurring amino acid
TKYQLPETRTTPIPISHYGNTLRAEPSKLGADGGAAADQEGVGAGGGGRGVVVRGAVAGGDAGGAVHAGRRGRRRRRRAGGGGARRGAVGAAVRGDLRGGGGRDAAQHQRQVRRPSHPGAEPARARPRRRXPRPRHPDHAVQAQVDRWRSIGRREPNXMPLLTCCGVVKPPLHDAAYVLRCADCTAEGA

SEQ ID NO: 34603 - protein, 144 aa, Zea mays subsp. mays
  misc_feature (130)..(130): Xaa can be any naturally occurring amino acid
PSTNCPRQEQLQFPSLTTATLCELSHQSSGRMAGRRQIKKEWVQAAADAASWCVALSLVAMLVVLCTLGAGEGGGAGAPVVVVRGAALSARPCEEIYVVAEGETLHSISDKCGDPLILERNPHVHDPDDXFPGLVIRITPSKPR

SEQ ID NO: 34604 - protein, 113 aa, Zea mays subsp. mays
  misc_feature (99)..(99): Xaa can be any naturally occurring amino acid
MAGRRQIKKEWVQAAADAASWCVALSLVAMLVVLCTLGAGEGGGAGAPVVVVRGAALSARPCEEIYVVAEGETLHSISDKCGDPLILERNPHVHDPDDXFPGLVIRITPSKPR

SEQ ID NO: 34605 - DNA, 1357 bp, Zea mays subsp. mays
  misc_feature (427)..(427): n is a, c, g, or t
gttttcattttggtcaaacaaaccaaggaagccctctgctctgcctcgcactcgcacacaccgtgcaccaccggccggccgggtcgtctcgtctcgtctccactgtccagcctccgccccccgcacctcgccatgtgctgccgccgccaacgcggccccgacgggacgcccgtcgacggcggccgccgccgccgccggggctgcggggccgtgctcgccgtgctggccctggcggccgccgcggcggtcgcgttcctggagagcacggccggcggggtctcgtacacgggggacgggtggctgcacgagtgcgccaagtgggacgccgagggcggccggttcctggcgtccaccttcttcggcggcggcgtggcggaggtgcgcgccggcgagggcgaggagcgggtggtcgtggcggaccctgacncggccggccgggtcgcgctggggctcgcggtcgacgcgcccaggcgccgcctgctcctggtgtactgcgatcgcccgccgcgcttcggatacgccgcgctcgccgcctacgacctcggatcgtggcgccgcctcttcctcacacgcctcgacgtgccaggcgagtcaacgttccccgacgacgtcgccgccgacgaggaaggcaacgcctacgtgaccgacgccagtggaaacaagatctggaaggtcagcccgagcggcgtgctgctgggcgtcatcaagaactccacgttcgtgcagcgaccagggctgcggcacaacctcgtcggcctcaacggcatcgtgtaccacccgaacggctacctcctcgtcgtccacaccttcggcggcgacctcttcaaggtcgacccgaagacggaggccgtgcacgccgtcaaggtgcaggggtcgctgggccgaggggacgggatggagctgctctccccgacgaggctggtcgtcgccggcacgccgagtagccggctggtggagagctccgacgactgggagaccgcgcgcgtcaccgggcagtacgtcgggccggtccaccgggttgggtcgtcggcgacggtgaaggacggggacgtgtacatcaaccacattgtcgggtttgggctcggcaagaagaagacgcacgtccttgcgagggcggtgttctcgccgttggccgcagcgagttgactgcggccggccggaccctccgtcgcgggatcaccaatcgctttttgcttaagcggcagttcatagttccactcagctccatgcatgagagttacaggctatatatacgtatttcggtgtgatatatagatgcttatgcttttgtattgacacgttgctcgaagctgcacgcttcttttgtttgatgcatgcaattgcaaaacatgtactc

SEQ ID NO: 34606 - protein, 381 aa, Zea mays subsp. mays
  misc_feature (143)..(143): Xaa can be any naturally occurring amino acid
VFILVKQTKEALCSASHSHTPCTTGRPGRLVSSPLSSLRPPHLAMCCRRQRGPDGTPVDGGRRRRRGCGAVLAVLALAAAAAVAFLESTAGGVSYTGDGWLHECAKWDAEGGRFLASTFFGGGVAEVRAGEGEERVVVADPDXAGRVALGLAVDAPRRRLLLVYCDRPPRFGYAALAAYDLGSWRRLFLTRLDVPGESTFPDDVAADEEGNAYVTDASGNKIWKVSPSGVLLGVIKNSTFVQRPGLRHNLVGLNGIVYHPNGYLLVVHTFGGDLFKVDPKTEAVHAVKVQGSLGRGDGMELLSPTRLVVAGTPSSRLVESSDDWETARVTGQYVGPVHRVGSSATVKDGDVYINHIVGFGLGKKKTHVLARAVFSPLAAAS

SEQ ID NO: 34607 - protein, 337 aa, Zea mays subsp. mays
  misc_feature (99)..(99): Xaa can be any naturally occurring amino acid
MCCRRQRGPDGTPVDGGRRRRRGCGAVLAVLALAAAAAVAFLESTAGGVSYTGDGWLHECAKWDAEGGRFLASTFFGGGVAEVRAGEGEERVVVADPDXAGRVALGLAVDAPRRRLLLVYCDRPPRFGYAALAAYDLGSWRRLFLTRLDVPGESTFPDDVAADEEGNAYVTDASGNKIWKVSPSGVLLGVIKNSTFVQRPGLRHNLVGLNGIVYHPNGYLLVVHTFGGDLFKVDPKTEAVHAVKVQGSLGRGDGMELLSPTRLVVAGTPSSRLVESSDDWETARVTGQYVGPVHRVGSSATVKDGDVYINHIVGFGLGKKKTHVLARAVFSPLAAAS

SEQ ID NO: 34608 - protein, 213 aa, Zea mays subsp. mays
  misc_feature (142)..(142): Xaa can be any naturally occurring amino acid
FSFWSNKPRKPSALPRTRTHRAPPAGRVVSSRLHCPASAPRTSPCAAAANAAPTGRPSTAAAAAAGAAGPCSPCWPWRPPRRSRSWRARPAGSRTRGTGGCTSAPSGTPRAAGSWRPPSSAAAWRRCAPARARSGWSWRTLXRPAGSRWGSRSTRPGAACSWCTAIARRASDTPRSPPTTSDRGAASSSHASTCQASQRSPTTSPPTRKATPT

SEQ ID NO: 34609 - DNA, 1693 bp, Zea mays subsp. mays
actcactcatagaggccgtcaggccagtcgccctcgcccagtagtaggctagtagcgacgggcgacggtggagatcgtgcgaggctgtgtactacctgtacgcctccatcgtcgcctcgcaccatcaatcctgtgcggtgccagatcctccccgggtcttgtcttgtcgcaggtggaagccatgtccgccgcggacgcagccggcggcaaggaggcggcgccggcgtgcgactcctgcacgggcatgccggcggtggtgtactgccgggccgactccgcgaggctgtgcctgcagtgcgaccgccacgtgcacggcgccaacaccgtgtccacccgccacgcccgggcgccgctctgcgccgggtgccacgcagccgctgccgctgccgccacgccggccgcttcctctgcgccagctgccgcttgggggaggagaaggatgagcgggacggcggtggcgccgccgacagtagtagcgacgacggtggcgcggtggaagggtacgccgggtgcccctcggtcgccgatctcgcgaccatcctgggcgccggctccgcgtgggaggagccccagacgctccgcttggagagccggagctccggcggcgagctggctgacgaggtcatccgccagctggtggagctcgccaggtcggaggcggcggctcgcgctgagatggagcagcttactccatggccgtcgccggagcttgctgccattactggacagtacgccgacttcggggctctcgacgctgacaccgcctggcatgatgatgcagcagccatcgcggcagcagtagtgccttccactgaggaggagcagcaagcgtggatcgcggccggctgcgacgtcggcgcgtgccggacggaggagaaggcgcgcgagaacgacgctgctctggccgagccgtgtctgtcctcgttcgtggagatgtcagagatctgccccgccagcgtcgtcggtcaccctcagccacggcggggacgagggcgtcgacagcagcggcaagacagccccgcggccgcagctggccgcgccgacgccggcgaagggcggctacgacgtggcctaccccgaccgcggcacggtgatctcgcgctacaaggagaagcggaagaacaggaggttcgacaagcagatccggtacgagtcgcgcaaggcccgcgccgacggccggatgcggatcaaggggcggttcgccaagtccggcgaggtctgagacgcgtgcgggcgctcacgccatgccaacggcaacgagctggtagggggaccgtgcgtgtgtttcacgtgggtggttaggtttggtattttggttggtgttgcagctcgctgctcgcacgtgtcgatgcgtactagtctacgttgattagagacggttgtctactctttcctcattcgtttaataaaacacggctccaccaccaatgcaagtttcaccccgatcgattggaagcgtgtgtttacgtggagaactcgctaagttagatgtcgtttggtaatgtaatagataaccgatattgttaaattatatttgtttaggtttaattataattaataatatactagaaatagataccggcttattcgaacttgttactgccggtattcgagagtgaatcattaccattattatttaagttgtatttcgtgaatcaaacgacacattagtttctagtcaaatttgttattc

SEQ ID NO: 34610 - protein, 208 aa, Zea mays subsp. mays
MEQLTPWPSPELAAITGQYADFGALDADTAWHDDAAAIAAAVVPSTEEEQQAWIAAGCDVGACRTEEKARENDAALAEPCLSSFVEMSEICPASVVGHPQPRRGRGRRQQRQDSPAAAAGRADAGEGRLRRGLPRPRHGDLALQGEAEEQEVRQADPVRVAQGPRRRPDADQGAVRQVRRGLRRVRALTPCQRQRAGRGTVRVFHVGG

SEQ ID NO: 34611 - protein, 206 aa, Zea mays subsp. mays
MSAADAAGGKEAAPACDSCTGMPAVVYCRADSARLCLQCDRHVHGANTVSTRHARAPLCAGCHAAAAAAATPAASSAPAAAWGRRRMSGTAVAPPTVVATTVARWKGTPGAPRSPISRPSWAPAPRGRSPRRSAWRAGAPAASWLTRSSASWWSSPGRRRRLALRWSSLLHGRRRSLLPLLDSTPTSGLSTLTPPGMMMQQPSRQQ

SEQ ID NO: 34612 - protein, 185 aa, Zea mays subsp. mays
MPAVVYCRADSARLCLQCDRHVHGANTVSTRHARAPLCAGCHAAAAAAATPAASSAPAAAWGRRRMSGTAVAPPTVVATTVARWKGTPGAPRSPISRPSWAPAPRGRSPRRSAWRAGAPAASWLTRSSASWWSSPGRRRRLALRWSSLLHGRRRSLLPLLDSTPTSGLSTLTPPGMMMQQPSRQQ

SEQ ID NO: 34613 - DNA, 1606 bp, Zea mays subsp. mays
gaaaatttccggtgctgagcgtgcatcggcagagctgactgtgactggtgaactgaaggaaaggggaggagaaggggagggaagctttgggcgggagaggaagcctagcagcaacagtaggcagtagcagggttgaccggaggggcagtggagtctggagagtaacccaacaaccccctcctcccctccccttctgtcttattgccacctctccacgtctccaccaaacaaggcaacaagggagaagtagatctgcatctgcgagaggaggcagcgggggtggtgatgatggagagccagccgctgcaggccccgacggccacggctccggcccccggatctgcggagccagccggagctccgccggccgtcacccccggcaaggagttcacgcgcacctgcaagggcctcgtcgtcgtgctcatcggaggatacgtgctgctccagctcctcccttcgtcactcaactacctcgccatcatcccctccaagacaatcccctatgtatggaccgtctttaccgctggttacatcgagcaagtcctcccaggggccattggcagttctcttggtcttctcttttgtggaaaggacattgaaccagcatggggccgcaaggaattcttgaagttcattattttgatcaactccatctgtggcattcttgcattttgctttgctattggactctactacgtcactggaaaggagagcttccttgtcacaccactttctggtttccacggttgccttgctggctttcttgtggccctgaagcaactcttaccaaaccttgagcttcctatgtgctttttctggaaaataaaggcaaagtggatgccattctttgttgtatgtttctcaagtatcatggccttcatcgtgcctgattccattaacttcctgccaactttggtgtccgggatgtacgttagctggctttacctgagatacttccaaaggaacccactgactggacttaagggtgatcccagtgatgacttttccttccccagtttattcccagctgccatgagaccagttacggaccctgtggccaacctgtttgataggctgttgtgtgcaaggtccaggcctttggaagtcgccctcccgatatcagatcctaccaaggcttcaagaagaagggagcgtggcgagagggttcttgaggaaaggttggcggctgacaatgctggtgacacagaggcctcgcctcgtggccatggcaccgcggaagactgagaactttcttgtgaccatcagctcctcttataggagccatggctttgctccctccagcgtttatagctctgcacttttgtcttctggagatggagctattcagttcacagcgaacgaataatacgatgttcttagtttctctttttttccgcttctttgtctgcgaggatttattggttaaattgtgtactagtcaattgttatggtacagcgaaaaagagagaagagggtgatggcatttgcagcgaggtgttgagattccgttgtagccatgcatttgcagccgattgtttggtactggtcaaagttctgtagtagtcatatactctgcttaaaatatagaaagaagaatggcttcgtc

SEQ ID NO: 34614 - protein, 319 aa, Zea mays subsp. mays
MMESQPLQAPTATAPAPGSAEPAGAPPAVTPGKEFTRTCKGLVVVLIGGYVLLQLLPSSLNYLAIIPSKTIPYVWTVFTAGYIEQVLPGAIGSSLGLLFCGKDIEPAWGRKEFLKFIILINSICGILAFCFAIGLYYVTGKESFLVTPLSGFHGCLAGFLVALKQLLPNLELPMCFFWKIKAKWMPFFVVCFSSIMAFIVPDSINFLPTLVSGMYVSWLYLRYFQRNPLTGLKGDPSDDFSFPSLFPAAMRPVTDPVANLFDRLLCARSRPLEVALPISDPTKASRRRERGERVLEERLAADNAGDTEASPRGHGTAED

SEQ ID NO: 34615 - protein, 318 aa, Zea mays subsp. mays
MESQPLQAPTATAPAPGSAEPAGAPPAVTPGKEFTRTCKGLVVVLIGGYVLLQLLPSSLNYLAIIPSKTIPYVWTVFTAGYIEQVLPGAIGSSLGLLFCGKDIEPAWGRKEFLKFIILINSICGILAFCFAIGLYYVTGKESFLVTPLSGFHGCLAGFLVALKQLLPNLELPMCFFWKIKAKWMPFFVVCFSSIMAFIVPDSINFLPTLVSGMYVSWLYLRYFQRNPLTGLKGDPSDDFSFPSLFPAAMRPVTDPVANLFDRLLCARSRPLEVALPISDPTKASRRRERGERVLEERLAADNAGDTEASPRGHGTAED

SEQ ID NO: 34616 - DNA, 907 bp, Zea mays subsp. mays
ctcgtccaaaaccctagccctcgcgccgccgccgccgtgcccagcgctcgagctcctcgcctgccgcgagctcgcgccgcaacgccaccatgaagttcaacatcgcgaacccgtctaccgggtgccagaagaagctggaaatcgatgacgaccagaaactacgtgccttttatgaccgaaggatctcccaggaggtcagtggtgatgctctgggtgaggagtttaagggttatgtcttcaagatcatgggtggatgtgagccaagacctatctgttatcaacttggtaattgttaagaagggtgagaacgatctgcctggtttaactgacactgagaagccaaggatgaggggtcccaaaagggcctccaagatcaggaagctgttcaatcttgcaaaggatgacgacgtgcgcaagtacgtgaacacgtaccgcaggacattcactaccaagaatggcaagaaggtgagcaaggcacctaagatccagcggcttgtgacccccttgaccctccagaggaagcgtgctagaattgctgacaagaagaagaggatcgctaagaagaagtctgaggctgctgagtaccagaagcttcttgcccagaggctgaaagaacagagggaccgccgcagtgagagcttggccaagaggaggtctaagctttctgccgccgccaaggcttctgctgccacctctgcctaagaatgatcagtgctttgagatgttttcaaggcctattttgttacagcttataagtaccttatgctgccctggctgtgttgcatcagtcgaccctccctacttagacttatgagtaattgttgcaattttgtatggacatggtactggcttgtcgggattttttgagtaccagaggtttgatatgttgttttattctgtgaacgcc

SEQ ID NO: 34617 - protein, 185 aa, Zea mays subsp. mays
MTTRNYVPFMTEGSPRRSVVMLWVRSLRVMSSRSWVDVSQDLSVINLVIVKKGENDLPGLTDTEKPRMRGPKRASKIRKLFNLAKDDDVRKYVNTYRRTFTTKNGKKVSKAPKIQRLVTPLTLQRKRARIADKKKRIAKKKSEAAEYQKLLAQRLKEQRDRRSESLAKRRSKLSAAAKASAATSA

SEQ ID NO: 34618 - protein, 176 aa, Zea mays subsp. mays
MTEGSPRRSVVMLWVRSLRVMSSRSWVDVSQDLSVINLVIVKKGENDLPGLTDTEKPRMRGPKRASKIRKLFNLAKDDDVRKYVNTYRRTFTTKNGKKVSKAPKIQRLVTPLTLQRKRARIADKKKRIAKKKSEAAEYQKLLAQRLKEQRDRRSESLAKRRSKLSAAAKASAATSA

SEQ ID NO: 34619 - protein, 165 aa, Zea mays subsp. mays
MLWVRSLRVMSSRSWVDVSQDLSVINLVIVKKGENDLPGLTDTEKPRMRGPKRASKIRKLFNLAKDDDVRKYVNTYRRTFTTKNGKKVSKAPKIQRLVTPLTLQRKRARIADKKKRIAKKKSEAAEYQKLLAQRLKEQRDRRSESLAKRRSKLSAAAKASAATSA

SEQ ID NO: 34620 - DNA, 1531 bp, Zea mays subsp. mays
  misc_feature (895)..(895): n is a, c, g, or t
  misc_feature (949)..(949): n is a, c, g, or t
  misc_feature (959)..(959): n is a, c, g, or t
  misc_feature (1037)..(1037): n is a, c, g, or t
  misc_feature (1072)..(1072): n is a, c, g, or t
  misc_feature (1099)..(1099): n is a, c, g, or t
tccgatccattccaccacccatctccctcctcagctcccctctccgctctccctccctcgctcgcgctctccacgcggatcaccggaggctagctagcaagctcgaccggcgcggccgatctagctcgcgcttgttggccgcttcagcttagcagcggcggcacgtcgtcaacctgtgctgtgagaaagactagtagagagagatacgtgtaaggatggctggcgcggggggtgcgacggctgtgaagcagccggcggcgggggcgcccgacgctggggccagcaggagcggggtcggggctggcgccgccggggcgccggtcgccgacccgcgcgccgaggcgctgcggtgcccgcgctgcgactcggccaacaccaagttctgctactacaacaactactcgctgtcgccagccgcggcacttctgcaatgcgtgcaagcgctactggacgcgcgggggcacgctccgcaacgtccccgtcggcgggggctgccgcaagaacaagcgctccaggagcagcggcgggcccggcgccggcgggaggaacgggtcctccgctgctgctgctgctgctgccgccgccgccgccgtcacgtcctcctcggcgccgtcgacgctgtccctcccgctgcatacggggtccctgccgtcgttgtcctcggcgctggggctgcccgggggcgcctcgctcgcgtcgctcctcctcgggaccgctggctctggcggtgaccacctcggcctcttccaggccgccatgcagtcggtggtctcctcggaggcgaccgcctacgagatgcagcagcagcaggcagcagcagacgcaggtggaccacctgctaggcctcggctacggaggcgccggcgccggcgccggcgcgcagatccacctcaanccgtggatgcacgaggcacccggtgctggcgcgggcgggatcatggacagcttntacgcgccgntgctgtccagctccctcgtgccgggcctggaggagctgcacgtcaaggcggaggtcgccggtgccggggatcaccagnagaagcccgcgcccggggaccagcagagcgccagntgggagctgccgacgccgtcgtcgtcnaacgtcgacgccaacgtcatcgcatctgacgcgctcatggccgccgccgccgcgtccatgaaccccggggttagctccgccacagcacccacggcgccaaccgtcccctcctccttcatgtactggggcaacggcggtattggcggcgctgccgcggcgtggccagacctcaccaactgcggatcttccattgccacgttcttctagccgtctggctgtcccgcactcccgctggcctcgttaacttcgttttttttaccttaattttctggttaattttttcttgactaaaataacatgtaatttgtggggaaagctgagatgagagagagagcgcactgtggaagaagagagctagatcatctcaccacctcatagggcagaaaattcgagaaatcaaacaatgatccaatatttcaagaggatttcttc

SEQ ID NO: 34621 - protein, 291 aa, Zea mays subsp. mays
  misc_feature (155)..(155): Xaa can be any naturally occurring amino acid
  misc_feature (173)..(173): Xaa can be any naturally occurring amino acid
  misc_feature (177)..(177): Xaa can be any naturally occurring amino acid
  misc_feature (203)..(203): Xaa can be any naturally occurring amino acid
  misc_feature (214)..(214): Xaa can be any naturally occurring amino acid
  misc_feature (223)..(223): Xaa can be any naturally occurring amino acid
MRASATGRAGARSATSPSAGAAARTSAPGAAAGPAPAGGTGPPLLLLLLPPPPPSRPPRRRRRCPSRCIRGPCRRCPRRWGCPGAPRSRRSSSGPLALAVTTSASSRPPCSRWSPRRRPPTRCSSSRQQQTQVDHLLGLGYGGAGAGAGAQIHLXPWMHEAPGAGAGGIMDSXYAPXLSSSLVPGLEELHVKAEVAGAGDHQXKPAPGDQQSAXWELPTPSSXNVDANVIASDALMAAAAASMNPGVSSATAPTAPTVPSSFMYWGNGGIGGAAAAWPDLTNCGSSIATFF

SEQ ID NO: 34622 - protein, 171 aa, Zea mays subsp. mays
MAGAGGATAVKQPAAGAPDAGASRSGVGAGAAGAPVADPRAEALRCPRCDSANTKFCYYNNYSLSPAAALLQCVQALLDARGHAPQRPRRRGLPQEQALQEQRRARRRREERVLRCCCCCCRRRRRHVLLGAVDAVPPAAYGVPAVVVLGAGAARGRLARVAPPRDRWLWR

SEQ ID NO: 34623 - DNA, 1696 bp, Zea mays subsp. mays
  misc_feature (440)..(441): n is a, c, g, or t
  misc_feature (443)..(444): n is a, c, g, or t
  misc_feature (1430)..(1430): n is a, c, g, or t
taatcaaaaaattattatttcttcttccagcgggcaattcctggccaccaccgggcgcgctgcaccgcgctatattactccgggctcgtggacaagcatgcagaggggcgtgtccttccctggcggaatggcggaggagtgcccgcccgccggcggcgccgagctctggctcccggacgagttcctggacgacgacttcttctccgaggaggagaaggcggcggtcgcggccaagagcgagagcgacgaggaggaagggatggacggcctctcgcgccgcgcggccgggctcgtcgtcgggggtggaggggacggttcccctgcaaaggcgcaagtgttagccggctcgccgcagtcgattctgtgcggcctgcatgcttccggggaggacagccccaacggcgcggcgtcgcaggtcagctcgccgccgtcgtcgccgnngnntaagacgccggccgacccctgggacctgctcaaagaggcggccggccaggtggcccgcatgcgcacaactagcggcatcctggtggcaacgaacgcgggcgcacatcaaagacaccccgtcccgccgctggcgcagaagctctctgcgccggccgacgctcccaaggccgcgggtgccaacctccctcaggctcagccgaagaactcgatggaacatcgccggattcagattgctcgttttaatgcgctgaagcagcagcagctcctgaagcacatgcgggagcgggagctcgccgtcgctacggcggcggcgtggggcacgagcgtcgcggggtctcatcgtgccgccgggtaccgtgcgccggcgccccatgtcctgagctcgtccgcgtggcccaccctccagaagcagcagcagcagcaaagggcggtgtccccggcgggcatgcgcgccgtcttcgtggcccctcctggcgccaagcgcgagtgcgccggcaccggcgtgttcatcccccgccaggccggcgcccccgcggagcccaagaaaaggccagcagcgtgcgcccctgtccttctcccggcgcgcgtcgtgcaggcgctcaacctcaacgtcgaggacctcggggcccgtcccatctacccgggcggcttcgtcctcgaccacgatgcactggtgagccggagcaacgctctgctggcgagccgcgcgtcccagcagctccatggcgcttcgtcgcgcgaggtgaatctcccccaggaatggacgtactgagggcgccgattcgccaccgcaccgctgcaagatgactcgacgatcactccagattaacggggggtgtcaaaaaaaaattactattgctattggtagcaataggtattataggtgttgttaggctagaagtaggaggcagcggtggtgtggcattacgcgccagcgttaggtgttcttttgtgcgggggtgatatattggttattttgggactgncggacgggttggtgatgagcaagagcgaaatcaatcatccgtggctctcgcaggtccgttgggggcggaggggagaaacagcaataataataataagtgggtgcttttgggggaggggagagaggggggtttggaactaatcctatgtttagctggttctggtactacgatggtttcccaagggaaaatcatcaagcattcagcagtctgtgaaagagatgtctcgtcactgtaagcaaataataataataataaacaggagctcc

SEQ ID NO: 34624 - protein, 404 aa, Zea mays subsp. mays
  misc_feature (147)..(148): Xaa can be any naturally occurring amino acid
NQKIIISSSSGQFLATTGRAAPRYITPGSWTSMQRGVSFPGGMAEECPPAGGAELWLPDEFLDDDFFSEEEKAAVAAKSESDEEEGMDGLSRRAAGLVVGGGGDGSPAKAQVLAGSPQSILCGLHASGEDSPNGAASQVSSPPSSPXXKTPADPWDLLKEAAGQVARMRTTSGILVATNAGAHQRHPVPPLAQKLSAPADAPKAAGANLPQAQPKNSMEHRRIQIARFNALKQQQLLKHMRERELAVATAAAWGTSVAGSHRAAGYRAPAPHVLSSSAWPTLQKQQQQQRAVSPAGMRAVFVAPPGAKRECAGTGVFIPRQAGAPAEPKKRPAACAPVLLPARVVQALNLNVEDLGARPIYPGGFVLDHDALVSRSNALLASRASQQLHGASSREVNLPQEWTY

SEQ ID NO: 34625 - protein, 372 aa, Zea mays subsp. mays
  misc_feature (115)..(116): Xaa can be any naturally occurring amino acid
MQRGVSFPGGMAEECPPAGGAELWLPDEFLDDDFFSEEEKAAVAAKSESDEEEGMDGLSRRAAGLVVGGGGDGSPAKAQVLAGSPQSILCGLHASGEDSPNGAASQVSSPPSSPXXKTPADPWDLLKEAAGQVARMRTTSGILVATNAGAHQRHPVPPLAQKLSAPADAPKAAGANLPQAQPKNSMEHRRIQIARFNALKQQQLLKHMRERELAVATAAAWGTSVAGSHRAAGYRAPAPHVLSSSAWPTLQKQQQQQRAVSPAGMRAVFVAPPGAKRECAGTGVFIPRQAGAPAEPKKRPAACAPVLLPARVVQALNLNVEDLGARPIYPGGFVLDHDALVSRSNALLASRASQQLHGASSREVNLPQEWTY

SEQ ID NO: 34626 - protein, 362 aa, Zea mays subsp. mays
  misc_feature (105)..(106): Xaa can be any naturally occurring amino acid
MAEECPPAGGAELWLPDEFLDDDFFSEEEKAAVAAKSESDEEEGMDGLSRRAAGLVVGGGGDGSPAKAQVLAGSPQSILCGLHASGEDSPNGAASQVSSPPSSPXXKTPADPWDLLKEAAGQVARMRTTSGILVATNAGAHQRHPVPPLAQKLSAPADAPKAAGANLPQAQPKNSMEHRRIQIARFNALKQQQLLKHMRERELAVATAAAWGTSVAGSHRAAGYRAPAPHVLSSSAWPTLQKQQQQQRAVSPAGMRAVFVAPPGAKRECAGTGVFIPRQAGAPAEPKKRPAACAPVLLPARVVQALNLNVEDLGARPIYPGGFVLDHDALVSRSNALLASRASQQLHGASSREVNLPQEWTY

SEQ ID NO: 34627 - DNA, 1477 bp, Zea mays subsp. mays
  misc_feature (154)..(154): n is a, c, g, or t
  misc_feature (254)..(255): n is a, c, g, or t
aatcgaaaaattttcgagctcaagctcaatcacttcggattggcggcgggcacgcgccggacgaaatggaagcggcaccatccgcccgcgccttctccccgtcctcgtctccctccgcgggggctagacccagccttcccctcgcgggcctggnctcgcgctcgcggcgcgcccgggtgctcgcggcgccgcccccgccccgcgccgtcgcctcctcccgcgcgccgctggtggtctccagcccgccaccgccnnaggactccggcacgcacaaccccgcgcacgccaaggtcgaccgctccggccgcttctgcagcccccgcgccgcacgggaactcgcgctgtgagtcccggcgtttccccagcttcagctcctacatacttcggtttctcttcttctgtgctgcgttggagttgggcttcggctgtggttctttgctgctggaggtgaaccgctacttccgcgtctcgtgtcgcaggatgatttcctacgccgcgtgtctggagggaaccgatgtcgtccggctcttcgatcgcaggatcagcgcaagacgagaacccgggtttgttttcaacaaggcatgcctattgagttacaaccatatgagctttggcgggggaccgctcgaggttggaacggaggaggaggctgagaagctggccagtcagaacgataaggattcagccaacgaagcagatgtactttcagctcctccaaaacttgtttacaacaactatgtattacggctgtccagggaacttttagtggctgttgccagtggatgggataagcatgtggttatcatcgacaaaataattccccaggcttggaaggatgaacctgtggcaaggattcttgagctctgcattctacatattgctatggctgagatgacatcaaaaggaacaccccacaaagttgtcattaatgaggcagtagatctggcaaagcgattttgtgatggtggtgcccctcgggtaatcaacggatgccttcgaacatttgtgaaggatcatgttgatgttgcaggcacgagccaggaagctaaatcaaaatcatgattttttgcaaatactcatacaacaaaatggtggctgaagtaaagaagtacggagaaaaccttgctgtcttgagttcaggcgaataccttctgtctccaaggtttagccttcaacctaagggaatctaaaaggtaaacatgatggactcatcaaggagccacaacacgttcattcttttagaatgttcggttattaggtgaagtatacagagctgtaaactggtgatgcacattcatgcttcatctaaaacaaccgaaggttatggcttctgatagcggatagcctactcgacgcagatcgttaaatgatcagatattaagatgaccaggagttgtgtaaaagcttgatgcacatgtaaaatgttatatatacttggcattggctcattgcaatgggagaaggatattctagtttc

SEQ ID NO: 34628 - protein, 353 aa, Zea mays subsp. mays
  misc_feature (52)..(52): Xaa can be any naturally occurring amino acid
  misc_feature (85)..(85): Xaa can be any naturally occurring amino acid
NRKIFELKLNHFGLAAGTRRTKWKRHHPPAPSPRPRLPPRGLDPAFPSRAWXRARGAPGCSRRRPRPAPSPPPARRWWSPARHRXRTPARTTPRTPRSTAPAASAAPAPHGNSRCESRRFPSFSSYILRFLFFCAALELGFGCGSLLLEVNRYFRVSCRRMISYAACLEGTDVVRLFDRRISARREPGFVFNKACLLSYNHMSFGGGPLEVGTEEEAEKLASQNDKDSANEADVLSAPPKLVYNNYVLRLSRELLVAVASGWDKHVVIIDKIIPQAWKDEPVARILELCILHIAMAEMTSKGTPHKVVINEAVDLAKRFCDGGAPRVINGCLRTFVKDHVDVAGTSQEAKSKS

SEQ ID NO: 34629 - protein, 193 aa, Zea mays subsp. mays
MISYAACLEGTDVVRLFDRRISARREPGFVFNKACLLSYNHMSFGGGPLEVGTEEEAEKLASQNDKDSANEADVLSAPPKLVYNNYVLRLSRELLVAVASGWDKHVVIIDKIIPQAWKDEPVARILELCILHIAMAEMTSKGTPHKVVINEAVDLAKRFCDGGAPRVINGCLRTFVKDHVDVAGTSQEAKSKS

SEQ ID NO: 34630 - DNA, 1055 bp, Zea mays subsp. mays
agaccattacctagaacatcctaatcgaaaagattatctccccggattccaaatcccatctccgattcactcggcccccgagccgccgccgggttcttcgcgcggacgatggcgggggctgccgagggcgccggcgcggaggcggtggagagggcgcacgggctctaccgcggcggccgccaccgggaggcgctggagctctactccgccgcgctggctgcggcgcgtagccccgcgcagcgcatcgcgctccacagcaaccgcgccgcctgctacctaaagctccacgacttccacaaggcagcacaagagtgtacatctgtcctcgagttggatacggagcatgctggagctctgatgttacgtgcccagactctcgtcactctgaaggattatcagtcagctctgtttgatgtcaacaggctcattgagataaacccgtcgtctgaagtgtatcggaacctgcaggcacgattgaagacacagctatcactggccccaattcctgagtgtgaagaggagtccctttgtcgtgaagaggaagaggaagaacttcctccacgagttcagaagaccgacacttcttctatcgctaagcctgaccaaccagcaaccaaactggtcctcgagaacaaaccttcagctggaccaattctccatagaaaacctgcaactgaacctctaaaggctgtggttccgtccacttcgccttcaaaaccccagggttgggaagccatcccaaaaccgaagagtcattcaggccttgactactcaaaatgggacaaaattgaagaggattcaagtgaagacgaggacgatgaggaagatgagcttccacagtacaagtttaaagtcagaagtgttggtgtgcggtctgtaaagtgaacagggttagcaatagattcagagtgtggtctgtgtacagtctaatagatgcccactgactagggtgccacttattcttctttattagttgagttatttggaatgaacaactatatattggttgatatttgcttgaatcagagataagaggatctccaagagtctccctt

SEQ ID NO: 34631 - protein, 258 aa, Zea mays subsp. mays
MAGAAEGAGAEAVERAHGLYRGGRHREALELYSAALAAARSPAQRIALHSNRAACYLKLHDFHKAAQECTSVLELDTEHAGALMLRAQTLVTLKDYQSALFDVNRLIEINPSSEVYRNLQARLKTQLSLAPIPECEEESLCREEEEEELPPRVQKTDTSSIAKPDQPATKLVLENKPSAGPILHRKPATEPLKAVVPSTSPSKPQGWEAIPKPKSHSGLDYSKWDKIEEDSSEDEDDEEDELPQYKFKVRSVGVRSVK

SEQ ID NO: 34632 - protein, 175 aa, Zea mays subsp. mays
MLRAQTLVTLKDYQSALFDVNRLIEINPSSEVYRNLQARLKTQLSLAPIPECEEESLCREEEEEELPPRVQKTDTSSIAKPDQPATKLVLENKPSAGPILHRKPATEPLKAVVPSTSPSKPQGWEAIPKPKSHSGLDYSKWDKIEEDSSEDEDDEEDELPQYKFKVRSVGVRSVK

SEQ ID NO: 34633 - DNA, 995 bp, Zea mays subsp. mays
  misc_feature (883)..(883): n is a, c, g, or t
aaacaaggcctgccactaactccgcgcacgcaacggcgaggtcgacgccgccggtcggcgatcgcgcactctgtctctgccgagtgccgccgtgctggatcttccgcccggcgctcctcagtcgaccttccgctcccgcccatggcacgaccctaagcccgccgctgtcggtggcggcggctggctctcagagtgggggtgggaccttatgctcggatcgatcgccgcgttctacgccgtcatggcgccctacaccaaggtggaggagagcttcaacgtgcaggccatgcatgatattctttatcacacttatcacatagatgtatgatcatttataatttcctggagttgttcttgttcctcgaacattcataggagcatttgttatctctattctctcatcaccggtagtcttttttttgcatgtacttcatgttccaaggttctatagtcttcttacagacgatcgttaaagctatgtatataatcttccatggatgtatatgctatctgatctgatgtttaatttctcattgatgcagttttggaaaactgatgtttttctttttccttttgtagctagactaacattgagctgtgttactttgacgagtttgagacttctcagagctcaggtgaaagaacccaaggtgtttgcacctgggaacatgagagaccctgacattctttcactgaattggcccggttgtccttgaggacaggacagcgagacgcccaggttcctgtcgcaggcaggaccacaaaccgccaacggtgaagatgtgcagtcgtctgtgtaacacagctcaatgttagtctagctacaaaaggaaaaagaaaaacatcagttttccaaaactgcatcaatgagaaattaaacatnagatcagatagcatatacatccatggaagattatatacatagctttaacgatcgtctgtaagaagactatagaaccttggaacatgaagtacatgcaaaaaaaaaaaaaaaa

SEQ ID NO: 34634 - protein, 105 aa, Zea mays subsp. mays
TRPATNSAHATARSTPPVGDRALCLCRVPPCWIFRPALLSRPSAPAHGTTLSPPLSVAAAGSQSGGGTLCSDRSPRSTPSWRPTPRWRRASTCRPCMIFFITLIT

SEQ ID NO: 34635 - protein, 72 aa, Zea mays subsp. mays
MYMLSDLMFNFSLMQFWKTDVFLFPFVARLTLSCVTLTSLRLLRAQVKEPKVFAPGNMRDPDILSLNWPGCP

SEQ ID NO: 34636 - protein, 70 aa, Zea mays subsp. mays
MLSDLMFNFSLMQFWKTDVFLFPFVARLTLSCVTLTSLRLLRAQVKEPKVFAPGNMRDPDILSLNWPGCP

SEQ ID NO: 34637 - DNA, 730 bp, Zea mays subsp. mays
gaggggtcccaagcccaaggaagcgaagcggaagagaccgagagggagaagcgtttctcctgggttgttcgggtgagccgctagcgagagcgagacggagcgaggctttgccgctgcagagcagagcgacatgagctaccggcttggaggcgcggcggaccgcgaggagggggacgaggagctgttcgagacggcgccgtccgtctccggcggcgagggctcgtgcgaccaggagcgccgcgcgttcgtgccgccgctgcggaggatgaactcggacagcatctacgacatggcgtccatggtgtcgcagcagctcccagccaagaaagggctatcgcggtactacgagggcaagtcgcagtcgttcgcgtgcatgtcggaggtgcgctgcctggaggacctgcgcaagaagggcagcccctacaagcacaggaccaacaagagctacggcgcgctgggactgggactgggagggatgatgtggccaagaagcccgcctccagctcctgcgccgacctcggcctcgccgccgccaacgggttcaggacggcccacggccccaattcagaacgggtaccaccagtgaggctgtagcctgtaggcagacgacgagagcactgcaactgttttttcgttctcttttttttttttacttctctactcttgttctgcgggatttccttcacgggcttgacttgacttgactgtgagaattttacgaggtggtgtg

SEQ ID NO: 34638 - protein, 151 aa, Zea mays subsp. mays
MSYRLGGAADREEGDEELFETAPSVSGGEGSCDQERRAFVPPLRRMNSDSIYDMASMVSQQLPAKKGLSRYYEGKSQSFACMSEVRCLEDLRKKGSPYKHRTNKSYGALGLGLGGMMWPRSPPPAPAPTSASPPPTGSGRPTAPIQNGYHQ

SEQ ID NO: 34639 - protein, 106 aa, Zea mays subsp. mays
MNSDSIYDMASMVSQQLPAKKGLSRYYEGKSQSFACMSEVRCLEDLRKKGSPYKHRTNKSYGALGLGLGGMMWPRSPPPAPAPTSASPPPTGSGRPTAPIQNGYHQ

SEQ ID NO: 34640 - protein, 98 aa, Zea mays subsp. mays
MASMVSQQLPAKKGLSRYYEGKSQSFACMSEVRCLEDLRKKGSPYKHRTNKSYGALGLGLGGMMWPRSPPPAPAPTSASPPPTGSGRPTAPIQNGYHQ

SEQ ID NO: 34641 - DNA, 2025 bp, Zea mays subsp. mays
agggacaaaaggtggtgcgatcttgttcggcacagagagagagagagagagagagagagagagagagagagagagagagagagagagagagcgacggagggtggcagggccgccgcgccggtgagccgacccccagccatggcattgccggctccccccgtccgcctggcgctgctgctgctcgtcgcgctgccattctgcgccgcgcatcccgggccgggggccttcaatgctcctcgccacttccagacgcccgcgctccactctgatggatttggcttggtggcaagaaggtcgattgctgaagctcctgctgacatcaacgtcactacgaatagctcctttgtgctggcggcagataggacatatcgaagggaccctttgaatggcttcaggaaatacccgggcggctggaatatcagtgaagtgcactatttcgcttccgtcggatatacagccattccgctgttcgccattgctctcgtgtggtttgtgatctttttcctggttatgcttgggatttgctgccgtcattgctgttgcccgcatcacacctacaagtattcacgaacagcatatgctctatcattgatacttctaatactgttcacatgtgctgcaattgctggatgtgctatgttatacgatggccagggaaaattccacaaaagcacaacgactactctgaagtttgttgttagccaggcaaattatactgttgacaaccttaggaacctatctgatagtttgtctgctgcaaagaaggtcgacatagcacagtcctttttgctgcctcctaatgtgcagaacgagataaatgaaattcaaggaaagctgaactcatcagctactgatcttgctattaaaacaacagataatgccgcgaagataaaaaaggtgctaaacagagtgcggcttgctttagttgtcattgcagctgtgatgcttcttctggcatttgttggcttcttgttatccatctttggtctggaattccttgtctctgtcttggttattattggatggatattggttactggaacgtttatcctgtgtggtgtatttcttcttctgcacaatgttgtttcagatacttgcgttgcaatggaagagtgggttgctcatccgacagaacacacagccctggacgaggttatcccctgcgtggagcctgccacggcgaacgaatccctgtacagaagcaggcaggtgacgttcgagctggtgaacgtggtgaaccaggtgatcaccaacgtgtcgaacaggaacttccccccgcagctgacgcctttctactacaaccagtcggggccactgatgcctctgctctgcaaccccttcacgcctgatctgagagaccgcaactgcagcagaggagaggttaccttggacaacgcaacccaggtgtggaagaagtacgagtgccagagcaccagcgtctcaggaggagccgagatctgcgcgacggtggggcgcgtcacccccagcatctacgggcagatgaccgcgggcgtgacggtgagtcaggggctgtaccagtacgggcctttcctcatccagctgcaggactgcaccttcgtgcgcgacaccttcacgaccatcaaccagggctactgcccggggctggagcgctacagcaagtgggtgtacgtgggcctggtgatggtctcgtcggcggtgatgctgtcgctcatcttctgggtgatctacgccagggagcggcggcaccgcgtgtacagcaagcagcaccagccgtacccggtggaggacaagccggcggcgacggtcccgggcgcttgaattgatggggccgttccagtgctccggcctactcccgtgccgctgtgcatactctactccgcgctagttgggttttacgtggtggtgtatgtaggtggatgtaccctggatttgttgtttcgtttgcttggtgttgctgtacgtttgctgattttccgtagacgaagttgctgtgcattctcgtactgacggtagctggatgaattgattatgttgggattgggc

SEQ ID NO: 34642 - protein, 599 aa, Zea mays subsp. mays
RDKRWCDLVRHRERERERERERERERERERATEGGRAAAPVSRPPAMALPAPPVRLALLLLVALPFCAAHPGPGAFNAPRHFQTPALHSDGFGLVARRSIAEAPADINVTTNSSFVLAADRTYRRDPLNGFRKYPGGWNISEVHYFASVGYTAIPLFAIALVWFVIFFLVMLGICCRHCCCPHHTYKYSRTAYALSLILLILFTCAAIAGCAMLYDGQGKFHKSTTTTLKFVVSQANYTVDNLRNLSDSLSAAKKVDIAQSFLLPPNVQNEINEIQGKLNSSATDLAIKTTDNAAKIKKVLNRVRLALVVIAAVMLLLAFVGFLLSIFGLEFLVSVLVIIGWILVTGTFILCGVFLLLHNVVSDTCVAMEEWVAHPTEHTALDEVIPCVEPATANESLYRSRQVTFELVNVVNQVITNVSNRNFPPQLTPFYYNQSGPLMPLLCNPFTPDLRDRNCSRGEVTLDNATQVWKKYECQSTSVSGGAEICATVGRVTPSIYGQMTAGVTVSQGLYQYGPFLIQLQDCTFVRDTFTTINQGYCPGLERYSKWVYVGLVMVSSAVMLSLIFWVIYARERRHRVYSKQHQPYPVEDKPAATVPGA

SEQ ID NO: 34643 - protein, 553 aa, Zea mays subsp. mays
MALPAPPVRLALLLLVALPFCAAHPGPGAFNAPRHFQTPALHSDGFGLVARRSIAEAPADINVTTNSSFVLAADRTYRRDPLNGFRKYPGGWNISEVHYFASVGYTAIPLFAIALVWFVIFFLVMLGICCRHCCCPHHTYKYSRTAYALSLILLILFTCAAIAGCAMLYDGQGKFHKSTTTTLKFVVSQANYTVDNLRNLSDSLSAAKKVDIAQSFLLPPNVQNEINEIQGKLNSSATDLAIKTTDNAAKIKKVLNRVRLALVVIAAVMLLLAFVGFLLSIFGLEFLVSVLVIIGWILVTGTFILCGVFLLLHNVVSDTCVAMEEWVAHPTEHTALDEVIPCVEPATANESLYRSRQVTFELVNVVNQVITNVSNRNFPPQLTPFYYNQSGPLMPLLCNPFTPDLRDRNCSRGEVTLDNATQVWKKYECQSTSVSGGAEICATVGRVTPSIYGQMTAGVTVSQGLYQYGPFLIQLQDCTFVRDTFTTINQGYCPGLERYSKWVYVGLVMVSSAVMLSLIFWVIYARERRHRVYSKQHQPYPVEDKPAATVPGA

SEQ ID NO: 34644 - protein, 429 aa, Zea mays subsp. mays
MLGICCRHCCCPHHTYKYSRTAYALSLILLILFTCAAIAGCAMLYDGQGKFHKSTTTTLKFVVSQANYTVDNLRNLSDSLSAAKKVDIAQSFLLPPNVQNEINEIQGKLNSSATDLAIKTTDNAAKIKKVLNRVRLALVVIAAVMLLLAFVGFLLSIFGLEFLVSVLVIIGWILVTGTFILCGVFLLLHNVVSDTCVAMEEWVAHPTEHTALDEVIPCVEPATANESLYRSRQVTFELVNVVNQVITNVSNRNFPPQLTPFYYNQSGPLMPLLCNPFTPDLRDRNCSRGEVTLDNATQVWKKYECQSTSVSGGAEICATVGRVTPSIYGQMTAGVTVSQGLYQYGPFLIQLQDCTFVRDTFTTINQGYCPGLERYSKWVYVGLVMVSSAVMLSLIFWVIYARERRHRVYSKQHQPYPVEDKPAATVPGA

SEQ ID NO: 34645 - DNA, 1859 bp, Zea mays subsp. mays
attttcgtcgcaatcctcaaaaagggaagacatggcggcgagcgcactgctgacggggtcgccgtggctgcgcatgcgcctcctaccggacgcgcccgcgcgccccttccgccacctccacctccgccggagcttctccgtccgcgcctccggcgccgacggcagccccgcccccgtccgcgtccgcttcgcgccgtcgcccaccggcaacctccacgtcggcggcgcccgcaccgcgctcttcaactacctcttcgcgcgctccaaggggggccgcttcgtgctccgcgtcgaggacaccgacctcgagcgctccaccaggaagtccgaggaggccgtcctcgccgacctcgcctggctcggtctagactgggacgaaggtcccgatgtcggtggggattttgggccttatcgccagtcagagcggaactcactgtacaaacagtatgctgagaagcttttggactctggtgcggtttaccgctgcttttgctccagcgaggaactcgagcaaatgaaggaagtcgcaaagcagagacaacttcctcctgtgtatatggggaagtgggcaagtgcttcagatgcagaagtacaacaggagttagagaaagggacaccttacacttaccgcttccgtgtgccaaaggaagggtctttgaaaattagtgacttaattcgtggtgaggtcagttggaacttagacacgcttggtgatttcgtgattatgagaagcaatggacagcctgtgtataacttctgtgtgacagttgacgacgctaccatgcaaatatctcatgttatcagagctgaagagcatctaccaaacacattgcgacaagctttaatttacaaagagtaaactgtctaaacggcatggagctacttctgtcgggcagtataaagatatgggctatctacctcaggcaatggtgaattatttagcactactgggctggggtgatggcactgagaatgagttcttcactattgatgacctagtccagaaattcactataaaccgtgtcaataaaagtggagcagtctttgatgcaacaaaattgaaatggatgaatggacaacatctaagatcatttccccatgatgaactcatcaaagcttttgaagatcggtggaaggacacaggcattctccaggaatctgaaagtggttttgctaaggaagctgccgagcttttgaaggatggtatcgatttgataacagatgcggacgcagctctaacgaatctgttgtcatatccccttcatactactctaagcagcgaggaagctaaacctgtggtgcaagacaagatctccgaggttgcttggagtcttatttccgcgtacgacagcggcgaactcggccaagcgctagctgagggccgtgatggctggcagaagtgggttaaaggtttcggcaagtctatcaaaagaaagggcaaggggctcttcatgccgctccgggtactgctgaccgggaagcttcatgggcctgacatgggtggcagcatcgccctaatacacaaggccggcgtctgctgcgctgtgactccgcagtccaacttcgtgactctagacgagcggttcaggatgctcaaggacgtcgactgggagtcgctggcgaaggagcaggaaacccctgctgtccctgccgccgcttcctagactgccaggaggacgacgttgcgcgcaatgtcgctcttgagttttttttttaaaaatccattttggcgtgtttttgtcaccgttcgtttccatggagtaggagaggagctcagtggtttggtcataggtcgttggtgctgtaatgtgggcaataatattgaattattattattagatgatgatgatgatgcatgt

SEQ ID NO: 34646 - protein, 285 aa, Zea mays subsp. mays
FSSQSSKREDMAASALLTGSPWLRMRLLPDAPARPFRHLHLRRSFSVRASGADGSPAPVRVRFAPSPTGNLHVGGARTALFNYLFARSKGGRFVLRVEDTDLERSTRKSEEAVLADLAWLGLDWDEGPDVGGDFGPYRQSERNSLYKQYAEKLLDSGAVYRCFCSSEELEQMKEVAKQRQLPPVYMGKWASASDAEVQQELEKGTPYTYRFRVPKEGSLKISDLIRGEVSWNLDTLGDFVIMRSNGQPVYNFCVTVDDATMQISHVIRAEEHLPNTLRQALIYKE

SEQ ID NO: 34647 - protein, 275 aa, Zea mays subsp. mays
MAASALLTGSPWLRMRLLPDAPARPFRHLHLRRSFSVRASGADGSPAPVRVRFAPSPTGNLHVGGARTALFNYLFARSKGGRFVLRVEDTDLERSTRKSEEAVLADLAWLGLDWDEGPDVGGDFGPYRQSERNSLYKQYAEKLLDSGAVYRCFCSSEELEQMKEVAKQRQLPPVYMGKWASASDAEVQQELEKGTPYTYRFRVPKEGSLKISDLIRGEVSWNLDTLGDFVIMRSNGQPVYNFCVTVDDATMQISHVIRAEEHLPNTLRQALIYKE

SEQ ID NO: 34648 - protein, 261 aa, Zea mays subsp. mays
MRLLPDAPARPFRHLHLRRSFSVRASGADGSPAPVRVRFAPSPTGNLHVGGARTALFNYLFARSKGGRFVLRVEDTDLERSTRKSEEAVLADLAWLGLDWDEGPDVGGDFGPYRQSERNSLYKQYAEKLLDSGAVYRCFCSSEELEQMKEVAKQRQLPPVYMGKWASASDAEVQQELEKGTPYTYRFRVPKEGSLKISDLIRGEVSWNLDTLGDFVIMRSNGQPVYNFCVTVDDATMQISHVIRAEEHLPNTLRQALIYKE

SEQ ID NO: 34649 - DNA, 1321 bp, Zea mays subsp. mays
tagaacatcctaatcaaaaaccgccccaaaccaaaaaccgccgccaagtacttccccgcgcacctcgactcctccccgcgcatcgcgccccgccgcgccgcgcccaccgcgagcctctccttctccccgctctccgccagcccgtcgtccctgctccgcctccggtccccctgcccgtccggcccggggggcaggctgcccccgcccccgccgccagcgcgcccgtctcgcacgcgcagcacaggacgcgcgcgatcccctcgcgtccggatcgccatggccgccgcggcgggggcatcctcgggctcttcctcgccgggtgggccgcccgggtcgccgcggacccgcagttccctttcaaggtgctcatggaggagctcgtgggcgtcaccgcgtgcgtgctgggcgacatggcctcccgccccaacttcggcctcaacgagctcgacttcgtcttctccaccctcgtcgtcggctccatcctcaacttcgtcctcatgtacctcctcgcccccaccgccgccgcgtcgtccgccgcctccgcgctccccagccacatgttcgagcccggcgccttctcgctcggctcccgcgtcgccacgctcgtgtccaagggcgccaccttcgcggtggtcggcttcgcggccgggctcgcgggaaccgcgctctccaacggccttatggcgatgcggaagcgcatggacccggcgttcgagacgcccaacaagccgccgcccacgctgctcaacgcggccacctgggcgctccacatggccggcagcagcaacctgcggtaccagacgctgaatggggtcgagtacatgctcggcaaggtcgcaccggcgccggtgttcaaggcgtccgtcgttgttctccgatgcttgaacaacgtgcttggtggggtgtccttcgtgctgcttgctaggttgaccggggcgcaaaaatcagataagccggcgacggtcgcggaagagaaggagaggttgatagctgtgggcaatgctgcagcagatgccatcggtgaggcaagagatggagaggagggtaagtaagtggtagaggagaggaacagtaagatgatggtgcatcgtcccacgctcttttgcaagaaacctgtagagttggttggaatggaataaggagtgaggctcaacttcttttcttaaagtcggtttgtggtttgtcgctgttgatgattacttcctccgtttcgttttagttgtcgctggatagtataaaattaaactattcagcgataactagaaagaaacaaagaaacggagggagtatatgcttagaatgaagtttttctctcatcctt

SEQ ID NO: 34650 - protein, 349 aa, Zea mays subsp. mays
EHPNQKPPQTKNRRQVLPRAPRLLPAHRAPPRRAHREPLLLPALRQPVVPAPPPVPLPVRPGGQAAPAPAASAPVSHAQHRTRAIPSRPDRHGRRGGGILGLFLAGWAARVAADPQFPFKVLMEELVGVTACVLGDMASRPNFGLNELDFVFSTLVVGSILNFVLMYLLAPTAAASSAASALPSHMFEPGAFSLGSRVATLVSKGATFAVVGFAAGLAGTALSNGLMAMRKRMDPAFETPNKPPPTLLNAATWALHMAGSSNLRYQTLNGVEYMLGKVAPAPVFKASVVVLRCLNNVLGGVSFVLLARLTGAQKSDKPATVAEEKERLIAVGNAAADAIGEARDGEEGK

SEQ ID NO: 34651 - protein, 227 aa, Zea mays subsp. mays
MEELVGVTACVLGDMASRPNFGLNELDFVFSTLVVGSILNFVLMYLLAPTAAASSAASALPSHMFEPGAFSLGSRVATLVSKGATFAVVGFAAGLAGTALSNGLMAMRKRMDPAFETPNKPPPTLLNAATWALHMAGSSNLRYQTLNGVEYMLGKVAPAPVFKASVVVLRCLNNVLGGVSFVLLARLTGAQKSDKPATVAEEKERLIAVGNAAADAIGEARDGEEGK

SEQ ID NO: 34652 - protein, 213 aa, Zea mays subsp. mays
MASRPNFGLNELDFVFSTLVVGSILNFVLMYLLAPTAAASSAASALPSHMFEPGAFSLGSRVATLVSKGATFAVVGFAAGLAGTALSNGLMAMRKRMDPAFETPNKPPPTLLNAATWALHMAGSSNLRYQTLNGVEYMLGKVAPAPVFKASVVVLRCLNNVLGGVSFVLLARLTGAQKSDKPATVAEEKERLIAVGNAAADAIGEARDGEEGK

SEQ ID NO: 34653 - DNA, 1676 bp, Zea mays subsp. mays
atccgtccctcctctcctgttccctccccgagtcgatatctcaccgtcgtgcgagtaaaacaaagcctcgccgccacggcgccacgcgagcaaagacctagcgcgagcaagcaagggaggcagagaccttagtgcgtcgcgcaacgcggctcggcccgacggcatggagagcctcgtcctcgcctcctcctgctccccgtccccacggctgccgctactctcccccttcgcccgcttccgccggctgcccggctccatgccacaggcgccggcgtccaccagcggtgccacgcggaaaggtcccaggaggcacatgctcttcgtcgccgccgccaccgcggccccttccggatccaggaacgttttcaaggaattgagagcaaaaggctttgcaagcatgtcatcttcgactggcaatgagaatatgtctactgaaactggcaccctgcctcccatgcctcccccatcatcatacattggttcacctgttttctggattggagttggtgtagcattgtctgtggcgtttaccacggtttcttccatgctaaagaaatatgccatggaacaagcatttaagtcaatgatgacccaagcaccaccaaactcatttggctccaactcgcctttcccatttggcatgccaccacaggcatctcctactgcaccaagcagtttttcgtacttggaaccaaagaaagatacctccccacaggtgtcaactgttgatgtctcagctaccgaagtggatgccgctggaacatcgaaagaggtggatgtgactgagacaccaaaaccttctaagaaatttgcatttgttgatgtttctcccgaagatttgcagcaaaaggacctccaatcttcactggagatggtagatgtaaaacatgatagtatagaaagtgaaagtaaggaggatactgaggaaaaggctcccacaaatggagcgacttttaagctgaatgaggatgctgctcgtgggccaactgaatccagtcaatcaggacctatgctatctgttgagacaattgagaagatgatggaagatccagctgtgcagaagatgggtttatccctacttgcctgaagagatgaggaacccagattcgttcaagtggatgctgcagaatccaatgtaccggcaacaactacaggatatgctaaagaacatgggtggatctcctgatcaatgggataaccgtatgctcgatcacctgaagaactttgaccttagcagtccagaagtgcggcagcagtttgcgcaagttggcatgactcccgaggaagtggtatcgaaaataatggcaaacccagatgtagctgtcgcattccagaacccaaaaatacagacagccatcatggactgctcgcagaaccctcttaacattgtaaagtaccaaaacgacaaggaggtcatggatgttttcatgaagatatcacagatctttccccaaatcaacggctagctggtcttcactgcgggattgcagtcttgattttttttgtcggcctatcatcccctgtgtctggagggcctgctgcggtaaccatctttgaaggaaaagggaacacctgttgctgttgggccgtgacgctctggataaaccctccctgtgtcgagctttttgagtttcatatgtagtagagtacatcgtgtgatgtagcggccttggtcc

SEQ ID NO: 34654 - protein, 307 aa, Zea mays subsp. mays
MESLVLASSCSPSPRLPLLSPFARFRRLPGSMPQAPASTSGATRKGPRRHMLFVAAATAAPSGSRNVFKELRAKGFASMSSSTGNENMSTETGTLPPMPPPSSYIGSPVFWIGVGVALSVAFTTVSSMLKKYAMEQAFKSMMTQAPPNSFGSNSPFPFGMPPQASPTAPSSFSYLEPKKDTSPQVSTVDVSATEVDAAGTSKEVDVTETPKPSKKFAFVDVSPEDLQQKDLQSSLEMVDVKHDSIESESKEDTEEKAPTNGATFKLNEDAARGPTESSQSGPMLSVETIEKMMEDPAVQKMGLSLLA

SEQ ID NO: 34655 - protein, 276 aa, Zea mays subsp. mays
MPQAPASTSGATRKGPRRHMLFVAAATAAPSGSRNVFKELRAKGFASMSSSTGNENMSTETGTLPPMPPPSSYIGSPVFWIGVGVALSVAFTTVSSMLKKYAMEQAFKSMMTQAPPNSFGSNSPFPFGMPPQASPTAPSSFSYLEPKKDTSPQVSTVDVSATEVDAAGTSKEVDVTETPKPSKKFAFVDVSPEDLQQKDLQSSLEMVDVKHDSIESESKEDTEEKAPTNGATFKLNEDAARGPTESSQSGPMLSVETIEKMMEDPAVQKMGLSLLA

SEQ ID NO: 34656 - protein, 257 aa, Zea mays subsp. mays
MLFVAAATAAPSGSRNVFKELRAKGFASMSSSTGNENMSTETGTLPPMPPPSSYIGSPVFWIGVGVALSVAFTTVSSMLKKYAMEQAFKSMMTQAPPNSFGSNSPFPFGMPPQASPTAPSSFSYLEPKKDTSPQVSTVDVSATEVDAAGTSKEVDVTETPKPSKKFAFVDVSPEDLQQKDLQSSLEMVDVKHDSIESESKEDTEEKAPTNGATFKLNEDAARGPTESSQSGPMLSVETIEKMMEDPAVQKMGLSLLA

SEQ ID NO: 34657 - DNA, 1955 bp, Zea mays subsp. mays
  misc_feature (221)..(221): n is a, c, g, or t
ctagaacatcctaatcgaaaaaagaactgtaaaaggtacgaggggccaaacaggaaaagtgagcccaaaccctagacccatggaagcgtggccgcctctagcccccgcggcggccgcagccgccaccccggtcgctgcctccgacgatgcggcggtcactcccgccggttccggggcgtggggaccagcggcaacggcgcagcggaaggccgtggagcacngagtcagcggcgcaggcggtgagccgcatcgtggcgagctgcgccaactccagcggcgtggcggtcgccgtggtggacgccaacgccgttatctccggcgcccccgccctctccacatccgcggggcgccttgtcaccgtgccggaggtgctcgaggaggtccgggacgcggccgcgcgccgacggctcggactcctccccatccccgtcgagaccgttgatcctgcgcccgagttcgtgaagaaagttaccaagtttgccagggagacaggagacatccaaacactttcagatgttgatatcaagattattgctttggcttacatgttagaagctgagatccatgggagtagccatttgcgggagcaccctcctcctctgcttgaggtgaatgtcagaaagctgtcagaagctccactgcctggttggggctctaatgtgcctaacctgaaagagtgggaagaattggatcagatgtcagaagctggtggagatatcaattctagaatacttcctctgaaggacattgagaatcaagatctcccgatgagcgagaccaacattgtgtgtgaggcacaggaggatacagaggaccagccttcagagaaggatgcacctgttgcatgggaagaggatgagaataatgtaggttggatgcctgctgttagccgcagcacacacagaagatatttgcggaggaaggcaaggcgtgatgccctcaaagaatctggacaaagttttgagacgagttctgttgctgcatcaattgatagcgataaagttctctctgaaaatggagggttggagcatggtctgacttcaacaggtggcctctcttttgtccctgagaaaatcagtgcaagttctgatggttttgaacttcaagcagaccctgaaattgctggagaacagttgcattctgaccagctatcttatggtgatgatactgatgcatgtaccaaagaattggacaaactagatataaaaggtgaggatgagggaggtgatgatgcacattccgtagactatgagagcagcgaacagagttgggccctgaggtccttatctgaatcaactatagcatgtgttactagtgattacgcgatgcaaaacgtcatcctgcagattggcctccggctcatagcaccaggtggcatgcagatacgccagatgcataggtgggttttgaggtgccatgcttgctataaggtgacccaagaggttggcaaaatattttgtccgaagtgtggcaatggtgggaccttaaggaaggtctcagtgacagttggtgaaaatgggatcactatggcttcacggcgcccacgtgttacacttcgaggcacaaaattttcgctcccaatgcctcaaggtggaagagatgccataactaagaaccccattctacgtgaggaccagcttcctcagaaggttcttcatcctaaattgaagaagtccagcaaggcggatgatttcttgggcgttgaggacatattttcgcacagtggtgataagaaggcgtcactgaaacctccagttggcaaggcactggcaatgttcagcgggaaaaggaatccgaacgacaaccacttctctcgcaagaagcactaagctgtccccttttcatgcacacctaatggtaccctagtttgtaagcaagaagagtggctgagagggggagtctatcgtattcatgtacgaacacatatataagcatgttaagctatgcagttttgc

SEQ ID NO: 34658 - protein, 560 aa, Zea mays subsp. mays
  misc_feature (25)..(25): Xaa can be any naturally occurring amino acid
MRRSLPPVPGRGDQRQRRSGRPWSXESAAQAVSRIVASCANSSGVAVAVVDANAVISGAPALSTSAGRLVTVPEVLEEVRDAAARRRLGLLPIPVETVDPAPEFVKKVTKFARETGDIQTLSDVDIKIIALAYMLEAEIHGSSHLREHPPPLLEVNVRKLSEAPLPGWGSNVPNLKEWEELDQMSEAGGDINSRILPLKDIENQDLPMSETNIVCEAQEDTEDQPSEKDAPVAWEEDENNVGWMPAVSRSTHRRYLRRKARRDALKESGQSFETSSVAASIDSDKVLSENGGLEHGLTSTGGLSFVPEKISASSDGFELQADPEIAGEQLHSDQLSYGDDTDACTKELDKLDIKGEDEGGDDAHSVDYESSEQSWALRSLSESTIACVTSDYAMQNVILQIGLRLIAPGGMQIRQMHRWVLRCHACYKVTQEVGKIFCPKCGNGGTLRKVSVTVGENGITMASRRPRVTLRGTKFSLPMPQGGRDAITKNPILREDQLPQKVLHPKLKKSSKADDFLGVEDIFSHSGDKKASLKPPVGKALAMFSGKRNPNDNHFSRKKH

SEQ ID NO: 34659 - protein, 427 aa, Zea mays subsp. mays
MLEAEIHGSSHLREHPPPLLEVNVRKLSEAPLPGWGSNVPNLKEWEELDQMSEAGGDINSRILPLKDIENQDLPMSETNIVCEAQEDTEDQPSEKDAPVAWEEDENNVGWMPAVSRSTHRRYLRRKARRDALKESGQSFETSSVAASIDSDKVLSENGGLEHGLTSTGGLSFVPEKISASSDGFELQADPEIAGEQLHSDQLSYGDDTDACTKELDKLDIKGEDEGGDDAHSVDYESSEQSWALRSLSESTIACVTSDYAMQNVILQIGLRLIAPGGMQIRQMHRWVLRCHACYKVTQEVGKIFCPKCGNGGTLRKVSVTVGENGITMASRRPRVTLRGTKFSLPMPQGGRDAITKNPILREDQLPQKVLHPKLKKSSKADDFLGVEDIFSHSGDKKASLKPPVGKALAMFSGKRNPNDNHFSRKKH

SEQ ID NO: 34660 - protein, 377 aa, Zea mays subsp. mays
MSEAGGDINSRILPLKDIENQDLPMSETNIVCEAQEDTEDQPSEKDAPVAWEEDENNVGWMPAVSRSTHRRYLRRKARRDALKESGQSFETSSVAASIDSDKVLSENGGLEHGLTSTGGLSFVPEKISASSDGFELQADPEIAGEQLHSDQLSYGDDTDACTKELDKLDIKGEDEGGDDAHSVDYESSEQSWALRSLSESTIACVTSDYAMQNVILQIGLRLIAPGGMQIRQMHRWVLRCHACYKVTQEVGKIFCPKCGNGGTLRKVSVTVGENGITMASRRPRVTLRGTKFSLPMPQGGRDAITKNPILREDQLPQKVLHPKLKKSSKADDFLGVEDIFSHSGDKKASLKPPVGKALAMFSGKRNPNDNHFSRKKH

SEQ ID NO: 34661 - DNA, 906 bp, Zea mays subsp. mays
ctctcacctttctcactcccgtctctctcgtctctctctctctccctggatcccgcccgccactggccgcccccactcgcccgccaccgccaccccggccccgaccccatccaccacggctgcccccgcccccggccgccactcccgccggcgcggccgcccaagcccacacccgccatgggagtcgggagctcagatcgggagggacggggtaggtagggttcacgagcgagcgagggtgctgccgtcgggcgccggtgtccaagtagcaagaggagagatggacgcgttcctacagagactcaagcggttggacgcgtaccccaaggtgaacgaggacttctacaagtggacgctctttggcggcatcgtcacgctcgtcgccgccgtcgtcatgttgcttctcttcatctccgagaccaggtcatatttttattcagcaacagagactaagttagttgtggacacatcaagaagagaaaggctacgagtaaatgttagtactttttaaacgaaataaactgtctgtaggctattggctgatcttggtgtttcttggggaaaagagtacgagcactctcaataatgtaactcagcaaatgtcatttgtacatatatattagacacctccagctaccttgccaacgcaagaacgagaagacgagttagactttgtcaaaaccctcttcactagtggaggtatcgaccatcactcgtcactgtaacccgatggtgatcggcaaccatgagcttccatgttattgtgttctgatacttgagacgtttattatgattatgtatgagatattgtctcttattagtactggatgatgagatgtgtcttattatgactacggatgagacttttgtgatgtaattgatgagactatggatttaaaaattgct

SEQ ID NO: 34662 - protein, 169 aa, Zea mays subsp. mays
SHLSHSRLSRLSLSPWIPPATGRPHSPATATPAPTPSTTAAPAPGRHSRRRGRPSPHPPWESGAQIGRDGVGRVHERARVLPSGAGVQVARGEMDAFLQRLKRLDAYPKVNEDFYKWTLFGGIVTLVAAVVMLLLFISETRSYFYSATETKLVVDTSRRERLRVNVSTF

SEQ ID NO: 34663 - protein, 76 aa, Zea mays subsp. mays
MDAFLQRLKRLDAYPKVNEDFYKWTLFGGIVTLVAAVVMLLLFISETRSYFYSATETKLVVDTSRRERLRVNVSTF

SEQ ID NO: 34664 - DNA, 1214 bp, Zea mays subsp. mays
  misc_feature (409)..(409): n is a, c, g, or t
  misc_feature (422)..(422): n is a, c, g, or t
atggcggaggcgctgcttctcgcgtgccacctcgccctctctttctccctcctcgccgcctccctctcccacctcatcgtggccgccgtctcccaccgctcgccctcctccctccaccaccgcctcatccgcctgctccgccacccgctcatccgcctcctcccgccgctcctcgcgctccccttcgccttcctcccgctcgcctccacgcccctactgccgcttctcctcctccctccactgctcccgctcctcccgctccccttcctccctccccacctcccgctcctccgcccgctcctcctcaccctgccgctcctcctgctcgcccgcgcggcagacctcctcgccgcctcgttccctgactcggacctccaggcgcacgcgctcgccgtcgcgcgcctcctcntcctcgccgcggnggggggcctctctcgtctcgtcgctctgcgcctccgcgccgaggggcacgacggcggccggcgcccacttcgtcgccgaggcggggctcgcctgcgcgggcgccgtgggcgggctctgggcggcgcagagcgggctcaatctttacgtcgacgcgtgcgtgcccacggggtgccaccgcctcctcgacaccggcagcaccgcagcgcccgccacgcggtgcgacgtcgacgaggctaggctcagggccgtcgctgtcatggatctcgccctgtccgtgcactgcgtcatcgtgactgccatcgtggcgggggtgctcctcggggtggcgaggtggtttggggttgacagcagcgctggtacggggaggaggcataatggatcctcctatgatgcattgcccacagtggcatctgctgggacaatggtggagatggagcatttgcaggggaagggtgttgttggcaagatcgtggcgcaggagtgaaatatgcgcaatgtattggattaactaggtacatttcaaatgactcgagtatatgccagagatgtcaacccctgaaatgggtggggatatttggccggtccaaatggtggcagaatttgttctgtggaatgctgatcattagttgcaatgagagtatactagtcactgctgctgcagatgaattgcattgttcattggctgttggtgcccaatctatgtctggaccattgttgttggtggccggctgcactgatctgaatgctttagttatgtccaagatttgatatttggtagttttgtctactcc

SEQ ID NO: 34665 - protein, 301 aa, Zea mays subsp. mays
  misc_feature (136)..(136): Xaa can be any naturally occurring amino acid
  misc_feature (141)..(141): Xaa can be any naturally occurring amino acid
WRRRCFSRATSPSLSPSSPPPSPTSSWPPSPTARPPPSTTASSACSATRSSASSRRSSRSPSPSSRSPPRPYCRFSSSLHCSRSSRSPSSLPTSRSSARSSSPCRSSCSPARQTSSPPRSLTRTSRRTRSPSRASXSSPRXGASLVSSLCASAPRGTTAAGAHFVAEAGLACAGAVGGLWAAQSGLNLYVDACVPTGCHRLLDTGSTAAPATRCDVDEARLRAVAVMDLALSVHCVIVTAIVAGVLLGVARWFGVDSSAGTGRRHNGSSYDALPTVASAGTMVEMEHLQGKGVVGKIVAQE

SEQ ID NO: 34666 - protein, 219 aa, Zea mays subsp. mays
  misc_feature (137)..(137): Xaa can be any naturally occurring amino acid
  misc_feature (141)..(141): Xaa can be any naturally occurring amino acid
MAEALLLACHLALSFSLLAASLSHLIVAAVSHRSPSSLHHRLIRLLRHPLIRLLPPLLALPFAFLPLASTPLLPLLLLPPLLPLLPLPFLPPHLPLLRPLLLTLPLLLLARAADLLAASFPDSDLQAHALAVARLLXLAAXGGLSRLVALRLRAEGHDGGRRPLRRRGGARLRGRRGRALGGAERAQSLRRRVRAHGVPPPPRHRQHRSARHAVRRRRG

SEQ ID NO: 34667 - DNA, 997 bp, Zea mays subsp. mays
  misc_feature (446)..(446): n is a, c, g, or t
  misc_feature (489)..(489): n is a, c, g, or t
  misc_feature (540)..(540): n is a, c, g, or t
  misc_feature (612)..(612): n is a, c, g, or t
  misc_feature (624)..(624): n is a, c, g, or t
  misc_feature (635)..(635): n is a, c, g, or t
  misc_feature (680)..(680): n is a, c, g, or t
  misc_feature (714)..(714): n is a, c, g, or t
  misc_feature (732)..(732): n is a, c, g, or t
  misc_feature (735)..(735): n is a, c, g, or t
  misc_feature (809)..(809): n is a, c, g, or t
  misc_feature (815)..(815): n is a, c, g, or t
  misc_feature (885)..(885): n is a, c, g, or t
  misc_feature (938)..(938): n is a, c, g, or t
  misc_feature (941)..(941): n is a, c, g, or t
  misc_feature (943)..(943): n is a, c, g, or t
  misc_feature (979)..(979): n is a, c, g, or t
aaagataaagttaggctcggcaccgggggctcatccgcaagcctgtggacgcgagtgagtgaacaccagccgtattgtcccgaccccgaccgatcctcgcctgctgcagccatggcgacctccgcggcgctctctaccgccgccaatcccacccagctctgccggtcccgcgcttcgctgggcaagccggtgaaggggcttggcctgagcatgggccgcgagcgcgcccagcggagcattgtgtgccaggcggcgagcagcatctccgccgaccgcgtccccgacatggagaagcggaagctgatgaacctcctcctcctcggcgccatctcgttgcccaccgtcggcatggtcgtcccctacggcgccttcttcgtccctgccggctccgggaacgccggcggcgggacctacgcgaaggacaagctgggcaacgacatcacggnggaggcgtggctcaacacgcacggtcccaacgaccgcacgctngcgcaggggctcaagggtgaccccacgtacctggtggtggagcaggacaanacgctggccacctacgggatcaacgccgtgtgcactcacctcggctgcgtcgtgccgtggaacggcgccganaacaagttcatntgcccatgccncggatcccagtacaacaaccagggcaaggtggtccgtggaccggngcctctgtcgctggccctggttcacgccgacgtngacgacggcaaggtcctnttngtcccgtgggtggagaccgacttcaggaccggcgaggacccgtggtggaaggcatgaggatgatccgaaaccancggtgntcagtgctcacacatgagacctacgtatgcctccgttccttgtgatgaggaaatatgcttgcgttcgttntccgtgggcgttgttcctacaaattcacttgctttctgtctctctctctatanacncnctgtataaaacaagaacagctgtttatcatctcttnttatataaccttttgaac

SEQ ID NO: 34668 - protein, 263 aa, Zea mays subsp. mays
  misc_feature (149)..(149): Xaa can be any naturally occurring amino acid
  misc_feature (163)..(163): Xaa can be any naturally occurring amino acid
  misc_feature (180)..(180): Xaa can be any naturally occurring amino acid
  misc_feature (204)..(204): Xaa can be any naturally occurring amino acid
  misc_feature (208)..(208): Xaa can be any naturally occurring amino acid
  misc_feature (212)..(212): Xaa can be any naturally occurring amino acid
  misc_feature (227)..(227): Xaa can be any naturally occurring amino acid
  misc_feature (238)..(238): Xaa can be any naturally occurring amino acid
  misc_feature (244)..(245): Xaa can be any naturally occurring amino acid
KDKVRLGTGGSSASLWTRVSEHQPYCPDPDRSSPAAAMATSAALSTAANPTQLCRSRASLGKPVKGLGLSMGRERAQRSIVCQAASSISADRVPDMEKRKLMNLLLLGAISLPTVGMVVPYGAFFVPAGSGNAGGGTYAKDKLGNDITXEAWLNTHGPNDRTXAQGLKGDPTYLVVEQDXTLATYGINAVCTHLGCVVPWNGAXNKFXCPCXGSQYNNQGKVVRGPXPLSLALVHADXDDGKVXXVPWVETDFRTGEDPWWKA

SEQ ID NO: 34669 - protein, 226 aa, Zea mays subsp. mays
  misc_feature (112)..(112): Xaa can be any naturally occurring amino acid
  misc_feature (126)..(126): Xaa can be any naturally occurring amino acid
  misc_feature (143)..(143): Xaa can be any naturally occurring amino acid
  misc_feature (167)..(167): Xaa can be any naturally occurring amino acid
  misc_feature (171)..(171): Xaa can be any naturally occurring amino acid
  misc_feature (175)..(175): Xaa can be any naturally occurring amino acid
  misc_feature (190)..(190): Xaa can be any naturally occurring amino acid
  misc_feature (201)..(201): Xaa can be any naturally occurring amino acid
  misc_feature (207)..(208): Xaa can be any naturally occurring amino acid
MATSAALSTAANPTQLCRSRASLGKPVKGLGLSMGRERAQRSIVCQAASSISADRVPDMEKRKLMNLLLLGAISLPTVGMVVPYGAFFVPAGSGNAGGGTYAKDKLGNDITXEAWLNTHGPNDRTXAQGLKGDPTYLVVEQDXTLATYGINAVCTHLGCVVPWNGAXNKFXCPCXGSQYNNQGKVVRGPXPLSLALVHADXDDGKVXXVPWVETDFRTGEDPWWKA

SEQ ID NO: 34670 - protein, 193 aa, Zea mays subsp. mays
  misc_feature (79)..(79): Xaa can be any naturally occurring amino acid
  misc_feature (93)..(93): Xaa can be any naturally occurring amino acid
  misc_feature (110)..(110): Xaa can be any naturally occurring amino acid
  misc_feature (134)..(134): Xaa can be any naturally occurring amino acid
  misc_feature (138)..(138): Xaa can be any naturally occurring amino acid
  misc_feature (142)..(142): Xaa can be any naturally occurring amino acid
  misc_feature (157)..(157): Xaa can be any naturally occurring amino acid
  misc_feature (168)..(168): Xaa can be any naturally occurring amino acid
  misc_feature (174)..(175): Xaa can be any naturally occurring amino acid
MGRERAQRSIVCQAASSISADRVPDMEKRKLMNLLLLGAISLPTVGMVVPYGAFFVPAGSGNAGGGTYAKDKLGNDITXEAWLNTHGPNDRTXAQGLKGDPTYLVVEQDXTLATYGINAVCTHLGCVVPWNGAXNKFXCPCXGSQYNNQGKVVRGPXPLSLALVHADXDDGKVXXVPWVETDFRTGEDPWWKA

SEQ ID NO: 34671 - DNA, 1924 bp, Zea mays subsp. mays
ttgaaaagaccaaacacgtacacggtgcagtgcaatccactcacctgctatggcgacatcaaggccccttgccttggcgctcctcttgtgcgccttgtcggcctgcagccacgccgccatttcctacccaccgtcggccatgtccacggcggcacctgccaacaatggcttcctctcgtgcctcatcaagagcgttcccccgcggctcctccacggcaagagctcgcgtgcgtacggctccatctgggagtccaccgtcaggaacgtcaagttcgtgtcggacaagacggtgaagccggtgtacattatcacccccaccgaggccgcgcacatccaggccaccgtggcgtgcgggcgcaagcacgggctgcgggtccgcgtgcggagcggcgggcacgactacgagggcctgtcgtaccggtccgccaagccggagacgttcgccgtggtggacctgtccatgatgcggcaggtgcgcatcgatgggcaaggccgccacggcgtgggtggactccggcgcgcagctcggcgagctctactacgccgtggcgaagatgacccccagcctcgggttcccggcgggcgtgtgcgccacgatcggcgtcgggggccacttcagcgggggcggcttcggcatgctgctgcgcaagtacggcaccgccggggacaacgtcatcgacgccaaggtggtggacgccaacggcaccctgctggacaggaagtccatgggcgaggactacttctgggcgatcaggggtggcgggggcgagagcttcggcatcatggtgtcgtggcaggtgcagctcgtgccggtcccgcccaaggtgaccgtgttccagatccacaggggggtcaaggacggcgccatcgacctcatcaacaaatggcagcaggtggcgccgtccctccccgatgacctcatgatccggatcatggccatggagcaggatgccatgttcgaggccctgtacctgggcacgtgcaaggacctcctcccgctgatggccagccgcttcccggagctgggcgtcaaacaggaggactgcaacgagatgccgtggatccagtccgtggccttcatccccatgggcaagtcggccaccgtgatggacctcctcaaccggacgtccaacatcaaggccttcggcaagtacaagtctgactacgtgaaggaccccatcccgagggacgtgtgggagaagatctacacctggctcgccaagcccggggccggggtcatgatcatggacccctacggcgccaggatcagctccatcccgcaggatgcgacgccgtttccgcaccggcagggcgtgctgttcaacatccagtacgtcagctactggttcggcgagggcgacggggcggcgccgacgcagtggagcagggacatgtacgcgttcatggagccgtacgtcagcaagaaccctaggcaggcgtacgccaactacagggacctcgaccttggcgtcaacgaggtggtcggcgacgtctccacctacgacagcggcagggtctggggcgagaagtactacaatggcaacttcgagaggctcgccaggaccaaggccaaggtggacccctgcgactacttcaggaacgagcagagcatcccgccattgctcaagtgatcgatgatacccggtcccatccagatcctttcgaccgcgccaagcaaaaggacgacgagtcgtacatgattctgctgattatattaattagattgatcctgctttgcatgcgttgagccaggtgctttgcatggcgagttagctacgtagttggcatcagccacatgcatgacattaaaacacaagctgacagccggctacccaagtaaataaggatacgcgacatacactgtcgtgccaattagtatggctgcttcttcttttttaatattattagtcaacattttatttct

SEQ ID NO: 34672 - protein, 382 aa, Zea mays subsp. mays
MGKAATAWVDSGAQLGELYYAVAKMTPSLGFPAGVCATIGVGGHFSGGGFGMLLRKYGTAGDNVIDAKVVDANGTLLDRKSMGEDYFWAIRGGGGESFGIMVSWQVQLVPVPPKVTVFQIHRGVKDGAIDLINKWQQVAPSLPDDLMIRIMAMEQDAMFEALYLGTCKDLLPLMASRFPELGVKQEDCNEMPWIQSVAFIPMGKSATVMDLLNRTSNIKAFGKYKSDYVKDPIPRDVWEKIYTWLAKPGAGVMIMDPYGARISSIPQDATPFPHRQGVLFNIQYVSYWFGEGDGAAPTQWSRDMYAFMEPYVSKNPRQAYANYRDLDLGVNEVVGDVSTYDSGRVWGEKYYNGNFERLARTKAKVDPCDYFRNEQSIPPLLK

SEQ ID NO: 34673 - protein, 358 aa, Zea mays subsp. mays
MTPSLGFPAGVCATIGVGGHFSGGGFGMLLRKYGTAGDNVIDAKVVDANGTLLDRKSMGEDYFWAIRGGGGESFGIMVSWQVQLVPVPPKVTVFQIHRGVKDGAIDLINKWQQVAPSLPDDLMIRIMAMEQDAMFEALYLGTCKDLLPLMASRFPELGVKQEDCNEMPWIQSVAFIPMGKSATVMDLLNRTSNIKAFGKYKSDYVKDPIPRDVWEKIYTWLAKPGAGVMIMDPYGARISSIPQDATPFPHRQGVLFNIQYVSYWFGEGDGAAPTQWSRDMYAFMEPYVSKNPRQAYANYRDLDLGVNEVVGDVSTYDSGRVWGEKYYNGNFERLARTKAKVDPCDYFRNEQSIPPLLK

SEQ ID NO: 34674 - protein, 331 aa, Zea mays subsp. mays
MLLRKYGTAGDNVIDAKVVDANGTLLDRKSMGEDYFWAIRGGGGESFGIMVSWQVQLVPVPPKVTVFQIHRGVKDGAIDLINKWQQVAPSLPDDLMIRIMAMEQDAMFEALYLGTCKDLLPLMASRFPELGVKQEDCNEMPWIQSVAFIPMGKSATVMDLLNRTSNIKAFGKYKSDYVKDPIPRDVWEKIYTWLAKPGAGVMIMDPYGARISSIPQDATPFPHRQGVLFNIQYVSYWFGEGDGAAPTQWSRDMYAFMEPYVSKNPRQAYANYRDLDLGVNEVVGDVSTYDSGRVWGEKYYNGNFERLARTKAKVDPCDYFRNEQSIPPLLK

SEQ ID NO: 34675 - DNA, 1120 bp, Zea mays subsp. mays
acgttaagacaaggcgaaggtaccaggcatctctgttcatcctgtgatggagaatccactccacagtgtttgccgttcacgaacttgctagtctagtacagtagtatatatattccgcgactgcgactacaatgggcgacagatcgtgcgcgatcgagagcgagctacctccatggcggcggcggcggtggcgggcagccggagcagggaggaacggtggagcctcgctggtaagacggcgctcgtcaccggaggaagcaaggggatcgggcgcgcgatcgtggaggagctcgcggggttcggggtgcgcgtgcacacgtgcgcccgcaccgcggccgacctggacgagcgcctgcgcgcgtgggccgcggacgcccgcctgccgggccgcgtcacggcgtccgtgtgcgacgtgtcggcgcggggcgaccgggaggcgctggtggcggcggcgcgggcggagctggggcccaggctggacatcctcgtcaacaacgccgggcagagcatgttccgcgcggccacggagacggcggccggcgactacgcgcgcctcatggccaccaacctcgagtcctgcttccacctcgcgcagctggcgcacccgctgctcctcgccgcgggcgccggcgccgcggtggtgaacgtgtcctccatcgcggggctggtcgcgtacccggcgctggcggcgtactcggcgaccaagggcgggctgaaccagctcacgcgcagcctggccgccgagtgggccggcgacggcgtgcgcgtcaactgcgtcgcgccgggcggcgtccagacggacatgttcagcagcgtcgcgctggagatggacccggagacgtcgctgaggatgatggaggcggagctggcgcgggtgccgttgcgccgattcggcgataccgaggagatcgcgtcccttgtcgccttcctctgcatgcccgcctcgtcctacatcaccgggcaggtcatctgcgccgacggtggccgcaccattgctgcctaggccttcgcgctatgtgcatgctaccctgagtacctgtacggctgtactgtacttacgtgccgacggctccacacgcacggctaataatgaatccgatccgctcgccgaattccattc

SEQ ID NO: 34676 - protein, 276 aa, Zea mays subsp. mays
MAAAAVAGSRSREERWSLAGKTALVTGGSKGIGRAIVEELAGFGVRVHTCARTAADLDERLRAWAADARLPGRVTASVCDVSARGDREALVAAARAELGPRLDILVNNAGQSMFRAATETAAGDYARLMATNLESCFHLAQLAHPLLLAAGAGAAVVNVSSIAGLVAYPALAAYSATKGGLNQLTRSLAAEWAGDGVRVNCVAPGGVQTDMFSSVALEMDPETSLRMMEAELARVPLRRFGDTEEIASLVAFLCMPASSYITGQVICADGGRTIAA

SEQ ID NO: 34677 - protein, 170 aa, Zea mays subsp. mays
MGDRSCAIESELPPWRRRRWRAAGAGRNGGASLVRRRSSPEEARGSGARSWRSSRGSGCACTRAPAPRPTWTSACARGPRTPACRAASRRPCATCRRGATGRRWWRRRGRSWGPGWTSSSTTPGRACSARPRRRRPATTRASWPPTSSPASTSRSWRTRCSSPRAPAPRW

SEQ ID NO: 34678 - protein, 164 aa, Zea mays subsp. mays
MFRAATETAAGDYARLMATNLESCFHLAQLAHPLLLAAGAGAAVVNVSSIAGLVAYPALAAYSATKGGLNQLTRSLAAEWAGDGVRVNCVAPGGVQTDMFSSVALEMDPETSLRMMEAELARVPLRRFGDTEEIASLVAFLCMPASSYITGQVICADGGRTIAA

SEQ ID NO: 34679 - DNA, 891 bp, Zea mays subsp. mays
aagcctcctccaaattaaaccgccggcgcctccgcttcgcgttctcgcctcatctcctcacgctcaggatccggcggcgaaggtaaggcaagatgtacacagcgaggaagaagatccagaaggataagggccttgagccctccgagttcgaggactccgtcgcccaggctttcttcgacctggagaacggtaaccaggagctcaagagcgacctcaaggacctttacatcaacggtgctatccagctggatgttgccgggagcaggaaggctgttgtgatccacgtcccataccgcttgcgcaaggccttcaggaagatccatgtcaggatcgtcagggagctggagaagaaattcagcggcaaggatgtggtaattgttgccacaaggaggatcgtgaggccgcccaagaagggttcagctgttcagcgccctcgcaccaggactctgactgctgtccatgatggcatcctggaggatgttgtcttcccagctgagattgtggggaagcgtgtcaggtaccgtctggatggtgccaagatcatcaagatcttcttggacccaaaggagaggaacaacaccgaatacaagctggacacctacactacggtctaccgcaggctgtgtgggaaagatgtggtctttgagtaccctatggccgaaaatgcataaatatgacgcccggatatccccattttattttgttgaatctggatgtttctttggggtctcaactagactgctccgtatgtacttcaaaaaccatagttttgatgccaaagttgttgcctaggaatttggtactcgggaattggtagcggacgtgaacaatgttaagttttgagcatttaaatttacctttgtcatgataacatgttgcgagtttttattt

SEQ ID NO: 34680 - protein, 192 aa, Zea mays subsp. mays
MYTARKKIQKDKGLEPSEFEDSVAQAFFDLENGNQELKSDLKDLYINGAIQLDVAGSRKAVVIHVPYRLRKAFRKIHVRIVRELEKKFSGKDVVIVATRRIVRPPKKGSAVQRPRTRTLTAVHDGILEDVVFPAEIVGKRVRYRLDGAKIIKIFLDPKERNNTEYKLDTYTTVYRRLCGKDVVFEYPMAENA

SEQ ID NO: 34681 - protein, 110 aa, Zea mays subsp. mays
MMASWRMLSSQLRLWGSVSGTVWMVPRSSRSSWTQRRGTTPNTSWTPTLRSTAGCVGKMWSLSTLWPKMHKYDARISPFYFVESGCFFGVSTRLLRMYFKNHSFDAKVVA

SEQ ID NO: 34682 - protein, 109 aa, Zea mays subsp. mays
MASWRMLSSQLRLWGSVSGTVWMVPRSSRSSWTQRRGTTPNTSWTPTLRSTAGCVGKMWSLSTLWPKMHKYDARISPFYFVESGCFFGVSTRLLRMYFKNHSFDAKVVA

SEQ ID NO: 34683 - DNA, 1713 bp, Zea mays subsp. mays
gcacgagaccattacctagaacatcctaatcgaaaagtccgtcgtctcgcgctctcgtttcgtcgctacgctagcttccagtcccgggcttagcaactgtgctgctgttgcactgcacccggcgcacgcagagatgcgccgtgtcgggacgggtgtgaggatgctttgcggcgcggcgctgtcggtgcttctgcttctcgcgggcggcgcggcggcgtcgcactcgcgctcgtcgtgccccgccacgccgccggacgcggggaacacgctgcaggtgtcgcacgcgttcgggccgtgctcgccgctgggccccgggacggcggcgccgtcgtgggcggggttcctggcggaccaggcgtcgcgtgacgcgtcgcggctgctgtacctggactcgctggcggtgcgtggccgcgcccgcgcgtacgcgcccatcgcgtcggggcggcagctgctgcagacgctgacgtacgtggtgcgggccagcctcggcacgccgccgcagcagctgctcctggccgtcgacaccagcaacgacgcctcgtggatcccttgcgccggctgcgcgggctgccccacgtcgtccgcggcgcccttcgacccggccgcgtccgcctcgtaccgcacggtgccctgcgggtcgccgctgtgcgcgcaggcacccaacgcggcgtgcccgcccggcggcaaggcctgcggcttcagcctcacctacgccgactcctcgctgcaggccgcgctgtcgcaggactccctcgccgtcgcaggcaacgccgtgaaggcctacaccttcgggtgcctgcagagggccactggcacggctgcgccgccgcaggggctgctgggtctcggccgcggcccgctgtcgttcctttcgcagaccaaggacatgtacgaggccaccttctcgtactgtctccccagcttcaagtcgctcaacttctctggaacgctccggctcgggcgcaacggccagccgcagcgcatcaagacgacgccgctgctggccaacccgcaccggtcgtcgctctactacgtgaacatgaccggcgtccgcgtgggcaggaaggtggtgcccatcccggcgttcgacccggcgacgggcgcgggcaccgtgctggactctggcaccatgttcacccggctggtggcgccggcgtacgtggccgtgcgggacgaggtccggcgccgcgtcggcgcgcccgtatcctcgctgggagggttcgacacgtgcttcaacaccaccgccgtcgcgtggccgcccatgacgctgctgttcgacggcatgcaggtgacgttgccggaggagaacgtggtcatccacagcacgtacgggaccatcagctgcctggccatggccgcggcgcccgacggcgtcaacaccgtgctcaacgtcatcgccagcatgcagcagcagaaccaccgtgtgctcttcgacgtgcccaacggacgcgtcggcttcgcgcgcgagcgctgcactgccgcttgatcagcttgctcgcgcgcctgcgcgcgggctcggattcgggttatatttagttaaacctacgttctacggttgtggacgtcatgcactgctgtcggagtgggtgattaataatttaactttccttttctttttaatctcgttgctcttcagatttaccatatgtgtttcacattcaccgcgttatgtggtttaggggctgaatgattggggtctaaataatgtactgt

SEQ ID NO: 34684 - protein, 450 aa, Zea mays subsp. mays
MRRVGTGVRMLCGAALSVLLLLAGGAAASHSRSSCPATPPDAGNTLQVSHAFGPCSPLGPGTAAPSWAGFLADQASRDASRLLYLDSLAVRGRARAYAPIASGRQLLQTLTYVVRASLGTPPQQLLLAVDTSNDASWIPCAGCAGCPTSSAAPFDPAASASYRTVPCGSPLCAQAPNAACPPGGKACGFSLTYADSSLQAALSQDSLAVAGNAVKAYTFGCLQRATGTAAPPQGLLGLGRGPLSFLSQTKDMYEATFSYCLPSFKSLNFSGTLRLGRNGQPQRIKTTPLLANPHRSSLYYVNMTGVRVGRKVVPIPAFDPATGAGTVLDSGTMFTRLVAPAYVAVRDEVRRRVGAPVSSLGGFDTCFNTTAVAWPPMTLLFDGMQVTLPEENVVIHSTYGTISCLAMAAAPDGVNTVLNVIASMQQQNHRVLFDVPNGRVGFARERCTAA

SEQ ID NO: 34685 - protein, 441 aa, Zea mays subsp. mays
MLCGAALSVLLLLAGGAAASHSRSSCPATPPDAGNTLQVSHAFGPCSPLGPGTAAPSWAGFLADQASRDASRLLYLDSLAVRGRARAYAPIASGRQLLQTLTYVVRASLGTPPQQLLLAVDTSNDASWIPCAGCAGCPTSSAAPFDPAASASYRTVPCGSPLCAQAPNAACPPGGKACGFSLTYADSSLQAALSQDSLAVAGNAVKAYTFGCLQRATGTAAPPQGLLGLGRGPLSFLSQTKDMYEATFSYCLPSFKSLNFSGTLRLGRNGQPQRIKTTPLLANPHRSSLYYVNMTGVRVGRKVVPIPAFDPATGAGTVLDSGTMFTRLVAPAYVAVRDEVRRRVGAPVSSLGGFDTCFNTTAVAWPPMTLLFDGMQVTLPEENVVIHSTYGTISCLAMAAAPDGVNTVLNVIASMQQQNHRVLFDVPNGRVGFARERCTAA

SEQ ID NO: 34686 - DNA, 517 bp, Zea mays subsp. mays
aagcacacaacaaacctgcagatcccccatggcaggctccacctccctcgttccccttcccgtccccgcccctccatctcgccaccgcttccacacgtccacgtccgcatccccccgccacctgcgcccctcccctgctacacgcctccgcgctgcccggcgtcggcatcccgacgccgtcgttgtcgtcccagatgcccgcccctgggtcggcgatctatcgggcgccgccgcgtcctaccgggacggaagtgaggaggacgaagacgacgcagatgaagatgaggctggggttccgccggcagtcatgcacgtcgtccgccgtcttgaggtctcacgacgtcggcatggcggggatcggagtggaggccagtaattactccagagtccagtccacgtaacactccaaattccaattccaaaaagctggctgcttgatcttttgttagtgctcgtgtactgctaataaaaactaaatttactgtcatctactactactattataagttattgaaag

SEQ ID NO: 34687 - protein, 132 aa, Zea mays subsp. mays
AHNKPADPPWQAPPPSFPFPSPPLHLATASTRPRPHPPATCAPPLLHASALPGVGIPTPSLSSQMPAPGSAIYRAPPRPTGTEVRRTKTTQMKMRLGFRRQSCTSSAVLRSHDVGMAGIGVEASNYSRVQST

SEQ ID NO: 34688 - protein, 124 aa, Zea mays subsp. mays
STQQTCRSPMAGSTSLVPLPVPAPPSRHRFHTSTSASPRHLRPSPATRLRAARRRHPDAVVVVPDARPWVGDLSGAAASYRDGSEEDEDDADEDEAGVPPAVMHVVRRLEVSRRRHGGDRSGGQ

SEQ ID NO: 34689 - protein, 115 aa, Zea mays subsp. mays
MAGSTSLVPLPVPAPPSRHRFHTSTSASPRHLRPSPATRLRAARRRHPDAVVVVPDARPWVGDLSGAAASYRDGSEEDEDDADEDEAGVPPAVMHVVRRLEVSRRRHGGDRSGGQ

SEQ ID NO: 34690 - DNA, 618 bp, Zea mays subsp. mays
ttgtttatgggtctgtcggtgccacagtatttcaacgaatacacttccgtcgcgggctttggtccagtgcacacgcgtgcaagatggttcaacgatatgatcaatgtggtgttctcctcgaaggcgcttgttggcggggcggtggcgtattttctggacaacaccctgcacaggcgcgatggcgtcgtgaggaaggaccggggccaccatttctgggacaggttcaggtccttcaagaccgacccgcgtagcgaggagttctactccctcccgttcaacctcaacaaattcttcccgtccttctgatccttgctggtgctggtaactgagagaagaaaaatggttgtggttaggttggttgtggactgtgattttggcaatgccacgccgcccaagaggctgtttctcctacttctgttgtggtgagctttgaatcttgcagagctcagcgtaaactatttcgaaaggagtggagaaattgcttggtattgctggatgtaaattgggtcgggatagattgataaaatgaaaacagaactgcgccagtaatctttctgtagattgtaaactattgaactccagtgctattttagagtaaactccaattggttgatgtgc

SEQ ID NO: 34691 - protein, 101 aa, Zea mays subsp. mays
LFMGLSVPQYFNEYTSVAGFGPVHTRARWFNDMINVVFSSKALVGGAVAYFLDNTLHRRDGVVRKDRGHHFWDRFRSFKTDPRSEEFYSLPFNLNKFFPSF

SEQ ID NO: 34692 - protein, 99 aa, Zea mays subsp. mays
MGLSVPQYFNEYTSVAGFGPVHTRARWFNDMINVVFSSKALVGGAVAYFLDNTLHRRDGVVRKDRGHHFWDRFRSFKTDPRSEEFYSLPFNLNKFFPSF

SEQ ID NO: 34693 - protein, 82 aa, Zea mays subsp. mays
VYGSVGATVFQRIHFRRGLWSSAHACKMVQRYDQCGVLLEGACWRGGGVFSGQHPAQARWRREEGPGPPFLGQVQVLQDRPA

SEQ ID NO: 34694 - DNA, 916 bp, Zea mays subsp. mays
  misc_feature (644)..(644): n is a, c, g, or t
  misc_feature (650)..(651): n is a, c, g, or t
acttcttttgcgctccttgcttccgcttgtagtgggagtgggagtggccgagtgggagaagggaagagatgagcagcagtgaggctagcacgcaagaccatggcgtgccggcgctcgaggcgcaggatagcacggatgaccatggcgtgcccgcgctcgaggcgcccacgcccgaggctacggacaaggtactggccgccatggcgcgactggcgcgacgtcggaggctggagctaaggcggctggggcgcactgcacccgtgggggcggagggagaggtggcgatgcgggtgcgtccggtgtcgggcacctccgcggacacgtcccgcgagtcggcgaaggtggcgcccgagccgcatgaagggggcttctgcggtggcggggtggcccaagcccgtgtcgcacggcgcggtgtcggtgatcgggcggcggcgggagatggaggacgcggtcgccgtcgccgtgccgttcctggtggccgcggcgggggaggagggggacggcggcggggagaaggaggctgagatggagttcttcgcggtgtacgacgggcacggcgggtcacgggtggcggacgcgtgccgagagcggctgcacgtggtgctcgcggaggaggtggcgcgtctgcaccttgtaagggcggngacggnncgcgctggagggaggtcatggaggcctgttcgcccgcgtggacggtgaggtcgccgtcgtcgagggcgaggtgaacaacgccggccacacggtgggctccaccgccgtcgtggccgtcgtggggccccgtcacatcgtggtcgcgaactgcggcgactcccgcgccgtgctctcccgcggcggcgtccccgtgccgctgtcttccgaccacaagccagataggcctgatgatttggaaagggtagaatcagtgggcggcagggtc

SEQ ID NO: 34695 - protein, 151 aa, Zea mays subsp. mays
MSSSEASTQDHGVPALEAQDSTDDHGVPALEAPTPEATDKVLAAMARLARRRRLELRRLGRTAPVGAEGEVAMRVRPVSGTSADTSRESAKVAPEPHEGGFCGGGVAQARVARRGVGDRAAAGDGGRGRRRRAVPGGRGGGGGGRRRGEGG

SEQ ID NO: 34696 - protein, 113 aa, Zea mays subsp. mays
  misc_feature (96)..(96): Xaa can be any naturally occurring amino acid
  misc_feature (98)..(98): Xaa can be any naturally occurring amino acid
MKGASAVAGWPKPVSHGAVSVIGRRREMEDAVAVAVPFLVAAAGEEGDGGGEKEAEMEFFAVYDGHGGSRVADACRERLHVVLAEEVARLHLVRAXTXRAGGRSWRPVRPRGR

SEQ ID NO: 34697 - protein, 107 aa, Zea mays subsp. mays
MARLARRRRLELRRLGRTAPVGAEGEVAMRVRPVSGTSADTSRESAKVAPEPHEGGFCGGGVAQARVARRGVGDRAAAGDGGRGRRRRAVPGGRGGGGGGRRRGEGG

SEQ ID NO: 34698 - DNA, 1730 bp, Zea mays subsp. mays
ctcgaaaatccgagccgccgccgatccctctccggccggcgcgcgtacgtacgtccgtccggccccagaaaatataaagggaaggcagccgggcgcgcgggtggttagccggccctctaccaccggcgcctctccgaccggccggccgccgtccagttccaggccgcccgcacgcacatgagatcatgagctcggaggactcggtgaagtcgctgtcgctggactacctgaacctgctgatcaacgggcaggccttcagcgacgtggccttcagcgtggaggggcggctggtgcacgcgcaccgctgcgtgctggccgcgcgcagcctcttcttccgcaagctgttctgcggcctggacccgaaccaccagccgccgacgcccgacgctgggctcgtcgtccaccggcgcccgcgcgccggagctcgtcatccccgtcagctccatccgctacgaggtgctggtgctggtgctccagttcctctacagcggccaggcctccgtggccgcgcccaagagcgggccgctcccgggctgcggcgccaggggctgctggcacaccagctgcggcgccgccgtcgacctcgccctcgacaccctcgccgccgcccgctccttcggcgtcgagcagctggccctcctcgtccagaagcagctggaggccatggcgaaggaggcgtccgtggacgacgtgatgaaggtgctgatggcgtcgcgcaagttcgagatgcaggagctctgggccacctgctcgcacctggtggcgcgctcgggcctctccgccgacctcctcgccaagcacctccccatcgacgtggtggccaagatccgaggagatccgcgccgccgccaataagtcccccgtgtgcgccgtctccggcggcggcggaccgcgctcgccgttcctcctcacccaccactacctccccgtcaacggcgcgtcggcgtcggcgtcggaggccgagcgcgaccacagggtccggcgcatgcggcgcgcgctggacgccgccgacatcgagctggtgaagctgatggtgatgggcgaggggctggacctggacggggcgctggccgtgcactacgccgtgcagcactgcggccgcgacgtcgtcaaggcgctgctggagctgggcgccgccgacgtcaactcccgcgcggggcccgcggggaagacggcgctgcacctggcggccgagatggtgtcccccgacatggtgtccgtgctcctcgaccaccacgccgaccccagcgcccggacgctggacggcgtcaccccgctcgacgtgctccgcggcctcacctccgagttcctcttcaggggcgccgtgccggggctcacgcacatcgagcccaacaagctcaggctctgcctcgagctcgtgcagtcagcggtgatggtgaccacgcgcgacgacgacgccggggcagggggaggaggaaacgatgccgccgacgacagcttggtgagcctcaccatgaactccacgctcatgtaccagggccaggagatagcgggggcgatggccggcgaggccaggaaagggagcggcggcggcggccgagggagcccgtccaacttgtacttccccactgccttcccataataagtatttagtttccttcatcaagcaagcaatgccttttgttttcatacatatatgcatccatccatccaaagatgatggatcttcaatttctctatgttgtattagatttttaatctgcattgtg

SEQ ID NO: 34699 - protein, 279 aa, Zea mays subsp. mays
MSSEDSVKSLSLDYLNLLINGQAFSDVAFSVEGRLVHAHRCVLAARSLFFRKLFCGLDPNHQPPTPDAGLVVHRRPRAGARHPRQLHPLRGAGAGAPVPLQRPGLRGRAQERAAPGLRRQGLLAHQLRRRRRPRPRHPRRRPLLRRRAAGPPRPEAAGGHGEGGVRGRRDEGADGVAQVRDAGALGHLLAPGGALGPLRRPPRQAPPHRRGGQDPRRSAPPPISPPCAPSPAAADRARRSSSPTTTSPSTARRRRRRRPSATTGSGACGARWTPPTSSW

SEQ ID NO: 34700 - protein, 205 aa, Zea mays subsp. mays
MRRALDAADIELVKLMVMGEGLDLDGALAVHYAVQHCGRDVVKALLELGAADVNSRAGPAGKTALHLAAEMVSPDMVSVLLDHHADPSARTLDGVTPLDVLRGLTSEFLFRGAVPGLTHIEPNKLRLCLELVQSAVMVTTRDDDAGAGGGGNDAADDSLVSLTMNSTLMYQGQEIAGAMAGEARKGSGGGGRGSPSNLYFPTAFP

SEQ ID NO: 34701 - protein, 190 aa, Zea mays subsp. mays
MVMGEGLDLDGALAVHYAVQHCGRDVVKALLELGAADVNSRAGPAGKTALHLAAEMVSPDMVSVLLDHHADPSARTLDGVTPLDVLRGLTSEFLFRGAVPGLTHIEPNKLRLCLELVQSAVMVTTRDDDAGAGGGGNDAADDSLVSLTMNSTLMYQGQEIAGAMAGEARKGSGGGGRGSPSNLYFPTAFP

SEQ ID NO: 34702 - DNA, 744 bp, Zea mays subsp. mays
gcacgagaccattacctagaacatcctaatcgaaaatttacgacctgtagacccatctgtttcctcgtctcctgctcttgctcagctatgcagccttgctttcataaaagtgcccagtcttgaggatgactttggtcaggaagcagcagagtatctaagtgaatgtttgctcagtagctcaaagcaataccgggcaatgatcgaagaacatgatacttctggggggaaatcaaaaggacaaggaaccggaaatgttctcattgttactcttgttgatgcggagacagaaagtagcataaacgctaccatgcttgaggaagggcttgcccggctcgaaagaagcaagagatgggacactagggagaggaagacggctctccagaacctggaacagttccaggacaaggcaaagaaggaaaggctgcggatttggcagtacggagatgttgaatcggacgaggacgagcaggccccgcctgcaaggaagccctggaggtcgtcggtagagactgggcagtgtaaggctgcagtctggcatgctatgaaagttttggacaaccacaaatgttggactctgccgggagttatagatgaggacttactgaggggtaccgtatttatattcggttagaagaagggaacttagcgaggcgaaatcacttttgatattccgtttttacaggcgaaactttctctgttttagcacttttgatattccgtttttacatcgcaagttataagggt

SEQ ID NO: 34703 - protein, 144 aa, Zea mays subsp. mays
MIEEHDTSGGKSKGQGTGNVLIVTLVDAETESSINATMLEEGLARLERSKRWDTRERKTALQNLEQFQDKAKKERLRIWQYGDVESDEDEQAPPARKPWRSSVETGQCKAAVWHAMKVLDNHKCWTLPGVIDEDLLRGTVFIFG

SEQ ID NO: 34704 - protein, 107 aa, Zea mays subsp. mays
MLEEGLARLERSKRWDTRERKTALQNLEQFQDKAKKERLRIWQYGDVESDEDEQAPPARKPWRSSVETGQCKAAVWHAMKVLDNHKCWTLPGVIDEDLLRGTVFIFG

SEQ ID NO: 34705 - DNA, 1323 bp, Zea mays subsp. mays
gcacgagaccattacctagaacatcctaatcgaaaagcggagtcagtctcaccatctctctcggccgacagccggccaccaccagccgccagtagcaatagcaaattagcaacccgccgagcaccgacctctccatagttcctctacggctctaccgagcaaccgccggcgtcgaccctgccgtccaggcccgtcctgccgcggtgccgcctgcgtccctgccccagccacccggccgccacccgccgccgccagcgaggagcgagtagtagcgaccctggtccctgccgcccttgcgttcgtggctccctgcccagtgcccctgcgtcagcgtcactgcactctccgaggtggaggtggttctcaaatctcaagtccatccacggcgctactaccctcgctgcaatggagttgaggaggcctgcatcctctcctcttgtcgacaactacgtggtacctggtgacgtcgtcctggacctctctgagatgaacaaccagaccattaaactcggcgcgggtctgcgtcaggagtgtgacaccatccaggcgactagtgctgggaagctgcggcagttgaaacccaacaagtattggattgaaaactcacagaaaagatatataccttctgtagaagataccgttcttggtattgtggtctacaccaaaccagacaactttttggtagacataaagggtcctaatttggcctttctaccagtactttcatttgaaggcggtacaaggagaaacatacccaagttcgagattggtacattaatatatgctcgagtggtgaaagcaaatagtatcatgaatcccgagctctcatgcatggatgctactgggaaagctgccgaatttggacagctcaaagatggttatatgttcgacacatcaactggcatgtcacgaatgttgttaagttccccaacgtgtccagttctggaggtccttgggaaaaaactgtcgtttgagattgctgttggactcaatggtcgagtctgggtgaatgctcctgcagcaagtactgtcattcttgtatcaaatgcaataatgaggtcagaatctttgagcggcataaaacaaagagctatggtagaaaatctattggagagattgtcatgatgataagtcagcaagcattagtctaaagtaaaatggaggagtttccattgtgtcagttcaaagtaaaagtaggaaagtttgagatcaaagtgactatccccatcaaaagattattatgtatcacgtgtcgtagtatacagtacactatactcttttttatattaaattatcaatgtatttatcaaagtcttgcgtccg

SEQ ID NO: 34706 - protein, 239 aa, Zea mays subsp. mays
MELRRPASSPLVDNYVVPGDVVLDLSEMNNQTIKLGAGLRQECDTIQATSAGKLRQLKPNKYWIENSQKRYIPSVEDTVLGIVVYTKPDNFLVDIKGPNLAFLPVLSFEGGTRRNIPKFEIGTLIYARVVKANSIMNPELSCMDATGKAAEFGQLKDGYMFDTSTGMSRMLLSSPTCPVLEVLGKKLSFEIAVGLNGRVWVNAPAASTVILVSNAIMRSESLSGIKQRAMVENLLERLS

SEQ ID NO: 34707 - protein, 212 aa, Zea mays subsp. mays
MNNQTIKLGAGLRQECDTIQATSAGKLRQLKPNKYWIENSQKRYIPSVEDTVLGIVVYTKPDNFLVDIKGPNLAFLPVLSFEGGTRRNIPKFEIGTLIYARVVKANSIMNPELSCMDATGKAAEFGQLKDGYMFDTSTGMSRMLLSSPTCPVLEVLGKKLSFEIAVGLNGRVWVNAPAASTVILVSNAIMRSESLSGIKQRAMVENLLERLS

SEQ ID NO: 34708 - DNA, 1686 bp, Zea mays subsp. mays
  misc_feature (451)..(451): n is a, c, g, or t
  misc_feature (1169)..(1170): n is a, c, g, or t
  misc_feature (1198)..(1198): n is a, c, g, or t
taatcaaaaactcttcccaattcccatagatcgatcgccgacccctcgagcaacgcagatcgcccgccgacccgacggcggcatggacaccgagtccttgcagcaggggagctcctcgtcgtggcacacgacgggcgccgtgtcgtgtggagccgcgcagcagcagaagctgccagcggtgccagggttcttcccagcgatcaagctggttccagctcaagtagttctctgcaaatatcagaaccagaaccccaacaaatccaagaagaagaggattactatatggaggatgattgtgatgatgattttgatggctacgacgaagatgattatgacttcgatgaagctgactttaaccagcaccttgctgataaatttgatgatttggatcttcctccaggcgtgggaggccaccgtaccttggttgcagaaaactacacccaaggaagangtcaaagagccacctaaatcaaatactgcagatgagaatgcaaataaatatacgcagttcaagcagtttgatactgttcagaatttctctgaccattactacgctaagaattctcatggagagccaaacagagcctggtcaaagagagttcaacatgactggaaacttctggagaaggatctaccagcgtatatttttgtccgggttgctgaagatagaatggaccttcttagggctgcgattattgggcccaagggaacaccttaccatgatgggcttttcttctttgatattcacattccctctgcttatccttgtgctcccccgctggtatattaccactctggaggacttcggattaatccaaacttgtataacaatgggaaagtgtgtcttagcctgttgggtacctgggatggtagaggttgtgagaagtggaatccagctcaatcgacaatgctgcaagttcttgtctccattcaagctctgattttgaatgacaagccatattacaacgagccaggatatgagtcctatgccaacactccgaatggagagcggttggctttggactataatgacaacacctttctgcactcatgcaagactatgttatactcacttcggaggcctccagagcactttgcagatcttgtcgctggccactttcgggtgcatgggcacacgattctcgcggcatgcaagcactacatggccnntaatgatattgggtcagtggtgccagangaggaggaggaggaggaggaggaagagtcatcagaacacaagagcggtgatgctggagcatcgggtagtgcaccagagctaggagtgatcaaggcaatccctacgaagagacgcagctcattcaatccaagcttgaaggtgctgtacaaagatctgctgatggaattcaatgtgaagggtgccgacacaaggaaattcatcgatgagaagttgaagaagaacaaacctgcagccgcctgaggaacatgcttgcaggcaaagcttttgtaggtataactggtcttggtggtgatatctaggacctggaacttgcttgctcacatgtagtagagagtatggtttaggggtggagtgctgagagagttctctctcggcactatttatcgccaatctaaatctaatgataggtttaccgcatcataaatatatatgtaacggctatatcgtctttcgctgattgttctggcatatcatgataggtttaccct

SEQ ID NO: 34709 - protein, 478 aa, Zea mays subsp. mays
  misc_feature (150)..(150): Xaa can be any naturally occurring amino acid
  misc_feature (390)..(390): Xaa can be any naturally occurring amino acid
  misc_feature (399)..(399): Xaa can be any naturally occurring amino acid
NQKLFPIPIDRSPTPRATQIARRPDGGMDTESLQQGSSSSWHTTGAVSCGAAQQQKLPAVPGFFPAIKLVPAQVVLCKYQNQNPNKSKKKRITIWRMIVMMILMATTKMIMTSMKLTLTSTLLINLMIWIFLQAWEATVPWLQKTTPKEXVKEPPKSNTADENANKYTQFKQFDTVQNFSDHYYAKNSHGEPNRAWSKRVQHDWKLLEKDLPAYIFVRVAEDRMDLLRAAIIGPKGTPYHDGLFFFDIHIPSAYPCAPPLVYYHSGGLRINPNLYNNGKVCLSLLGTWDGRGCEKWNPAQSTMLQVLVSIQALILNDKPYYNEPGYESYANTPNGERLALDYNDNTFLHSCKTMLYSLRRPPEHFADLVAGHFRVHGHTILAACKHYMAXNDIGSVVPXEEEEEEEEESSEHKSGDAGASGSAPELGVIKAIPTKRRSSFNPSLKVLYKDLLMEFNVKGADTRKFIDEKLKKNKPAAA

SEQ ID NO: 34710 - protein, 451 aa, Zea mays subsp. mays
  misc_feature (123)..(123): Xaa can be any naturally occurring amino acid
  misc_feature (363)..(363): Xaa can be any naturally occurring amino acid
  misc_feature (372)..(372): Xaa can be any naturally occurring amino acid
MDTESLQQGSSSSWHTTGAVSCGAAQQQKLPAVPGFFPAIKLVPAQVVLCKYQNQNPNKSKKKRITIWRMIVMMILMATTKMIMTSMKLTLTSTLLINLMIWIFLQAWEATVPWLQKTTPKEXVKEPPKSNTADENANKYTQFKQFDTVQNFSDHYYAKNSHGEPNRAWSKRVQHDWKLLEKDLPAYIFVRVAEDRMDLLRAAIIGPKGTPYHDGLFFFDIHIPSAYPCAPPLVYYHSGGLRINPNLYNNGKVCLSLLGTWDGRGCEKWNPAQSTMLQVLVSIQALILNDKPYYNEPGYESYANTPNGERLALDYNDNTFLHSCKTMLYSLRRPPEHFADLVAGHFRVHGHTILAACKHYMAXNDIGSVVPXEEEEEEEEESSEHKSGDAGASGSAPELGVIKAIPTKRRSSFNPSLKVLYKDLLMEFNVKGADTRKFIDEKLKKNKPAAA

SEQ ID NO: 34711 - protein, 382 aa, Zea mays subsp. mays
  misc_feature (54)..(54): Xaa can be any naturally occurring amino acid
  misc_feature (294)..(294): Xaa can be any naturally occurring amino acid
  misc_feature (303)..(303): Xaa can be any naturally occurring amino acid
MIVMMILMATTKMIMTSMKLTLTSTLLINLMIWIFLQAWEATVPWLQKTTPKEXVKEPPKSNTADENANKYTQFKQFDTVQNFSDHYYAKNSHGEPNRAWSKRVQHDWKLLEKDLPAYIFVRVAEDRMDLLRAAIIGPKGTPYHDGLFFFDIHIPSAYPCAPPLVYYHSGGLRINPNLYNNGKVCLSLLGTWDGRGCEKWNPAQSTMLQVLVSIQALILNDKPYYNEPGYESYANTPNGERLALDYNDNTFLHSCKTMLYSLRRPPEHFADLVAGHFRVHGHTILAACKHYMAXNDIGSVVPXEEEEEEEEESSEHKSGDAGASGSAPELGVIKAIPTKRRSSFNPSLKVLYKDLLMEFNVKGADTRKFIDEKLKKNKPAAA

SEQ ID NO: 34712 - DNA, 1103 bp, Zea mays subsp. mays
aaggactcagtccacactccacagggaaggagggagcaggagaggtaggtagccaagaagatcggttccagcggcaggcgcgagcgaggcgtgaccgatggcggccgcgtcgctctgagccgggcgcggtggctcctggtggagcacccggccgtgccctcgttccgctggcagccaggccgcacggtcggcgcgacgccgtccttcgcggccgccgtcatctgcggctacctcgccgcggtgctcgtcctccgccgcctcgtcctgccccgcctcccggcgctgcctccgccggcgctccgcgcgctctccgccgcccacaacgcggtcctgctggcgctctccgccgccatggccggcgggtgcgcgctgtcgacggccgcgacggcgccggcgccgcggtgggcgtgggccttctgcttcccgccgcggggcgccacggaggcgtcggggcccgtcttcttctgggcgcacgtgttctacctctccaaggtgtacgagctcggcgacacgctgctcatcctgctcgcccgccgcccgctcacgctgctccacgtgtaccaccacgcgctcgtcgtggccatgtgctacctctggctcgccacccggcagtcgctgatgcccgtcgcgctcgtcaccaacgccggcgtgcacgtcgtgatgtactcctactacctctcctgcagcgtcggcctgcgctggcccgggcggtggaagcgcgccgtcacggagctgcagatcgcgcagttcctcttcagcttcgcggcctccgtggtgatgctgtggctccacttcgccgctggcggctgcgaggggatggccggctgggtgttcaacgccgtcttcaacgcgtcgctgctcgcgctcttcctcaacttccacggcgccgcctacaaaggcgccgccaaggccaacaagggtaaagcggaatgacgcggccgacaagctttaatttgccggcaaccaaaatcctcgtgagatttaattgggaccaattgtttaatgttgcttcttcgccaaattattactgatacgaagtctgtctgaaataattgttcgaaaaagaatggcatcgatcgcccttgaattatgggtgaattttc

SEQ ID NO: 34713 - protein, 306 aa, Zea mays subsp. mays
GLSPHSTGKEGAGEVGSQEDRFQRQARARRDRWRPRRSEPGAVAPGGAPGRALVPLAARPHGRRDAVLRGRRHLRLPRRGARPPPPRPAPPPGAASAGAPRALRRPQRGPAGALRRHGRRVRAVDGRDGAGAAVGVGLLLPAAGRHGGVGARLLLGARVLPLQGVRARRHAAHPARPPPAHAAPRVPPRARRGHVLPLARHPAVADARRARHQRRRARRDVLLLPLLQRRPALARAVEARRHGAADRAVPLQLRGLRGDAVAPLRRWRLRGDGRLGVQRRLQRVAARALPQLPRRRLQRRRQGQQG

SEQ ID NO: 34714 - protein, 193 aa, Zea mays subsp. mays
MAGGCALSTAATAPAPRWAWAFCFPPRGATEASGPVFFWAHVFYLSKVYELGDTLLILLARRPLTLLHVYHHALVVAMCYLWLATRQSLMPVALVTNAGVHVVMYSYYLSCSVGLRWPGRWKRAVTELQIAQFLFSFAASVVMLWLHFAAGGCEGMAGWVFNAVFNASLLALFLNFHGAAYKGAAKANKGKAE

SEQ ID NO: 34715 - DNA, 1881 bp, Zea mays subsp. mays
gcacgagaccattacctagaacatcctaatcgaaaagcgtttcgttcatccgagcggcgcgtgcgccgtgctcgtttcctcttcctccacacgagacgcggacgcctcgctgagaacgggaggggctgctttgttgctgtagataccgggcgagggcggcgtgatctcggtttcgacgccgcgggcgggacgcgatggctttgtgaccttcttgtcctcttcttgacgcccccccccgaccggtttcaggcggttgcgtccgcggcgtggcgtggggcgatgctgcggaggatggtgcccgacccgtcgtccccggactcctccggcgggggcgggggaggggacgctcggccccgttggcggcggcggcggcgcgctgttcgccgtgccgcgcctcttcgtcgggttcgccgccaagcgcgtggcgcccgacggggagtcgtcgaggagcccgacgtcgccgctggaccccaaggcgctgctgctccggtcgccgcgctcgccgaggaggacctggggcgcgccgggcctcgtcgacgcgctggccgccgacaccgcggccgccaactgcctgctcagcccgcgcctgcggctcgtcaggcagcacagctccccgcccaagggctgcggcgggcactcgcagccggagctcggtaagacgatgtcctgctgccccgcgcctgacactgccgcggccggcgccgccgccggcgcaggcatgtcggtgccgtgcccgtgcagcaggttccagttacgccacggggatctgaagtctggtcctgaggccaccgggtcggccgacaccggcgctcacctcgccagcaagcgccactcgttcgacctcggcaagctcccgggcccgggctcgctgccagtgccggcgtcggcgtctgcgtcgtcgaacgccgcccggcgcttcgtcggctctgtctccgcgagcgagatcgagcagtcggaggactacacccgcatcatcgcgcgcggccccaaccccaagacgacgcacatcttcggcgactgcatcctggagccccgtacggtcgggtgcggtgacagcaaggccgtggagtcgggggaaggaggcgccgggtgctacttcgtggtcaagcgcgccgccccgggcgccggtgacttcctcagctcctgcttcgcgtgcaagaagaagcttgaaggcaacgacatttacatctaccgcggggagaaggcgttctgcagcgccaattgccgggaccaggagatccagctggaggaggaagccgagaacaacacgagcagcggttcccctgggtcctcctcctcctcctcctcgtcctccaacgacgacatcttcatggccggcatggtggtcgcgacgtgacctccacccaccggcccaccaccgcgccgtttcgccgccgcaggcgttttttccatccctcctccaagtacgacagtgggacaggcgatcctagccgatctcgttcacggttcagtgcgcatcgccgtcgtcgtcgtcaccagtctgttgcttttggttcagcaaactgtactacgtgatggaggagccgagaaggaagaaaacggtgaaatgctctgctgtgctcatggtgggtcattgtcgccagtcgtcctgggaacctgcggaagatctgcattatttttttttcagaaagaaagagagaggagagaggaggtcgcctgccactgtagttctgatccaaaggctgcccgctgccggccgggcagtggtgcccccgccatccctttcctcgctcgcttttcttcttctcgctttcttcctactcgtagtcgtagcagcagtgtctgtccggtgtctgcgcctcgcattgcgttgccacagctactgtcttctgagataatgacatcgagctgctttgagtc

SEQ ID NO: 34716 - protein, 231 aa, Zea mays subsp. mays
MSCCPAPDTAAAGAAAGAGMSVPCPCSRFQLRHGDLKSGPEATGSADTGAHLASKRHSFDLGKLPGPGSLPVPASASASSNAARRFVGSVSASEIEQSEDYTRIIARGPNPKTTHIFGDCILEPRTVGCGDSKAVESGEGGAGCYFVVKRAAPGAGDFLSSCFACKKKLEGNDIYIYRGEKAFCSANCRDQEIQLEEEAENNTSSGSPGSSSSSSSSSNDDIFMAGMVVAT

SEQ ID NO: 34717 - protein, 218 aa, Zea mays subsp. mays
ARDHYLEHPNRKAFRSSERRVRRARFLFLHTRRGRLAENGRGCFVAVDTGRGRRDLGFDAAGGTRWLCDLLVLFLTPPPDRFQAVASAAWRGAMLRRMVPDPSSPDSSGGGGGGDARPRWRRRRRAVRRAAPLRRVRRQARGARRGVVEEPDVAAGPQGAAAPVAALAEEDLGRAGPRRRAGRRHRGRQLPAQPAPAARQAAQLPAQGLRRALAAGAR

SEQ ID NO: 34718 - protein, 212 aa, Zea mays subsp. mays
MSVPCPCSRFQLRHGDLKSGPEATGSADTGAHLASKRHSFDLGKLPGPGSLPVPASASASSNAARRFVGSVSASEIEQSEDYTRIIARGPNPKTTHIFGDCILEPRTVGCGDSKAVESGEGGAGCYFVVKRAAPGAGDFLSSCFACKKKLEGNDIYIYRGEKAFCSANCRDQEIQLEEEAENNTSSGSPGSSSSSSSSSNDDIFMAGMVVAT

SEQ ID NO: 34719 - DNA, 1500 bp, Zea mays subsp. mays
  misc_feature (296)..(296): n is a, c, g, or t
  misc_feature (305)..(305): n is a, c, g, or t
  misc_feature (319)..(319): n is a, c, g, or t
  misc_feature (347)..(347): n is a, c, g, or t
  misc_feature (450)..(450): n is a, c, g, or t
aaaaaaccctcttcgaagttcgatcccagggccgctccggcggcggcggcgcgttgagatggctgacactgacagcgcggagaccgagaaagagaagatggtagcggatgatgggggcaagcccgcagagctctcgaagagcgcgaggaagaagctgcagaagcaggagcggcaggcggaacgtaaagcggcccgaaaagcggcggagaaggagcgacggcgcgccgacatagagcggcggaggcgtgagtgggaggacgctcttgccgccgcgccgtcggatgaggcccgggccnagatggtgncggcgcggcggganacgcggcgcgagcgggtgggccggcggncggaggagcgcggggcgcgagctgaccggctcaggcgcgcggctgagggcgcgggccagaaggtggtgctggacctcgagtttgcggaccttatgaggcccancgagattcatagcctcacgcagcagattatgtactgctatgcagtgaatgggagatctgcaaacccagctcacctgtggctgacaggttgcagtggtgaaatggcgacccatcttcagagaattcctgggtatgataagtggatcattgaaagggcggccaggccttatattgaagcatttgaagaccgtaaagaaaacctcgtgtatcttacagcagatgctgagacagtgcttgatgatctagacatgtcgaaaatatacatcatcggcggcctggtggatcgaaacagatggaaaggcataacactgaagaagtcagctgagcagggaattcaatctgcaaagcttcctattggaaactacctaaaaatgtcaagttctcaggttcttacagttaaccaagtgtttgagataatgttgaagtttgtggaaacaagggactggaagacggcattcttccatgtgattccacaaaggaagcgaggagaagctgagaccagagatgacgtggaaaaaggaggcctggatgacaacgatggcgccgccgaaggggctgcagatggagaccattccgaggaagacctgaacaagggcttcggtgaggaggaggacgatgatggggacgaagagctggaagaggaagaagcagatgtctccaacaagaggcagtgtgttagagttgaaaacggggaagctggggatgccaccgtagcagaggtggaaccaaacaacggcggcggcggcgggggcggggaccgctgaacagtgaacagcaccaccacgtttgtcgctaactcgctattttcacaacagcatcggtattggatttttgagcgttgtctctggcatttttcatgtattttagggctagtttggcaaattcatttttccaagtgattccgattttcctaaggtaaaatgaactaatttccttggaaaaatgaaaaaaaaaatcactagtaaaaatgggattgccaaactgtcctttattagacaatttctgccgtactctactcggaactgaataactgaccagcttagttaaagtc

SEQ ID NO: 34720 - protein, 403 aa, Zea mays subsp. mays
  misc_feature (99)..(99): Xaa can be any naturally occurring amino acid
  misc_feature (102)..(102): Xaa can be any naturally occurring amino acid
  misc_feature (106)..(106): Xaa can be any naturally occurring amino acid
  misc_feature (116)..(116): Xaa can be any naturally occurring amino acid
  misc_feature (150)..(150): Xaa can be any naturally occurring amino acid
KNPLRSSIPGPLRRRRRVEMADTDSAETEKEKMVADDGGKPAELSKSARKKLQKQERQAERKAARKAAEKERRRADIERRRREWEDALAAAPSDEARAXMVXARRXTRRERVGRRXEERGARADRLRRAAEGAGQKVVLDLEFADLMRPXEIHSLTQQIMYCYAVNGRSANPAHLWLTGCSGEMATHLQRIPGYDKWIIERAARPYIEAFEDRKENLVYLTADAETVLDDLDMSKIYIIGGLVDRNRWKGITLKKSAEQGIQSAKLPIGNYLKMSSSQVLTVNQVFEIMLKFVETRDWKTAFFHVIPQRKRGEAETRDDVEKGGLDDNDGAAEGAADGDHSEEDLNKGFGEEEDDDGDEELEEEEADVSNKRQCVRVENGEAGDATVAEVEPNNGGGGGGGDR

SEQ ID NO: 34721 - protein, 384 aa, Zea mays subsp. mays
  misc_feature (80)..(80): Xaa can be any naturally occurring amino acid
  misc_feature (83)..(83): Xaa can be any naturally occurring amino acid
  misc_feature (87)..(87): Xaa can be any naturally occurring amino acid
  misc_feature (97)..(97): Xaa can be any naturally occurring amino acid
  misc_feature (131)..(131): Xaa can be any naturally occurring amino acid
MADTDSAETEKEKMVADDGGKPAELSKSARKKLQKQERQAERKAARKAAEKERRRADIERRRREWEDALAAAPSDEARAXMVXARRXTRRERVGRRXEERGARADRLRRAAEGAGQKVVLDLEFADLMRPXEIHSLTQQIMYCYAVNGRSANPAHLWLTGCSGEMATHLQRIPGYDKWIIERAARPYIEAFEDRKENLVYLTADAETVLDDLDMSKIYIIGGLVDRNRWKGITLKKSAEQGIQSAKLPIGNYLKMSSSQVLTVNQVFEIMLKFVETRDWKTAFFHVIPQRKRGEAETRDDVEKGGLDDNDGAAEGAADGDHSEEDLNKGFGEEEDDDGDEELEEEEADVSNKRQCVRVENGEAGDATVAEVEPNNGGGGGGGDR

SEQ ID NO: 34722 - protein, 371 aa, Zea mays subsp. mays
  misc_feature (67)..(67): Xaa can be any naturally occurring amino acid
  misc_feature (70)..(70): Xaa can be any naturally occurring amino acid
  misc_feature (74)..(74): Xaa can be any naturally occurring amino acid
  misc_feature (84)..(84): Xaa can be any naturally occurring amino acid
  misc_feature (118)..(118): Xaa can be any naturally occurring amino acid
MVADDGGKPAELSKSARKKLQKQERQAERKAARKAAEKERRRADIERRRREWEDALAAAPSDEARAXMVXARRXTRRERVGRRXEERGARADRLRRAAEGAGQKVVLDLEFADLMRPXEIHSLTQQIMYCYAVNGRSANPAHLWLTGCSGEMATHLQRIPGYDKWIIERAARPYIEAFEDRKENLVYLTADAETVLDDLDMSKIYIIGGLVDRNRWKGITLKKSAEQGIQSAKLPIGNYLKMSSSQVLTVNQVFEIMLKFVETRDWKTAFFHVIPQRKRGEAETRDDVEKGGLDDNDGAAEGAADGDHSEEDLNKGFGEEEDDDGDEELEEEEADVSNKRQCVRVENGEAGDATVAEVEPNNGGGGGGGDR

SEQ ID NO: 34723 - DNA, 1419 bp, Zea mays subsp. mays
ctgctaagtgccaagtgccaacgccctctctcgcacccgttccacgtaacggaatcatccaccaccgggcaccggcagtcacagcgcacctcactgaaattggaacagagaacatggcggccgccgcgcccgcgtgccacgtccatatcgaggccctgcagacggcgctgccaacgcgcgcggtggagcccgggcgggcgcgccccgtggccgtggccgcgcccgcgctcgtcgctggcgccgcgctgcagcgccgagcccgcgttgtgctctactaccgcgcagccgccgacgcgtcggcgccgtggagcccggaggaggctctcctggcgaaggagtcgctgagcgaggccgtggccgaccacccggagatggcaggccgcctccggcgccgcgcggacgggctgtgggaggtgaagctcaacgacacgggcgtcaggctcgtgctggccaccgtggaggccgcggtcgacgacttcgtcggcgccggcgtcagcgagcaggaccgcaagcgcagggaagccgctctcgcgccgtggaccgacgtggacgccgacggtcccgatatgtgcgccctctgcttcgttcagctgacacggttccagggcgacgggggatacgccgtcggcgtgagctgcagcctgatgctgtgcgacccgctgtcgctggcgcggttcctgctgtcgtgggcgcgcacgcacgcggcgatcaaggcccggaacaaggccgccaccatcccgatgatgcggtacgcgggctacttccagcgccccaacaccatgacccgccgcatcaagtccgtcccgctcgacgccttcgccgccgacggcgtcggcaccgacaccgacaccgacaccgtgctcttcagagcctccggggcgcccgaccaccgcgcgctcgccggggcctgcgttggcgaggccagagacaggctcggcgcggccgaggtgccgcagttcacgctcctcgtcgtcgctagagacggtgtcggggacaacccgagagcgatgaccgttgagacgtgcgccgcggatagcctgtcggtccccggcggctccactggcgacaagcctgaggttgcgcagtggcaggacctcgggctggaggagtttgcgctcagggagagcaagcccgtgcacgtgtcctgcagcatcgtgactgccggggatgaagggctcgtcatcgtgatgcccgatggcaaaggatttctggtcacggtgactgtccgcctgtccgaatttgttaacatttagtttttattgagaagtatttatattgagagctttgtgtattttaatttaattttcaagaccataagttcgaagccctgacttacggcgtcgaggtaatacgtctgagcgccgtgctcagcgatgtcaagtgtagcaccatgatggataaaccgatgatacggtaggc

SEQ ID NO: 34724 - protein, 416 aa, Zea mays subsp. mays
AKCQVPTPSLAPVPRNGIIHHRAPAVTAHLTEIGTENMAAAAPACHVHIEALQTALPTRAVEPGRARPVAVAAPALVAGAALQRRARVVLYYRAAADASAPWSPEEALLAKESLSEAVADHPEMAGRLRRRADGLWEVKLNDTGVRLVLATVEAAVDDFVGAGVSEQDRKRREAALAPWTDVDADGPDMCALCFVQLTRFQGDGGYAVGVSCSLMLCDPLSLARFLLSWARTHAAIKARNKAATIPMMRYAGYFQRPNTMTRRIKSVPLDAFAADGVGTDTDTDTVLFRASGAPDHRALAGACVGEARDRLGAAEVPQFTLLVVARDGVGDNPRAMTVETCAADSLSVPGGSTGDKPEVAQWQDLGLEEFALRESKPVHVSCSIVTAGDEGLVIVMPDGKGFLVTVTVRLSEFVNI

SEQ ID NO: 34725 - protein, 379 aa, Zea mays subsp. mays
MAAAAPACHVHIEALQTALPTRAVEPGRARPVAVAAPALVAGAALQRRARVVLYYRAAADASAPWSPEEALLAKESLSEAVADHPEMAGRLRRRADGLWEVKLNDTGVRLVLATVEAAVDDFVGAGVSEQDRKRREAALAPWTDVDADGPDMCALCFVQLTRFQGDGGYAVGVSCSLMLCDPLSLARFLLSWARTHAAIKARNKAATIPMMRYAGYFQRPNTMTRRIKSVPLDAFAADGVGTDTDTDTVLFRASGAPDHRALAGACVGEARDRLGAAEVPQFTLLVVARDGVGDNPRAMTVETCAADSLSVPGGSTGDKPEVAQWQDLGLEEFALRESKPVHVSCSIVTAGDEGLVIVMPDGKGFLVTVTVRLSEFVNI

SEQ ID NO: 34726 - protein, 293 aa, Zea mays subsp. mays
MAGRLRRRADGLWEVKLNDTGVRLVLATVEAAVDDFVGAGVSEQDRKRREAALAPWTDVDADGPDMCALCFVQLTRFQGDGGYAVGVSCSLMLCDPLSLARFLLSWARTHAAIKARNKAATIPMMRYAGYFQRPNTMTRRIKSVPLDAFAADGVGTDTDTDTVLFRASGAPDHRALAGACVGEARDRLGAAEVPQFTLLVVARDGVGDNPRAMTVETCAADSLSVPGGSTGDKPEVAQWQDLGLEEFALRESKPVHVSCSIVTAGDEGLVIVMPDGKGFLVTVTVRLSEFVNI

SEQ ID NO: 34727 - DNA, 1491 bp, Zea mays subsp. mays
gtacgatagtggggaagcggtggtgcgctcgtcagccgatgagccgacacacacacagacacagcacaggacacacggcccccggtttctccccgttgctgctgtcccgccggcgtccagtctcggcggggctctagctggggacgcgccggctcgcgctgtgacctgggagctctggactctggaggcgctgcaggcggtcgggcgggcgatggggtgggcttcctgctgcaagcggtctgacggggctgaacctggcaggaggaggaggaagaagaaggacacggcgtggcggatcttctcactcaaggagctccagtcagcgacgaacaatttcaattacgacaacaagctcggcgagggcgggttcggcagtgtgtactggggccagctctgggacggatcacagatcgccgtgaagaggctcaagagctggagcaacaaggccgaaacggagttcgctgtcgaggtggaggttctggcacgcgtgcggcacaggagccttctaagcctgcgcgggtactgcgccgaaggccaggagcgcctgatagtctacgattacatgccgaacctgagcatacactctcagctccatgggcagcacgcggcggagtgcaacctcagctgggagaggaggatgaggatcgctgtggactccgcggaagggatcgcctacctgcaccacagcgcgacgccgcacatcatccacagagacgtgaaggcgagcaacgtgctcctggacgccgacttccaggcgcgggtcgccgacttcggcttcgccaagctggtcccggacggcgcgacgcacgtcaccaccaaggtgaaaggcacgctgggctacctggcgccggagtacgcgatgctcgggaaggcctccgagagctgcgacgtcttcagcttcggggtcacgctgctggcagctggccagcgggaggaggcccgtggagaagctgagccccaccgccgccgcgaagcagaccgtgacggagtgggcgctcccgctggcccgcgccaggaggttcggcgagatcgccgaccccaagctcggcggcggattcgtcgaggaggagctcaagcgggtggtgctcgtcgggctcgtctgcgcccaggacaggccggagcttcggcccacgatgtctgaggtcgtccagctgctcaagggagagtctgctgagaagctcgacagcctggagaacgactgcctgttcaagcctggtggtggctcgttccagggctcggactgcgtcggcgagggcgagggcgagggcgaggggaggagccccggagcagatggagggatacaggaggcagttgattcgagcgagatagtttcctcagcaagctagtgtgtggtattggcagtagctggttcctcagcaagacagcagctccctgcctctgggagaaacgtgtgttgatcagtgtattttttgtgtggctaatccttgctattagcgagttaattcgggagtttcattgcccagttctcct

SEQ ID NO: 34728 - protein, 379 aa, Zea mays subsp. mays
YDSGEAVVRSSADEPTHTQTQHRTHGPRFLPVAAVPPASSLGGALAGDAPARAVTWELWTLEALQAVGRAMGWASCCKRSDGAEPGRRRRKKKDTAWRIFSLKELQSATNNFNYDNKLGEGGFGSVYWGQLWDGSQIAVKRLKSWSNKAETEFAVEVEVLARVRHRSLLSLRGYCAEGQERLIVYDYMPNLSIHSQLHGQHAAECNLSWERRMRIAVDSAEGIAYLHHSATPHIIHRDVKASNVLLDADFQARVADFGFAKLVPDGATHVTTKVKGTLGYLAPEYAMLGKASESCDVFSFGVTLLAAGQREEARGEAEPHRRREADRDGVGAPAGPRQEVRRDRRPQARRRIRRGGAQAGGARRARLRPGQAGASAHDV

SEQ ID NO: 34729 - protein, 309 aa, Zea mays subsp. mays
MGWASCCKRSDGAEPGRRRRKKKDTAWRIFSLKELQSATNNFNYDNKLGEGGFGSVYWGQLWDGSQIAVKRLKSWSNKAETEFAVEVEVLARVRHRSLLSLRGYCAEGQERLIVYDYMPNLSIHSQLHGQHAAECNLSWERRMRIAVDSAEGIAYLHHSATPHIIHRDVKASNVLLDADFQARVADFGFAKLVPDGATHVTTKVKGTLGYLAPEYAMLGKASESCDVFSFGVTLLAAGQREEARGEAEPHRRREADRDGVGAPAGPRQEVRRDRRPQARRRIRRGGAQAGGARRARLRPGQAGASAHDV

SEQ ID NO: 34730 - protein, 192 aa, Zea mays subsp. mays
MPNLSIHSQLHGQHAAECNLSWERRMRIAVDSAEGIAYLHHSATPHIIHRDVKASNVLLDADFQARVADFGFAKLVPDGATHVTTKVKGTLGYLAPEYAMLGKASESCDVFSFGVTLLAAGQREEARGEAEPHRRREADRDGVGAPAGPRQEVRRDRRPQARRRIRRGGAQAGGARRARLRPGQAGASAHDV

SEQ ID NO: 34731 - DNA, 1906 bp, Zea mays subsp. mays
cccacactccaccacccgcgccgccgcctcctactccgccccggcccctctgatccggaccgagcgccggccatggcgctcgccttcgacgagttcgggcgccccttcatcatcctgcgggagcaggagaagaagacgcgccttagggggctcgacgcgcagaaggccaacatcgcctcggccaaggccgtcgcgcggatcctccgcacgtcgcttggacccaagggcatggacaagatgctccagtcccccgacggcgacgtcatcatcacaaatgatggagcgaccatcctggagcagatggatgttgacaaccagatagcaaagctgatggtggagctgtcccgtagtcaagactatgaaatcggggatggtaccaccggggtggtagtcatggcaggggctcttctcgagcaggccgagaagcttctggagcgtggtattcaccccattagggtggctgaaggctatgagatggcgtcaaaggtagcttttgaccacctagaacatatctccgaaaagtttgagttcagtgcagacaacattgaacccctggtccagacctgcatgacaactctatcctcaaagattgttaaccgttgcaagcgggcgttggcagagattgctgtcaaagcagtacttgcggttgcaagatttggagaggaaggatgttaacttggatctaattaaagtagaaggcaaggttggtgggaagctggaggacactgaacttgtatatggaattattgttgacaaatatatgagccatccacaaatgccaaagagaattgaggatgctaagattgccatcttgacatgcccatttgagcctccgaagccaaagacaaagcataaggttgacattgacactgttgagaaattccagacactgcgtgagcaagagcagaaatactttgatgaaatggttcagaagtgcaaggatgctggtgcaaccctggttatttgccagtggggttttgatgatgaagccaatcatttattgatgcacagaaatctgccagcagttagatgggttggtggtgttgaattggaaattgattgccattgctacaggagggcggattgttccgagattccaagagttgagtcctgaaaagcttggaaaggctggatttagtcagagagaaatcattcggaacaacaaaggaccggatgctttacattgagaagtgtgccaattctagagctgttaaaacccattttcatccgtggtggaaacaaaatgatgattgaggagaccaagcgcagtcttcatgatgctctttgcgtggcaaggaatctgatccggaataactcaattgtgtacggtggcggctcagccgagatatcttgctcaattgctgttgaaactgctgcagataggcacccgggagttgagcagtatgctatcaggtcattcgctgatgcattagatgctgttccactagcgttggccgaaaacagtggtttgtcaccaattgataccttaactgcggtaaaagctcaacaagtcaaggagagcaacccccactgcggcatagactgcaacgacgttggcaccaccgacatgaaagaacagaacgtcttcgagaccctgattggcaagcagcaacagatcttgcttgccacccaggtggtgaagatgatcctgaagatcgacgacgtcatctcaccgtccgagtactgatggaaagaaggaacgggatggctatgctggatatgcgtaggcggcattgctgatgtgttgattggtgtacctccttatccaggcttgctgcctaccactcactccctgtgtgacgttttgccgaaattggtttgtattgtgcacgataatatctggaaatagactctagacagtccttagttatctttttattataaaaaaagtcagtgccttctcgtc

SEQ ID NO: 34732 - protein, 224 aa, Zea mays subsp. mays
PTLHHPRRRLLLRPGPSDPDRAPAMALAFDEFGRPFIILREQEKKTRLRGLDAQKANIASAKAVARILRTSLGPKGMDKMLQSPDGDVIITNDGATILEQMDVDNQIAKLMVELSRSQDYEIGDGTTGVVVMAGALLEQAEKLLERGIHPIRVAEGYEMASKVAFDHLEHISEKFEFSADNIEPLVQTCMTTLSSKIVNRCKRALAEIAVKAVLAVARFGEEGC

SEQ ID NO: 34733 - protein, 200 aa, Zea mays subsp. mays
MALAFDEFGRPFIILREQEKKTRLRGLDAQKANIASAKAVARILRTSLGPKGMDKMLQSPDGDVIITNDGATILEQMDVDNQIAKLMVELSRSQDYEIGDGTTGVVVMAGALLEQAEKLLERGIHPIRVAEGYEMASKVAFDHLEHISEKFEFSADNIEPLVQTCMTTLSSKIVNRCKRALAEIAVKAVLAVARFGEEGC

SEQ ID NO: 34734 - protein, 148 aa, Zea mays subsp. mays
MDKMLQSPDGDVIITNDGATILEQMDVDNQIAKLMVELSRSQDYEIGDGTTGVVVMAGALLEQAEKLLERGIHPIRVAEGYEMASKVAFDHLEHISEKFEFSADNIEPLVQTCMTTLSSKIVNRCKRALAEIAVKAVLAVARFGEEGC

SEQ ID NO: 34735 - DNA, 1254 bp, Zea mays subsp. mays
gcaaatccccttccgcgtctgtctggcctctggggcttctaggttagcgcgtgccaccaccatggccgaggaggtccaggctccactttccgccaccatggccgaggaggtgcaggctccactttccgccaccatggcgaaggaggcccagtcgccgccgtccgcaaccatagcggaggcgacggcgccgccgcagctcgtattgtttaactcctttacgaagagggaggagccattccagccccgggtagaggggaaggtagggatgtacgtctgtggcgtcactccctacgactttagccacatcggccacgcgcgtgcctacgtcgccttcgacgtcctctacaggtaccttaaattcttggggtatgaagttgaatatgtccgtaatttcacggatattgatgacaagattattaagcgtgccaatgaacgcggtgaaacagtaacaagcttgagtagccagtttatcaatcaatttcttcttgacatgactgagctccagtgcttgcctcctacctgcgagccacgggtaacagaacacattgagcatattataaagttgataacacagataatggacaatggcaaagcctatgctattgaaggagatgtttacttttcagttgaaagttttcctgaatatctcagtttatctggaagaaaatttgatcaaaatcaggcaggtgcacgggttgcttttgatacaagaaagcacaatcctgcagacttcgcactctggaaagctgcaaaggagggtgaacctttttgggatagcccttggggccgtggaagaccaggctggcatattgaatgcagcgcaatgagtgctcactatttaggacatgtattcgatattcatggtggggggaaagatttgatttttcctcatcatgagaatgagcttgcacaaagccgcgcagcttatcctgagagcgaggtcaagtgctggatgcacaatggctttgttaacaaggatgataaaaaaatggcaaaatcagataataactttttcacgattagagatatcactgctctttaccatccaatggctttaagatttttcttgatgcgcacacattatagatcagatgttaaccattctgatcaagcgcttgagattgcatctgatcgtgtctactacatttatcagactttatatgactgtgaggaagtgttagctacatatcgtgaagagggtacctctctcccagtgccgtctgaggagcaaaatctgattggaaagcaccattc

SEQ ID NO: 34736 - protein, 417 aa, Zea mays subsp. mays
QIPFRVCLASGASRLARATTMAEEVQAPLSATMAEEVQAPLSATMAKEAQSPPSATIAEATAPPQLVLFNSFTKREEPFQPRVEGKVGMYVCGVTPYDFSHIGHARAYVAFDVLYRYLKFLGYEVEYVRNFTDIDDKIIKRANERGETVTSLSSQFINQFLLDMTELQCLPPTCEPRVTEHIEHIIKLITQIMDNGKAYAIEGDVYFSVESFPEYLSLSGRKFDQNQAGARVAFDTRKHNPADFALWKAAKEGEPFWDSPWGRGRPGWHIECSAMSAHYLGHVFDIHGGGKDLIFPHHENELAQSRAAYPESEVKCWMHNGFVNKDDKKMAKSDNNFFTIRDITALYHPMALRFFLMRTHYRSDVNHSDQALEIASDRVYYIYQTLYDCEEVLATYREEGTSLPVPSEEQNLIGKHH

SEQ ID NO: 34737 - protein, 397 aa, Zea mays subsp. mays
MAEEVQAPLSATMAEEVQAPLSATMAKEAQSPPSATIAEATAPPQLVLFNSFTKREEPFQPRVEGKVGMYVCGVTPYDFSHIGHARAYVAFDVLYRYLKFLGYEVEYVRNFTDIDDKIIKRANERGETVTSLSSQFINQFLLDMTELQCLPPTCEPRVTEHIEHIIKLITQIMDNGKAYAIEGDVYFSVESFPEYLSLSGRKFDQNQAGARVAFDTRKHNPADFALWKAAKEGEPFWDSPWGRGRPGWHIECSAMSAHYLGHVFDIHGGGKDLIFPHHENELAQSRAAYPESEVKCWMHNGFVNKDDKKMAKSDNNFFTIRDITALYHPMALRFFLMRTHYRSDVNHSDQALEIASDRVYYIYQTLYDCEEVLATYREEGTSLPVPSEEQNLIGKHH

SEQ ID NO: 34738 - protein, 385 aa, Zea mays subsp. mays
MAEEVQAPLSATMAKEAQSPPSATIAEATAPPQLVLFNSFTKREEPFQPRVEGKVGMYVCGVTPYDFSHIGHARAYVAFDVLYRYLKFLGYEVEYVRNFTDIDDKIIKRANERGETVTSLSSQFINQFLLDMTELQCLPPTCEPRVTEHIEHIIKLITQIMDNGKAYAIEGDVYFSVESFPEYLSLSGRKFDQNQAGARVAFDTRKHNPADFALWKAAKEGEPFWDSPWGRGRPGWHIECSAMSAHYLGHVFDIHGGGKDLIFPHHENELAQSRAAYPESEVKCWMHNGFVNKDDKKMAKSDNNFFTIRDITALYHPMALRFFLMRTHYRSDVNHSDQALEIASDRVYYIYQTLYDCEEVLATYREEGTSLPVPSEEQNLIGKHH

SEQ ID NO: 34739 - DNA, 342 bp, Zea mays subsp. mays
ataagattgggcttctccagcctctctcagttgcgaacaacctgatggcgaagaagaaaggctcggcgaccgccgccgccgccgccgccatggcggatgagacggacgtctcgagtcctcagggctccgcccccggcagcgagggaggtggggagaaggagggcgcctttcttcttggggagccaacctgggaggacgctggcggcggggcggtggcggtgcgcggagacggggcacgagctaccggagcgggagaaggaggcctacgcgcggtcccgcgcttgccgcctcgcgctcattgaccacgccgtcgcgcagaagaagccgccgctcaacgccttc

SEQ ID NO: 34740 - protein, 99 aa, Zea mays subsp. mays
KIGLLQPLSVANNLMAKKKGSATAAAAAAMADETDVSSPQGSAPGSEGGGEKEGAFLLGEPTWEDAGGGAVAVRGDGARATGAGEGGLRAVPRLPPRAH

SEQ ID NO: 34741 - protein, 85 aa, Zea mays subsp. mays
MAKKKGSATAAAAAAMADETDVSSPQGSAPGSEGGGEKEGAFLLGEPTWEDAGGGAVAVRGDGARATGAGEGGLRAVPRLPPRAH

SEQ ID NO: 34742 - protein, 82 aa, Zea mays subsp. mays
MRRTSRVLRAPPPAAREVGRRRAPFFLGSQPGRTLAAGRWRCAETGHELPEREKEAYARSRACRLALIDHAVAQKKPPLNAF

SEQ ID NO: 34743 - DNA, 1880 bp, Zea mays subsp. mays
ccagcccaacttacagaagcccacaaagtattcacttaacgtctgtaactaccggcccatcccaggaagaggccccgctcctctccctgctcgctgcacagggactcggcctccgggacggcagacccacaagcgccagcacgctcgagactgtgccgtgggagtgggaggttcctcaggtgctgagcagtcgccggcggcgaccgccggtgtcggagatgaaggagagaagcggctccagggcggcggtggacgagcgctacgcgcagtggaagtcgctcatccccgtcctctacgactggtttgccaaccacaacctcgtctggccatccctctcctgccggtgggggccacagtttgagaaagctacctacaagaatcgtcagcgcctgtacctatctgaacagacggatgggagtgtgcctaatactctggttatcgcaaattgtgaagttgtgaaacctagggttgcagctgctgaacatatctcacagttcaatgaggaagcacggtcaccttttgtaaagaagtacaaaactatagttcatcctggtgaggttaacagaatcagggaacttccacagaacagtaagatcatagccactcacactgacagtccagatgtacttatttgggatgttgaagcacaaccaaatagacatgctgtcctaggagcaagcgagtctcgccctgatctgatattaacaggacataaggaaaatgcggaatttgcgcttgccatgtgtccagcagaaccatatgtcctatcaggaggaaaggacaaatctgttgtcttgtggagcatccaagaccatatatctgcccttggggattcctcgtcttctcctggagcatctggcagcaagcagtctattaaaactgcaaatgaaaaggagagccctaaagttgatcctagaggtatatttcatggacatgacagcacggttgaagatgttcagttctgcccttccagtgcgcaggagttttgtagtgtgggtgatgatgcttgtcttattctgtgggatgctcgaactggcactgccccagctgttaaggttgagaaagctcacagtggagatgttcattgtgttgattggaatccccttgatgttaactatatcttaactgggtctgccgataactctgtccgaatgtgggatcgtcggaatctgggttcaggaggagctggttctccaattcacaaatttgaaggccataaagctgctgttctttgtgttcagtggtcacctgacagagcatctgtttttggaagttctgcagaagatggtttcttaaacgtgtgggatcatgagaaggtggggaagaagaaaaattctaatgtcccagccgggcttttctttcagcacgctggtcatagggataagattgtagacttccactggaattcgtcagatccttggacaattgtcagtgtctctgatgatggcgagagcactggtggaggtggaacactgcagatttggcgcatgagtgatttgatctaccgcccagaggatgaagttcttgcagagctggagaatttcaaggctcatttggccagctgtgcaccgaagaattgagtcatgtgggttacctgcggaatgcaatcctgtggaaactgagtaggtgatgtagtttcatggccataagtatgagccccagttgacattgaatctgtcctctgatgctcctagagctgtacccttgaggggcttgtgcttttgtgagcttgtgttaaacctgctgtacgagtaaactagtatgtccgcaaacgcgtcagagccggatgtctgtgggccagctattgggatactgccggatatcgtcaacaattgttccagattggtgtattggatctaatgagattgtcagcaattgct

SEQ ID NO: 34744 - protein, 525 aa, Zea mays subsp. mays
SPTYRSPQSIHLTSVTTGPSQEEAPLLSLLAAQGLGLRDGRPTSASTLETVPWEWEVPQVLSSRRRRPPVSEMKERSGSRAAVDERYAQWKSLIPVLYDWFANHNLVWPSLSCRWGPQFEKATYKNRQRLYLSEQTDGSVPNTLVIANCEVVKPRVAAAEHISQFNEEARSPFVKKYKTIVHPGEVNRIRELPQNSKIIATHTDSPDVLIWDVEAQPNRHAVLGASESRPDLILTGHKENAEFALAMCPAEPYVLSGGKDKSVVLWSIQDHISALGDSSSSPGASGSKQSIKTANEKESPKVDPRGIFHGHDSTVEDVQFCPSSAQEFCSVGDDACLILWDARTGTAPAVKVEKAHSGDVHCVDWNPLDVNYILTGSADNSVRMWDRRNLGSGGAGSPIHKFEGHKAAVLCVQWSPDRASVFGSSAEDGFLNVWDHEKVGKKKNSNVPAGLFFQHAGHRDKIVDFHWNSSDPWTIVSVSDDGESTGGGGTLQIWRMSDLIYRPEDEVLAELENFKAHLASCAPKN

SEQ ID NO: 34745 - protein, 453 aa, Zea mays subsp. mays
MKERSGSRAAVDERYAQWKSLIPVLYDWFANHNLVWPSLSCRWGPQFEKATYKNRQRLYLSEQTDGSVPNTLVIANCEVVKPRVAAAEHISQFNEEARSPFVKKYKTIVHPGEVNRIRELPQNSKIIATHTDSPDVLIWDVEAQPNRHAVLGASESRPDLILTGHKENAEFALAMCPAEPYVLSGGKDKSVVLWSIQDHISALGDSSSSPGASGSKQSIKTANEKESPKVDPRGIFHGHDSTVEDVQFCPSSAQEFCSVGDDACLILWDARTGTAPAVKVEKAHSGDVHCVDWNPLDVNYILTGSADNSVRMWDRRNLGSGGAGSPIHKFEGHKAAVLCVQWSPDRASVFGSSAEDGFLNVWDHEKVGKKKNSNVPAGLFFQHAGHRDKIVDFHWNSSDPWTIVSVSDDGESTGGGGTLQIWRMSDLIYRPEDEVLAELENFKAHLASCAPKN

SEQ ID NO: 34746 - protein, 279 aa, Zea mays subsp. mays
MCPAEPYVLSGGKDKSVVLWSIQDHISALGDSSSSPGASGSKQSIKTANEKESPKVDPRGIFHGHDSTVEDVQFCPSSAQEFCSVGDDACLILWDARTGTAPAVKVEKAHSGDVHCVDWNPLDVNYILTGSADNSVRMWDRRNLGSGGAGSPIHKFEGHKAAVLCVQWSPDRASVFGSSAEDGFLNVWDHEKVGKKKNSNVPAGLFFQHAGHRDKIVDFHWNSSDPWTIVSVSDDGESTGGGGTLQIWRMSDLIYRPEDEVLAELENFKAHLASCAPKN

SEQ ID NO: 34747 - DNA, 1558 bp, Zea mays subsp. mays
  misc_feature (170)..(170): n is a, c, g, or t
  misc_feature (175)..(175): n is a, c, g, or t
  misc_feature (230)..(230): n is a, c, g, or t
  misc_feature (262)..(262): n is a, c, g, or t
  misc_feature (371)..(372): n is a, c, g, or t
gtgccctcaggccaggcctcgtccatcggccgcgagtacgcggctctgcgacaaaccccgcaaaaccaccgcaccgctccgcccgcccacgcggccgcaccggtgggcgatgccctccgtagccggtcatttcaccgcgggcgcggcccatgcccgcggcccaccaccgnaccgnctcgcctcctgctccttatatgaccggttccccacctccgcctccgttccccatntccaccaccaccaccaccaccaaaccctagcngcctcccttcgccgccgcagctgatcggccatgtcttcctcgacctccgatgcggccagggacgacgccgtctcatctcccgacctgccccccctgtccgcgcacgtcnncgcggcggctgctgcggccgcggcagcggcctcctcggggggaggcatagggctcgggggcgggggctccggccggaggctgccgccgccgtgctggacgcacgaggagaccctcgcgctcatcgaggcgtaccgcgacaggtgggaggcgctgcggaagggcaacctgcgcgcggctgactgggacgacgtggccaacgccgtcaccgctcgctgcggtcggttccccaccgccacgcataagtccggcgtgcagtgccgccacaagatcgagaagcttcgaaagcgataccgcgctgagcggtcgcgatccgcggggcggtccaaggggcccaagtggccgttcttcccgctcctccacgacctcgccggcggcggcgtgccggaccctagccctaacgccatcgtcaagatcaagaccaagggccctgccccgccggcatccccgccttcccctgtgtcctccccttcctcctccgaggaggctgtgcggagcaggagcctgcacgggctcatctccaacggcggggccgggagcgggctgcgcttcaccatccctaaggcctgccgcacgaagcccgccgcggcggcagctgtgaagccggagaggagcggcggcaggacgacgccgagtcagaggcgatggccgaggtggctgccgcactgcggtccgtcggggaggggttccttcgtatggaggagcgcaggctcgagctgtcgcttcagatggagaaggaacgaatggagtcagagatgaagcgcacccagacgatgctcgacgcccaacagctcttcctcgaggccttcctgggtaagcagcagcagcagcagcagcacaagaaggccagggtctccccttcctctgccgcaatggaagaggactgatcaatccatgtagcccggttgctctagttctgctctgtcaaccttgtgtgcatccttcctcgctctgcgttgactgctgttcatgctagtattgttaactttgtgtcagtagcaatataatcttactattgtgtatggatggtgatgtaggtgtagggatatggatatggataaggggggaagggcgaggtttgaattagaaattaggtggtctcagttttaatcagtgaacgacttgtgttatgagcttatgatgagctgctgctgttacgttgaaacacttcagcttgttcaaatggct

SEQ ID NO: 34748 - protein, 278 aa, Zea mays subsp. mays
  misc_feature (27)..(27): Xaa can be any naturally occurring amino acid
MSSSTSDAARDDAVSSPDLPPLSAHVXAAAAAAAAAASSGGGIGLGGGGSGRRLPPPCWTHEETLALIEAYRDRWEALRKGNLRAADWDDVANAVTARCGRFPTATHKSGVQCRHKIEKLRKRYRAERSRSAGRSKGPKWPFFPLLHDLAGGGVPDPSPNAIVKIKTKGPAPPASPPSPVSSPSSSEEAVRSRSLHGLISNGGAGSGLRFTIPKACRTKPAAAAAVKPERSGGRTTPSQRRWPRWLPHCGPSGRGSFVWRSAGSSCRFRWRRNEWSQR

SEQ ID NO: 34749 - DNA, 1364 bp, Zea mays subsp. mays
acgcacctggtttcgtccccaaatctcactcaatccccagtcccgacacccatcctctccaccgaagtcaccaccgcatggacgacgccgcgaatcccacccctccaccatccacctccgccgcatccgcggcggccgcggcggcgcaacaccagcagctccagcgccaactcttcctaatgcagcaggcgcagtcccatccgcagcagctgtcgcagcaggccatgtcccgcttcccctccaacatcgacgctcacctccgccctctagggccgcttcgcttccaacagccccagccccagccccagccgtcccactcccagggtccatctcagtcgccgtcgcaggccacgcagcaggcgtcaccccagcagcagcagcagcaggcggcggcggcggcggcagcggcgcaggcacaagcacaggcccaggcccaggcggcacgggtacgaagccccgagatggagatggcgctgcaggacgccatgcgggtctgcaatccggacgtcaagacgcccttccagtccatcgaggacgctgtcaacaggttattaccttaccatgttgttgccgactatgaggctgaagaagatgacaggatccttgatagcgacacaacaggccagatcccttctcgcctgcagcaatgggaccataatattctggtgaagattgctgagttcacgacaacttttgacaagcaagtattggcatataacataatgaccaagaaaagggccatcggtgagttcaggtcggaggagcggctcatgctggagcaagccttattgcaggaggaaaagcaagctatgctgggactgagggcagagatggagtcgagagagaaagctggtcgcgaggctgccgaagtgaagatgcgtttggcaatggagcatgctcgtgctgaggcacaagctcactctgagatgatgaatcatggtcctataagggccagtgctgttgcttcgcaaggggaggatggtccgagtcatgacatggtgcaagaacatggcgaagatgggtggggaaattctcagagggatgatgaagatccatcggaggatttcctcaacgatgagaacgaacctgagaatgggaactcagatgggcaggaggactggcgcagatctggggagtttgatctcaactctaggtaaggcagttggatttccacatgaaggtttctaggtaggctacgacatgctggtattgtatctactattctattgttgtgttcggtgaagatgtctttgtggctgtaaacatggcattcgaacaattcagtttctttgtaatttgactagtaatatttacttgagcactcaatatgtgccatttccaacttggagaaaaaaaattacaat

SEQ ID NO: 34750 - protein, 384 aa, Zea mays subsp. mays
APGFVPKSHSIPSPDTHPLHRSHHRMDDAANPTPPPSTSAASAAAAAAQHQQLQRQLFLMQQAQSHPQQLSQQAMSRFPSNIDAHLRPLGPLRFQQPQPQPQPSHSQGPSQSPSQATQQASPQQQQQQAAAAAAAAQAQAQAQAQAARVRSPEMEMALQDAMRVCNPDVKTPFQSIEDAVNRLLPYHVVADYEAEEDDRILDSDTTGQIPSRLQQWDHNILVKIAEFTTTFDKQVLAYNIMTKKRAIGEFRSEERLMLEQALLQEEKQAMLGLRAEMESREKAGREAAEVKMRLAMEHARAEAQAHSEMMNHGPIRASAVASQGEDGPSHDMVQEHGEDGWGNSQRDDEDPSEDFLNDENEPENGNSDGQEDWRRSGEFDLNSR

SEQ ID NO: 34751 - protein, 359 aa, Zea mays subsp. mays
MDDAANPTPPPSTSAASAAAAAAQHQQLQRQLFLMQQAQSHPQQLSQQAMSRFPSNIDAHLRPLGPLRFQQPQPQPQPSHSQGPSQSPSQATQQASPQQQQQQAAAAAAAAQAQAQAQAQAARVRSPEMEMALQDAMRVCNPDVKTPFQSIEDAVNRLLPYHVVADYEAEEDDRILDSDTTGQIPSRLQQWDHNILVKIAEFTTTFDKQVLAYNIMTKKRAIGEFRSEERLMLEQALLQEEKQAMLGLRAEMESREKAGREAAEVKMRLAMEHARAEAQAHSEMMNHGPIRASAVASQGEDGPSHDMVQEHGEDGWGNSQRDDEDPSEDFLNDENEPENGNSDGQEDWRRSGEFDLNSR

SEQ ID NO: 34752 - protein, 325 aa, Zea mays subsp. mays
MQQAQSHPQQLSQQAMSRFPSNIDAHLRPLGPLRFQQPQPQPQPSHSQGPSQSPSQATQQASPQQQQQQAAAAAAAAQAQAQAQAQAARVRSPEMEMALQDAMRVCNPDVKTPFQSIEDAVNRLLPYHVVADYEAEEDDRILDSDTTGQIPSRLQQWDHNILVKIAEFTTTFDKQVLAYNIMTKKRAIGEFRSEERLMLEQALLQEEKQAMLGLRAEMESREKAGREAAEVKMRLAMEHARAEAQAHSEMMNHGPIRASAVASQGEDGPSHDMVQEHGEDGWGNSQRDDEDPSEDFLNDENEPENGNSDGQEDWRRSGEFDLNSR

SEQ ID NO: 34753 - DNA, 1746 bp, Zea mays subsp. mays
cttcaatttttactatttaattatacagatacatatccagccggcgcagccaggaggcgactgaccgaattgtattgtttgttcgatcgaagcaggcagatggcaggcggcggattcgtggaggacatgaacatgatgagggagcagagcctcctcgaggcgacgtgcggcgacctcttcgaccacatcgacgacctcctcgacttccccaacgaggactccgccgccgccgtgctcctcctggacgcgccggcgccggggagcccgctgtcggcgcgcatcatcgacgtcggccgcgccggcaatgcgctcgccccgcctgctgcccccgcgcagcacgacgcttccgctagcgccttcttcgccgccgcggggaacgatgtgttcgacaccaaggacgtcgtcggcgcacacatcggctcgtgcgacgacattgacatggacatggcgcagctggagtggctatcggggctcttcgacgacgcctccatcccgcacgagccggtgttccctggcgcgacggcgggcggcgcggcgcccatcatgaagagctccgcgctggcggccggcagcgctgctgccgccggacaaaatggaggacgcgctgctgttccgcagctccagccccatctcggtgctggagcacggcagcggtggcagcggcagcgccagcgccaccggctccgcgtcctcgtcctcctcctcggcgtcctcctcctcggagtccttctccgggagtgggagtggaggagggcatgtttggtcggcgccagtgtcgccgcgcccggcgccgccgccggtgctcgtcataccggcgcgcgcgcggagcaagcgctcccgttcgtccgcgttcaccggcgccgccgcgcgcgccggggcggagacgccaaccatcctcgtgccgacgcccatgtactcgtccgggtctgcccactcggaccccgagagcatcgccgagtccagcccgcacccggcgccgcccatgaagaagaagaagaaggccaagaagcctgcgccccccgcgccagctgcctcttctgacgacaacgatggcgacgccgactacgaggaaggcggcgagcaagcggagccgcagggcggcgccgtcaggaggtgcacgcattgccagatcgagaagacgccgcagtggcgcgcggggccgctggggcccaagacgctctgcaacgcctgcggcgtgcgctacaagtccggtcgcctgttcccggagtaccgccccgcggcgagccccaccttcgtgccgtccatccactccaactcgcacaagagggtggtggagatgcgccagaaggctgtccggagcggcgaccccgtcgtgcgaccttctccatttcatccgccgccgggattgacgtcccggcatggcgtcgccggactgtcggtcggtctcgtcccccatatagctatatatgtatgcatgcatggttgcttcatcagtcgtcgtcgcccattatggtcatcatcaccgcttcaccggtcaccgccatggatcgtctcccgcccatcatcacatgcattggtttgtgtcagcatccatccaatcccaatccatcgccgggcgtcccggcgttgttagttcattaggtcttttttttcctcatcggggggctagtgttattttacctttgatccttttgtctattggttaattggtttcccctggatgttttttgtttgtatagagtgaaaaagagagaggagaaatagatgaatcagagtggttgctgc

SEQ ID NO: 34754 - protein, 346 aa, Zea mays subsp. mays
LQFLLFNYTDTYPAGAARRRLTELYCLFDRSRQMAGGGFVEDMNMMREQSLLEATCGDLFDHIDDLLDFPNEDSAAAVLLLDAPAPGSPLSARIIDVGRAGNALAPPAAPAQHDASASAFFAAAGNDVFDTKDVVGAHIGSCDDIDMDMAQLEWLSGLFDDASIPHEPVFPGATAGGAAPIMKSSALAAGSAAAAGQNGGRAAVPQLQPHLGAGARQRWQRQRQRHRLRVLVLLLGVLLLGVLLREWEWRRACLVGASVAAPGAAAGARHTGARAEQALPFVRVHRRRRARRGGDANHPRADAHVLVRVCPLGPREHRRVQPAPGAAHEEEEEGQEACAPRASCLF

SEQ ID NO: 34755 - protein, 333 aa, Zea mays subsp. mays
MEDALLFRSSSPISVLEHGSGGSGSASATGSASSSSSSASSSSESFSGSGSGGGHVWSAPVSPRPAPPPVLVIPARARSKRSRSSAFTGAAARAGAETPTILVPTPMYSSGSAHSDPESIAESSPHPAPPMKKKKKAKKPAPPAPAASSDDNDGDADYEEGGEQAEPQGGAVRRCTHCQIEKTPQWRAGPLGPKTLCNACGVRYKSGRLFPEYRPAASPTFVPSIHSNSHKRVVEMRQKAVRSGDPVVRPSPFHPPPGLTSRHGVAGLSVGLVPHIAIYVCMHGCFISRRRPLWSSSPLHRSPPWIVSRPSSHALVCVSIHPIPIHRRASRRC

SEQ ID NO: 34756 - protein, 313 aa, Zea mays subsp. mays
MAGGGFVEDMNMMREQSLLEATCGDLFDHIDDLLDFPNEDSAAAVLLLDAPAPGSPLSARIIDVGRAGNALAPPAAPAQHDASASAFFAAAGNDVFDTKDVVGAHIGSCDDIDMDMAQLEWLSGLFDDASIPHEPVFPGATAGGAAPIMKSSALAAGSAAAAGQNGGRAAVPQLQPHLGAGARQRWQRQRQRHRLRVLVLLLGVLLLGVLLREWEWRRACLVGASVAAPGAAAGARHTGARAEQALPFVRVHRRRRARRGGDANHPRADAHVLVRVCPLGPREHRRVQPAPGAAHEEEEEGQEACAPRASCLF

SEQ ID NO: 34757 - DNA, 1160 bp, Zea mays subsp. mays
aaaccaaacataatacgatgctgcggcgccttgttgcgggagccgccgccgtgcgttcgccgctgccgccgctgttctgtcgggtgcttcacaacggcagcggaggtagtgggtgtagctcgggggatccggagagcgtggcgtaccgcatgtcgatgctgcggcgcccctctaccgtccgcaagaaggggctcacctggaactgctgcagcctcatcggtcgccttgccgcaccggtgaggccgttcgacactagctttcttgaagtccccagtgcgtacaccttcctctccgtcaccttctcgtcgcccggcgacctcttcgagctcgtccaacataaatgtgacattgcagctgactggtgagctggcaaatgttggcctaaagcatctgaagcatgatgacctcgtttatgtatctggtcatctgggctcttatcataaagtcagtccaagtggtgaacggcacattgtctataagatttatgtcagagagctgaattatgttgttgatcaaaataagaagcctcagaatgatgcagactcaacaagtccaccatcaatgacatctgtcacccctcaaatgctaaaagagaatgagtgtataggcaggcttcgcttgtggcaggtcttctttgcgaacccatatgagtggtgggacaaccgacaatccaaaacatgggccaactatcctgatttcaagcacaaggacactcgtgagaaaatttggcttcgtccagatgaccctccttgggtacgaaagcagcttgaattatatgacctggaagtagcagagaatggccataggtgtaaaagtcgactgtcaaaaaaacaaaattggaaaacccaagattttgactactttgatgatgaagaagtacagtattcagcggaagcatgaataggacgcatggcattgtctgccaagaatgaagaaattcaccaggccatttgggtggtttgggggtgggggcggctgtttctttgctcagtgatcttactcaattctatagatgtatgcttggtatgatgtggatatgttttgagtctgctaactattgggatggcaaggttatgtgtagtttgtaattttatttatgcgtattttgagatgcaagtgtgagggaacctcgacatattagcgaggccctatcaattaac

SEQ ID NO: 34758 - protein, 120 aa, Zea mays subsp. mays
TKHNTMLRRLVAGAAAVRSPLPPLFCRVLHNGSGGSGCSSGDPESVAYRMSMLRRPSTVRKKGLTWNCCSLIGRLAAPVRPFDTSFLEVPSAYTFLSVTFSSPGDLFELVQHKCDIAADW

SEQ ID NO: 34759 - protein, 115 aa, Zea mays subsp. mays
MLRRLVAGAAAVRSPLPPLFCRVLHNGSGGSGCSSGDPESVAYRMSMLRRPSTVRKKGLTWNCCSLIGRLAAPVRPFDTSFLEVPSAYTFLSVTFSSPGDLFELVQHKCDIAADW

SEQ ID NO: 34760 - protein, 112 aa, Zea mays subsp. mays
MTSVTPQMLKENECIGRLRLWQVFFANPYEWWDNRQSKTWANYPDFKHKDTREKIWLRPDDPPWVRKQLELYDLEVAENGHRCKSRLSKKQNWKTQDFDYFDDEEVQYSAEA

SEQ ID NO: 34761 - DNA, 1526 bp, Zea mays subsp. mays
  misc_feature (351)..(353): n is a, c, g, or t
gttgagcagaatcagcagaaaggtgcaggatcaggaggagctctcgtggcgtcagtctctggaaggtccaaattaagattagaagatggacggcgagatggacgaggacgcgctgacggagatccttgcgaggctgccgtgcaggtcgctggcgcggttccagtgcgtctccacgtcgtggcgccgcatcatctcgagcgactacctccgccgccggctgccgctcatcacgtcgggggtgctctaccacgacgacacgcgccgcggcgacgcggacggcggcaggaggcagcaggtgtacacgtacgcgtgcgcgtcaggcggtggcgccaccgccaccgccacggcggnnncccccgacatgggcttcttcccgcgccacgacacgtccaccatcatcgacggctgcaacgggctgctgctctactacgcgtcccgcccgacggcggcgttccacgtcgtgaacccgaccacgcggcggtgggcggagctgccggcgccgcgcgcgaggacgctgctctccgtgctggcgttcgacccctgcgcgtccccgcgctaccgggtggtgtgcttcaccgggtggctcccccggggcgcgaccctcgaggtgttcgactcggagcgcggcgcgtggaccgaccacgaggtcgacttcggcctcgacaccgacgccatgtccgccaccatgcactactccggcggcgcgctccacgtgctggcctactcgggccacgtcgtccgcgtcgacctggacaccatggcgtccgcggccaccgagctcccggcccccgtcagctgccgggcgcgcgccgggcactgccgcggccgcctgcgcttcgcgtccagcgacggagcgcgcctcaggatctgggagctcagggacgccaccggaggcgagtgggcgctcaagcacgagatcggggtcgccgatgtcgtccccggcgccgcgtcccagcccatcacgttcctgttcatggcgttccaccctgagcgggaggtggtgtacctgtggtcgccgtggaagctgctggcgttcgacatggtccagaggcgcgtcgaggaggagtgggcgttcggttcggagaaagaaggcacgcatctcatacaggtctggttgtttccgttctcgcgccatttggccagcgcgctggcctgattcggcttttttgccgacgagccggaaatagcattggggcccaagtgtttcgttgcctacccagtaccaacaagtccacaaccacaatgctcgggttactaaaaggtcgataaaataccaaaaaaaaaacagtcaaagacagtgttcgtcgaaaaaaactaaggaaaaacaattagtagtaaaactgaaaatacctttaatactacatggcgccttgaacggcatgttgttgtcctttatagatcacgatcactgtggtattggggctattcaattattcttccacgacggtgtgtaagcgtagtgtgtctcttcgatgttctagtaatgtttaagaatatgtggttcaagtggagtgttgagtgttggc

SEQ ID NO: 34762 - protein, 356 aa, Zea mays subsp. mays
  misc_feature (89)..(90): Xaa can be any naturally occurring amino acid
MDGEMDEDALTEILARLPCRSLARFQCVSTSWRRIISSDYLRRRLPLITSGVLYHDDTRRGDADGGRRQQVYTYACASGGGATATATAXXPDMGFFPRHDTSTIIDGCNGLLLYYASRPTAAFHVVNPTTRRWAELPAPRARTLLSVLAFDPCASPRYRVVCFTGWLPRGATLEVFDSERGAWTDHEVDFGLDTDAMSATMHYSGGALHVLAYSGHVVRVDLDTMASAATELPAPVSCRARAGHCRGRLRFASSDGARLRIWELRDATGGEWALKHEIGVADVVPGAASQPITFLFMAFHPEREVVYLWSPWKLLAFDMVQRRVEEEWAFGSEKEGTHLIQVWLFPFSRHLASALA

SEQ ID NO: 34763 - protein, 352 aa, Zea mays subsp. mays
  misc_feature (85)..(86): Xaa can be any naturally occurring amino acid
MDEDALTEILARLPCRSLARFQCVSTSWRRIISSDYLRRRLPLITSGVLYHDDTRRGDADGGRRQQVYTYACASGGGATATATAXXPDMGFFPRHDTSTIIDGCNGLLLYYASRPTAAFHVVNPTTRRWAELPAPRARTLLSVLAFDPCASPRYRVVCFTGWLPRGATLEVFDSERGAWTDHEVDFGLDTDAMSATMHYSGGALHVLAYSGHVVRVDLDTMASAATELPAPVSCRARAGHCRGRLRFASSDGARLRIWELRDATGGEWALKHEIGVADVVPGAASQPITFLFMAFHPEREVVYLWSPWKLLAFDMVQRRVEEEWAFGSEKEGTHLIQVWLFPFSRHLASALA

SEQ ID NO: 34764 - protein, 329 aa, Zea mays subsp. mays
  misc_feature (117)..(118): Xaa can be any naturally occurring amino acid
VEQNQQKGAGSGGALVASVSGRSKLRLEDGRRDGRGRADGDPCEAAVQVAGAVPVRLHVVAPHHLERLPPPPAAAHHVGGALPRRHAPRRRGRRQEAAGVHVRVRVRRWRHRHRHGXXPRHGLLPAPRHVHHHRRLQRAAALLRVPPDGGVPRREPDHAAVGGAAGAAREDAALRAGVRPLRVPALPGGVLHRVAPPGRDPRGVRLGARRVDRPRGRLRPRHRRHVRHHALLRRRAPRAGLLGPRRPRRPGHHGVRGHRAPGPRQLPGARRALPRPPALRVQRRSAPQDLGAQGRHRRRVGAQARDRGRRCRPRRRVPAHHVPVHGVPP

SEQ ID NO: 34765 - DNA, 1091 bp, Zea mays subsp. mays
acccacctcagccgctcgcaaaaccctctcctctcgagaagcagcgcggcggagaccggagagaagcagtcggcagccgggaagcccgtcgcgtgcctttcttcctcaacgtgccatgattaacgaaatatttgagcactgggatgataaaagcaaagaaagtaaatgtgatgtggagaagcctgctgctactgagtcctctaaaccgaaggttagcttggaggaaacaaaggatcctgagaagcatgaagttgatgttggtggcaccgacgatgatgaaagtgacgaagactttgttgattcagaagagggtgaatcagatgatgacgagagtactaagagcaagaataggccaagcagcctcacccttgaagacacctccagggaaaaaggcaaggatcacaacaccgtctgtgggcaaaaaaaacctgctgagaagtgttacattcgatcgcaaacttgtatagctcatagttcttttccatggcactggaacctcaatttgtgatgtgtagtttgcagttagtgatgatgctaagaaaaatatccacgtccatgtcgaagttggtgaagacggctcgctcaatcattgacaactacaagcaatccactggtcatagctgcaagtcgtgcagcaagtaattttctcgcctcgtgcggtcgaagcacagtgctcattgcaagatcaaggtgaagcaagcacagtgctcattgcaaggtgaattataaccagtgctcattgcaaggtgaagctagtgatgatgctaagaaaagtaccataatttttctcacacatgggcgtcctttttggtcgtggactttctactcgtccgttagtctggaaactcattgcaaggtgaagcacagtgctcgaaagtgaagtagcattcatggactatgttagggacgttcgttattaggcaagtgaattgtgggtttgcgtttactgctacaaacgggctctaaggcagcatcaacagaatgctattgcttattgcgggttgttggaaagttgctgttttttctgctcaacagaatgtgtaattgagattttcttgaattagaaagttgttgttttgcagcgtgtattg

SEQ ID NO: 34766 - protein, 168 aa, Zea mays subsp. mays
PTSAARKTLSSREAARRRPERSSRQPGSPSRAFLPQRAMINEIFEHWDDKSKESKCDVEKPAATESSKPKVSLEETKDPEKHEVDVGGTDDDESDEDFVDSEEGESDDDESTKSKNRPSSLTLEDTSREKGKDHNTVCGQKKPAEKCYIRSQTCIAHSSFPWHWNLNL

SEQ ID NO: 34767 - protein, 130 aa, Zea mays subsp. mays
MINEIFEHWDDKSKESKCDVEKPAATESSKPKVSLEETKDPEKHEVDVGGTDDDESDEDFVDSEEGESDDDESTKSKNRPSSLTLEDTSREKGKDHNTVCGQKKPAEKCYIRSQTCIAHSSFPWHWNLNL

SEQ ID NO: 34768 - protein, 107 aa, Zea mays subsp. mays
MIKAKKVNVMWRSLLLLSPLNRRLAWRKQRILRSMKLMLVAPTMMKVTKTLLIQKRVNQMMTRVLRARIGQAASPLKTPPGKKARITTPSVGKKNLLRSVTFDRKLV

SEQ ID NO: 34769 - DNA, 1248 bp, Zea mays subsp. mays
  misc_feature (377)..(377): n is a, c, g, or t
agctaccaatggtcatggcgaagcagcagcatgacaaggggttgccgaagcaagctcgcaatgagcccgcgccgttccggctcgagcagtgttgccgctgcgacgatgcccaccgtcaggccgacgacgagtccatggatgctgctgggtctgctggcccgctgcacctgactctcggcccgctcggctcggccgccggcccccgttgctcgtgcggtgtcgcgccggcgccggcgccggcggcgcccgcaacggtggccgtcctccgcgggtcccggtacatgaggccggcgcaggagctgctgggcgagattgtgcgcgtggccgacctggcggctgccgacgacgaagacgaggaccaggcggcggagcggctngagggcggcggtcaccggacggcgcgtcgggcggccgggaacgacggcgacggcgtccaggccaagctcctctacctgctcagcgagctggagagcaggcgggagcgctacttcggcgagctggagcgcgtggtgtcgtcgttcgagccggcgctgggcggcggcgcggcggcggcctacacgaccctgatggcgcgggccatgggccgccacttcggcaacctgcgccgcgccatactgcgcaggctcaggctccaagccgccgccgcggcgaggaggtctctgcggcgcggcggcgaggaccaggacgacgacgacgacgacgacggcgacagcgacggcgaggtgaccgaggagctggtggacaggttggctcggcggacgaagctggccgcggcggcgcgggcggagcaagcgtggcggccgctgcgtggcctgccggatggctccgtggccgtgctccgggcgtggctcttcgaccatttcctccacccgtaccccaacgacggcgagaagctgaggctggcggtgaccaccggcttgagcaggcgccagatatccaactggttcatcaacgcgcgcgtgcggctgtggaagcctatgatcgaggagatgtacaaggacgagttctccgacggttccgccgtctccagctacgacgacgccagcgcctcctcctcctgactcctgagtcttgaccacctcgccctcgagagcgtttatctagctacttaatcactcgatgtctcggttgattggtcctgttgctttgggattatattaatttatttatatccagcttaatcatgtgcggtgcctctcttgtatttcttagaaaaggacatactccttcaaaatctagcgacttttc

SEQ ID NO: 34770 - protein, 352 aa, Zea mays subsp. mays
  misc_feature (125)..(125): Xaa can be any naturally occurring amino acid
LPMVMAKQQHDKGLPKQARNEPAPFRLEQCCRCDDAHRQADDESMDAAGSAGPLHLTLGPLGSAAGPRCSCGVAPAPAPAAPATVAVLRGSRYMRPAQELLGEIVRVADLAAADDEDEDQAAERXEGGGHRTARRAAGNDGDGVQAKLLYLLSELESRRERYFGELERVVSSFEPALGGGAAAAYTTLMARAMGRHFGNLRRAILRRLRLQAAAAARRSLRRGGEDQDDDDDDDGDSDGEVTEELVDRLARRTKLAAAARAEQAWRPLRGLPDGSVAVLRAWLFDHFLHPYPNDGEKLRLAVTTGLSRRQISNWFINARVRLWKPMIEEMYKDEFSDGSAVSSYDDASASSS

SEQ ID NO: 34771 - protein, 350 aa, Zea mays subsp. mays
  misc_feature (123)..(123): Xaa can be any naturally occurring amino acid
MVMAKQQHDKGLPKQARNEPAPFRLEQCCRCDDAHRQADDESMDAAGSAGPLHLTLGPLGSAAGPRCSCGVAPAPAPAAPATVAVLRGSRYMRPAQELLGEIVRVADLAAADDEDEDQAAERXEGGGHRTARRAAGNDGDGVQAKLLYLLSELESRRERYFGELERVVSSFEPALGGGAAAAYTTLMARAMGRHFGNLRRAILRRLRLQAAAAARRSLRRGGEDQDDDDDDDGDSDGEVTEELVDRLARRTKLAAAARAEQAWRPLRGLPDGSVAVLRAWLFDHFLHPYPNDGEKLRLAVTTGLSRRQISNWFINARVRLWKPMIEEMYKDEFSDGSAVSSYDDASASSS

SEQ ID NO: 34772 - protein, 348 aa, Zea mays subsp. mays
  misc_feature (121)..(121): Xaa can be any naturally occurring amino acid
MAKQQHDKGLPKQARNEPAPFRLEQCCRCDDAHRQADDESMDAAGSAGPLHLTLGPLGSAAGPRCSCGVAPAPAPAAPATVAVLRGSRYMRPAQELLGEIVRVADLAAADDEDEDQAAERXEGGGHRTARRAAGNDGDGVQAKLLYLLSELESRRERYFGELERVVSSFEPALGGGAAAAYTTLMARAMGRHFGNLRRAILRRLRLQAAAAARRSLRRGGEDQDDDDDDDGDSDGEVTEELVDRLARRTKLAAAARAEQAWRPLRGLPDGSVAVLRAWLFDHFLHPYPNDGEKLRLAVTTGLSRRQISNWFINARVRLWKPMIEEMYKDEFSDGSAVSSYDDASASSS

SEQ ID NO: 34773 - DNA, 1509 bp, Zea mays subsp. mays
gagccctcgacgagcacccgagagacacgagagtgaaggaaagaggaaaaagaagaagactacagccaaaaccctatctcactccggcgcgccaccggccgatggtttcgatgaacaccacgccgaatccgcttgactccgccgccggcagcgccgccgtcgccggcggaagcgtggacgagggaggaggaggaggcggcaggaagaagcggatgcgcggggcggtagcggcggcgatggtgccgccgccgatggcggtcccgctgccggccgcggcgcccgcggcgggggaggaggttcggaaggtcaggaagccgtacaccatcaccaaatcccgggagagctggacggagccggagcacgataagttcctcgaggccctgcagctttttgatcgtgattggaagaagattgaagcatatgtcggctcgaagactgttatacagataaggagccatgcacagaagtacttcttgaaggttcagaagaatggcacaggcgagcatctgcccccacccaggccaaaacggaaggcagctcatccatatccccagaaatcatctaaaaatgtttctcaaactattttattacaagaacaacctactcagcgggagcaaggttctgtcatgcctatggatactgctactgtgataaacacaaatgcgaatgtggcagtggcagtggcagtgccttcctgggacaatactcttgctcaatctctcagtgctggtcttgttccaggtgcaacaaataactgttcaagtagcatagagagtccatctggtacttggccaacttctgaagcagttgagcaagaaattgtggttccatcactccatgctatgccagattttgcccgagtatacagcttcctaggaagcatatttgatcctgatacaagtgggcatttgcagaggttaaaagtgatggatccaattgatattcaaacggtactactacttatgagaaatctttccacgaaccttaggagtcctgactttgagcaacatctatggtggtggggaccatgttaaacctgaaggcatggaaaatcatggatctcctcagagtggccatcttccattcctggtaacaagtgaatgagagcacactggcaatttgtggtcgaagctttggttgtttccacgagacacattcttgtgtgttctcagcaatcgagttgtggacggctggtctggcaatttatgaatgccatgtctgccaatctgtatagcttccaataatgggtctgaccctagactagttttgttttccacgttcatgtagatagctagttttgtgtgctcatgcaattttttactgggtggagcctagatcgatatgtttttgttgtatcacttgtgcacgcgtgtatgtaagtatgtggaaccttgtaatgcttgaggtacttgagagtcttcggttaagacaaagcatatatgcgcaataatcaggagatcaccatcgtcgactatataatgagaagtttttttagttgtggacctacct

SEQ ID NO: 34774 - protein, 343 aa, Zea mays subsp. mays
ALDEHPRDTRVKERGKRRRLQPKPYLTPARHRPMVSMNTTPNPLDSAAGSAAVAGGSVDEGGGGGGRKKRMRGAVAAAMVPPPMAVPLPAAAPAAGEEVRKVRKPYTITKSRESWTEPEHDKFLEALQLFDRDWKKIEAYVGSKTVIQIRSHAQKYFLKVQKNGTGEHLPPPRPKRKAAHPYPQKSSKNVSQTILLQEQPTQREQGSVMPMDTATVINTNANVAVAVAVPSWDNTLAQSLSAGLVPGATNNCSSSIESPSGTWPTSEAVEQEIVVPSLHAMPDFARVYSFLGSIFDPDTSGHLQRLKVMDPIDIQTVLLLMRNLSTNLRSPDFEQHLWWWGPC

SEQ ID NO: 34775 - protein, 310 aa, Zea mays subsp. mays
MVSMNTTPNPLDSAAGSAAVAGGSVDEGGGGGGRKKRMRGAVAAAMVPPPMAVPLPAAAPAAGEEVRKVRKPYTITKSRESWTEPEHDKFLEALQLFDRDWKKIEAYVGSKTVIQIRSHAQKYFLKVQKNGTGEHLPPPRPKRKAAHPYPQKSSKNVSQTILLQEQPTQREQGSVMPMDTATVINTNANVAVAVAVPSWDNTLAQSLSAGLVPGATNNCSSSIESPSGTWPTSEAVEQEIVVPSLHAMPDFARVYSFLGSIFDPDTSGHLQRLKVMDPIDIQTVLLLMRNLSTNLRSPDFEQHLWWWGPC

SEQ ID NO: 34776 - protein, 307 aa, Zea mays subsp. mays
MNTTPNPLDSAAGSAAVAGGSVDEGGGGGGRKKRMRGAVAAAMVPPPMAVPLPAAAPAAGEEVRKVRKPYTITKSRESWTEPEHDKFLEALQLFDRDWKKIEAYVGSKTVIQIRSHAQKYFLKVQKNGTGEHLPPPRPKRKAAHPYPQKSSKNVSQTILLQEQPTQREQGSVMPMDTATVINTNANVAVAVAVPSWDNTLAQSLSAGLVPGATNNCSSSIESPSGTWPTSEAVEQEIVVPSLHAMPDFARVYSFLGSIFDPDTSGHLQRLKVMDPIDIQTVLLLMRNLSTNLRSPDFEQHLWWWGPC

SEQ ID NO: 34777 - DNA, 1318 bp, Zea mays subsp. mays
gcacttggttggagctcctctaccttttccatcgctctgctctgctccgcgtctccgtccgccccggcaaaagcaaaacacagccatggaggggtacgaccgcgagttctggcagttcagcgaccagctgcgcctgcagacgaccgccttctccggcctctccctcggcgactccatctggtctccggccaccggcgccggcgggcggcgcaacaacaacaccgacctactcgcggcctccgcgtcggcagccgacgccggcaagcacaacggcgtgggcctcagcctgaatgatggagggcccggactcattggctccgggaagctcgccttcggcggcagcaaggccggccgctacaacaacctcccatccgagaaggccgcgcccgtctacaaccacagcggcgccacgatcaacggcggctacgccaggagcgacaacgccggcctggcggcgttcaacaagatggggagctacttccacaacagtaacggcaacggcggcggcggcggggaggtgaagagctacttcaacaagtccgccggacgggcggcgagcaacaacagccacgggcacgccggcggcggcaagaagggcggcggcggcgggaagcacggcaagaacgagggcaacggcggcgcggtggcggccacggacaagcggttcaagacgctgccggcgtcggaggcgctgccgcggggcgaggccatcggcggctacatcttcgtctgcaacaacgacaccatggacgagaacctcaggagggagctgttcgggctgccgtcgaggtacagggactcggtgcgggccatccgcccggggctgcccctcttcctctacaactactccacccaccagctgccggcatcttcaaggccgccagcttcggcgggaccaacatcgacccgacggcgtgggaggacaagaagtgccccggcgagtcgcgcttccctgcacaggtgcgagtggcaacgcggaagatctacgatccactggaggaggacgccttccgccccatccttcaccactacgacgggcccaagtttcggctcgagctctccgtcgccgagaccctcgccctcctcgacatcttcgctgacaaggatgacgcctgagccttccttgccgccccctcgcccgccagtgccaatccattaatgcacagacaataaaatggctggagggacagaccaaactatccacctttgtttgatatgataaagggctatgtatgaggcacgcgtcccattatttttgtttttattataagactagacctcgttccgtaagatacatgtatcaatattatataaaaac

SEQ ID NO: 34778 - protein, 385 aa, Zea mays subsp. mays
HLVGAPLPFPSLCSAPRLRPPRQKQNTAMEGYDREFWQFSDQLRLQTTAFSGLSLGDSIWSPATGAGGRRNNNTDLLAASASAADAGKHNGVGLSLNDGGPGLIGSGKLAFGGSKAGRYNNLPSEKAAPVYNHSGATINGGYARSDNAGLAAFNKMGSYFHNSNGNGGGGGEVKSYFNKSAGRAASNNSHGHAGGGKKGGGGGKHGKNEGNGGAVAATDKRFKTLPASEALPRGEAIGGYIFVCNNDTMDENLRRELFGLPSRYRDSVRAIRPGLPLFLYNYSTHQLPASSRPPASAGPTSTRRRGRTRSAPASRASLHRCEWQRGRSTIHWRRTPSAPSFTTTTGPSFGSSSPSPRPSPSSTSSLTRMTPEPSLPPPRPPVPIH

SEQ ID NO: 34779 - protein, 357 aa, Zea mays subsp. mays
MEGYDREFWQFSDQLRLQTTAFSGLSLGDSIWSPATGAGGRRNNNTDLLAASASAADAGKHNGVGLSLNDGGPGLIGSGKLAFGGSKAGRYNNLPSEKAAPVYNHSGATINGGYARSDNAGLAAFNKMGSYFHNSNGNGGGGGEVKSYFNKSAGRAASNNSHGHAGGGKKGGGGGKHGKNEGNGGAVAATDKRFKTLPASEALPRGEAIGGYIFVCNNDTMDENLRRELFGLPSRYRDSVRAIRPGLPLFLYNYSTHQLPASSRPPASAGPTSTRRRGRTRSAPASRASLHRCEWQRGRSTIHWRRTPSAPSFTTTTGPSFGSSSPSPRPSPSSTSSLTRMTPEPSLPPPRPPVPIH

SEQ ID NO: 34780 - protein, 230 aa, Zea mays subsp. mays
MGSYFHNSNGNGGGGGEVKSYFNKSAGRAASNNSHGHAGGGKKGGGGGKHGKNEGNGGAVAATDKRFKTLPASEALPRGEAIGGYIFVCNNDTMDENLRRELFGLPSRYRDSVRAIRPGLPLFLYNYSTHQLPASSRPPASAGPTSTRRRGRTRSAPASRASLHRCEWQRGRSTIHWRRTPSAPSFTTTTGPSFGSSSPSPRPSPSSTSSLTRMTPEPSLPPPRPPVPIH

SEQ ID NO: 34781 - DNA, 841 bp, Zea mays subsp. mays
atcgacgacgacaaacagcaagagcaagcaagagaggacgacatggcggcgccacggagcctggcggaccgcgcgctgcgcggcgtggcggacctgataaagctgctcccgagcggcacggtgttcctgttccagttcctgagcccgctggcgagcaacaacgggcactgcgccacgctgaacaaggcgctgagcggggcgctggtggcgctgtgcggcgcctcctgcgccttctcctgcttcaccgacagctacgtgggcgcggacgggcgcgtgtactacggcgtggtgacgcggcggggcctgcgcaccttcacgcccgacccggacgccgccgcccgggacctgtcggcgtaccgcctccgcgccggcgacttcgcgcacgcccgcgctctcgctgctcgtcttccgccaccctcgcgctcctcgacgccgacaccgtcgcctgcctctacccggcgctggagctcgccgagcccaccatgatggccgtgctcccgcccgtcgtcggcgccgtcgcgggctacgtcttcatggtgttccccaacaaccggcacggcgtcgggtaccagcccacgcccgccaccgaggacttccagcacaaatactagccagccggttcgtcgtcgttgcagagtactgtactgcgcgtgtgtctttgattgtctgtctgtctgattcattcatttgcttggtggtgtgggggtgccgtctttgtacgtcgtctctgcttgttcattcgggctttcattaacttacggaatcaggtctgtaataattaatctgtgtatattcttcccgactgcaatgcatgcatcctcaaacacacaattcctatctg

SEQ ID NO: 34782 - protein, 202 aa, Zea mays subsp. mays
RRRQTARASKRGRHGGATEPGGPRAARRGGPDKAAPERHGVPVPVPEPAGEQQRALRHAEQGAERGAGGAVRRLLRLLLLHRQLRGRGRARVLRRGDAAGPAHLHARPGRRRPGPVGVPPPRRRLRARPRSRCSSSATLALLDADTVACLYPALELAEPTMMAVLPPVVGAVAGYVFMVFPNNRHGVGYQPTPATEDFQHKY

SEQ ID NO: 34783 - protein, 161 aa, Zea mays subsp. mays
IDDDKQQEQAREDDMAAPRSLADRALRGVADLIKLLPSGTVFLFQFLSPLASNNGHCATLNKALSGALVALCGASCAFSCFTDSYVGADGRVYYGVVTRRGLRTFTPDPDAAARDLSAYRLRAGDFAHARALAARLPPPSRSSTPTPSPASTRRWSSPSPP

SEQ ID NO: 34784 - protein, 147 aa, Zea mays subsp. mays
MAAPRSLADRALRGVADLIKLLPSGTVFLFQFLSPLASNNGHCATLNKALSGALVALCGASCAFSCFTDSYVGADGRVYYGVVTRRGLRTFTPDPDAAARDLSAYRLRAGDFAHARALAARLPPPSRSSTPTPSPASTRRWSSPSPP

SEQ ID NO: 34785 - DNA, 1504 bp, Zea mays subsp. mays
  misc_feature (517)..(517): n is a, c, g, or t
gcccacggagatgaagcgccggcgcctgccgcccgtcctcttcctcctcgcgctcgcgctcttgtccctcgccttccgccgccacctctccctccccctcggcgttccccagttcgccgccggtggcgtcagcggcgacgcgctcctccgcctcctcgcggccaccgacgtcggcggggaccagatcctggcggaggcggccgcgctgctggccaacgcgtcggtgtccaccttccccagcatcggcaaccaccaccgcctcctctacctccgcgtcccctaccgcatcaacgccacctccgcgccgcggcagcggacagtgtcccgtctccgcattcccttccacgacgtccccaacgacgacgccctcctcgccgccttccgcgcatccctccgcggcttcctcctcgcgcgccaccgccaccgccaccgccgaggcggcgacgacgtcgcgggcgccatggccgacctccccgccctcctcctcggccagcgccggcgccggcgcgccccgacntgcgccgtcgtcgggaacagcggcacccttctcggctccggccggggcgcgcagatcgacgcgcacgacctcgtgatccggctcaacaacgcccgcgtcgcggggttcgcggccgacgtcggcgccacgaccggcgtctcgttcgtgaactccaacatcctccaccactgcgccgtccgctccgccatcaccgccccgggctgcgcctgccacccctacgggcgcgcggtcccgctggccatgtacgtctgccagccggcgcacctcctggacgcgctcatctgcaacgccacggcgacgccggagtccccgttcccgctcctcgtcaccgacgcgcgcatcgacgcgctgtgcgcgcgcatcgccaagtactactcgatgcggcggttcgtggcggccacggggcagccggccagcaactggacccggaggcacgacgagaggtacttccactactcgtcgggcctgcaggcggtggtcatggcgctaggggcgtgcgatgaggtgagcgtgttcggtttcgggaaggcgccgggggccaagcaccattaccacaccaaccagaagaaggagctcgacctgcacgactacgaggccgagtaccagttctaccgcgacctccaggaacggccagaggcggtgccattcctcgacgaggcgccgggcttcaaggtgccaccggtgaagctctactggtgaccactgacgtcagtaacgtctggttggtagtaacttgtactgtaatatgtttgttgtacaattttttttatttttacattttcacctaaagaggtgtttaggcagagagagataagcgtgtagagaatgtagcgattgacagggagggaatgtgtttaaggatagggaaaatggagatcaaatttgtgattgatcaaatggatcaaattggttgtagttgttcatgtattctgtctgtgtagggcaactgtacacttcatcgattcttgttcatatatagacactttc

SEQ ID NO: 34786 - protein, 404 aa, Zea mays subsp. mays
  misc_feature (172)..(172): Xaa can be any naturally occurring amino acid
PTEMKRRRLPPVLFLLALALLSLAFRRHLSLPLGVPQFAAGGVSGDALLRLLAATDVGGDQILAEAAALLANASVSTFPSIGNHHRLLYLRVPYRINATSAPRQRTVSRLRIPFHDVPNDDALLAAFRASLRGFLLARHRHRHRRGGDDVAGAMADLPALLLGQRRRRRAPXCAVVGNSGTLLGSGRGAQIDAHDLVIRLNNARVAGFAADVGATTGVSFVNSNILHHCAVRSAITAPGCACHPYGRAVPLAMYVCQPAHLLDALICNATATPESPFPLLVTDARIDALCARIAKYYSMRRFVAATGQPASNWTRRHDERYFHYSSGLQAVVMALGACDEVSVFGFGKAPGAKHHYHTNQKKELDLHDYEAEYQFYRDLQERPEAVPFLDEAPGFKVPPVKLYW

SEQ ID NO: 34787 - protein, 401 aa, Zea mays subsp. mays
  misc_feature (169)..(169): Xaa can be any naturally occurring amino acid
MKRRRLPPVLFLLALALLSLAFRRHLSLPLGVPQFAAGGVSGDALLRLLAATDVGGDQILAEAAALLANASVSTFPSIGNHHRLLYLRVPYRINATSAPRQRTVSRLRIPFHDVPNDDALLAAFRASLRGFLLARHRHRHRRGGDDVAGAMADLPALLLGQRRRRRAPXCAVVGNSGTLLGSGRGAQIDAHDLVIRLNNARVAGFAADVGATTGVSFVNSNILHHCAVRSAITAPGCACHPYGRAVPLAMYVCQPAHLLDALICNATATPESPFPLLVTDARIDALCARIAKYYSMRRFVAATGQPASNWTRRHDERYFHYSSGLQAVVMALGACDEVSVFGFGKAPGAKHHYHTNQKKELDLHDYEAEYQFYRDLQERPEAVPFLDEAPGFKVPPVKLYW

SEQ ID NO: 34788 - protein, 339 aa, Zea mays subsp. mays
  misc_feature (173)..(173): Xaa can be any naturally occurring amino acid
AHGDEAPAPAARPLPPRARALVPRLPPPPLPPPRRSPVRRRWRQRRRAPPPPRGHRRRRGPDPGGGGRAAGQRVGVHLPQHRQPPPPPLPPRPLPHQRHLRAAAADSVPSPHSLPRRPQRRRPPRRLPRIPPRLPPRAPPPPPPPRRRRRRGRHGRPPRPPPRPAPAPARPDXRRRREQRHPSRLRPGRADRRARPRDPAQQRPRRGVRGRRRRHDRRLVRELQHPPPLRRPLRHHRPGLRLPPLRARGPAGHVRLPAGAPPGRAHLQRHGDAGVPVPAPRHRRAHRRAVRAHRQVLLDAAVRGGHGAAGQQLDPEARREVLPLLVGPAGGGHGARGVR

SEQ ID NO: 34789 - DNA, 1555 bp, Zea mays subsp. mays
  misc_feature (187)..(187): n is a, c, g, or t
  misc_feature (219)..(220): n is a, c, g, or t
  misc_feature (440)..(440): n is a, c, g, or t
ccccctccctccccttttgaccctccctcaccagctgcaaaaccgcgggccgcatcccgcccgcgccgcccaccggcggccacagccgcctacataaaccactaatcgaccactcgccgaaccaaaccacccacccacccaaacccaatggcgtccaacctcctctccgccccgtcccgaaccctanctccgtcgccggcgccggcccccgcgggcctnngcgggcgtgtgccggtgcaggcgcacctcccgcgcggcggcctcggcctcgccccccgccgcaagcaagccgcgcgctccgcgtgcgcgcgtcggtggcgatcgagaaggagacgccggagagcgagccgcccccgacgttcctccgcgaggacgggcacgggtccgggtccgtgcgggcgcggttcgaggccatgatccggcgggtgcagggggaggtntgcgccgcgctcgaggaggccgacggcggcggcgcgcgcttcgtcgaggacgtctggtcgcgccctggcgggggcggtggcatcagccgcgtcctgcaggacggccgcgtcttcgagaaggccggggtcaacgtctccgtcgtctacggggtcatgccgcccgacgcctaccgcgccgccaaggcggaggccgccaagaacggggccgccgccgcggatggccacaagcctggccccgtgccattcttcgccgcggggattagttcggtgcttcaccccaagaacccatttgctccaacattgcattttaactaccgttactttgagacggatgcaccaaaagatgcacctggtgcaccaagacaatggtggttcggcggtggtactgacttgactccttcatacatcattgaagaggacgtgaagcatttccattctgttcaaaagcaagcatgtgataaatttgatccaagttttcacccaagattcaaaaaatggtgtgatgattatttctatattaagcaccgtaatgagcggcgtgggctaggtggaatattttttgatgaccttaatgattacgatcaagaaatgcttctcaactttgctacagaatgtgcggactctgtacttcctgcgtacataccgatcatagaacggaggaagaacactccgttcaacgaggagcacagggcatggcagcaattgcggagaggtcgttatgtggagttcaaccttgtctacgaccgtggtacaacatttggcctaaagactggaggaaggattgagagcatacttgtgtcccttccacttacagcacgatggcagtatgatcataaaccggaagaaggaaccgaggaatggaaacttctggaagcctgcataaacccgaaggattggatctgattagccgttattcttgagatcttttgttagagttttccttctgtagggctaagaccacgtgcagtttcattatatattttgcatctgtagaatcgtgaataaatatgatgtagtgatgttgtagctgtttgtatctatctgctgttttcccccatgtgaatgagagaaccattggcttctgtatttacgaaggattcaggtttctgaacact

SEQ ID NO: 34790 - protein, 309 aa, Zea mays subsp. mays
  misc_feature (9)..(9): Xaa can be any naturally occurring amino acid
MIRRVQGEXCAALEEADGGGARFVEDVWSRPGGGGGISRVLQDGRVFEKAGVNVSVVYGVMPPDAYRAAKAEAAKNGAAAADGHKPGPVPFFAAGISSVLHPKNPFAPTLHFNYRYFETDAPKDAPGAPRQWWFGGGTDLTPSYIIEEDVKHFHSVQKQACDKFDPSFHPRFKKWCDDYFYIKHRNERRGLGGIFFDDLNDYDQEMLLNFATECADSVLPAYIPIIERRKNTPFNEEHRAWQQLRRGRYVEFNLVYDRGTTFGLKTGGRIESILVSLPLTARWQYDHKPEEGTEEWKLLEACINPKDWI

SEQ ID NO: 34791 - protein, 249 aa, Zea mays subsp. mays
MPPDAYRAAKAEAAKNGAAAADGHKPGPVPFFAAGISSVLHPKNPFAPTLHFNYRYFETDAPKDAPGAPRQWWFGGGTDLTPSYIIEEDVKHFHSVQKQACDKFDPSFHPRFKKWCDDYFYIKHRNERRGLGGIFFDDLNDYDQEMLLNFATECADSVLPAYIPIIERRKNTPFNEEHRAWQQLRRGRYVEFNLVYDRGTTFGLKTGGRIESILVSLPLTARWQYDHKPEEGTEEWKLLEACINPKDWI

SEQ ID NO: 34792 - DNA, 1750 bp, Zea mays subsp. mays
  misc_feature (63)..(63): n is a, c, g, or t
gtagccacaggataacacgcccacggctctcgtcagtcgtcacccgccttgtcttgtttcgcngtcttgttccgcgctccccaacccccctcccaaccccaaccccgtcccaacccccactacggccttccccccatggctcccctggcctcccttcctctcccgcccagtactgccgtcaccgctcgcttcctcgccgcccccgccatccgcgtgatcagcccatcgcggcccgcgctgccgctcctctcatccgcctccgcaggcggcttccctcacgcctctcgcgctccctgcagtgccgcccgcgagcaccgccgcggcaccgtgcgggaatgctctcgagctgatgctgctggagcagctccattatcaaagacactgttagacctcaaggattcctgctggagatttttaaggccacatacaatccgaggaactgctttaggatccatagcattggttgcgagagccttgatagagaattcccatctgataaactggtggttgatattcaaagcattctatggacttggggcattgatatttggcaatggttacatagttgggattaatcagatctatgatgttgctattgacaagataaacaagccatatttacccattgctgctggtgatctctcaattcagtcagcatggttgttggtgatattatttgcagctgcaggtttttcaattgttatatcaaactttggacctttcattacctctctatactgccttggcctatttcttggcactatatattctgttcctccattcagactgaagagatatccggttgctgcttttcttatcattgcaacggttcgtggtttccttctcaactttggcgtgtactatgctactagggctgcactaggtcttacattccaatggagctcccctgttgctttcattacatgcttcgtgacactatttgctttggtcattgctataaccaaagatctccctgatgttgaaggagatcgcaagtatcaaatatcaactttggcaacaaagcttggtgtcagaaatattgcattccttggatctggtttattattagcaaactatattgctgctattgctgtagcttttaccatgcctcaggctttcaggtgcactgtaatggttcctgtgcatgctgtccttgctggtcgtttaattttccagacatgggttctggagcaagcgaagtacagaaaggatgctatttcgcagtactatcggttcatctggaatctcttctatgctgaatatatcttcttcccgttaatatagagaggttcttcgagtgctcaggcgtcgccgcgtcgcctaccagtgctcatagtcatcctcctcgacttttcagggcaccatgaggtacacacgtctctatctccacgttctcgggatcaacatcgccgaaggtgttcataccacggcatcgccgacgtgctcatactcaatagccatcaacaagggatgatgcttatgtggctgacggacctccacaaacgtgtttccctttttcggtggtagtagtataaaatttctcaaaaaatatcattttttttctaaaaaatattggaaacgaacgtaggtcgtagggcgtccttgcaccatgtgtccgcgtcgcccctagtagaatagtcattactcctaccacacgcctcaggtcgtggacatgtacaagtacaacataaagacctgctgcccttgattcgattttttcaattataaaagactgttaaaagattgtatg

SEQ ID NO: 34793 - protein, 382 aa, Zea mays subsp. mays
MAPLASLPLPPSTAVTARFLAAPAIRVISPSRPALPLLSSASAGGFPHASRAPCSAAREHRRGTVRECSRADAAGAAPLSKTLLDLKDSCWRFLRPHTIRGTALGSIALVARALIENSHLINWWLIFKAFYGLGALIFGNGYIVGINQIYDVAIDKINKPYLPIAAGDLSIQSAWLLVILFAAAGFSIVISNFGPFITSLYCLGLFLGTIYSVPPFRLKRYPVAAFLIIATVRGFLLNFGVYYATRAALGLTFQWSSPVAFITCFVTLFALVIAITKDLPDVEGDRKYQISTLATKLGVRNIAFLGSGLLLANYIAAIAVAFTMPQAFRCTVMVPVHAVLAGRLIFQTWVLEQAKYRKDAISQYYRFIWNLFYAEYIFFPLI

SEQ ID NO: 34794 - DNA, 1933 bp, Zea mays subsp. mays
acgggaggaggagaggagagagcccaccacccgcgaccgcgaccgcgacctaacccggagacctccctaggctagctcccctcccagaccccaggctctcccacccacctttcccctctccctccctcctccccgtcccacgccgccgcacccccgcctggctgcttgggtggcaatcggccgtagaggaggagggtgtaggagcttgatccgggccacctgccccctgcgccgtcgggatgtacgtgccgccgccgcccaccggcggcgccggcgagcagcctagggtttaccaggtctggcggggaagcaacgaattcttcttgcagggaagattcatatttgggcctgatgtgagatctgtgtttctcactatgttcctcatcatcgcaccagtggttgtcttctgtgtgttcgtcgcaaggcatctcataaatgatttccccgatagctggggaatctcggtgatggtagtagtggttgtcttcaccgtttatgatttgacgctgcttctttgtacctctggtagagatcctggtataatacctcggaatactcatcctcctgaacctgaatccattgatgggatcaatgatacaggtgttcagactccacaacaatttcgtttgcctcgcacaaaggaagttgttgtaaatgggatcagtgtacgggtaaaatactgtgatacttgcatgttgtaccgaccacctcgatgctcacactgttccatttgcaataactgtgtggaacggtttgatcatcactgtccatgggtcggccagtgcataggactgcgtaattatcggttcttctatatgtttgtatcctcgacaacattgctctgcctgtatgtatttgccttctgttgggtgtatgtgatcaagattagagcagcctgagcacttgtcaatctggaaggccttgttgaagacaccagcatcaattgttctgattatctactgttttctttgtgtatggtttgtgggtggtttatctgtcttccatttgtacctgatgggcactaaccagacaacatacgagaatttcaggtatcgctatgaccggcgcgataatccatataacagaggtactctgaacaattttctagagatattctgcaccgctatccccccttcgaagaacaatttccgggcaagggtgacagtagagcaagggctgcagcaaacgcgctcacagtctaggggtttcatgagccccagcatgggcaagccaaccatcggagagcttgagatgggcaggaagccagtagtaccttgggacgagccaaggacggcagctgatatcagggacttggaagcaggtttcgggggcatgtttgacgagaaagagggcagagtagcccacgcatccccagatctgagcagagatctcccagcagagtttgtggaagggcgaactggcatgcactcgaggcagtcaagttgggttcagagaggaggcgatgcgagtgaagcgtcggcggtgcaaatggctactgtccataccgccgaagatagcaaccatgtcccctggagtggcacacgttagcctgacaaaaaggcgggggaaaaaaaggagaggaactacggtgtgtttcggttgtgtctcgaggtgggtgctggtggtgatgtcgtctcgaagtgaactgccatgtgtttattaccacgtgtgccagggcaaggccctggatcattttgtaatccgaaacacaagcttgctgctgtagtctcatgcctggtagatcaccagatccctgctgtggttgttttttttttggtttggcttgttttgttttgcttgcttgtctgtttgggtgtgtgttctcaacaaaatgaagtagccgacgagcctaagctcccgccaggtctggataatgtatatgtatataactatattattagcaggttgcgacgaatgctgtgcttggtttgcc

SEQ ID NO: 34795 - protein, 219 aa, Zea mays subsp. mays
MYVPPPPTGGAGEQPRVYQVWRGSNEFFLQGRFIFGPDVRSVFLTMFLIIAPVVVFCVFVARHLINDFPDSWGISVMVVVVVFTVYDLTLLLCTSGRDPGIIPRNTHPPEPESIDGINDTGVQTPQQFRLPRTKEVVVNGISVRVKYCDTCMLYRPPRCSHCSICNNCVERFDHHCPWVGQCIGLRNYRFFYMFVSSTTLLCLYVFAFCWVYVIKIRAA

SEQ ID NO: 34796 - protein, 177 aa, Zea mays subsp. mays
MGTNQTTYENFRYRYDRRDNPYNRGTLNNFLEIFCTAIPPSKNNFRARVTVEQGLQQTRSQSRGFMSPSMGKPTIGELEMGRKPVVPWDEPRTAADIRDLEAGFGGMFDEKEGRVAHASPDLSRDLPAEFVEGRTGMHSRQSSWVQRGGDASEASAVQMATVHTAEDSNHVPWSGTR

SEQ ID NO: 34797 - protein, 174 aa, Zea mays subsp. mays
MFLIIAPVVVFCVFVARHLINDFPDSWGISVMVVVVVFTVYDLTLLLCTSGRDPGIIPRNTHPPEPESIDGINDTGVQTPQQFRLPRTKEVVVNGISVRVKYCDTCMLYRPPRCSHCSICNNCVERFDHHCPWVGQCIGLRNYRFFYMFVSSTTLLCLYVFAFCWVYVIKIRAA

SEQ ID NO: 34798 - DNA, 1515 bp, Zea mays subsp. mays
ccattacctagaacatcctaatcgaaaaaagaagccaagggggaagcgaaaccgaaagcgagcagagtttggcaatggagctcccgtggggaatgctgctgccgctgctgctggtcctctccgtctcgtcctcgtcatcgtcgtcggctgctgccacgctcgccgtcagcgctccgcccccactgcttgttcctcctcctcgtcatgctcaagacgccgaaggcatgctcatcaacggcaacttcgagacggcgccgcggaggctgaacaagaccctcatcgtggggcgccactcgctgccggggtggacggtgcaggggcacgtggagtacgtctcgggcggtccccagcccgggggcatgttcttcgcggtgccgcacggcgtgcacgcgctgcgcctcggcagccgcgcgtcggcgtcgcagaacgtgacggtgcggccgggggcgctgtacgcgctcacgttcgcggcgacgcggacgtgcgcgcaggacgaggccctgcgcgtggcggtggcgccgtcgctctcggcgcccgccgacgtcgccgtgcgcacgctctacagcggcgcgtccgccgacacctgggcctggggcttccgcgcctcctcccccgtcgcgcaggtcacgttcgccaaccccggcgtgcaggaggaccccgcgtgcggcccgctgctggacgctgtcgccatcaaggagctgcccgcgccgtacccgaccaaagacaacctgatcaagaacgacggcttcgagatcggtccccaggtgctcaggaactcgacggtcggcgttctgctgccccccaagcagaaggacgcgacgtcgccgctgcccggctggatcatcgagtcgctcaaggcggtgcggttcatcgacgcggcccacttctctgtccccgcggggcagtacgcggtggagctggtggccgggcgggagagcgccatcgcgcaggtcatccgcaccgtgcccaaccgcgcctacaacctgtcgttcgccgtcggcgacgcccggaacggctgccacggctctatgctggtggaggcgttcgcgggcaacgtcacgcagaaggtgccgttcgattccacggggaaaggcgggtttaagacggcggcgttcaggttcgtggccagcggcgtccgcacccgcctcaccttctacagctcctactaccacaccaaggtcaccgacggcgtctcgctctgcggccccgtgctggaccaggtcaaggttgtgcctgtcaaggcgtagtgaaatgtagtgaaatgaatcgtgagagcgccgagtgacggtcgagtgacggtctgctctgctctgctctgctcgtcgtctgtagctgtgctcgtcgtgatttggcgtggtgggttgtgaaagtgtggacgaattatggacccttcggaatctgatcgtggtgtgctgtgcggtgcgatgtgctgtagcgaaatttggttactcatctcttgttctctccgcgtttggaatttgcgttttccaatccggtattgaatgtataataatt

SEQ ID NO: 34799 - protein, 390 aa, Zea mays subsp. mays
MELPWGMLLPLLLVLSVSSSSSSSAAATLAVSAPPPLLVPPPRHAQDAEGMLINGNFETAPRRLNKTLIVGRHSLPGWTVQGHVEYVSGGPQPGGMFFAVPHGVHALRLGSRASASQNVTVRPGALYALTFAATRTCAQDEALRVAVAPSLSAPADVAVRTLYSGASADTWAWGFRASSPVAQVTFANPGVQEDPACGPLLDAVAIKELPAPYPTKDNLIKNDGFEIGPQVLRNSTVGVLLPPKQKDATSPLPGWIIESLKAVRFIDAAHFSVPAGQYAVELVAGRESAIAQVIRTVPNRAYNLSFAVGDARNGCHGSMLVEAFAGNVTQKVPFDSTGKGGFKTAAFRFVASGVRTRLTFYSSYYHTKVTDGVSLCGPVLDQVKVVPVKA

SEQ ID NO: 34800 - protein, 384 aa, Zea mays subsp. mays
MLLPLLLVLSVSSSSSSSAAATLAVSAPPPLLVPPPRHAQDAEGMLINGNFETAPRRLNKTLIVGRHSLPGWTVQGHVEYVSGGPQPGGMFFAVPHGVHALRLGSRASASQNVTVRPGALYALTFAATRTCAQDEALRVAVAPSLSAPADVAVRTLYSGASADTWAWGFRASSPVAQVTFANPGVQEDPACGPLLDAVAIKELPAPYPTKDNLIKNDGFEIGPQVLRNSTVGVLLPPKQKDATSPLPGWIIESLKAVRFIDAAHFSVPAGQYAVELVAGRESAIAQVIRTVPNRAYNLSFAVGDARNGCHGSMLVEAFAGNVTQKVPFDSTGKGGFKTAAFRFVASGVRTRLTFYSSYYHTKVTDGVSLCGPVLDQVKVVPVKA

SEQ ID NO: 34801 - protein, 366 aa, Zea mays subsp. mays
HYLEHPNRKKKPRGKRNRKRAEFGNGAPVGNAAAAAAGPLRLVLVIVVGCCHARRQRSAPTACSSSSSCSRRRRHAHQRQLRDGAAEAEQDPHRGAPLAAGVDGAGARGVRLGRSPARGHVLRGAARRARAAPRQPRVGVAERDGAAGGAVRAHVRGDADVRAGRGPARGGGAVALGARRRRRAHALQRRVRRHLGLGLPRLLPRRAGHVRQPRRAGGPRVRPAAGRCRHQGAARAVPDQRQPDQERRLRDRSPGAQELDGRRSAAPQAEGRDVAAARLDHRVAQGGAVHRRGPLLCPRGAVRGGAGGRAGERHRAGHPHRAQPRLQPVVRRRRRPERLPRLYAGGGVRGQRHAEGAVRFHGERRV

SEQ ID NO: 34802 - DNA, 1562 bp, Zea mays subsp. mays
tcggaatcgggcgttctgggctcctctgtttcctttcgtcaccgtcctcgccgttgtgttcccttctcagtctcggggttttcttctcgcgggcacctccggctgcttcctttgccaccgcagcaccagcgctgtccatggagcccccgccgctctcctcgttgcaggaggagggggaggaggggcctaccgtcgaggactcgtccgtcttctccgcagccgttgtgccgcctcgccccgccacgcaccactcgctccacaagtacgcgccgctggactggtccgcctacttcgacgaggagcgccgcgtagccatccccgacaccgacaacgttttcaatgcgtacacgaccggatcggaggggcccgtcgtgttctgcctgcacggaggcggttattcggggctttcatttgctctagcagcaagtcaaatgaaggacaaggctcgtgttgttgccatggatctaagggggcatggaaaatcaacaacgaatgatgatctggatttgtccattgaaactcttaccaatgatgtcatagctgttatacgtacaatgtatggagatttgccaccagcaattatacttgttgggcatagcatgggcggttcagtggctatacatgtggctgcaagaaaagaaattagaaatcttcatgggcttgttgtcgttgatgttgtcgagggaacagcaatggcttcattagttcatatgcagaagatcttagcaaaccgggcacagcattttcctagcattgaaaaagcaattgaatggagtgtcaaaggtgggccattaaggaacatcgagtctgctcgtgtgtccattccatctaccctgaaatacgatgaatcacgagaatgctatacatatcgcactcctcttgagcaaacagaaaagtactggaaaggatggtatgaaggtctttcagacaagttcctatcttgcccagtgcaaaagatcctgttgttagctggtaccgacagactggacagagctttaacaatcggtcaaatgcaaggaaaatttcaaatggtggtgattcggcacactggacatgctatacaggaagatgtacctgaagaatttgcatcgcacatactgaagttcatatcccgcaacaaaatagggcctaacggtgttgagatacctgggctcattaaaaaatggcagcagtagacataatgtacaagttaccgttctggaaaatgttcaggaaaatgatgagtaggtctgcctatccgagttctcttcatatcgaattaaaaaaaggttcaagatgatcatgcgatcgttaacaatcagtcattggtttcgtcatctgttggcaactctcccatgtcgcttgagttgctttgtttctgacatcactctgcgacctgccggcgtcttttgtacgagggttcttgtatgtttttaggtagagctgagtgcagtgcgttgtaatgctttccgtgaggttattatactgctatcaagcaggatcagctcgttatgacagctctgtttcgaatttctgctggcctcggcaagtttgatgggaataaatcgaagaagccttctttg

SEQ ID NO: 34803 - protein, 390 aa, Zea mays subsp. mays
GIGRSGLLCFLSSPSSPLCSLLSLGVFFSRAPPAASFATAAPALSMEPPPLSSLQEEGEEGPTVEDSSVFSAAVVPPRPATHHSLHKYAPLDWSAYFDEERRVAIPDTDNVFNAYTTGSEGPVVFCLHGGGYSGLSFALAASQMKDKARVVAMDLRGHGKSTTNDDLDLSIETLTNDVIAVIRTMYGDLPPAIILVGHSMGGSVAIHVAARKEIRNLHGLVVVDVVEGTAMASLVHMQKILANRAQHFPSIEKAIEWSVKGGPLRNIESARVSIPSTLKYDESRECYTYRTPLEQTEKYWKGWYEGLSDKFLSCPVQKILLLAGTDRLDRALTIGQMQGKFQMVVIRHTGHAIQEDVPEEFASHILKFISRNKIGPNGVEIPGLIKKWQQ

SEQ ID NO: 34804 - protein, 345 aa, Zea mays subsp. mays
MEPPPLSSLQEEGEEGPTVEDSSVFSAAVVPPRPATHHSLHKYAPLDWSAYFDEERRVAIPDTDNVFNAYTTGSEGPVVFCLHGGGYSGLSFALAASQMKDKARVVAMDLRGHGKSTTNDDLDLSIETLTNDVIAVIRTMYGDLPPAIILVGHSMGGSVAIHVAARKEIRNLHGLVVVDVVEGTAMASLVHMQKILANRAQHFPSIEKAIEWSVKGGPLRNIESARVSIPSTLKYDESRECYTYRTPLEQTEKYWKGWYEGLSDKFLSCPVQKILLLAGTDRLDRALTIGQMQGKFQMVVIRHTGHAIQEDVPEEFASHILKFISRNKIGPNGVEIPGLIKKWQQ

SEQ ID NO: 34805 - protein, 247 aa, Zea mays subsp. mays
MKDKARVVAMDLRGHGKSTTNDDLDLSIETLTNDVIAVIRTMYGDLPPAIILVGHSMGGSVAIHVAARKEIRNLHGLVVVDVVEGTAMASLVHMQKILANRAQHFPSIEKAIEWSVKGGPLRNIESARVSIPSTLKYDESRECYTYRTPLEQTEKYWKGWYEGLSDKFLSCPVQKILLLAGTDRLDRALTIGQMQGKFQMVVIRHTGHAIQEDVPEEFASHILKFISRNKIGPNGVEIPGLIKKWQQ

SEQ ID NO: 34806 - DNA, 1349 bp, Zea mays subsp. mays
attgaactgctctgggaccgccctgtaacatccaccaactcgaggaggaggaggaggaggaggaggaggaggagagatccccccaccgagcctcggtttccaagcgccagcagaagaagaagagacaggacacatggcggcaggtttcggcccgaggttcgccgccggcgatgctccggcgagacggtgtaacctggagcggttcctcgaggccaccacgcccgtcgttgcgtcctccagctgctcgtccaaggagaccgcgaacggttgggggcagcggcggtcagacgacgcagacggctcgtcgccgttcttcgctctgggcgacctctgggactcgttcaaggagtgcagcgcgtacggcaccgctgtgccccttgctctgaacggctgcagcgacggcgtcgttcagtactacgtcccctacctgtctgcaatccagctttacggagccctcagcaggcacatcggcccttcgaggacgggtgcagaggagagcgacagcgacgcggagcgcgagacgagctccagcacgaacacgttatcggcgcgggaggaggcgagcgagagcagcaccagcggcagcgaagcctccggcgacgagggcgagccgggaccggggagctggtgccaggagcggctcctcttcgagttcctcgagtccgagcctccctaccagcgcgagcctctggctgacaagatttgtagccttgcccagcggtttccggagctcaagactctcaggagctgcgacctgtctccggcaagctggatctccgtggcgtggtacggtggacgaactagatagatgtacccgatctaccggatcccgacggggccaacgctgcgcgacctggacgcctgcttcctcacctaccactccctgtccacgcagttcgcagcaggcgccagcagcaacggccccagaccggcgacggcagccaccgcgacggcgatgatgtggctcccgacgttcgcgatggcgtcgtacaaggtgaaggcggcggcgtggacgccgggctggcgcgaccggcaggtggccgcgtccctcgcgcaggccgccgacgcctggctcaggctcctgcgcgccgaccacccggaccaccgcttcttcgccgcccggcggcctcccaggagatggtgatcatttgagtgtatagagtactctctctctctggcaagtctgaaggtagttgtcctgaaaaaagaaacggctgaggtagttagggttcactagcggaaccggagtgataaagtatgttcatcctgtagtttcaatgttttttccttttttttgtatccgccatgttctcaggaaaaaaatgtatcagaaaacgtataataggtgt

SEQ ID NO: 34807 - protein, 224 aa, Zea mays subsp. mays
MAAGFGPRFAAGDAPARRCNLERFLEATTPVVASSSCSSKETANGWGQRRSDDADGSSPFFALGDLWDSFKECSAYGTAVPLALNGCSDGVVQYYVPYLSAIQLYGALSRHIGPSRTGAEESDSDAERETSSSTNTLSAREEASESSTSGSEASGDEGEPGPGSWCQERLLFEFLESEPPYQREPLADKICSLAQRFPELKTLRSCDLSPASWISVAWYGGRTR

SEQ ID NO: 34808 - DNA, 1163 bp, Zea mays subsp. mays
actgacaggcgccagagagagagagacacacaccacaactccacaagggcaagggaggcgcgctcctctcgcctcgcctcgcctcgcctcccccggggaagaagaggaggagagggagctaagcagcagccggccgacgcgggaatgctcgtcggcggcgggcgggacgacgaggaggtgctccggaagctcaagagcatggacgtggacaagctggagaacggcggcggcggcggtgaggcggagagcccgcgccccgccgtcaagtaccacggctggaaggccatgcccttcatcatcgggaacgagacgttcgagaagctgggcacgctgggcacgtcggccaacctgctggtgtacctgacgcaggtgttccacatgcggagcgtggacgcggccacgctgctcaacgggctcaacggcaccaccagcctcgcccccatcgtcggcgccttcctctccgacgcctacctcggccgctacctcgcgctcgccatcgcctccatcgcctccctcatcgtaagcgccatctccgcccccctcttgtacgcgtgttgccttaattcgcgacgacgtccgtctgtcgtcgttgccgccggggtccgagctagctagacgtaccggcggcggccgggtcgggttcgggggtgggtggagttcagcggccgggcagggtggttgacgggttccttcgtgttaggctgcccgcgcccaatcagattcaggtttttgcgatgacgacggtggggttggtggcctcttcgctgtgtcccagctagcttgcgacgagctggatcggactcactctcgagcggctagccgagctgctctttcctttgtttttcttccctccccacgactccgtccgctggatcggagaagacaagatggcgggcggcacatgggacgagcgcacacgtgcacgctcgctcactggctcctcgtggtcgcttctcggagaatctggacgagtggtgggcgtgtttggttttgctgctgccttagtaccttacctcacctcactgggcgaggttagcttttaccaggtctggagagagctaatctggctagctcaagttggtttgaaaaatcctgaaaacacgagcaacgagctggaccttgctgcacattcgaacaagctgcctgtactgatatttgatctc

SEQ ID NO: 34809 - protein, 204 aa, Zea mays subsp. mays
TDRRQRERDTHHNSTRAREARSSRLASPRLPRGRRGGEGAKQQPADAGMLVGGGRDDEEVLRKLKSMDVDKLENGGGGGEAESPRPAVKYHGWKAMPFIIGNETFEKLGTLGTSANLLVYLTQVFHMRSVDAATLLNGLNGTTSLAPIVGAFLSDAYLGRYLALAIASIASLIVSAISAPLLYACCLNSRRRPSVVVAAGVRAS

SEQ ID NO: 34810 - protein, 156 aa, Zea mays subsp. mays
MLVGGGRDDEEVLRKLKSMDVDKLENGGGGGEAESPRPAVKYHGWKAMPFIIGNETFEKLGTLGTSANLLVYLTQVFHMRSVDAATLLNGLNGTTSLAPIVGAFLSDAYLGRYLALAIASIASLIVSAISAPLLYACCLNSRRRPSVVVAAGVRAS

SEQ ID NO: 34811 - protein, 138 aa, Zea mays subsp. mays
MDVDKLENGGGGGEAESPRPAVKYHGWKAMPFIIGNETFEKLGTLGTSANLLVYLTQVFHMRSVDAATLLNGLNGTTSLAPIVGAFLSDAYLGRYLALAIASIASLIVSAISAPLLYACCLNSRRRPSVVVAAGVRAS

SEQ ID NO: 34812 - DNA, 1193 bp, Zea mays subsp. mays
gatagacgaaaaaccgagcccacgcgagaagaaaaaaaaagtggctaaaaatggaggcgtccgcggaggcggcggccgccgccgccgctgcgcgaacgttgaggtgggctggccgcgcggggcacctgggcggcgtcccgcgcgccgtcgtgttcgccgcggtgggcgcgttcgccaaggcgtgcgcctcgctgctcaacaccaccacggtccacaacgccgacgcgctcctccgcctcgtctcggcgcgggctcccgggacgccgctcctcaccgtcagtaatcacatgtccacgttagatgacccacttatgtggggattcaagggttttccaacttcggatgctaagcttggaaggtgggtgctgacagcagaagatatatgcttcaagaatgtagtcatgtcctacatgtttcgacttgggaaatgcatactaatcacgagagggggtgggatttatcaagaacacatgaatgaagcccttgacgtgcttagaaatggaggctggctgcatacattccctgaaggaaaaatagcccaagaagatcagccgattagaagattgaagtggggaactgccagtcttattgtccgagcacctataactccaatagttttgccaattgttcactctggtttcgaaaaggtcatgccagaaaactcgttctttggacggcgaacaccagtgccactctgcagtaagaagatagatatcattgttggagagccaatagagtttgacttgccaagcttgaagcaagaagcatcaacggtaccccatgactcatcctctgaacggaaggggtggccgaccattacaccggatgggctggacgaggccgcccagagatggctttaccagaagatgtcagacaaggtccagtctgtgatggagagactgcggaaaacagttaccaaccttaagcagcgttgatcttcatctatcaggcaataccttgttgaactgctgattaggattctttaactagcttgagttggtggatacagaaatggacaagtggtcgtcacacaagttcgtcaaagtattggtaataatagaattagagctcagattgtttcattttttagtctttttttagttattgttttgaaaggtttcttcattatttacaatcaactgttcaggttgcctgccagttttactgaggcatgaataaaaaaaaggcttttg

SEQ ID NO: 34813 - protein, 294 aa, Zea mays subsp. mays
MEASAEAAAAAAAARTLRWAGRAGHLGGVPRAVVFAAVGAFAKACASLLNTTTVHNADALLRLVSARAPGTPLLTVSNHMSTLDDPLMWGFKGFPTSDAKLGRWVLTAEDICFKNVVMSYMFRLGKCILITRGGGIYQEHMNEALDVLRNGGWLHTFPEGKIAQEDQPIRRLKWGTASLIVRAPITPIVLPIVHSGFEKVMPENSFFGRRTPVPLCSKKIDIIVGEPIEFDLPSLKQEASTVPHDSSSERKGWPTITPDGLDEAAQRWLYQKMSDKVQSVMERLRKTVTNLKQR

SEQ ID NO: 34814 - protein, 215 aa, Zea mays subsp. mays
MSTLDDPLMWGFKGFPTSDAKLGRWVLTAEDICFKNVVMSYMFRLGKCILITRGGGIYQEHMNEALDVLRNGGWLHTFPEGKIAQEDQPIRRLKWGTASLIVRAPITPIVLPIVHSGFEKVMPENSFFGRRTPVPLCSKKIDIIVGEPIEFDLPSLKQEASTVPHDSSSERKGWPTITPDGLDEAAQRWLYQKMSDKVQSVMERLRKTVTNLKQR

SEQ ID NO: 34815 - protein, 207 aa, Zea mays subsp. mays
MWGFKGFPTSDAKLGRWVLTAEDICFKNVVMSYMFRLGKCILITRGGGIYQEHMNEALDVLRNGGWLHTFPEGKIAQEDQPIRRLKWGTASLIVRAPITPIVLPIVHSGFEKVMPENSFFGRRTPVPLCSKKIDIIVGEPIEFDLPSLKQEASTVPHDSSSERKGWPTITPDGLDEAAQRWLYQKMSDKVQSVMERLRKTVTNLKQR

SEQ ID NO: 34816 - DNA, 1193 bp, Zea mays subsp. mays
gctttacaactccccaccccatcccatccacacacacttcacccagcgcggcggccgccggccgccggcaatggaggccgtggcgcgcagcggcactacctttggcggttcgtgcggagacagagtggtacaacgaggttgtcctcagcgccgtggcgccaggcgactggtggcgcggcctgccgcacccggtgcagtcatggatgcgcaactgcgtcggcggttacctcctctatttcatctctggtttcctctggtgcttcgtcatctactactggaagcgccacgcctacatccccaaagatgccatccccacaaatgaagctatgaagaagcaaatagttgtagcatcgaaggctatgcctttttactgcgctcttccaactttatctgaatatatgattgagagcggatggactcggtgctacttcaatatcagcgaaattggtttttctatgtacctctgttatatggctatgtatctcatctttgtggagtttggaatttactggatgcacagggagttgcatgacataaaaccattatacaaatatctgcatgcaacccaccatatttacaacaaggagaataccttgtctccatttgctggacttgcatttcatccactggatggtattctgcaagcaataccgcatgtgttcgcgctcttcctctttccaacacacttcaggacacatattgcactcttgttcctagaggctgtgtggacaacaaacatccacgactgcattcatggcaagatatggccagtcatgggcgctggatatcacaccattcaccatacgacttaccgccacaactatggccactacaccatctggatggactggatgtttggtacgctcaatgagccagaagatatcctcaagaaggcttgagtttctcggagctgtggtatccctatggtgctggtgctggaactgctcgatctgttcccagtgtttctaatccgttgagcctgttcagcactgtctgtttatgtaggcatcagtgtgttaattagtttgctaggttcatatggctttgtgcttattctgtaatttagtgatgtttgtctcatgacgcaacggagttcaggacgaataaaactttgctagacacattctggattccagttgcttgtacaatgttgcaactcaactgtcaatataggatgtaaaacggattccttc

SEQ ID NO: 34817 - protein, 298 aa, Zea mays subsp. mays
FTTPHPIPSTHTSPSAAAAGRRQWRPWRAAALPLAVRAETEWYNEVVLSAVAPGDWWRGLPHPVQSWMRNCVGGYLLYFISGFLWCFVIYYWKRHAYIPKDAIPTNEAMKKQIVVASKAMPFYCALPTLSEYMIESGWTRCYFNISEIGFSMYLCYMAMYLIFVEFGIYWMHRELHDIKPLYKYLHATHHIYNKENTLSPFAGLAFHPLDGILQAIPHVFALFLFPTHFRTHIALLFLEAVWTTNIHDCIHGKIWPVMGAGYHTIHHTTYRHNYGHYTIWMDWMFGTLNEPEDILKKA

SEQ ID NO: 34818 - protein, 231 aa, Zea mays subsp. mays
MRNCVGGYLLYFISGFLWCFVIYYWKRHAYIPKDAIPTNEAMKKQIVVASKAMPFYCALPTLSEYMIESGWTRCYFNISEIGFSMYLCYMAMYLIFVEFGIYWMHRELHDIKPLYKYLHATHHIYNKENTLSPFAGLAFHPLDGILQAIPHVFALFLFPTHFRTHIALLFLEAVWTTNIHDCIHGKIWPVMGAGYHTIHHTTYRHNYGHYTIWMDWMFGTLNEPEDILKKA

SEQ ID NO: 34819 - protein, 190 aa, Zea mays subsp. mays
MKKQIVVASKAMPFYCALPTLSEYMIESGWTRCYFNISEIGFSMYLCYMAMYLIFVEFGIYWMHRELHDIKPLYKYLHATHHIYNKENTLSPFAGLAFHPLDGILQAIPHVFALFLFPTHFRTHIALLFLEAVWTTNIHDCIHGKIWPVMGAGYHTIHHTTYRHNYGHYTIWMDWMFGTLNEPEDILKKA

SEQ ID NO: 34820 - DNA, 1767 bp, Zea mays subsp. mays
acaagcacagcagcagcagcagcagcagcaggcaagaagaatccaaagcggaagggtctctccccccatctctgttccaccaggtgcggcgggcggcgatgggggcgcggaggcggctgcaggcagacgcgccgccggggcatcgccacaggcagggcgcgccggcgccggactcggagcgccgggtacctcaacgggtggctgtcgcagccgacgcccgtcttcggcctccgcctctgggtgctcatcggcatcgccgtcggcgccgccatcgtgctcgtgctcctcctcatcttcgtctgcctctcccgccgccgccgccgccgccgcctcgccgccaacccctactaccccgccgacaccaagctgctcaagaagcacctgcagcagcaggccacgcccacgcccacgcccaccaaggacatccaggagatcgtccgccgccagcaggagcccgcggtgcagctcgccaaggccgtgccgcagccgcagccgcagccgcagactcctccgccgccgccgcctccgcagcacaggccaccggcgcggaagacgcccggcagcggcgtgtcggccacgactagcggcgggagcgagcgggacggcgccacgcctaggagcaccggcagcggcgcggggctgccggaggtctcgcacctcgggtggggccactggttcacgctccgcgagctggaggaggccaccggcgggctcgccgaggagaatgtgatcggcgagggcgggtacgggatcgtgtacaagggcaccttgcacgactccactttggtcgccgtcaagaacctgctcaataatagggggcaggccgagaaggagttcaaggtggaggtggaagcaatcggtcgtgttcggcacaaaaatctcgtcaggttgctcggctactgcgtagagggtgcttacaggatgctcgtgtatgagtatgtggacaatggtaatcttgaccagtggcttcatggtgatgttggcgaagtgagccccactgacatgggacatcaggatgaacattatgcttgccacagctaaagggctggcctacctccacgaggggctggaaccgaaggtggtccaccgcgacatcaaggctagcaacatccttcttgaccagcagtggaacgccaaagtatcggatttcgggctcgcaaagctgttgtgctcggagagaagctacgttacgacccgtgtcatgggaaccttcggttacgtggcgcctgagtacgccagcaccggcatgctgaacgagaggagcgatgtgtatagcttcggcgtgctgataatggagatcatcaccggcagatgtcctgtggattacacaagggcggctggagaggtgcagctggtggagtggctcaagaacatggtggccgagaggaaagcggaggaggtagtggacagtaagatggccgagaggcctcctcccaagacgctgaagcgggcgctcctggtggcgctccgctgcgtggaccctgacgcgaacaagcggcctaagatggggcatgtgatccacatgctcgaaatggacgatctccagttccgagacgataagaggcccggggccgggagagatggtcgtcgtccccagggtccggataggtacagctccaagctaggtggaggaagggagcctcagcaagcgcgagcaccagcgtcggtacagatgagatgattgtcattagagagtagcgatattaaccatgttatttttttcccgtcagtaaatacattctttcccaactcgttccatcgattctc

SEQ ID NO: 34821 - protein, 346 aa, Zea mays subsp. mays
TSTAAAAAAAGKKNPKRKGLSPHLCSTRCGGRRWGRGGGCRQTRRRGIATGRARRRRTRSAGYLNGWLSQPTPVFGLRLWVLIGIAVGAAIVLVLLLIFVCLSRRRRRRRLAANPYYPADTKLLKKHLQQQATPTPTPTKDIQEIVRRQQEPAVQLAKAVPQPQPQPQTPPPPPPPQHRPPARKTPGSGVSATTSGGSERDGATPRSTGSGAGLPEVSHLGWGHWFTLRELEEATGGLAEENVIGEGGYGIVYKGTLHDSTLVAVKNLLNNRGQAEKEFKVEVEAIGRVRHKNLVRLLGYCVEGAYRMLVYEYVDNGNLDQWLHGDVGEVSPTDMGHQDEHYACHS

SEQ ID NO: 34822 - protein, 242 aa, Zea mays subsp. mays
QAQQQQQQQQARRIQSGRVSPPISVPPGAAGGDGGAEAAAGRRAAGASPQAGRAGAGLGAPGTSTGGCRSRRPSSASASGCSSASPSAPPSCSCSSSSSSASPAAAAAAASPPTPTTPPTPSCSRSTCSSRPRPRPRPPRTSRRSSAASRSPRCSSPRPCRSRSRSRRLLRRRRLRSTGHRRGRRPAAACRPRLAAGASGTAPRLGAPAAARGCRRSRTSGGATGSRSASWRRPPAGSPRRM

SEQ ID NO: 34823 - protein, 221 aa, Zea mays subsp. mays
MNIMLATAKGLAYLHEGLEPKVVHRDIKASNILLDQQWNAKVSDFGLAKLLCSERSYVTTRVMGTFGYVAPEYASTGMLNERSDVYSFGVLIMEIITGRCPVDYTRAAGEVQLVEWLKNMVAERKAEEVVDSKMAERPPPKTLKRALLVALRCVDPDANKRPKMGHVIHMLEMDDLQFRDDKRPGAGRDGRRPQGPDRYSSKLGGGREPQQARAPASVQMR

SEQ ID NO: 34824 - DNA, 1706 bp, Zea mays subsp. mays
agccagacgcagaccccctgcctgttgccctgtcgcagtctagcatcaggcatccatcggcgagagcgagagcgagagcgtttcgcagcaagcctacctcacctcaccttgcctgcctgtctgtctgtctccagagctgctcttgtccggagacggagccgactgaacatggccggagacccgggggacgcgccggaggtgggaggcggcggcatacgctccgtgctcaccacggcctcgctcgtcgctccctccggggacgaggttcagtttcgggagatcgacggcaagatcatcggcctctacttcgcggcaaactggtatccgaaatgcgaggctttcaccccggtgctggccgcggcgtacgagcagctcaaggagcgcggcgccggcttcgaggtcgtgctggtgtcgtgcgacgaggaccggccgtcgttcgagcggttccacggaaccatgccgtggccagcggtgcctttcggcgacctcagctgcaagaagcgcctcagcgagaggttccaggtggagggcatcccgcgcctggtggtgctcgctccggacggcggcgcggtggtacacccggacgccgccgacctcgtgcaccgctacggcgagagggcgttcccgttcacggccgcgagggtggcggagctggaggcggatgaccagcgcaagtacgcgtcccagacgctggagaagctcttctccgtcagcgggaaagagtacgtgatgaacagtggtaataatgaaaaggttccggtctcgagcctggtggggaagacggtggggctctacttctcggctaaccattgcgcgccgtgtatcaagttcacgacgaagctggcggccatctacagcagcctcaggggcaaggcggaggacttcgagatcgtgtacgtccccatggacagggaggaggacgggtacctgcgctcctgcggcgacatgccgtggctggcgctcccctacgacggcgcgccgtcgcgcgcgctggcgaggtacttcgacgtgcgggagatcccgacgctggtggtggtcgggcccgacggcaggacggtgacgcgggacggccggaacctggtgaacctctacttcgacatggccttcccgttcacggacgcgcagatcaggctgctgcaggaggcggaggacgaggcggccaaggagtacccgcggtcgctgcgccaccggggccaccgccacgagctcagcatcgtgtcggagaagtccgggggagggccctacatctgctgcgagtgcgaggagcagggactcggctgggcgtaccagtgcatcgcctgcggctacgagatacacctcaggtgcggccagaatgcggagggcggcagcgcaggaactgcttagctagctaggcgacggcagcataacagcatcactggagtactggtgtctacctactagactgctgcatgcgtattggacttgtgcatggtctgtgtttgatcccaacaaacgtcagcttgctaagtctgatgctaaagtagtcaaatagatagatgagaaatgcatggccttccttgtaaggcttagtaggtggttagatgagtgaacaacaaaatgaagctgcagcaatcaatctactgtggcaggtgttatgcaaatcttgctgcactgcccaaccaaactactgcattttccagtgcgccttcttcgagcctaatttgacaccactgaaattaggcttt

SEQ ID NO: 34825 - protein, 454 aa, Zea mays subsp. mays
SQTQTPCLLPCRSLASGIHRRERERERFAASLPHLTLPACLSVSRAALVRRRSRLNMAGDPGDAPEVGGGGIRSVLTTASLVAPSGDEVQFREIDGKIIGLYFAANWYPKCEAFTPVLAAAYEQLKERGAGFEVVLVSCDEDRPSFERFHGTMPWPAVPFGDLSCKKRLSERFQVEGIPRLVVLAPDGGAVVHPDAADLVHRYGERAFPFTAARVAELEADDQRKYASQTLEKLFSVSGKEYVMNSGNNEKVPVSSLVGKTVGLYFSANHCAPCIKFTTKLAAIYSSLRGKAEDFEIVYVPMDREEDGYLRSCGDMPWLALPYDGAPSRALARYFDVREIPTLVVVGPDGRTVTRDGRNLVNLYFDMAFPFTDAQIRLLQEAEDEAAKEYPRSLRHRGHRHELSIVSEKSGGGPYICCECEEQGLGWAYQCIACGYEIHLRCGQNAEGGSAGTA

SEQ ID NO: 34826 - protein, 398 aa, Zea mays subsp. mays
MAGDPGDAPEVGGGGIRSVLTTASLVAPSGDEVQFREIDGKIIGLYFAANWYPKCEAFTPVLAAAYEQLKERGAGFEVVLVSCDEDRPSFERFHGTMPWPAVPFGDLSCKKRLSERFQVEGIPRLVVLAPDGGAVVHPDAADLVHRYGERAFPFTAARVAELEADDQRKYASQTLEKLFSVSGKEYVMNSGNNEKVPVSSLVGKTVGLYFSANHCAPCIKFTTKLAAIYSSLRGKAEDFEIVYVPMDREEDGYLRSCGDMPWLALPYDGAPSRALARYFDVREIPTLVVVGPDGRTVTRDGRNLVNLYFDMAFPFTDAQIRLLQEAEDEAAKEYPRSLRHRGHRHELSIVSEKSGGGPYICCECEEQGLGWAYQCIACGYEIHLRCGQNAEGGSAGTA

SEQ ID NO: 34827 - protein, 302 aa, Zea mays subsp. mays
MPWPAVPFGDLSCKKRLSERFQVEGIPRLVVLAPDGGAVVHPDAADLVHRYGERAFPFTAARVAELEADDQRKYASQTLEKLFSVSGKEYVMNSGNNEKVPVSSLVGKTVGLYFSANHCAPCIKFTTKLAAIYSSLRGKAEDFEIVYVPMDREEDGYLRSCGDMPWLALPYDGAPSRALARYFDVREIPTLVVVGPDGRTVTRDGRNLVNLYFDMAFPFTDAQIRLLQEAEDEAAKEYPRSLRHRGHRHELSIVSEKSGGGPYICCECEEQGLGWAYQCIACGYEIHLRCGQNAEGGSAGTA

SEQ ID NO: 34828 - DNA, 937 bp, Zea mays subsp. mays
  misc_feature (893)..(893): n is a, c, g, or t
  misc_feature (915)..(915): n is a, c, g, or t
  misc_feature (930)..(930): n is a, c, g, or t
cgaaaaaaaaaccctagcagttcggtagtccctctcctctcgaggtattagcagtcgaccggttcctcggagcacgatgaagtttgttgctgcctacctgcttgctgtcctcgctgggaacgccagcccctccgctgacgatttgactgccattctggagtcagttggctgtgaagttgacaatgaaaagatggaactcctgctgtcccaactgagcggtaaggacatcaccgagctcattgccgcgggcagggagaagtttgcttcagtcccatgtggtggcggcggtgtcgctgttgcggcagctgcacctgctgctggcggagctgctcctgcagctgaggcaaagaaagaagcaaagctgaactgcaagtcaagacagacattagtgttgcaggagtctgctcatcttaaggctgtactggacaacccgcagttccagcttgacccatttgctgcgatccatcagcacctgctggcaacgcagccgcctgcagctgcaaagaaggacgacacagcggggaatcaggggaatgttttcaaggacaagaaaagcaggaggaagaagggcacatcgtcaatctctcaggcaatggatatctgattgtgttccttcagtactagtaacttggtccgatgtcgactgcccgtgttccactagagggagctcatcgaagttcgatatcgatggttggcatagttttagtaccagtagaggttgtactgtaccagccctctcttttggcagcctgttgattgatgtttgcagaaccggtgccatcaacatttggtgctactttggaaactggggatttgaggagaggattgagggagaaaatgaacttgaggggattgagagggtcaatcctatatgaggtggcaatttccaagcncaacaattcatttgttattatncctggcgactgtttnttaagtc

SEQ ID NO: 34829 - protein, 175 aa, Zea mays subsp. mays
MKFVAAYLLAVLAGNASPSADDLTAILESVGCEVDNEKMELLLSQLSGKDITELIAAGREKFASVPCGGGGVAVAAAAPAAGGAAPAAEAKKEAKLNCKSRQTLVLQESAHLKAVLDNPQFQLDPFAAIHQHLLATQPPAAAKKDDTAGNQGNVFKDKKSRRKKGTSSISQAMDI

SEQ ID NO: 34830 - protein, 137 aa, Zea mays subsp. mays
MELLLSQLSGKDITELIAAGREKFASVPCGGGGVAVAAAAPAAGGAAPAAEAKKEAKLNCKSRQTLVLQESAHLKAVLDNPQFQLDPFAAIHQHLLATQPPAAAKKDDTAGNQGNVFKDKKSRRKKGTSSISQAMDI

SEQ ID NO: 34831 - protein, 113 aa, Zea mays subsp. mays
MFSRTRKAGGRRAHRQSLRQWISDCVPSVLVTWSDVDCPCSTRGSSSKFDIDGWHSFSTSRGCTVPALSFGSLLIDVCRTGAINIWCYFGNWGFEERIEGENELEGIERVNPI

SEQ ID NO: 34832 - DNA, 1834 bp, Zea mays subsp. mays
atgcccggccttgtgcttgtgcaccatcgacctatccaaagttagctgcccgaaagaaacctgctcgcgtctctcgtcgtcatcaaccggcggcagcgcgccgcatgcgcacgtcaccggcccggccgcatgcgatgcgcggcaacatgtcgttgacgccagccgtggcggctttaaatccgcgggacgcctcctcctcttggctcttgttcgccagccgtacgtcgtcgtcagtgtcgtgtactcgttttcccttccaaggcacccgttgcgagggcggaggcgccgatggccggggcgggggcgggtgcgggagcgggggcgctggcccgggctcgcagcgtgcgcgacgctggcgtgcaacgtcgcaggcgccgtgctcttcctcctcagccaagacgacgagcggctgcggcgcgggtgtgcggcgaggttgggcgctggcggcgtcgcgtcgcagccggtggaggagtgcggggatgaagaggcgctcgcgccggacgccgtcctcaacctcgagctcggcgacccgacgatgtaccgggcgttctggcgggaggttggggactgcggcgccaccttgatccgcgggtgccaggggatgagctacttctccgacgacgacgccgtgctctgctggttcctcgagccggagctggagcgcgaggtgcgccgactccaccgcatcgttggaaacgcagtcgtcgacggctaccacctcgtggtcggcaccggcgccacccagctctaccaggccgccatgtacgcgctcagttcgccggcgcgccgggaccagcccgtacccgtcgtctcgccggcgccgtactactcttcctatccgccgcagacagacctcctgctgtcggacttctaccgctgggccggcgatgccaacacgttcaccggcgatgaatgcatcgagctggtctgctcgccgaacaaccccgacggcgccatccgcgaggccgtcgtgaggtccgccggcgccaaggcgatccatgacctggtgtactactggccacagtacacgcccatcaccggggccgccgcccacgacatcatgctcttcagcgtgtccaagctcaccggccatgccggcacgaggctcgggtgggcgctggtgaaggaccgcgaagtggccaggaatatggtctacttcgtcgaccgcagcaccaccggcgtatgcaaggagtcacagatgcgcgccaccaagatcctcggggtcgtctccgacgcctacgaggtcgtcccgccggccagggccagggccagcggcgcggtgccccgcctcttcgacttcgcgctgcggcgcctggaggagcgctggcgcatcctgcgcgccaccgtggctgccaccggcgccttcagcctgccggaggagacctccggctactgcaacttcgccaagcaaaccgtgacagcttgccctgcgttcgcgtggctgcgatgtgagaaggagggcgtcgaggactgcgccgagttgctcgccggccacaatatcgtgggtagcggcggggagcagttcggaggagacgcgcggtgcgtcaggatcaacatgctggacagggacaacgtgttcgacatgctcgtccagcgcctctcctctataaactgaacggagtgaatgcatggagtggcacagcagcctgcattgccacaaataaaatgaacccagaaggatttggtgtccttttcttttgtcagtttggtatcttgggtcctggtagagaaactttgtttcggtttgcttttgatgctttgggctgaactgtgtgtcaaatcagtagactgttatggattcaggaataaaaataagagtgagaacggtttctgt

SEQ ID NO: 34833 - protein, 537 aa, Zea mays subsp. mays
CPALCLCTIDLSKVSCPKETCSRLSSSSTGGSAPHAHVTGPAACDARQHVVDASRGGFKSAGRLLLLALVRQPYVVVSVVYSFSLPRHPLRGRRRRWPGRGRVRERGRWPGLAACATLACNVAGAVLFLLSQDDERLRRGCAARLGAGGVASQPVEECGDEEALAPDAVLNLELGDPTMYRAFWREVGDCGATLIRGCQGMSYFSDDDAVLCWFLEPELEREVRRLHRIVGNAVVDGYHLVVGTGATQLYQAAMYALSSPARRDQPVPVVSPAPYYSSYPPQTDLLLSDFYRWAGDANTFTGDECIELVCSPNNPDGAIREAVVRSAGAKAIHDLVYYWPQYTPITGAAAHDIMLFSVSKLTGHAGTRLGWALVKDREVARNMVYFVDRSTTGVCKESQMRATKILGVVSDAYEVVPPARARASGAVPRLFDFALRRLEERWRILRATVAATGAFSLPEETSGYCNFAKQTVTACPAFAWLRCEKEGVEDCAELLAGHNIVGSGGEQFGGDARCVRINMLDRDNVFDMLVQRLSSIN

SEQ ID NO: 34834 - protein, 359 aa, Zea mays subsp. mays
MYRAFWREVGDCGATLIRGCQGMSYFSDDDAVLCWFLEPELEREVRRLHRIVGNAVVDGYHLVVGTGATQLYQAAMYALSSPARRDQPVPVVSPAPYYSSYPPQTDLLLSDFYRWAGDANTFTGDECIELVCSPNNPDGAIREAVVRSAGAKAIHDLVYYWPQYTPITGAAAHDIMLFSVSKLTGHAGTRLGWALVKDREVARNMVYFVDRSTTGVCKESQMRATKILGVVSDAYEVVPPARARASGAVPRLFDFALRRLEERWRILRATVAATGAFSLPEETSGYCNFAKQTVTACPAFAWLRCEKEGVEDCAELLAGHNIVGSGGEQFGGDARCVRINMLDRDNVFDMLVQRLSSIN

SEQ ID NO: 34835 - protein, 337 aa, Zea mays subsp. mays
MSYFSDDDAVLCWFLEPELEREVRRLHRIVGNAVVDGYHLVVGTGATQLYQAAMYALSSPARRDQPVPVVSPAPYYSSYPPQTDLLLSDFYRWAGDANTFTGDECIELVCSPNNPDGAIREAVVRSAGAKAIHDLVYYWPQYTPITGAAAHDIMLFSVSKLTGHAGTRLGWALVKDREVARNMVYFVDRSTTGVCKESQMRATKILGVVSDAYEVVPPARARASGAVPRLFDFALRRLEERWRILRATVAATGAFSLPEETSGYCNFAKQTVTACPAFAWLRCEKEGVEDCAELLAGHNIVGSGGEQFGGDARCVRINMLDRDNVFDMLVQRLSSIN

SEQ ID NO: 34836 - DNA, 1398 bp, Zea mays subsp. mays
attcaaaatcgatcccgaccttccgctcccgcaagaaaggaggagaaaaggaacagaggaagcgaagcacaagcagtcagaggcggccgccgcagcccgccgcagtagcgacacgcaaccccccttcccctatcacgccacccgactccacggaggagcgagaccgcgcgccgcagatccttggtcgccgctagggttccggcgagatggacgtggtgaaggcggcgcagctgtcggggcggacgctggaacgtgtagtggtgcaccccctggtgctgctcagcatcgtcgaccactacaaccgcgtcgcccgcgacacccgtaagcgcgtcgtcggcgtcctcctcggcacctcctcccgcggctccgtcgacgtcaccaactcctacgcggtgccgtttgaggaggatgacaaggatcctaggatctggttccttgaccacaattatcatgagtccatgttctccatgttcaagaggattaacgccaaggagcatgttgttggctggtacagcactggcccaaagctaagggagaatgacttggatgttcatgcattgttcaacagtgattattgatgttcaacccaaggagcttgggatacccaccaaggcgtattacgccgtggaagaagttaaagagaatgctacacagaaaagtcagaaggtatttgtccatgttccttcagaaattgctgctcatgaagttgaggaaattggagttgaacaccttttaagggacgtaaaggacacaaccataagcacacttgctacagaggtcactagcaagcttgcagccttgaagggactggatgcaaggctcagggagatccgaagctatttggatcttgtaattgaagggaagctcccactgaatcatgagattttgtatcatttgcaggatgtctttaatctccttccaaatctgaacgtaaatgagctaattaaagcctttgcagtgaaaacaaacgacatgatgttggtaatatatctgtcttctctgatccggagtgtcattgcgcttcacaatttgatcaacaataagatgctaaacaaggagcatgagaaggctgaggattcgaaaccagccgccattccaactgctgccggtggagggggagctaaatgaacttttgatcacttattgatggccaagaaaaaggaggaaacgtgattgcatgtttatcacggttgtgctggaaccaaatcgccttgaccttgaatggatattttcatgtttacttcacgtatgataaggtcaacggcaagagaaatcatttacgttgtatgagagcattagatcatacctcaagttttctgtagatctcgatgctatttcatctgatgcatcatgtttcgtgatgtagacttaagttatttattattatgattgatttat

SEQ ID NO: 34837 - protein, 196 aa, Zea mays subsp. mays
MTWMFMHCSTVIIDVQPKELGIPTKAYYAVEEVKENATQKSQKVFVHVPSEIAAHEVEEIGVEHLLRDVKDTTISTLATEVTSKLAALKGLDARLREIRSYLDLVIEGKLPLNHEILYHLQDVFNLLPNLNVNELIKAFAVKTNDMMLVIYLSSLIRSVIALHNLINNKMLNKEHEKAEDSKPAAIPTAAGGGGAK

SEQ ID NO: 34838 - protein, 193 aa, Zea mays subsp. mays
MFMHCSTVIIDVQPKELGIPTKAYYAVEEVKENATQKSQKVFVHVPSEIAAHEVEEIGVEHLLRDVKDTTISTLATEVTSKLAALKGLDARLREIRSYLDLVIEGKLPLNHEILYHLQDVFNLLPNLNVNELIKAFAVKTNDMMLVIYLSSLIRSVIALHNLINNKMLNKEHEKAEDSKPAAIPTAAGGGGAK

SEQ ID NO: 34839 - protein, 191 aa, Zea mays subsp. mays
MHCSTVIIDVQPKELGIPTKAYYAVEEVKENATQKSQKVFVHVPSEIAAHEVEEIGVEHLLRDVKDTTISTLATEVTSKLAALKGLDARLREIRSYLDLVIEGKLPLNHEILYHLQDVFNLLPNLNVNELIKAFAVKTNDMMLVIYLSSLIRSVIALHNLINNKMLNKEHEKAEDSKPAAIPTAAGGGGAK

SEQ ID NO: 34840 - DNA, 1711 bp, Zea mays subsp. mays
  misc_feature (1633)..(1633): n is a, c, g, or t
  misc_feature (1635)..(1635): n is a, c, g, or t
  misc_feature (1666)..(1666): n is a, c, g, or t
  misc_feature (1676)..(1676): n is a, c, g, or t
  misc_feature (1695)..(1695): n is a, c, g, or t
gagactcccagttgaagggaggagagcaaagcgagcagcacgggatccaaaatccaccacgatgagcagcggtggcgggcggaaggcggcgggccccggcggcgaggaggcggaggtggaggcgcttatccgggcggcgcaggacgcggtgctcctgaagctcaaggcgaactcccacctcgtctcctcggcctccagccctccttcgctcgacgcggcggagctcgatcccctggacagcgacctcgcccggcgcttcgacgcgctcaagtcccgcgcggcggcgccgaatccgaaggcggccggagccggagccgcccttggagggatggatgagctggaggcgcggttcgctgcgctgaagggggcggcggggcccgagaaggacacgagggtgaggctggaggatctgggaggggagtcgtcggaggacgaggcggacgaggtggacaaggtgatgcgctgggccatggatgccgcgcggctcgacgtcgctgcggcgggctccggcggccaggcgacgaagcgcgctgacggcgacgaggaggaggaagagaaggatgagaagagcagcgtgagtagcgaggacgaggacgaggatgagaggttgcaggtggagatggcgaggaagaaggagatggccaaaaccaaaaccaaatccaagaacaagtggttcttcttgtgatatccatatcctactgatcatatgtacatttcatatctattttcaatccaagtatatgatttatcgtatgctcttccctcggcaaacaaccacttattccaaactgtttgagactcacaaacttgcaagaatgcaatatgcaaacgaagagtattttgtccacaatcctttgcccactttggctcgtggggatcgttttctttttcactcaggcagctagttaacgccaatacaaatatcataaactagatacaatgtcatgctacacttcagtttggagtacgacgatgtgtcacagatacttgaggcaaaacgccaaccatcattcctggcatagtttatcttcacttgccactgcatgcagaggtagaaagcaactgattttacaagtccactcacttgaaattacaaggttcagatttcatagccagaacagaatacaaagaccatgagctaagcttcaatcagcatagtacaatcgcggggtctaatgagagcaaaatcagatcgaggttgctgtggagaagtttgtgagtttatctattctgataatggaactgtaaccattgtatatcatgtgaatatttaaaggaactgatagagagatacaatcaatctcaaatgaacttaaggataataagggtcaacatgagatatgttgttctaaaattgaaacaataaagggtaaatggcttccaactctgtggattcattcgtaactttcaagaaatggcagttgctcactactaacagcttatctacaacctaatgaaattcgttggtagtgtccacttcatatgtcataagttgaagagcataaatattctgaaagctcacggtaaaagcatcaaggatagttacatgctaaatggctatgcactaaagactaaacacaggccgtgcaggtcaaggaatgcctatgagagtaactcctactagaattacttntnttgattttaacattcataagacaaaaatgcnaacagatccnagggaacttgataagattngtcagagttatttgtt

SEQ ID NO: 34841 - protein, 227 aa, Zea mays subsp. mays
RLPVEGRRAKRAARDPKSTTMSSGGGRKAAGPGGEEAEVEALIRAAQDAVLLKLKANSHLVSSASSPPSLDAAELDPLDSDLARRFDALKSRAAAPNPKAAGAGAALGGMDELEARFAALKGAAGPEKDTRVRLEDLGGESSEDEADEVDKVMRWAMDAARLDVAAAGSGGQATKRADGDEEEEEKDEKSSVSSEDEDEDERLQVEMARKKEMAKTKTKSKNKWFFL

SEQ ID NO: 34842 - protein, 207 aa, Zea mays subsp. mays
MSSGGGRKAAGPGGEEAEVEALIRAAQDAVLLKLKANSHLVSSASSPPSLDAAELDPLDSDLARRFDALKSRAAAPNPKAAGAGAALGGMDELEARFAALKGAAGPEKDTRVRLEDLGGESSEDEADEVDKVMRWAMDAARLDVAAAGSGGQATKRADGDEEEEEKDEKSSVSSEDEDEDERLQVEMARKKEMAKTKTKSKNKWFFL

SEQ ID NO: 34843 - protein, 118 aa, Zea mays subsp. mays
MDELEARFAALKGAAGPEKDTRVRLEDLGGESSEDEADEVDKVMRWAMDAARLDVAAAGSGGQATKRADGDEEEEEKDEKSSVSSEDEDEDERLQVEMARKKEMAKTKTKSKNKWFFL

SEQ ID NO: 34844 - DNA, 2257 bp, Zea mays subsp. mays
aactttcttcctcgctctttctctctcttcgtgcgtctgcggtctgccatcggcatcgcccccaccaccacacgtccacctctcccgcaattgggaatttctcctcgccgcctcgtctctgccgggctcgctcgtacgtcgctccccacccgcaatggcggacactttcgccctcctccttctcctgatcctgtcctcgtcggtccgcgccgcccccgacgccgtggtgtcgagaatcgccttcggatcctgcgccaaccagagcgagccccagcccatttggaacgccgtcgcggggttcgacccgcaggtgttcgtctggctcggggacaacgtctacggcgacaacaagcgcccattccgggtcttcgggagggagcgcaccgtggggccctggaagaacgtgccgcgcttctacccttccaccgaggaggagctgcggaggcggtaccagctcgccagggcgcagcccgggtacgccaggctcagggagagggctcaggttcttggaacatgggatgaccatgattatggattgaatgatgcaggaaaagaacttagtgggaaagtgattgctcaaaggcttatgttagatttcttggatgaacctgaagacagtaaacggaggaaacaagctggtgtttatgcctcatacatgtttggccctgaaggaaaacgtgtgaaggtaatcttgctggataccagatatcacagagacccgctattaagtgatggaactattctgggagatccccagtggcagtggctagagagggagcttcatggtccacaatcagagatcaccatcattggatcttcgatccaggtagtgtctaatctttcagccactactgggcctttgttctatgtggagtcctgggcacgcttcccgagggagagagaaaggctgttcagattgattgatagtagtaagagacctggagtgctatttattagtggggatgtccatttcggagaaatcaccagattcgattgtggagctcaatacccatcatatgatgttacttcgagtggtcttacccagtctgtcgagaactctgtgccagaagtgtttcaacctcttatgagacttctggcaatactaacaccaactaccatgcgagttttgagcccaaattgccaatataaatcatgtacaataggccaaccaaattttggagcgattgaaattgattggaacgctgtacctccgcggattaaacttgaactaagagatgttgagggtcattctgttcacagcgtagagttccctatatctgaactgcagccctcggaagcgcatgcaatcaaaagacaaacccatactttccaacgtcactgtactctcgaaacagagctcccatggctaacacgataccggcttgctctgatgttgtttgtcatcatagctgtttttgcggtggttgtggtgatgctagcgatcgcctgcttgtcaaactttaccaagtccagtaagaaaagcaagaaggaatagctgtgagctgcagaggagaaacgaagattcggtccagctataagctggatttcacactgaccagggatcacctatctcaaacaatgcctttgagcaggcaagagccagattgcaccacagtatcaagcagtacactgcgttgtgcaatttgcaaagcgcagattggatagatagatatgatagctaacaaataacttacaaccatgtgcctgcctcgtatagcttcgccttttgttttccgtcttcatgccttccgccctgtttttgttttctggtaagcattacattgactaagaaaaatcttggtggtggaagtgtcccacaagtccaaaaaaaaaaaaaaaaaagcttctcgtgccggcttctcgtgccgttttttttttttttttttccacaacatagctttttgcagagattcagtacataaggattcttcaaattaaccataccacaccataacatgggacatttgcgaaactacgggtacaggtatcaaaatgcaacgagttcaatactaaaatataagcgtagtgcaatctaatcttcttcttcgccctttctctgggtaataattgggttacttggaaactgttgatcagtgggtcagttagaatgtgaactggttgttgctgggtaagtatgtggtttgttggtatattgagtctggggacagagagtgaggtcctgatctgcttgtaacagtacctgctttggttttgtgattgctatatactgaaacccaaatccctctgttgctattcc

SEQ ID NO: 34845 - protein, 497 aa, Zea mays subsp. mays
TFFLALSLSSCVCGLPSASPPPPHVHLSRNWEFLLAASSLPGSLVRRSPPAMADTFALLLLLILSSSVRAAPDAVVSRIAFGSCANQSEPQPIWNAVAGFDPQVFVWLGDNVYGDNKRPFRVFGRERTVGPWKNVPRFYPSTEEELRRRYQLARAQPGYARLRERAQVLGTWDDHDYGLNDAGKELSGKVIAQRLMLDFLDEPEDSKRRKQAGVYASYMFGPEGKRVKVILLDTRYHRDPLLSDGTILGDPQWQWLERELHGPQSEITIIGSSIQVVSNLSATTGPLFYVESWARFPRERERLFRLIDSSKRPGVLFISGDVHFGEITRFDCGAQYPSYDVTSSGLTQSVENSVPEVFQPLMRLLAILTPTTMRVLSPNCQYKSCTIGQPNFGAIEIDWNAVPPRIKLELRDVEGHSVHSVEFPISELQPSEAHAIKRQTHTFQRHCTLETELPWLTRYRLALMLFVIIAVFAVVVVMLAIACLSNFTKSSKKSKKE

SEQ ID NO: 34846 - protein, 446 aa, Zea mays subsp. mays
MADTFALLLLLILSSSVRAAPDAVVSRIAFGSCANQSEPQPIWNAVAGFDPQVFVWLGDNVYGDNKRPFRVFGRERTVGPWKNVPRFYPSTEEELRRRYQLARAQPGYARLRERAQVLGTWDDHDYGLNDAGKELSGKVIAQRLMLDFLDEPEDSKRRKQAGVYASYMFGPEGKRVKVILLDTRYHRDPLLSDGTILGDPQWQWLERELHGPQSEITIIGSSIQVVSNLSATTGPLFYVESWARFPRERERLFRLIDSSKRPGVLFISGDVHFGEITRFDCGAQYPSYDVTSSGLTQSVENSVPEVFQPLMRLLAILTPTTMRVLSPNCQYKSCTIGQPNFGAIEIDWNAVPPRIKLELRDVEGHSVHSVEFPISELQPSEAHAIKRQTHTFQRHCTLETELPWLTRYRLALMLFVIIAVFAVVVVMLAIACLSNFTKSSKKSKKE

SEQ ID NO: 34847 - protein, 302 aa, Zea mays subsp. mays
MLDFLDEPEDSKRRKQAGVYASYMFGPEGKRVKVILLDTRYHRDPLLSDGTILGDPQWQWLERELHGPQSEITIIGSSIQVVSNLSATTGPLFYVESWARFPRERERLFRLIDSSKRPGVLFISGDVHFGEITRFDCGAQYPSYDVTSSGLTQSVENSVPEVFQPLMRLLAILTPTTMRVLSPNCQYKSCTIGQPNFGAIEIDWNAVPPRIKLELRDVEGHSVHSVEFPISELQPSEAHAIKRQTHTFQRHCTLETELPWLTRYRLALMLFVIIAVFAVVVVMLAIACLSNFTKSSKKSKKE

SEQ ID NO: 34848 - DNA, 1189 bp, Zea mays subsp. mays
attatcgaccagcaccctcatctatatccatcaacatcgatccatccatccatcatggcggcggagcagcagcatcagctggatctgccggggttccggttccacccgacggaggaggagctgctggagttctacctgaagcaggcggcgcgcgggaggaagctcaagttcgacatcatccccacggtgcacctgtaccggcacgacccctgggagctgccgagcctggcgcgcgtcgttggcgagcgcgagtggtacttcttcgtgccccgcgacggcggcgggcgggcggccaagcagcagcccggctccggcggccggcctagccgcaccacggagcgcgggttctggaaggccacggggtcggaccgcgccgtgcggtgcgccgccgaccccaagcgcctcatcgggctcaagaagacgctcgtctactacgagggccgcgcgccgcggggcaccaagacggactgggtcatgaacgagtaccgcctccccgacgctgccgacgctagcagcgacgcgcgcgtgccgcaggtggacgtggtgctgtgcaaggtctaccgcaaggccgtgtcgctcaaggagctggagcagcgggtggccatggaggagctcgcgcgcgccaccgccacgccgtccgcgtcccacagcaccggctcccccgccgactccatgtcgtcgtcggagatcgtgatggtgcccgtgggcggcgtctcgctctcaccgtcagctgcgatgagcatgaagagagaggaggcggcgaagaatcagcagcagcaggaccccttcctgacgcagctgcggagcccacggatggagagctggtggtctgcctactacgccagcgtcctcaacttctaaccaaaatccacacaatccaacagctttatatgtaaagcgaaggcccacgctcacagtcgtcggcccaactgatgcccgtgcgccgcgcgctgggccgcacggcccaagagctaccaagcgcgggcacgcaccgcggcagcccaaggatctctccaccttatctccctgctcgggactcgggacctttacctatcttcttcgttcttccatgggagcgagctagagagagggcgccatggatcagcagcttctcgtggatgactccaatcatattaacgatatactaacttataatgtgccgatcgttgaacaccgtttattttgattc

SEQ ID NO: 34849 - protein, 286 aa, Zea mays subsp. mays
IIDQHPHLYPSTSIHPSIMAAEQQHQLDLPGFRFHPTEEELLEFYLKQAARGRKLKFDIIPTVHLYRHDPWELPSLARVVGEREWYFFVPRDGGGRAAKQQPGSGGRPSRTTERGFWKATGSDRAVRCAADPKRLIGLKKTLVYYEGRAPRGTKTDWVMNEYRLPDAADASSDARVPQVDVVLCKVYRKAVSLKELEQRVAMEELARATATPSASHSTGSPADSMSSSEIVMVPVGGVSLSPSAAMSMKREEAAKNQQQQDPFLTQLRSPRMESWWSAYYASVLNF

SEQ ID NO: 34850 - protein, 268 aa, Zea mays subsp. mays
MAAEQQHQLDLPGFRFHPTEEELLEFYLKQAARGRKLKFDIIPTVHLYRHDPWELPSLARVVGEREWYFFVPRDGGGRAAKQQPGSGGRPSRTTERGFWKATGSDRAVRCAADPKRLIGLKKTLVYYEGRAPRGTKTDWVMNEYRLPDAADASSDARVPQVDVVLCKVYRKAVSLKELEQRVAMEELARATATPSASHSTGSPADSMSSSEIVMVPVGGVSLSPSAAMSMKREEAAKNQQQQDPFLTQLRSPRMESWWSAYYASVLNF

SEQ ID NO: 34851 - DNA, 1571 bp, Zea mays subsp. mays
  misc_feature (997)..(998): n is a, c, g, or t
gagcaaaatatagcatttcgatcccgacaccccaaaatccctcagccctctggccccggcggcgcccaaaccctcgccgtcccgccgtctccaaaacccccttaccatggccgccgcgacaaccgcgggggccggagccgcgacgccgcagccgccacggcagtacaagctagctccgcaaagcgagctgcgtgtggaggtgctccccgacgcgcccctccgagtgcgcctcgtcactggcaccgcagagatcttcggcaccgagctgcctccggagggctgggtccccgtccctccccgatcgaagatcgccattttcacctggcacggcgcgacggtggaactggacggggtgagcgagagcgagtacacgtctgacgagactccaatggtaatttatgtcaacacgcacgccattctggatgcccgcagggcaagggcgagaattgccgcagctcaagggggcgataaggaggcctcacagggacctagagtgattgttgtggggccaacagattctggaaaaagtactctctgcaaaatgcttcttagctgggctgccaaactgggctggaagcctacgtatgtcgatttagatattggccagggatctataacgatccctggatgtatttctgctacaccaattgagaaacctatagatttaattgatgggattcccttggagatgccactggtatacttctatggtcacccaaatccaagtattaatgcggatgtttacaaagttcttatgaaggagctagctaaaacattggagaaacagttctctggcaatgctgaatctagggcagcaggaatggttatcaatacaatggggtgggttgaaggccttgggtatgagttacttctcaacgcaattgaaaccttcaaggccaatgtagtactggtactgggacaggagaaactctggaagatgttgaaagatgcagttcaaagcaagtccaacattgatgttgtaaaacttcataaatcnnagggtgttgtcctcagaaattcaaaatatcggcaaagaacgagaagcttccgaatcaaggaatacttttatgggattgcaaatgatcttgcaccgcactcaaacattgtcaatttcagtgatgtctcggtgtacaaaatcggtggtggccatcaagctccccgttcagcattacctatcggtgcagagcctgtggcagatcctactcgacttgttgctgtcaacatcagcacggatatgatccatacagtgcttgcaatttcctatgctaaggaacctgaagaaataatatctagcaatgttgccggattcattcatgttactgatgttgacatccaaaggaagaagctgacgtacattgcaccttgcccgggggacttgccaagcaggttgttgatcgcgagttcacttacatggtatgaagcgtgatcagtctaagttagatgggccatatgcccatacgcatgttgtaaagccaggacatgtgacgttgggactgagcgttcgatgtctactgctaaccaagagaaacgatgcaaggacaaatatcttgttccctcgtgatttgctgtgt

SEQ ID NO: 34852 - protein, 439 aa, Zea mays subsp. mays
  misc_feature (297)..(298): Xaa can be any naturally occurring amino acid
MAAATTAGAGAATPQPPRQYKLAPQSELRVEVLPDAPLRVRLVTGTAEIFGTELPPEGWVPVPPRSKIAIFTWHGATVELDGVSESEYTSDETPMVIYVNTHAILDARRARARIAAAQGGDKEASQGPRVIVVGPTDSGKSTLCKMLLSWAAKLGWKPTYVDLDIGQGSITIPGCISATPIEKPIDLIDGIPLEMPLVYFYGHPNPSINADVYKVLMKELAKTLEKQFSGNAESRAAGMVINTMGWVEGLGYELLLNAIETFKANVVLVLGQEKLWKMLKDAVQSKSNIDVVKLHKXXGVVLRNSKYRQRTRSFRIKEYFYGIANDLAPHSNIVNFSDVSVYKIGGGHQAPRSALPIGAEPVADPTRLVAVNISTDMIHTVLAISYAKEPEEIISSNVAGFIHVTDVDIQRKKLTYIAPCPGDLPSRLLIASSLTWYEA

SEQ ID NO: 34853 - protein, 345 aa, Zea mays subsp. mays
  misc_feature (203)..(204): Xaa can be any naturally occurring amino acid
MVIYVNTHAILDARRARARIAAAQGGDKEASQGPRVIVVGPTDSGKSTLCKMLLSWAAKLGWKPTYVDLDIGQGSITIPGCISATPIEKPIDLIDGIPLEMPLVYFYGHPNPSINADVYKVLMKELAKTLEKQFSGNAESRAAGMVINTMGWVEGLGYELLLNAIETFKANVVLVLGQEKLWKMLKDAVQSKSNIDVVKLHKXXGVVLRNSKYRQRTRSFRIKEYFYGIANDLAPHSNIVNFSDVSVYKIGGGHQAPRSALPIGAEPVADPTRLVAVNISTDMIHTVLAISYAKEPEEIISSNVAGFIHVTDVDIQRKKLTYIAPCPGDLPSRLLIASSLTWYEA

SEQ ID NO: 34854 - protein, 294 aa, Zea mays subsp. mays
  misc_feature (152)..(153): Xaa can be any naturally occurring amino acid
MLLSWAAKLGWKPTYVDLDIGQGSITIPGCISATPIEKPIDLIDGIPLEMPLVYFYGHPNPSINADVYKVLMKELAKTLEKQFSGNAESRAAGMVINTMGWVEGLGYELLLNAIETFKANVVLVLGQEKLWKMLKDAVQSKSNIDVVKLHKXXGVVLRNSKYRQRTRSFRIKEYFYGIANDLAPHSNIVNFSDVSVYKIGGGHQAPRSALPIGAEPVADPTRLVAVNISTDMIHTVLAISYAKEPEEIISSNVAGFIHVTDVDIQRKKLTYIAPCPGDLPSRLLIASSLTWYEA

SEQ ID NO: 34855 - DNA, 1487 bp, Zea mays subsp. mays
  misc_feature (94)..(94): n is a, c, g, or t
atcgtaaaacaactcgagtatccatctccaccttccctttctcctcctctctcccggattcccggcgacctcccttttccttccctcccgagtngcggccgcccgcccgcctccgtgatcgcaattcgcacctgcacgcgcggccccgacccctagtcctccccacccatggcgcggcgatccgcccctctcctgcgccgcctcgtctccgcctcctccccgcccgcgctgcagtccctcccggaccacgtcggcgtcctcgcgcggcgcacggtgacctacatgccccggcccggggacggcgcaccgcgcgccgtcacgctcatcccaggcgacggcatcggccccctcgtcacgggcgccgtgcggcaggtcatggaggcgatgcacgcgcccgtctacttcgagacctacgacgtccacggagacatgcccacgggtcccgccagccgtcatcgaatccatccgccgcaacaaggtctgcatcaagggcgggctcgccacgcccgtcggcggcggggtctcctccctcaacatgcagctgcgcaaggagctcgatctctacgcctcgctcgtccagtgctccaacctccccggtctgcccaccaggcacgagggtgtcgacatcgtcgtaatcagggagaacaccgagggcgagtactcggggctcgagcacgaggtcgtacccggggtcgttgagagcctcaaggtgatcacaaagttttgctctgagaggattgccaaatatgcattcgagtatgcttaccttaacaaccgaaagaaagtcactgcagtgcataaagcaaacattatgaagcttgccgatggtttgttcttggagtcttgccgtgaagttgcttcaaaatatcctggtattcagtacaatgaaatgattgttgacaactgctctatgcaacttgtttcaaagcctgaacaatttgatgtcatggttacgcctaatctttatggcaatttggtggctaacacagctgcaggtattgttggagggacgggcatcatgcctggaggcaatgtgggtcaggactacgccatctttgagcaaggcgcttctgcaggaaatgttgggaatgagaaccttgtggagcagaagaaagcaaaccctgtcgcgctgcttctgtcatctgctatgatgttgaggcacttgcagttcccgtcatttgcggaccggctcgagacggcagtgaagcgcgtcgttgctgaaggcacgtacagaacaaaggatctgggcggtagcagcaccacccaggaagttaccgatgctgtggttgccaatctggattagattccaggtgtacacggctaaaaaaaggctaattctttggggtgactagttgtctagtcttgactcctgagtgttatttatcttcttacatagattttagattgcttcacatcttcaagagggattacaagccacaaggtatcccttgtttcagattttctttagaaataatattgaggaaccc

SEQ ID NO: 34856 - protein, 255 aa, Zea mays subsp. mays
MQLRKELDLYASLVQCSNLPGLPTRHEGVDIVVIRENTEGEYSGLEHEVVPGVVESLKVITKFCSERIAKYAFEYAYLNNRKKVTAVHKANIMKLADGLFLESCREVASKYPGIQYNEMIVDNCSMQLVSKPEQFDVMVTPNLYGNLVANTAAGIVGGTGIMPGGNVGQDYAIFEQGASAGNVGNENLVEQKKANPVALLLSSAMMLRHLQFPSFADRLETAVKRVVAEGTYRTKDLGGSSTTQEVTDAVVANLD

SEQ ID NO: 34857 - protein, 210 aa, Zea mays subsp. mays
  misc_feature (31)..(31): Xaa can be any naturally occurring amino acid
RKTTRVSISTFPFSSSLPDSRRPPFSFPPEXRPPARLRDRNSHLHARPRPLVLPTHGAAIRPSPAPPRLRLLPARAAVPPGPRRRPRAAHGDLHAPARGRRTARRHAHPRRRHRPPRHGRRAAGHGGDARARLLRDLRRPRRHAHGSRQPSSNPSAATRSASRAGSPRPSAAGSPPSTCSCARSSISTPRSSSAPTSPVCPPGTRVSTSS

SEQ ID NO: 34858 - protein, 176 aa, Zea mays subsp. mays
MARRSAPLLRRLVSASSPPALQSLPDHVGVLARRTVTYMPRPGDGAPRAVTLIPGDGIGPLVTGAVRQVMEAMHAPVYFETYDVHGDMPTGPASRHRIHPPQQGLHQGRARHARRRRGLLPQHAAAQGARSLRLARPVLQPPRSAHQARGCRHRRNQGEHRGRVLGARARGRTRGR

SEQ ID NO: 34859 - DNA, 1332 bp, Zea mays subsp. mays
actacgtagctgcctgtgcctctttctggctccctgctgtctgcctggccggtgctcacagacacgcgcaagatggccggacgcacggaggaggctcgcaggagcggggagagggagacggtgtgcgtgacgggcgccggcgggtacatcgcctcatggctcgtcaagctcctcctctcccgcggctacgccgtgcacgccaccgtccgtgacccgcgtgatcccaagaacgcccacctggggcagctggaatgggccgcggagaatctccggctgttcaaggccgacgtgctcgacagcgacgcgctggctgccgcagtctccgggtgccggggggtcttccatgttgcctgtccggtgcccacggatagggttcttgatccggagtcagaagtactggctcctgctgtgcaaggtaccttaaacattcttcaggcttgctcagctaataatattcagaaggttgttgtggtttcgtctaccgccgctgttcatttcgacccaaattggcctccacatagacctaaagacgaggattgctggtcggacataaacttttgcaaaaagaacgaggactggtatatggttgccaaggttattgctgaaaagacagccctagaatacggagagagaaatggattaaatgttgttacagtttgccctactatggctttaggaccgctcttgcggcctatgctcaatgtcagccatgaattcctcatgtacattattaaaggaggtcctactatgatgaagaacattccatggcacatagttgatgtccgagatgtggttgatgctttgcttatggtatacaagaaagaggaatcgacagggagatacatctgtgcaccaaattgcatcagtgcaaaagatctggtgaacatgctgaagagggattatcctaattacaattatgtaaactgcgacaatgatatggtgcttaactctatagttacaccacttatgtcggagaaactgaagaatttgggctggaaaccaatgaagacactagaggaaacattattggatagtgttgaatgctataagaagatggggcttctaaaagatgctgagggatgcccttgtcgtcttcctcacctttttcatatggctatagaaaaatgaagaatactcaccattgcttcttgtgttacctaattactctttgaacattgttgggtatgtgttctaatcacacaccaataatgttgacattcaatgggttgtggttgatttgaaataaatgtttggtttcttatgtaatctatatggaacaaagtgcacctttcactttttttgtatggaagttgtcatgcatcttttttctcg

SEQ ID NO: 34860 - protein, 351 aa, Zea mays subsp. mays
MAGRTEEARRSGERETVCVTGAGGYIASWLVKLLLSRGYAVHATVRDPRDPKNAHLGQLEWAAENLRLFKADVLDSDALAAAVSGCRGVFHVACPVPTDRVLDPESEVLAPAVQGTLNILQACSANNIQKVVVVSSTAAVHFDPNWPPHRPKDEDCWSDINFCKKNEDWYMVAKVIAEKTALEYGERNGLNVVTVCPTMALGPLLRPMLNVSHEFLMYIIKGGPTMMKNIPWHIVDVRDVVDALLMVYKKEESTGRYICAPNCISAKDLVNMLKRDYPNYNYVNCDNDMVLNSIVTPLMSEKLKNLGWKPMKTLEETLLDSVECYKKMGLLKDAEGCPCRLPHLFHMAIEK

SEQ ID NO: 34861 - protein, 181 aa, Zea mays subsp. mays
MVAKVIAEKTALEYGERNGLNVVTVCPTMALGPLLRPMLNVSHEFLMYIIKGGPTMMKNIPWHIVDVRDVVDALLMVYKKEESTGRYICAPNCISAKDLVNMLKRDYPNYNYVNCDNDMVLNSIVTPLMSEKLKNLGWKPMKTLEETLLDSVECYKKMGLLKDAEGCPCRLPHLFHMAIEK

SEQ ID NO: 34862 - DNA, 907 bp, Zea mays subsp. mays
atctttttttctattcccatttccattctcgcaccgcatccaccgcgccgccgcgagagagagagggtgagtactgaggaggagggtttccgatggagaacggcgaggatacgttcgcctcccccaccgccgccgccgcggacttctccaccaacggcggggacggcacgcccaagctccacgacgcggcggacgagatcgagtccctccgcgcggcgaagcgcgacctggaggagaagctcgatgccgtgcgccacgagaaccagttcctgtcctccgagtcccgccgccttgaggttctcgtgtcccaggcccgcgaggaggtcgccgccgccgagcaaggtgctgccaccaacgagagcgaggccgccacgctccgcagcgaggtcgagcgcctccaggatctcctcgccgcggagaaggctagccatgaggaggagatgcgcaggggtgcacggctcggggaccagctgcagaccgcgtaccaggagaaggccgccctcgaggaggagatcgagaccctgaagggttccgccactgccgagggcaagggcgtggaagagggatgtgattctattgctgccagggccgggacgcctaaggatcagggcgtggtgcctcccgcactggtggctgccgcggctgctggagcagctgccacggctggcatcgcagtggtcttgttcaacctcaagaggtaatctggtggtccgttgcgcggaagttttgatctgctgctatggcctatatgagaatgggttaaccgttttgttagtgtcactggagtcgtagtagtagtatctttactatcagctggataatagactagatgaacatgtatggcaagtacctttactttctgaagttttcaatggtaataagagtcgtgaacacaaacatgaggggt

SEQ ID NO: 34863 - protein, 202 aa, Zea mays subsp. mays
MENGEDTFASPTAAAADFSTNGGDGTPKLHDAADEIESLRAAKRDLEEKLDAVRHENQFLSSESRRLEVLVSQAREEVAAAEQGAATNESEAATLRSEVERLQDLLAAEKASHEEEMRRGARLGDQLQTAYQEKAALEEEIETLKGSATAEGKGVEEGCDSIAARAGTPKDQGVVPPALVAAAAAGAAATAGIAVVLFNLKR

SEQ ID NO: 34864 - protein, 174 aa, Zea mays subsp. mays
IFFSIPISILAPHPPRRRERERVSTEEEGFRWRTARIRSPPPPPPPRTSPPTAGTARPSSTTRRTRSSPSARRSATWRRSSMPCATRTSSCPPSPAALRFSCPRPARRSPPPSKVLPPTRARPPRSAARSSASRISSPRRRLAMRRRCAGVHGSGTSCRPRTRRRPPSRRRSRP

SEQ ID NO: 34865 - DNA, 1581 bp, Zea mays subsp. mays
ggggggatccttggctttacagcacaaacctcgatagcctatccagccagcatcgttggattggagcacgcaaacaaaaccaaaagggagagcgacagcgtcaggaaataatacccaggggaaaaaacagagagagaaagaaaagaaaagaaaagaaaaggccattcaatcttatcaacacaaagttgatttaataaaaaaaggcaggaatcggtacagaagctgctgaattttctgttccattccatcaagcaataatgaagcgggggagcatggcccgccccagccttgcagcactattgtgctttgttgtcacttacctactcttcactccctccataaatagcaccactgcaccctctccttcgcgcactcatccattccatcatcccctttgcaagtatagtctctctgctaagcgaagcgaagcttcaagctagtctcggcggctctagaagacgatgggcaaggacgacgtgatcgagagcggcgctggcggcggcgagttcgctgccaaggactacacggaccctcccccggcgccgctgatcgacgcggcggagctggggtcctggtcgctgtaccgcgccgtgatcgccgagttcatcgccacgctgctgttcctgtacatcacggtggccaccgtgatcgggtacaagcaccagacggacgcgtcggcgtcgggcgccgacgcggcgtgcggcggcgtgggcgtgctgggcatcgcctgggccttcggcggcatgatcttcgtcctcgtctactgcaccgccggcatctcggggggccacatcaaccccgccgtcaccttcggcctcttcctggcgcgcaaggtctccctggtgcgcgcgctgctctacatcgtggcgcagtgcctcggcgccatctgcggcgtcggcctcgtcaaggcgttccagagcgcctacttcgacaggtacggcggcggcgccaactcgctcgcctccggctactcccgcggcaccggcctcggcgccgagatcatcggcaccttcgtgctcgtctacaccgtcttctccgccaccgaccccaagcgcaacgcccgcgactcccacgtcccggttctggctcccctccccatcggcttcgccgtgttcatggtgcacctggccaccatccccgtcaccggcaccggcatcaacccggccaggagcctgggcgccgccgtcatctacaacaaggacaagccctgggacgaccactggatcttctgggtgggccctctcgtgggcgctgccatcgcggccttctaccaccagtacatcctccgggctggcgccatcaaggccctcggctccttcaggagcaacgcgtgatgagcggggcttggctgtggagcaatggcgggcgacctacgggcggggggccgtgagcgaggagaatgccatcattcatcgatcgacttgggtgccggtggttggttcgggtcgccttttttttgtttcagcagctgctgcgttgcgcgcgtgcgtgagatttggtttggtttcgttcccctgcaatgtaatcatgtcgtgactctcaagggattattccgctctgctcttatggtctctgttttct

SEQ ID NO: 34866 - protein, 290 aa, Zea mays subsp. mays
MGKDDVIESGAGGGEFAAKDYTDPPPAPLIDAAELGSWSLYRAVIAEFIATLLFLYITVATVIGYKHQTDASASGADAACGGVGVLGIAWAFGGMIFVLVYCTAGISGGHINPAVTFGLFLARKVSLVRALLYIVAQCLGAICGVGLVKAFQSAYFDRYGGGANSLASGYSRGTGLGAEIIGTFVLVYTVFSATDPKRNARDSHVPVLAPLPIGFAVFMVHLATIPVTGTGINPARSLGAAVIYNKDKPWDDHWIFWVGPLVGAAIAAFYHQYILRAGAIKALGSFRSNA

SEQ ID NO: 34867 - protein, 196 aa, Zea mays subsp. mays
MIFVLVYCTAGISGGHINPAVTFGLFLARKVSLVRALLYIVAQCLGAICGVGLVKAFQSAYFDRYGGGANSLASGYSRGTGLGAEIIGTFVLVYTVFSATDPKRNARDSHVPVLAPLPIGFAVFMVHLATIPVTGTGINPARSLGAAVIYNKDKPWDDHWIFWVGPLVGAAIAAFYHQYILRAGAIKALGSFRSNA

SEQ ID NO: 34868 - DNA, 468 bp, Zea mays subsp. mays
  misc_feature (250)..(250): n is a, c, g, or t
  misc_feature (256)..(257): n is a, c, g, or t
ctagactgcacccccatcccgcagcagccaaaacctacctagccgccgccgcaggcggccccccatcgccgccaagatgcagatctttgtgaagactctgacggggaagaccatcactttggaggtggagtcctccgacaccattgacaatgtgaaggccaagatccaggacaaggagggcatccccccggaccagcagcggctcatcttcgccgtcagagtcttcacaaagatctgcatcttggcggcngtgggnnatacggtggtggaaaccgcggcggcggctacggcaacaacgacgggaactggaggaactgagcggtggggtccctgaggcctagttatctttcgcttctgctaccgtgttcaccctagtctagagggggtttatcttcgtctgtggtcgtctcgtgtccgtttgtttcgtttcgtgttcattgttgttgttgcccatctgtgtttttgacc

SEQ ID NO: 34869 - protein, 85 aa, Zea mays subsp. mays
  misc_feature (58)..(58): Xaa can be any naturally occurring amino acid
  misc_feature (60)..(61): Xaa can be any naturally occurring amino acid
MQIFVKTLTGKTITLEVESSDTIDNVKAKIQDKEGIPPDQQRLIFAVRVFTKICILAXVXXTVVETAAAATATTTGTGGTERWGP

SEQ ID NO: 34870 - DNA, 619 bp, Zea mays subsp. mays
aactatccgagttcacttcacactcgtgcacccatccgggtcactggctcactgccaccgcgccccaatcacgcgcgcgccacccgcgatgatggcggcggcggcgatctccggctccagcggccacctcgtcgcctcctccccccgcttcaggcagccgctcacgctcccttctcgcagcggtcgcccaatcgccgccgccgcctcgcccgtggcccgcggcggggtcgcggtcgccgccgtgtccagccccgctgtgtcggccgtcgcggggaaggatgccaaacaggctcctaaggatttccttcatatcaatgattttgacaaggatacaataatgaatatccttaatcgagcgatcgaggttaaggcagcgataaagtctggagacaggagcttccaaccattcaatgggaaatcaatggcgatgatttttgccaagccatcaatgaggacccgtgtttcatttgaggcgggattcttcttacttggtgggcatgctatttatttgggtccagatgatatccagatgggcaagcgtgaggagactcgtgatgttgctcgagtactttctggctataatgatatcatctggacccaaataaatagcatgcccacc

SEQ ID NO: 34871 - protein, 206 aa, Zea mays subsp. mays
TIRVHFTLVHPSGSLAHCHRAPITRAPPAMMAAAAISGSSGHLVASSPRFRQPLTLPSRSGRPIAAAASPVARGGVAVAAVSSPAVSAVAGKDAKQAPKDFLHINDFDKDTIMNILNRAIEVKAAIKSGDRSFQPFNGKSMAMIFAKPSMRTRVSFEAGFFLLGGHAIYLGPDDIQMGKREETRDVARVLSGYNDIIWTQINSMPT

SEQ ID NO: 34872 - protein, 177 aa, Zea mays subsp. mays
MMAAAAISGSSGHLVASSPRFRQPLTLPSRSGRPIAAAASPVARGGVAVAAVSSPAVSAVAGKDAKQAPKDFLHINDFDKDTIMNILNRAIEVKAAIKSGDRSFQPFNGKSMAMIFAKPSMRTRVSFEAGFFLLGGHAIYLGPDDIQMGKREETRDVARVLSGYNDIIWTQINSMPT

SEQ ID NO: 34873 - protein, 176 aa, Zea mays subsp. mays
MAAAAISGSSGHLVASSPRFRQPLTLPSRSGRPIAAAASPVARGGVAVAAVSSPAVSAVAGKDAKQAPKDFLHINDFDKDTIMNILNRAIEVKAAIKSGDRSFQPFNGKSMAMIFAKPSMRTRVSFEAGFFLLGGHAIYLGPDDIQMGKREETRDVARVLSGYNDIIWTQINSMPT

SEQ ID NO: 34874 - DNA, 1406 bp, Zea mays subsp. mays
aaatcggacacacggcaacagcacacactggacacgaatcgctagtagacacagcgcacagcggcagccggcaagcaagaacccaaacattccagtgcccttaccgttgcatgcagccatgacgaggatgagcttggcggtgtcggcgacgttctttgtgctcgcggtcgcctcggcggcgcagccggcgccgagcatgcccccgccggcggtggccgtgaacagctcccggctggagaaggcgtacgtggcgctgcaggcgctgaggcgcgccatcacggacgaccccaagaagctgacggagaactggtgcgggcccgacgtgtgcaactacttcggcgtgtactgcgcgccggcgcccgacgacccctgccagcgcaccgtggcctccgtggacctcaaccacggcgacctcgccgggacgctccccgaggagctgggcctgctgtccgacctcgccgtcttccacctcaactccaaccgcttctgcggctccctccccgagtcgctccggtccctgcacctcctccacgagatcgatgtcagcaacaacaggctgtccgggcccttcccgtcgcagctcctctgcctccccagtgtccagtacgtcgacatcaggtttaacaacttctgcggcgaggtgccggcggccatcttcgacaagaagatcgacgcgcttttcatcaacaacaaccacttcgagttcacgctgccggccagcttcaccaactcgacggcgtcggtgatcgtgctggcgaaccttccgcgggtgagcggctgcctgccgagcagcatcggcgacatggccggcacgctcaacgagctcatcctcctcaacagcggcatctcctcctgcatcccgccggagatcggcaagctggacaagctcaccgtgctcgacctcagcttcaacagcatcgccggcgcgctgccggacacgatcggcggcatgcgggcgctggagcagctggacgtcgcgcacaaccggctcaccggcgagatccccgagagcatctgcgagctgccgcacctcaagaacttcacctactcgtacaacttcttctgcggcgagccacgccggtgcctcgaggtgccgcgcgtcgacgaccggcagaactgcatcgctggccgccccgaccagcggccaggcgaggagtgcgtctcattcctacaccaaccgcaagtccactgcgacgcccacgggtgcatcgcgccaccacctccagcggtgcatgctcctccgccgcctgtatactgaattactgatcagtggtaacttgtaaatgtttcctgctcctgcctcgtggtgtgaaaacttggagggtaaacgcatacacatggtatatactgtaatttttattcatcagcagaagagagtaataatggattcatagatttacattacg

SEQ ID NO: 34875 - protein, 418 aa, Zea mays subsp. mays
NRTHGNSTHWTRIASRHSAQRQPASKNPNIPVPLPLHAAMTRMSLAVSATFFVLAVASAAQPAPSMPPPAVAVNSSRLEKAYVALQALRRAITDDPKKLTENWCGPDVCNYFGVYCAPAPDDPCQRTVASVDLNHGDLAGTLPEELGLLSDLAVFHLNSNRFCGSLPESLRSLHLLHEIDVSNNRLSGPFPSQLLCLPSVQYVDIRFNNFCGEVPAAIFDKKIDALFINNNHFEFTLPASFTNSTASVIVLANLPRVSGCLPSSIGDMAGTLNELILLNSGISSCIPPEIGKLDKLTVLDLSFNSIAGALPDTIGGMRALEQLDVAHNRLTGEIPESICELPHLKNFTYSYNFFCGEPRRCLEVPRVDDRQNCIAGRPDQRPGEECVSFLHQPQVHCDAHGCIAPPPPAVHAPPPPVY

SEQ ID NO: 34876 - protein, 379 aa, Zea mays subsp. mays
MTRMSLAVSATFFVLAVASAAQPAPSMPPPAVAVNSSRLEKAYVALQALRRAITDDPKKLTENWCGPDVCNYFGVYCAPAPDDPCQRTVASVDLNHGDLAGTLPEELGLLSDLAVFHLNSNRFCGSLPESLRSLHLLHEIDVSNNRLSGPFPSQLLCLPSVQYVDIRFNNFCGEVPAAIFDKKIDALFINNNHFEFTLPASFTNSTASVIVLANLPRVSGCLPSSIGDMAGTLNELILLNSGISSCIPPEIGKLDKLTVLDLSFNSIAGALPDTIGGMRALEQLDVAHNRLTGEIPESICELPHLKNFTYSYNFFCGEPRRCLEVPRVDDRQNCIAGRPDQRPGEECVSFLHQPQVHCDAHGCIAPPPPAVHAPPPPVY

SEQ ID NO: 34877 - protein, 376 aa, Zea mays subsp. mays
MSLAVSATFFVLAVASAAQPAPSMPPPAVAVNSSRLEKAYVALQALRRAITDDPKKLTENWCGPDVCNYFGVYCAPAPDDPCQRTVASVDLNHGDLAGTLPEELGLLSDLAVFHLNSNRFCGSLPESLRSLHLLHEIDVSNNRLSGPFPSQLLCLPSVQYVDIRFNNFCGEVPAAIFDKKIDALFINNNHFEFTLPASFTNSTASVIVLANLPRVSGCLPSSIGDMAGTLNELILLNSGISSCIPPEIGKLDKLTVLDLSFNSIAGALPDTIGGMRALEQLDVAHNRLTGEIPESICELPHLKNFTYSYNFFCGEPRRCLEVPRVDDRQNCIAGRPDQRPGEECVSFLHQPQVHCDAHGCIAPPPPAVHAPPPPVY

SEQ ID NO: 34878 - DNA, 1586 bp, Zea mays subsp. mays
gtggcgcttgtctcgatcgttccatcgaccggcggccggccagcctagctcttggctcttgctccgatcggatcgagcgccggacaagtcaaggcagccgtacgtacgacgatggcgcagggcagccgcagcgctgccgtgcccgccgcagcgtccttcttcgcccttctcgccgtggcggccccgctgctcctgtgctgcgcgccggccgccgcggagctggccaggctggagcacccgcccaaggacggcggctcgctcagcctgctcgtcgtcggcgactggggccgaaagggcacgttcaaccagtccagggtcgcccatcagatgggcagggttggggagcagctcagcatcgacttcgtcatatccaccggcgacaacttctacgagaacggcctgacgggcacggatgacgaggcgttcgagcagtctttcaccgatatctacacggcgaagagcctgcagaagccgtggtacctggtgctgggaaaccatgactacaggggtgacgcgctcgcgcagctgagcccggtcctgcggaagatcgacagccggttcatttgcatcaaatcattcgtcgtcaacgcagaaatcgtggagttcttcttcgttgacaccaccccgtttcaactcaagtactggactcaccctaaggacgatcactacgactggagaggggtggcgcctcgggaaaactacataaacaatctgctcaaggatttggacggggccatgaagacatcgactgcggcgtggaaggttgccgtgggccaccataccatgaggagtgtcagtgatcatggtgacaccaaggagctactgcagctactgcttccagtcctccaggccaacggcgtcgatttctacatcaacgggcatgaccactgcctggaacacatcagcagcagagacagcccaatccagtacttcacaagcggaggcggttccaaggcatggagaggagtgcagaaccccaccgaagatgacctcaagttcttctacgacgggcaaggcttcatgtccctccagctagaccgtagccaagccaagttcaccttttacgatgtcgacgggaaggcgctgtacagttacacacggtcgagcctgatggaaacaggccaccacctccaagcctccggctacgtcaacgaggaatgaagcaggggcgagtcagcatgcagcgctggagaactgagatcgatgcagttcaagcgtacgtataaattctcgagtgcttgatgtggttcatctgtcaagggcaacaacagttaggtttatatgtgtgcccttgcatctctcgacatctgtcactgccgtccggtactatttggggtcatgccatcgattcgaaaacatgacatggtaggggcagccatgatgtagcaaaaaaaaaaatagtgcaaatattcattatcgaggagttaaaacattaattgtgtggacagcggccgagcataggaccaaaatcagcagggggcaatcaacagattatgtaaaaattacatggttcagtggtgcgacaataaagacacagtatatatatggaaatatatcgtatgcaatcaagcgatgtgctacacccc

SEQ ID NO: 34879 - protein, 349 aa, Zea mays subsp. mays
MAQGSRSAAVPAAASFFALLAVAAPLLLCCAPAAAELARLEHPPKDGGSLSLLVVGDWGRKGTFNQSRVAHQMGRVGEQLSIDFVISTGDNFYENGLTGTDDEAFEQSFTDIYTAKSLQKPWYLVLGNHDYRGDALAQLSPVLRKIDSRFICIKSFVVNAEIVEFFFVDTTPFQLKYWTHPKDDHYDWRGVAPRENYINNLLKDLDGAMKTSTAAWKVAVGHHTMRSVSDHGDTKELLQLLLPVLQANGVDFYINGHDHCLEHISSRDSPIQYFTSGGGSKAWRGVQNPTEDDLKFFYDGQGFMSLQLDRSQAKFTFYDVDGKALYSYTRSSLMETGHHLQASGYVNEE

SEQ ID NO: 34880 - protein, 277 aa, Zea mays subsp. mays
MGRVGEQLSIDFVISTGDNFYENGLTGTDDEAFEQSFTDIYTAKSLQKPWYLVLGNHDYRGDALAQLSPVLRKIDSRFICIKSFVVNAEIVEFFFVDTTPFQLKYWTHPKDDHYDWRGVAPRENYINNLLKDLDGAMKTSTAAWKVAVGHHTMRSVSDHGDTKELLQLLLPVLQANGVDFYINGHDHCLEHISSRDSPIQYFTSGGGSKAWRGVQNPTEDDLKFFYDGQGFMSLQLDRSQAKFTFYDVDGKALYSYTRSSLMETGHHLQASGYVNEE

SEQ ID NO: 34881 - DNA, 1398 bp, Zea mays subsp. mays
actttcgcccatttcatttcaaaccaaaaccctctctccccttgccttccacggttccaccacaccccggatcaaatcgccacagaaaattcccagaaaaataacaagcacttgttcatcatcaaagtaaacgcggcagaaccctagcgagccgttcctccaacgactcacctcccacccactcacccaccccatggcgaccaacccctccaacggcgccggcgccgacgtccctgcaagccccggcggcggtgcggctctcggttgcggcgcaggcggccgcgatccagccctcgtccccgcgcttcttcttctcctcgcttgccgggaccaacccggcctccccgcaccgtcgcatcgccatcgccgttgatctctccgacgagtccgccttcgcagtcaagtgggccgtgcagaactacgtccgccccggggacgccgtcgtgctgctccacgtgcgccccacctccgtcctctacggcgccgactgggggttccatcccggtctccgtcgctgacgaggacgacgctgccgaggacgccgccgccgccgccgagggcgatccctcggaggaggagctgcagaagaaacgggaggaggactacgacgccttcacctccaccaaggcgcaggacctcgcgcaaccgctggtcgacgcccagatccccttcaagatccacgtcgtcaaggaccacgacatgaaggagcgcctctgcctcgaggctgagcgccttggcctctccgccatgatcatggggagccgcggtttcggggcctcccggaaaggcagcaaggggcggcttgggagtgttagtgattactgcgtacaccactgtgtatgccctgttgtggttgttcgctaccctgatgatgctgcagatgcccggtggagatgcatcaggggtgacagatgagttgcacactgtaccagaggacgaacctgtttatcacgatgcacctgaggtgcagaaagaaaactgaggcaacggccacatgcagctgaagaacgaaggaaaacacgaggcttatagtgaggcaatcctgtgtatctggaagatgggaccggatgtttatctttgcttctatatatcaactgcgtatcatgatcagctgtctgcttcccgttgagtttcatatcggcgtcgtagatcatctgagttttttgttggtttgcttgtgagatgtagagtactcttcccgtgggtcgaaggtgtcttgcagatgcttgagctttatgttgtcgaacggtagttatctacacggtatcatctgctctgttaagcctgtttagtgtttactgtattggatactcgttaatagagaaccgctacttttcagtatttattatcacctgtatattggataaaattattgcttagcttatgcttgcatgctcc

SEQ ID NO: 34882 - protein, 71 aa, Zea mays subsp. mays
MKERLCLEAERLGLSAMIMGSRGFGASRKGSKGRLGSVSDYCVHHCVCPVVVVRYPDDAADARWRCIRGDR

SEQ ID NO: 34883 - protein, 59 aa, Zea mays subsp. mays
MATNPSNGAGADVPASPGGGAALGCGAGGRDPALVPALLLLLACRDQPGLPAPSHRHRR

SEQ ID NO: 34884 - protein, 55 aa, Zea mays subsp. mays
MIMGSRGFGASRKGSKGRLGSVSDYCVHHCVCPVVVVRYPDDAADARWRCIRGDR

SEQ ID NO: 34885 - DNA, 1859 bp, Zea mays subsp. mays
gaaaaagaacagaggttattcgttttggctacccgttttgaagacgatgatgagtccggcgtcggagcgcagcctcatcatccagagcgacgacgacgacgacgcccgatccggccacgacgtggaggagccggagccagagcaggagcaggactccgactcctcgtcgtcgtcctcatcctgcgccaccccacgccgcggcccaagctcacccccctacatccagcaatggccgcagagttacaggcaatcgatcgacattctcagcagcgtgcagtcacccaacctgacctttctggggactccaactctgagcaggctgtcgaactcattcctcgccatcaccgattctttccggagcaaggcccccgaaacgatctctagctttatcaagccactccttggccccacgccaagtgacgatcagcagcggcagcatgaaggcacccgaaagagttccgagtaccttgtgccctcgagaagatcatctctgcagcagatcccagaggatcaaaagccacctgtaggtggccatggggcgtctcatgaccagaactgctcttacacccagggagtgatgaatggaataaatgttctatgtggtgtggggatcctatcaacaccttatgccatcaaacaggggggctggattgggctggcgatactctgtatatatgctcttctcgcatggtacacaggtgtgctcctgcgccattgcctggacagcaaggagggcctcaagacatacccagatattggccatgcagcctttggcagcacaggccgcatagttatctcgataatactgtacgtggagttgtatgcatgttgcatcgagtatttgatattggagggtgacaatttgtcaaaattattccccaatgctcacctgaccattgggagcatgacactgaactcacatgtattttttgcaatcttgactaccatcatagtcatgccaaccacctggctccgtgacctgagctggctgagctacatttcagctgggggtgtcattgcatcaatccttgtagtcatctgcctgttcttggttggggttgtcaatgatgtcggctttgagaatgaagggactgcactgaacgccccaggaattcctattgcaattggattatatggttactgctactcagggcatgggttttttccaaatatctattcttccctgaagaatcgcaaccagtttccttcaattctttttacttgtattgggctgtctacctttttgtatgctggtgctgcagtgatgggatacaaaatgtttggtgaagccacagagtcccaattcacactcaacttaccagataattctgtcatttctaagattgctgtttggacaacggtggcaaatccaataaccaaatatgcattaactattattccattggctatgagtttggaagagctgctgccaccaaaccaacaaaagtattttacaataatcatgcttagatcatctctggtgatatcaaccctcctgattgctctatttgtgcctttctttggacttgtgatggccttggttggttctttgtttgccatgcttgtgacctacattttgccttgcgcgtgttttttggcgatcctcaagacaaaagtggggtggcatcagatagcagcttgctcgttcatcatagttgtcggggtttgctgtgcctacgtgggaacatactcgtccctgtcgaagataatccagaactacgcgtagcacagctgttcctgtgatcctgtatatgcatctgcctgacaaaatcatgtgtgtgctatatgggccgaacatatgtacaagatgaaagtttaccattcaattcactcgatgtataataaattattggtgcctc

SEQ ID NO: 34886 - protein, 574 aa, Zea mays subsp. mays
KKNRGYSFWLPVLKTMMSPASERSLIIQSDDDDDARSGHDVEEPEPEQEQDSDSSSSSSSCATPRRGPSSPPYIQQWPQSYRQSIDILSSVQSPNLTFLGTPTLSRLSNSFLAITDSFRSKAPETISSFIKPLLGPTPSDDQQRQHEGTRKSSEYLVPSRRSSLQQIPEDQKPPVGGHGASHDQNCSYTQGVMNGINVLCGVGILSTPYAIKQGGWIGLAILCIYALLAWYTGVLLRHCLDSKEGLKTYPDIGHAAFGSTGRIVISIILYVELYACCIEYLILEGDNLSKLFPNAHLTIGSMTLNSHVFFAILTTIIVMPTTWLRDLSWLSYISAGGVIASILVVICLFLVGVVNDVGFENEGTALNAPGIPIAIGLYGYCYSGHGFFPNIYSSLKNRNQFPSILFTCIGLSTFLYAGAAVMGYKMFGEATESQFTLNLPDNSVISKIAVWTTVANPITKYALTIIPLAMSLEELLPPNQQKYFTIIMLRSSLVISTLLIALFVPFFGLVMALVGSLFAMLVTYILPCACFLAILKTKVGWHQIAACSFIIVVGVCCAYVGTYSSLSKIIQNYA

SEQ ID NO: 34887 - protein, 559 aa, Zea mays subsp. mays
MMSPASERSLIIQSDDDDDARSGHDVEEPEPEQEQDSDSSSSSSSCATPRRGPSSPPYIQQWPQSYRQSIDILSSVQSPNLTFLGTPTLSRLSNSFLAITDSFRSKAPETISSFIKPLLGPTPSDDQQRQHEGTRKSSEYLVPSRRSSLQQIPEDQKPPVGGHGASHDQNCSYTQGVMNGINVLCGVGILSTPYAIKQGGWIGLAILCIYALLAWYTGVLLRHCLDSKEGLKTYPDIGHAAFGSTGRIVISIILYVELYACCIEYLILEGDNLSKLFPNAHLTIGSMTLNSHVFFAILTTIIVMPTTWLRDLSWLSYISAGGVIASILVVICLFLVGVVNDVGFENEGTALNAPGIPIAIGLYGYCYSGHGFFPNIYSSLKNRNQFPSILFTCIGLSTFLYAGAAVMGYKMFGEATESQFTLNLPDNSVISKIAVWTTVANPITKYALTIIPLAMSLEELLPPNQQKYFTIIMLRSSLVISTLLIALFVPFFGLVMALVGSLFAMLVTYILPCACFLAILKTKVGWHQIAACSFIIVVGVCCAYVGTYSSLSKIIQNYA

SEQ ID NO: 34888 - protein, 558 aa, Zea mays subsp. mays
MSPASERSLIIQSDDDDDARSGHDVEEPEPEQEQDSDSSSSSSSCATPRRGPSSPPYIQQWPQSYRQSIDILSSVQSPNLTFLGTPTLSRLSNSFLAITDSFRSKAPETISSFIKPLLGPTPSDDQQRQHEGTRKSSEYLVPSRRSSLQQIPEDQKPPVGGHGASHDQNCSYTQGVMNGINVLCGVGILSTPYAIKQGGWIGLAILCIYALLAWYTGVLLRHCLDSKEGLKTYPDIGHAAFGSTGRIVISIILYVELYACCIEYLILEGDNLSKLFPNAHLTIGSMTLNSHVFFAILTTIIVMPTTWLRDLSWLSYISAGGVIASILVVICLFLVGVVNDVGFENEGTALNAPGIPIAIGLYGYCYSGHGFFPNIYSSLKNRNQFPSILFTCIGLSTFLYAGAAVMGYKMFGEATESQFTLNLPDNSVISKIAVWTTVANPITKYALTIIPLAMSLEELLPPNQQKYFTIIMLRSSLVISTLLIALFVPFFGLVMALVGSLFAMLVTYILPCACFLAILKTKVGWHQIAACSFIIVVGVCCAYVGTYSSLSKIIQNYA

SEQ ID NO: 34889 - DNA, 1659 bp, Zea mays subsp. mays
agttggtccggccattgtaattgctacgggcacacagcgaaacgcccggcctttgttactcaaagtcgagaagcgccgtcttccccctttccaacctcaagtctacagtctacaccgaatccatcccccatcgccgccgccgccgccgccgacgacgacgatggcaagcctactccggcgatctgccgtacccgcgcgccagctcctcctcctcccgcgccatttcgccgccgccggctccgcccccgccttgtcccgctcgttctcccgcttcaacccccgagacgacagctctatgttcgatccaccggagccgccggtgaactggggcgtgagcatagttccggagaagaaggcttacgttgtggagagattcgggaagtatctcaagaccctcggctccgggttccacctcctgatccccgccgtcgaccgtattgcctacgtgcactcgctcaaggaagagaccatccctatccctcaccagaacgccatcaccaaggacaacgtcaccatacagattgacagcgtcatctatgtcaagatcatggacccctaccttgcttcctatggtgtggagaatccaatctatgctgtcctacaacttgcacaaacaaccatgagaagtgaactcgggaagataaccttagataagacttttgaggagagagatgcattaaatgagaaaattgtgagtgccatcaatgaagcagccacagattggggcctgaagtgtatccgctatgagatcagggacataaatcctccagcagggattaggcaggctatggagatgcaggctgaggcagaaaggaaaaaacgcgctcaaatccttgagtcagaagggatgaaacaggcccaaatccttgaatcagaagggaaaaagactgcccagatccttgaatctgaaggagctatgttggatctagcaaaccgtgccaagggtgcggctgaagcaattcttgccaagtcagaagctactgctcgtggaatgagattggtttcagatgcgatgacaactgaaggcagtgccaaggctgctagcctgaaacttgcagagcaatacatcgaagcattctcaaatctggcacaaaagacaaatacaatgcttcttccaggtgatagtgccagcccagcatctttcgtggcccaggcaatgaagacgtatgagcaaatccattcccacagccaggcattaaagagccacccccagatagaagagctgaaggaatcaggagagaccagtcctgctccatcttctgaggcgagcaagacaccaccactcattgaggaagcagattctaaccagaccttctcactgcaacgccccaagaacaagcagtgagctttgctcaagtgtttgaagtccttttttctatctgttgttctgaaacatgagtgccactgagaaacaccactagtaggttttagttttctttaatctgagagagctgatatgtggcggagaagggatagacccctaggcatttggtttctgggagctaaatgcgactggagagacctagagagattttgattctcgtgaaggttatactttggttccttgttggaatgaagtttgtaaaaaggcaaagttgggttaacgttggttagacaaaatgcataaatgcttaagttatttctttcttgctgagcttg

SEQ ID NO: 34890 - protein, 447 aa, Zea mays subsp. mays
VGPAIVIATGTQRNARPLLLKVEKRRLPPFQPQVYSLHRIHPPSPPPPPPTTTMASLLRRSAVPARQLLLLPRHFAAAGSAPALSRSFSRFNPRDDSSMFDPPEPPVNWGVSIVPEKKAYVVERFGKYLKTLGSGFHLLIPAVDRIAYVHSLKEETIPIPHQNAITKDNVTIQIDSVIYVKIMDPYLASYGVENPIYAVLQLAQTTMRSELGKITLDKTFEERDALNEKIVSAINEAATDWGLKCIRYEIRDINPPAGIRQAMEMQAEAERKKRAQILESEGMKQAQILESEGKKTAQILESEGAMLDLANRAKGAAEAILAKSEATARGMRLVSDAMTTEGSAKAASLKLAEQYIEAFSNLAQKTNTMLLPGDSASPASFVAQAMKTYEQIHSHSQALKSHPQIEELKESGETSPAPSSEASKTPPLIEEADSNQTFSLQRPKNKQ

SEQ ID NO: 34891 - protein, 394 aa, Zea mays subsp. mays
MASLLRRSAVPARQLLLLPRHFAAAGSAPALSRSFSRFNPRDDSSMFDPPEPPVNWGVSIVPEKKAYVVERFGKYLKTLGSGFHLLIPAVDRIAYVHSLKEETIPIPHQNAITKDNVTIQIDSVIYVKIMDPYLASYGVENPIYAVLQLAQTTMRSELGKITLDKTFEERDALNEKIVSAINEAATDWGLKCIRYEIRDINPPAGIRQAMEMQAEAERKKRAQILESEGMKQAQILESEGKKTAQILESEGAMLDLANRAKGAAEAILAKSEATARGMRLVSDAMTTEGSAKAASLKLAEQYIEAFSNLAQKTNTMLLPGDSASPASFVAQAMKTYEQIHSHSQALKSHPQIEELKESGETSPAPSSEASKTPPLIEEADSNQTFSLQRPKNKQ

SEQ ID NO: 34892 - protein, 349 aa, Zea mays subsp. mays
MFDPPEPPVNWGVSIVPEKKAYVVERFGKYLKTLGSGFHLLIPAVDRIAYVHSLKEETIPIPHQNAITKDNVTIQIDSVIYVKIMDPYLASYGVENPIYAVLQLAQTTMRSELGKITLDKTFEERDALNEKIVSAINEAATDWGLKCIRYEIRDINPPAGIRQAMEMQAEAERKKRAQILESEGMKQAQILESEGKKTAQILESEGAMLDLANRAKGAAEAILAKSEATARGMRLVSDAMTTEGSAKAASLKLAEQYIEAFSNLAQKTNTMLLPGDSASPASFVAQAMKTYEQIHSHSQALKSHPQIEELKESGETSPAPSSEASKTPPLIEEADSNQTFSLQRPKNKQ

SEQ ID NO: 34893 - DNA, 1237 bp, Zea mays subsp. mays
  misc_feature (86)..(86): n is a, c, g, or t
gcacgagaccattacctagaacatcctaatcgaaaagatttgattccctatccctgcgctgcccacctcccctttcccgcctgtgncctcccattcacttgcccccttttttccctctcccgacctcccaattcccgaaatcacccccgacactccccacccaagaacccctcgtccccacctcgccatgggcagcgccgccgcctcgccgccgccgtccgggaagctgacgcaggaagagctgaagcgcgtggcggcgcaccgcgcggtggagttcgtggagcccggcatgacgctgggcctgggcacgggctccacggcggcgcacgcgctggaccgcctgggcgacctcctccgcgcgggcgcgctgccgggggtggccggcgtgcccacctccctcaagacggaggcccacgcggcgcgcgccgggatcccgctgctcccgctcccgggcgccaggatcgcgctctccatcgacggcgccgacgaggtcgacccggacctcaacctcgtcaagggccgcggcggctcgctgctccgcgagaagatgatcgagggcgccggcgcccgcttcgtcgtcatcgtcgacgagtccaagctcgtgccgcgcctcggctgcacgggcgccatccccgtcgaggtcatccccttcggcgcgctccacacgctgggcctcatccgcggcctcttcgacggattgcctggattccacgccaggctgaggactgtccccgccgctcccgccaaggggggagaagactcggactcggagtcggagcagcccttcgtcaccgacaacggcaactacatcgtcgagatgttcttcgaggacggcatccgcggcgacctgcgcgacatcagtgaccgcctgctccggatcaccggcgtcgtagagcacggcatgttcctgggcatggccaccaccgtcatcgtcgccaacaaggacggcacggtgtcagtcatggacaggaagaagtagcagtagtaatctacaagcagtagcctgttcttcgaaacagcgatcgcctgatcaccggcatgttccttgacgtggccaccaccaccatcgtcgctgccaacagcgacgacaagaagtactaataattttgcaagtagcctgtgtctgtgcaacacccagctactcttatctaagttggagttgtatcgtgtccgtgcgttatcctcatatgctgagtgtctgcaggagtatgttaatcatcatcctggtgttattatc

SEQ ID NO: 34894 - protein, 287 aa, Zea mays subsp. mays
  misc_feature (29)..(29): Xaa can be any naturally occurring amino acid
ARDHYLEHPNRKDLIPYPCAAHLPFPACXLPFTCPLFSLSRPPNSRNHPRHSPPKNPSSPPRHGQRRRLAAAVREADAGRAEARGGAPRGGVRGARHDAGPGHGLHGGARAGPPGRPPPRGRAAGGGRRAHLPQDGGPRGARRDPAAPAPGRQDRALHRRRRRGRPGPQPRQGPRRLAAPREDDRGRRRPLRRHRRRVQARAAPRLHGRHPRRGHPLRRAPHAGPHPRPLRRIAWIPRQAEDCPRRSRQGGRRLGLGVGAALRHRQRQLHRRDVLRGRHPRRPARHQ

SEQ ID NO: 34895 - protein, 263 aa, Zea mays subsp. mays
MGSAAASPPPSGKLTQEELKRVAAHRAVEFVEPGMTLGLGTGSTAAHALDRLGDLLRAGALPGVAGVPTSLKTEAHAARAGIPLLPLPGARIALSIDGADEVDPDLNLVKGRGGSLLREKMIEGAGARFVVIVDESKLVPRLGCTGAIPVEVIPFGALHTLGLIRGLFDGLPGFHARLRTVPAAPAKGGEDSDSESEQPFVTDNGNYIVEMFFEDGIRGDLRDISDRLLRITGVVEHGMFLGMATTVIVANKDGTVSVMDRKK

SEQ ID NO: 34896 - protein, 229 aa, Zea mays subsp. mays
MTLGLGTGSTAAHALDRLGDLLRAGALPGVAGVPTSLKTEAHAARAGIPLLPLPGARIALSIDGADEVDPDLNLVKGRGGSLLREKMIEGAGARFVVIVDESKLVPRLGCTGAIPVEVIPFGALHTLGLIRGLFDGLPGFHARLRTVPAAPAKGGEDSDSESEQPFVTDNGNYIVEMFFEDGIRGDLRDISDRLLRITGVVEHGMFLGMATTVIVANKDGTVSVMDRKK

SEQ ID NO: 34897 - DNA, 1697 bp, Zea mays subsp. mays
attttcccactacctgctcctgcttgttgcttgtgcggtgtgcgctgcgcgcggcaggggggtgaaggggatgaaggaggagatgatggtcggcctgtcggcgccggggccggtggggaggtggggcgccgcgccgccgcaggcgatgctggagaggatgaaggactacggccaggagggcgccttcgcgctctgggacgatctctcgcccgaggaccgggagctcctcgtccgggacatcgagagtctagacctctcaaggatcgatcggatcatccggcgctcccttggatcacaaggcatcccattgcctgctgtcgagcccgtgccggaatctagtgtctccaaggtggaggacaggtctgcagaggacaaagaaagatggtggaagaaggggttgaaagccatctcggaggggaagctggccgttgtccttttggccggtggtcagggtactcgactgggaagctcagatcctaagggatgtttcaatatcggacttccatcaggaaagtcacttttccagctccaagctgaaaggattctgtgcgttcaaaagctggctgctcaatctagcgaaagcccgagtaacactgtgccgatccactggtacataatgacaagcccctttacagatgctgccaccgccaaattctttgaaacccgtagatattttggcttagaccctgaccaagtgacatttttccaacaaggcacacttccatgcgtttctgccgatggtagatttattatggagacagcatatagggtagcaaaggctcctgatggcaacggtggagtttatgctgcactgaagtccaagaagttgatggaagatatggccgcgcggggtgtgaaatacgtagattgctacggagttgacaacgcgctggttcgagttgcagatcctacgttcttagggtacttcattgacatgggggcatcttctgccgccaaagtggttaggaaggcttatccgcaagagaacgttggggtgttcgttcaacgaggccgtgggggaccgctctcggtggttgagtacagcgaaatggattcggctatggctaccgaaatgaatcagtcgacagggcgactccgttactgttggagcaacatctgcctgcacatgttcactctggacttcttgaaccaagtggcaaacagccttgagaaggacagtgtataccatctagctgagaagaagatcccttccatccatgggttcacgacgggcctgaagcttgaacagtttatattcgacgccttcacatactccccgtccacggcacttttcgaggtcatgcgggaggaggaattcgcgccggtaaagaacgccagcggcgcaacgtatgacacccctgatagcgcgaagctcatgctgctccgcctccacagcagatgggtagtcgctgctggcggcttcttgacgcactctgtgcccttgtatatgacaggcgtcgaagtttctccgctctcctcctacgccggagagaacctggaagccatctgccgtgggcgaacgttccatgcgccgagcgagatctcgttttaggaggtagacctgttcatgggactggagtagcagttgtgtgatcatctgtaaaacgagcgtaaaggatgggcaggctgttgtgtactgcgtgttgtagatgtaacatctcggacggacacaaaattcatctcgagttttctctccc

SEQ ID NO: 34898 - protein, 516 aa, Zea mays subsp. mays
FSHYLLLLVACAVCAARGRGVKGMKEEMMVGLSAPGPVGRWGAAPPQAMLERMKDYGQEGAFALWDDLSPEDRELLVRDIESLDLSRIDRIIRRSLGSQGIPLPAVEPVPESSVSKVEDRSAEDKERWWKKGLKAISEGKLAVVLLAGGQGTRLGSSDPKGCFNIGLPSGKSLFQLQAERILCVQKLAAQSSESPSNTVPIHWYIMTSPFTDAATAKFFETRRYFGLDPDQVTFFQQGTLPCVSADGRFIMETAYRVAKAPDGNGGVYAALKSKKLMEDMAARGVKYVDCYGVDNALVRVADPTFLGYFIDMGASSAAKVVRKAYPQENVGVFVQRGRGGPLSVVEYSEMDSAMATEMNQSTGRLRYCWSNICLHMFTLDFLNQVANSLEKDSVYHLAEKKIPSIHGFTTGLKLEQFIFDAFTYSPSTALFEVMREEEFAPVKNASGATYDTPDSAKLMLLRLHSRWVVAAGGFLTHSVPLYMTGVEVSPLSSYAGENLEAICRGRTFHAPSEISF

SEQ ID NO: 34899 - protein, 493 aa, Zea mays subsp. mays
MKEEMMVGLSAPGPVGRWGAAPPQAMLERMKDYGQEGAFALWDDLSPEDRELLVRDIESLDLSRIDRIIRRSLGSQGIPLPAVEPVPESSVSKVEDRSAEDKERWWKKGLKAISEGKLAVVLLAGGQGTRLGSSDPKGCFNIGLPSGKSLFQLQAERILCVQKLAAQSSESPSNTVPIHWYIMTSPFTDAATAKFFETRRYFGLDPDQVTFFQQGTLPCVSADGRFIMETAYRVAKAPDGNGGVYAALKSKKLMEDMAARGVKYVDCYGVDNALVRVADPTFLGYFIDMGASSAAKVVRKAYPQENVGVFVQRGRGGPLSVVEYSEMDSAMATEMNQSTGRLRYCWSNICLHMFTLDFLNQVANSLEKDSVYHLAEKKIPSIHGFTTGLKLEQFIFDAFTYSPSTALFEVMREEEFAPVKNASGATYDTPDSAKLMLLRLHSRWVVAAGGFLTHSVPLYMTGVEVSPLSSYAGENLEAICRGRTFHAPSEISF

SEQ ID NO: 34900 - protein, 489 aa, Zea mays subsp. mays
MMVGLSAPGPVGRWGAAPPQAMLERMKDYGQEGAFALWDDLSPEDRELLVRDIESLDLSRIDRIIRRSLGSQGIPLPAVEPVPESSVSKVEDRSAEDKERWWKKGLKAISEGKLAVVLLAGGQGTRLGSSDPKGCFNIGLPSGKSLFQLQAERILCVQKLAAQSSESPSNTVPIHWYIMTSPFTDAATAKFFETRRYFGLDPDQVTFFQQGTLPCVSADGRFIMETAYRVAKAPDGNGGVYAALKSKKLMEDMAARGVKYVDCYGVDNALVRVADPTFLGYFIDMGASSAAKVVRKAYPQENVGVFVQRGRGGPLSVVEYSEMDSAMATEMNQSTGRLRYCWSNICLHMFTLDFLNQVANSLEKDSVYHLAEKKIPSIHGFTTGLKLEQFIFDAFTYSPSTALFEVMREEEFAPVKNASGATYDTPDSAKLMLLRLHSRWVVAAGGFLTHSVPLYMTGVEVSPLSSYAGENLEAICRGRTFHAPSEISF

SEQ ID NO: 34901 - DNA, 1619 bp, Zea mays subsp. mays
taatcgaaaaaacaaaactgcaattatctcagtctccttcaaacaactgttttttccattgttagactcaaagcctatccccttcacggagctcgccaagcgctatgggggacgccaacggcggcagtatgcacgttgtgatgctgccatggctggcgttcggccacatcctccccttcacggagctcgccaagcgcatagctaggcagggccaccgggtcaccctcttctccacgccaagaaacacccggcggttaatccgcatccctccagaactcgcggggcatatccgcgtcgtggacatcgcgctgccgcgcgtggagcgcctgccggaggactgcgaggcgagcatagacctgccatccgacgacctccgcccgtacctccgcgtagcctacgacgccgccttcgccgacaaactctcggccatcctgcaggagccgcggccggagaggccggactgggttctcatcgactacgccgcgtactgggcgcccgcggccgcggcgaggcacggcgtgccgtgcgccttcctgagcctgttcggcgccgcgaccctcagtttctatgggcccccggaggggctcatgggacgcggcaagtacgccaggacgaagccggaggacctcaccgtagtacccgactacgtgccgttcccaacaaccgtcgcgcaccgcggcttcgaggcgcgcgagctattcaagccaggccttgtcccggacgactccggcgtgtcggagggccacaggttcggcgtgtccatcggagagagccagatcgtaggcatcaggagcagaacagagctcgagtcggagtggctgcaggtgcttggcaagctctacaagaagccggtgatcccgatcggcctgttccctccgccgcccacgcaagacatcgccggccacgaggcgactttgcggtggctggacagacaggctcagggctccgtcgtgtacgcggccttcggcagcgaggcgaagctgacgagcgcgcagctccaaacaattgcgctaggtttggaggcttccggcctgccgttcctctgggcattcaggccgccaaccgacgccgcaccaggacaaggcacgggcgggttgcccgaaggcttcaaggagcgtgtcaatggccggggattggtctgccgcggctgggtgcctcaacccaggctgttggctcatgaatcggttggtgggtttctgacccacgccggctggaactccatcgccgaaggcctctcgcggggcgtcacgatggtgctgttgccgctgatgttcgatcagggcctcaacgccaggcttcttgtggataagaagatcgggattgaggtggagagggacgaagacgacggcacgttcgcgcccaaagacatcgcggatgctctgaggacggccatggcggagaaccaagacgggactagggtcaaggaactggccgaggtgtttggaaatgacgaggccaatgatcagtgcctgcgagatttcctccggtatctgttagaatacatcaggcagcatcaaggttagttccagtccatttcgaggctaatgttaatgcagaaaagggcaaagaaatggtagtgagtcacgtcacgctatcaaaaaaaaaaaatccttccaggt

SEQ ID NO: 34902 - protein, 472 aa, Zea mays subsp. mays
MGDANGGSMHVVMLPWLAFGHILPFTELAKRIARQGHRVTLFSTPRNTRRLIRIPPELAGHIRVVDIALPRVERLPEDCEASIDLPSDDLRPYLRVAYDAAFADKLSAILQEPRPERPDWVLIDYAAYWAPAAAARHGVPCAFLSLFGAATLSFYGPPEGLMGRGKYARTKPEDLTVVPDYVPFPTTVAHRGFEARELFKPGLVPDDSGVSEGHRFGVSIGESQIVGIRSRTELESEWLQVLGKLYKKPVIPIGLFPPPPTQDIAGHEATLRWLDRQAQGSVVYAAFGSEAKLTSAQLQTIALGLEASGLPFLWAFRPPTDAAPGQGTGGLPEGFKERVNGRGLVCRGWVPQPRLLAHESVGGFLTHAGWNSIAEGLSRGVTMVLLPLMFDQGLNARLLVDKKIGIEVERDEDDGTFAPKDIADALRTAMAENQDGTRVKELAEVFGNDEANDQCLRDFLRYLLEYIRQHQG

SEQ ID NO: 34903 - protein, 464 aa, Zea mays subsp. mays
MHVVMLPWLAFGHILPFTELAKRIARQGHRVTLFSTPRNTRRLIRIPPELAGHIRVVDIALPRVERLPEDCEASIDLPSDDLRPYLRVAYDAAFADKLSAILQEPRPERPDWVLIDYAAYWAPAAAARHGVPCAFLSLFGAATLSFYGPPEGLMGRGKYARTKPEDLTVVPDYVPFPTTVAHRGFEARELFKPGLVPDDSGVSEGHRFGVSIGESQIVGIRSRTELESEWLQVLGKLYKKPVIPIGLFPPPPTQDIAGHEATLRWLDRQAQGSVVYAAFGSEAKLTSAQLQTIALGLEASGLPFLWAFRPPTDAAPGQGTGGLPEGFKERVNGRGLVCRGWVPQPRLLAHESVGGFLTHAGWNSIAEGLSRGVTMVLLPLMFDQGLNARLLVDKKIGIEVERDEDDGTFAPKDIADALRTAMAENQDGTRVKELAEVFGNDEANDQCLRDFLRYLLEYIRQHQG

SEQ ID NO: 34904 - protein, 460 aa, Zea mays subsp. mays
MLPWLAFGHILPFTELAKRIARQGHRVTLFSTPRNTRRLIRIPPELAGHIRVVDIALPRVERLPEDCEASIDLPSDDLRPYLRVAYDAAFADKLSAILQEPRPERPDWVLIDYAAYWAPAAAARHGVPCAFLSLFGAATLSFYGPPEGLMGRGKYARTKPEDLTVVPDYVPFPTTVAHRGFEARELFKPGLVPDDSGVSEGHRFGVSIGESQIVGIRSRTELESEWLQVLGKLYKKPVIPIGLFPPPPTQDIAGHEATLRWLDRQAQGSVVYAAFGSEAKLTSAQLQTIALGLEASGLPFLWAFRPPTDAAPGQGTGGLPEGFKERVNGRGLVCRGWVPQPRLLAHESVGGFLTHAGWNSIAEGLSRGVTMVLLPLMFDQGLNARLLVDKKIGIEVERDEDDGTFAPKDIADALRTAMAENQDGTRVKELAEVFGNDEANDQCLRDFLRYLLEYIRQHQG

SEQ ID NO: 34905 - DNA, 1825 bp, Zea mays subsp. mays
tagaacatcctaatcgaaaaacagcacgcataggacgaactaccgatgcaagctgcgatcgatcagtcaccgcatctccggttccgcgcaggcatggacgacaagtcctgctacgtggccaccggcctctccctggcggccatcctcctcgtcctccaccgcctcgtggtccgtgctggcggcaaggggaacgccgccgcgcggcggtgtgcctcctagccctcccgccgtcccgttcctcgggcacctccacctgctagcatcggagtgccctctccactcgtcgctggcccgcctcgcggcgcgccacggccccgtgctctcgctgcgcctgggctcccgcgccgccgtggtggtgtcgtcgccggagtgcgccgaggcgtgcttcacggagcacgacgtggcgttcgccaaccgccccagactgacctcgcaggcgctggcctccttcggcggcgccgcgctggccgtgtctagctacgggccctactggcgcaacctccggcgcgtggccgccgtgcgcctcctctccacgcaccgcgtggcgtgcatgtgccccgtcatctcggccgaggtgcgcgccatgctgcgccgggtggggcgtgcggccgaggcggcggggcgcgtccagctcaaggccagcctgttcgagctctccctcagcgtgctcatggagaccatcgcgcagaccaagacgtcgcgcgccgacgacgcggacgatgccgtgtcgcccgaggcgcacgagttccggcggatcgtcgacgagatcctgccctacctcggcgccaccaacctgtgggactacctgccgctcctgcggcggttcgacgtgctcggggtgaggaacaagatcagggacgttgtcggcaggagggacgccttcctgcagcggctcatcgacgcggagcggcggaggctggacggcgacggtgacggcgacgacggcgagaagaagagcatgatcgccgtgatgctctcgctgcagaagtcggagccggacgtgtacacggacaccatgatcatggcactgtgcgggaacttgtttacagccggaacggagacgacgtcgtccacgatagaatgggccatgtcgctgttgctgaaccacccggacgcgctgaagaaggccgaggcagagatcgaggcggccgtgggcgcgtcccgcctcatcaccatggacgacgtgcccgggctgggctacctgcagtgcgtcatcaacgagacgctgcgcctgtacccggtggccccgctgctgctgccgcacgagtcggcggcggactgcacggtcggcggctacgacgtgccccgcggcacgctgctgttcgtcaacgcgtacgccatccacagggacccggcggcgtgggaggagccggacgagttcaggccggagcggttccgcgacggcaaggccgagggccggctgatgctgccgttcgggatgggacggcgcaggtgccccggggagacactcgcgctgcggaccgccggcctcgtgctcgccacgctcatccagtgcttccactgggacaggatcgatggcgctgagatcgacatgaccgagagcggcgggctcaccatgccccgggccgtcccgttggaggccacctgcaagcctcgcgaagccatgcgtcatgttcttcagcagctctgattggtctatgtgctaaacattctcatccctattctctcttgtgtgtgtggcagtacgaacagcacgtgctagctaaataagctgcgagcaatagctatccgcgtaacagtatggttcgtcaaagttgttatctttcaaaagttatctagtactataaacaaattgttcgtgtcg

SEQ ID NO: 34906 - protein, 366 aa, Zea mays subsp. mays
MCPVISAEVRAMLRRVGRAAEAAGRVQLKASLFELSLSVLMETIAQTKTSRADDADDAVSPEAHEFRRIVDEILPYLGATNLWDYLPLLRRFDVLGVRNKIRDVVGRRDAFLQRLIDAERRRLDGDGDGDDGEKKSMIAVMLSLQKSEPDVYTDTMIMALCGNLFTAGTETTSSTIEWAMSLLLNHPDALKKAEAEIEAAVGASRLITMDDVPGLGYLQCVINETLRLYPVAPLLLPHESAADCTVGGYDVPRGTLLFVNAYAIHRDPAAWEEPDEFRPERFRDGKAEGRLMLPFGMGRRRCPGETLALRTAGLVLATLIQCFHWDRIDGAEIDMTESGGLTMPRAVPLEATCKPREAMRHVLQQL

SEQ ID NO: 34907 - protein, 355 aa, Zea mays subsp. mays
MLRRVGRAAEAAGRVQLKASLFELSLSVLMETIAQTKTSRADDADDAVSPEAHEFRRIVDEILPYLGATNLWDYLPLLRRFDVLGVRNKIRDVVGRRDAFLQRLIDAERRRLDGDGDGDDGEKKSMIAVMLSLQKSEPDVYTDTMIMALCGNLFTAGTETTSSTIEWAMSLLLNHPDALKKAEAEIEAAVGASRLITMDDVPGLGYLQCVINETLRLYPVAPLLLPHESAADCTVGGYDVPRGTLLFVNAYAIHRDPAAWEEPDEFRPERFRDGKAEGRLMLPFGMGRRRCPGETLALRTAGLVLATLIQCFHWDRIDGAEIDMTESGGLTMPRAVPLEATCKPREAMRHVLQQL

SEQ ID NO: 34908 - protein, 326 aa, Zea mays subsp. mays
METIAQTKTSRADDADDAVSPEAHEFRRIVDEILPYLGATNLWDYLPLLRRFDVLGVRNKIRDVVGRRDAFLQRLIDAERRRLDGDGDGDDGEKKSMIAVMLSLQKSEPDVYTDTMIMALCGNLFTAGTETTSSTIEWAMSLLLNHPDALKKAEAEIEAAVGASRLITMDDVPGLGYLQCVINETLRLYPVAPLLLPHESAADCTVGGYDVPRGTLLFVNAYAIHRDPAAWEEPDEFRPERFRDGKAEGRLMLPFGMGRRRCPGETLALRTAGLVLATLIQCFHWDRIDGAEIDMTESGGLTMPRAVPLEATCKPREAMRHVLQQL

SEQ ID NO: 34909 - DNA, 1161 bp, Zea mays subsp. mays
aacataaataacacacaaagttgtccgatcaaagcttgcgcgtttacaatgtctggacgatcaaggcacttcacaatgtccacccttctcgctacgagcttcttctttgtactcctatgcagctcgctacaagtacgtggcgtgaactacacgttcgtgaaggacgcggcgctggcgcccagcgtgtcgtactacgactacatcatcgtgggcggcggcacggccggggtgcccgctggccgccacgctgtcggagcgcttccgcgtgctgctgctggagcgcggcgcctcgccctacgacgacgaccgcatcggggacatggcccgcttcgcggacacgctgtcggacacctccccgggctcgcccgcgcagcgcttcgtgtcggaggacggcgtcatcaactcgcgcccgcgggtgctgggcggcggcagctgcatcaacgccggcttctacacgcgggccagcgacgactacgtgcggggcgtcgggtgggacctgggcgccgccggggcggcgtaccggtgggtggaggacgtggtggcgttccagccggagctggggccctggcaggccgcgctgcagggcggcctgctcgaggccggggtcgcgccggacaacggcttcacgttcgaccacttcgacgggaccaaggtcggcgggtccatcttcgacgccgacggccggcggcacacggccgcggacctgctgaggtacgcgcgcgccgaggggctcgacgtgctgctacgggccagagtggccaagatcctgttcttcaatgtcagagggaggagatcagggaggcggacagcggcacgcggcgtggtgttccacgactccgaggggcggatgcacaaggcgttcctcagcgcgggccgccggaacgagatcatcctctcggcaggcgccatgggcagcccgcagctactgatgctcagcggcgtcggcccagccgaccacctccgctcgttcggcatccccctcgtgcgcgaccaccccgcggtcggacaggggatgtccgacaaccccatgaacgccatctacgtgccgtcgccttccccggtcgaggtctcgctcatacaggtcgtcggcatcacccaggtcgggagctacatcgagggcgccagcggctccaactggggcgtccgccactctgcctccgg

SEQ ID NO: 34910 - protein, 387 aa, Zea mays subsp. mays
NINNTQSCPIKACAFTMSGRSRHFTMSTLLATSFFFVLLCSSLQVRGVNYTFVKDAALAPSVSYYDYIIVGGGTAGVPAGRHAVGALPRAAAGARRLALRRRPHRGHGPLRGHAVGHLPGLARAALRVGGRRHQLAPAGAGRRQLHQRRLLHAGQRRLRAGRRVGPGRRRGGVPVGGGRGGVPAGAGALAGRAAGRPARGRGRAGQRLHVRPLRRDQGRRVHLRRRRPAAHGRGPAEVRARRGARRAATGQSGQDPVLQCQREEIREADSGTRRGVPRLRGADAQGVPQRGPPERDHPLGRRHGQPAATDAQRRRPSRPPPLVRHPPRARPPRGRTGDVRQPHERHLRAVAFPGRGLAHTGRRHHPGRELHRGRQRLQLGRPPLCLR

SEQ ID NO: 34911 - protein, 371 aa, Zea mays subsp. mays
MSGRSRHFTMSTLLATSFFFVLLCSSLQVRGVNYTFVKDAALAPSVSYYDYIIVGGGTAGVPAGRHAVGALPRAAAGARRLALRRRPHRGHGPLRGHAVGHLPGLARAALRVGGRRHQLAPAGAGRRQLHQRRLLHAGQRRLRAGRRVGPGRRRGGVPVGGGRGGVPAGAGALAGRAAGRPARGRGRAGQRLHVRPLRRDQGRRVHLRRRRPAAHGRGPAEVRARRGARRAATGQSGQDPVLQCQREEIREADSGTRRGVPRLRGADAQGVPQRGPPERDHPLGRRHGQPAATDAQRRRPSRPPPLVRHPPRARPPRGRTGDVRQPHERHLRAVAFPGRGLAHTGRRHHPGRELHRGRQRLQLGRPPLCLR

SEQ ID NO: 34912 - protein, 362 aa, Zea mays subsp. mays
MSTLLATSFFFVLLCSSLQVRGVNYTFVKDAALAPSVSYYDYIIVGGGTAGVPAGRHAVGALPRAAAGARRLALRRRPHRGHGPLRGHAVGHLPGLARAALRVGGRRHQLAPAGAGRRQLHQRRLLHAGQRRLRAGRRVGPGRRRGGVPVGGGRGGVPAGAGALAGRAAGRPARGRGRAGQRLHVRPLRRDQGRRVHLRRRRPAAHGRGPAEVRARRGARRAATGQSGQDPVLQCQREEIREADSGTRRGVPRLRGADAQGVPQRGPPERDHPLGRRHGQPAATDAQRRRPSRPPPLVRHPPRARPPRGRTGDVRQPHERHLRAVAFPGRGLAHTGRRHHPGRELHRGRQRLQLGRPPLCLR

SEQ ID NO: 34913 - protein, 280 aa, Zea mays subsp. mays
MARFADTLSDTSPGSPAQRFVSEDGVINSRPRVLGGGSCINAGFYTRASDDYVRGVGWDLGAAGAAYRWVEDVVAFQPELGPWQAALQGGLLEAGVAPDNGFTFDHFDGTKVGGSIFDADGRRHTAADLLRYARAEGLDVLLRARVAKILFFNVRGRRSGRRTAARGVVFHDSEGRMHKAFLSAGRRNEIILSAGAMGSPQLLMLSGVGPADHLRSFGIPLVRDHPAVGQGMSDNPMNAIYVPSPSPVEVSLIQVVGITQVGSYIEGASGSNWGVRHSAS

SEQ ID NO: 34914 - DNA, 1109 bp, Zea mays subsp. mays
ccctgaaactcaactagccgttggagtcaaggcagcggcggcggacgcggctgaaagctgtcgaccgtgccgcgccgcccccaacggtcactggagaggaagaagaaactcgcatttccatccccagccaattgtcgctcgcctttaaatcctgcgccccaccgccgcctccactcccaccgctctctatcctcccactcaaatactcctcaatagccatcgaggagaagggagatagaaacgggagggaacacccactcgatcgtcagccatgacccggggagagaaccaggagtcgcaaaccggtaacgtccccgccgcatccgcggcgacgccggggccgaagccggcgtcggcgggggccgggaaaggcgcggagggccagtctgtggtgcggcggctgcagtcggagctgatggcgctgatgatgggcggcgacccgggcgtgtcggcgtttcccgagggggacaacatgctccactgggtgggcaccatcgacggctccgccgggacggcctacgagggcacctcctaccgcctcgcgttggccttcaccaccgagtacccgtacaagccgcccaaggtgcggttcgacaccccctgcttccaccctaacgtcgacgtgcacggcaacatctgcctggacatcctccaggacaagtggtcctccgcctacgacgtgcgcaccatcctcctctccatccagagcctgcttggagagccgaacaacgactcgccgctcaacactcaggcggcagcgctctgggcgaaccaggaagagtttaggaagatggtggagaaaatctacaagcccgccgcatagaggaggatgacagcgccggtgaagatgtgggttcttcaagcactcatttcgcttggattgatcgacaagagataatatttggattgtttgggttcccagtctggtgctgtagcaggaaggaatatttgggtcgcctagagcgtggcgattctgtaattttgttctttgagttctgaaatgttcagatattcatttttccatgaatcgttttcgtcccttcgcctcttcctaactgcaatattggtatgaaattatgaatatggactggacaagactgattgaattc

SEQ ID NO: 34915 - protein, 183 aa, Zea mays subsp. mays
MTRGENQESQTGNVPAASAATPGPKPASAGAGKGAEGQSVVRRLQSELMALMMGGDPGVSAFPEGDNMLHWVGTIDGSAGTAYEGTSYRLALAFTTEYPYKPPKVRFDTPCFHPNVDVHGNICLDILQDKWSSAYDVRTILLSIQSLLGEPNNDSPLNTQAAALWANQEEFRKMVEKIYKPAA

SEQ ID NO: 34916 - protein, 135 aa, Zea mays subsp. mays
MALMMGGDPGVSAFPEGDNMLHWVGTIDGSAGTAYEGTSYRLALAFTTEYPYKPPKVRFDTPCFHPNVDVHGNICLDILQDKWSSAYDVRTILLSIQSLLGEPNNDSPLNTQAAALWANQEEFRKMVEKIYKPAA

SEQ ID NO: 34917 - protein, 132 aa, Zea mays subsp. mays
MMGGDPGVSAFPEGDNMLHWVGTIDGSAGTAYEGTSYRLALAFTTEYPYKPPKVRFDTPCFHPNVDVHGNICLDILQDKWSSAYDVRTILLSIQSLLGEPNNDSPLNTQAAALWANQEEFRKMVEKIYKPAA

SEQ ID NO: 34918 - DNA, 1143 bp, Zea mays subsp. mays
  misc_feature (81)..(81): n is a, c, g, or t
agaacgagtggcgatggcagtactgcacttgcaggtggcggcggtggcggtgctgctgatggcgacggggctgcgcgcgcntgcgggtgggcttctacgacagctcgtgcccagcggcggagatcatcgtgcagcaggaggtgagcagggcggtggcggccaacccgggcctcgccgccggcctgctccgcctccacttccacgactgtttcgttgggggctgcgacgcgtccgtgctcatcgactccaccaagggcaacaccgcggagaaggacgccgagcccaacctcagcctgcggggcttcgaggtcgtcgatcgcatcaaggcgcgcgtcgagcaggcctgcttcggcgtcgtctcctgcgcggacatactcgcgttcgcggcccagggacagcgtcgcactcgccggtgggaacgcgtaccaggtgccggcggggcggcgggacgggtccgtgtcgcgcgcgtcggacaccaacggcaacctgccgccgccgacggccaacgtcgcgcagctcacgcagatcttcggcaccaagggcctgacgcagaaggagatggtcatcctgtcgggcgcgcacaccatcggctcctcgcactgcagctccttcagcggccggctgtcggggtcggccacgacggcgggcgggcaggacccgaccatggacccggcgtacgtggcgcagctggcgcggcagtgcccgcagggcggcagacccgctcgtgcccatggactacgtctcccccaacgccttcgacgagggcttctacaagggcgtcatggccaaccggggcctgctgtcctcggaccaggcgctgctcagcgacaagaacaccgccgtgcaggtcgtcacctacgccaacgacccgggccacctttccaggccgacttcgccgccgccatggtcaagatggggctccgtcggcgtgctcaccggcaccagcgggcaaggtcagggccaactgcagagtcgcctgatccatcgtcatcactcgtgtggagttgtagattcgttatattgatttggaccggacgacgtcgacaggatggccgtagcatagcatagcctgcttgcggcaattgtatgtatgcctgtacttgcgcgtgtatgggtttcgctgtgcaaattttcgttggcttc

SEQ ID NO: 34919 - protein, 181 aa, Zea mays subsp. mays
  misc_feature (27)..(27): Xaa can be any naturally occurring amino acid
ERVAMAVLHLQVAAVAVLLMATGLRAXAGGLLRQLVPSGGDHRAAGGEQGGGGQPGPRRRPAPPPLPRLFRWGLRRVRAHRLHQGQHRGEGRRAQPQPAGLRGRRSHQGARRAGLLRRRLLRGHTRVRGPGTASHSPVGTRTRCRRGGGTGPCRARRTPTATCRRRRPTSRSSRRSSAPRA

SEQ ID NO: 34920 - protein, 177 aa, Zea mays subsp. mays
  misc_feature (23)..(23): Xaa can be any naturally occurring amino acid
MAVLHLQVAAVAVLLMATGLRAXAGGLLRQLVPSGGDHRAAGGEQGGGGQPGPRRRPAPPPLPRLFRWGLRRVRAHRLHQGQHRGEGRRAQPQPAGLRGRRSHQGARRAGLLRRRLLRGHTRVRGPGTASHSPVGTRTRCRRGGGTGPCRARRTPTATCRRRRPTSRSSRRSSAPRA

SEQ ID NO: 34921 - protein, 169 aa, Zea mays subsp. mays
MVILSGAHTIGSSHCSSFSGRLSGSATTAGGQDPTMDPAYVAQLARQCPQGGRPARAHGLRLPQRLRRGLLQGRHGQPGPAVLGPGAAQRQEHRRAGRHLRQRPGPPFQADFAAAMVKMGLRRRAHRHQRARSGPTAESPDPSSSLVWSCRFVILIWTGRRRQDGRSIA

SEQ ID NO: 34922 - DNA, 906 bp, Zea mays subsp. mays
acaccactgccctcttccactctcatcgcgccggtaaagcccccacgcgcggcgcgcctcccgtccctcctcccctcccgtcctcctcccctctccgcgtcccggctccatgggcggcctgtcggtgatcgcgccccccgcgcgtgacacaggcgtcgccgcagcaccgccgcgcgcgccgggcgttcctcgtctccaactacctcatcctgggttgcgcgtccgggtgcgggcttcctcacgctgtcgctccgcctgggtcccctccgtgggacggcttccttcctcatcctgctccacgcgctcaccgtggccgccgccgtggccgggtgcgccgtcatcgcggcgcccgacccgccgcgcggccgctgctacaccgcccacatgtccgccaccgccgtcgtgtccatcctgcagggcgccgccgccgtgctcgccttctcccgcacctcggagttcctcgccggcgggctccggtcgtacgtccgcgaggaggacggcgccgtcatcctcccgcatggtcggcgggctcggcgtcggcatcttctgcctcgagtgggtcgcgctcgcgctggccttcgtgctcaggtactacgcctacgtcgacagggagtgcggcggcaacccgctgcgccgcagcgccaaggtcggcggcgaggacggcgccggcacctggccctggcccttccaggtctgaggactggtcacattggccttcgctgcgggaaggtggaactgagaatcgtgtgctcttggaagggaaatcaagcgtcgagtgttgttctactggtagaactgtgtgggtgagaatgggagtggatgctgtgattcgtttattggtttattatgtggctcatatttgtaaggctgttatatctatataattatttatgtgtcttgcgatcg

SEQ ID NO: 34923 - protein, 195 aa, Zea mays subsp. mays
MGGLSVIAPPARDTGVAAAPPRAPGVPRLQLPHPGLRVRVRASSRCRSAWVPSVGRLPSSSCSTRSPWPPPWPGAPSSRRPTRRAAAATPPTCPPPPSCPSCRAPPPCSPSPAPRSSSPAGSGRTSARRTAPSSSRMVGGLGVGIFCLEWVALALAFVLRYYAYVDRECGGNPLRRSAKVGGEDGAGTWPWPFQV

SEQ ID NO: 34924 - protein, 140 aa, Zea mays subsp. mays
MSATAVVSILQGAAAVLAFSRTSEFLAGGLRSYVREEDGAVILPHGRRARRRHLLPRVGRARAGLRAQVLRLRRQGVRRQPAAPQRQGRRRGRRRHLALALPGLRTGHIGLRCGKVELRIVCSWKGNQASSVVLLVELCG

SEQ ID NO: 34925 - DNA, 1442 bp, Zea mays subsp. mays
  misc_feature (83)..(83): n is a, c, g, or t
ctgaaagaaacaaaaaaataaataaaacaaagataaatcattggggttgggggattgcaattgcaagttgccgctgtgcggtngcggtcgctcccctcccgactccggccagcagcagcgacggtgccggcagtcgattactccacgcggcggcggcggcggcggtagcccatcctttcccgttttctgatccagtcctactgataccgggcacagcacgcctgctcttgtgatatactctattaaggtacggcgtgaagatgagggttttcttggtctcgtgaaggcgacgctcttgtctgctaactacatattatagaatgttttgcttgaggggctactggtcgccttcactagctccagtgagggaagggcctgttcgacatcatataaagttcaattctatagtggtttgtggtgccaggggtccgagaccgagatatccccgtgtgtggaaaactcgtaagaaaattgggactatttccaagtcgcagaagcttgtcgaatgtattaaaggtctgtctaatgtaaaggaggaagtttatggggcacttgactcatttgttgcatgggaactggagtttcccttgatagtggtaaagaaggcactgaagaaacttgaggacgaaaaggaatggaaacgaataattcaggtcattaaatggatgttcaacaaaggtcaagggaagacaatgggaagctattacaccttgttgaatgctttgatcgaggatggacggattgaggaagcagaagagttatttggaatggtgttctcacgatatatggagggtttgcctcgtacatttttcatgagaatgatttctttctattacaacgtggaagcgtatgataatatgtttgagatttttgctgatatggaggaactaggcgtaagacctgatggttctattatcaggatgctaggtgatgtatttcagaagttagagatgatggacaaatatgaaaagttaaaaaagaaataccgaccaccgaaatgggaatatcgacacatcaaaggcaagcgcataagaatcagagtttatcctgacagtaatcctgaagtggcggcaaaaggagatcccgacactgatgagctcgaagagttagaaagcacacaccttaataacgaattggatgaagcagcaagctcaggcctcgacaggagtgtattggacgatgcagcttctggagaccttgaatatatgtagatcagagcttccatttggtacttttttgtgcctgcttaaccaaagcggtctagagcaaattgaactggtaacatactctctgttttgatttgacatcctagaacccgtgtcgtcatactgccaagacatgggcatcgctatcttctgaagtatttttactacctagaatgagtagaaactacatgccaggctttgccatcagcagtcttttcaagacatcatggtggtttc

SEQ ID NO: 34926 - protein, 296 aa, Zea mays subsp. mays
MFCLRGYWSPSLAPVREGPVRHHIKFNSIVVCGARGPRPRYPRVWKTRKKIGTISKSQKLVECIKGLSNVKEEVYGALDSFVAWELEFPLIVVKKALKKLEDEKEWKRIIQVIKWMFNKGQGKTMGSYYTLLNALIEDGRIEEAEELFGMVFSRYMEGLPRTFFMRMISFYYNVEAYDNMFEIFADMEELGVRPDGSIIRMLGDVFQKLEMMDKYEKLKKKYRPPKWEYRHIKGKRIRIRVYPDSNPEVAAKGDPDTDELEELESTHLNNELDEAASSGLDRSVLDDAASGDLEYM

SEQ ID NO: 34927 - protein, 181 aa, Zea mays subsp. mays
MFNKGQGKTMGSYYTLLNALIEDGRIEEAEELFGMVFSRYMEGLPRTFFMRMISFYYNVEAYDNMFEIFADMEELGVRPDGSIIRMLGDVFQKLEMMDKYEKLKKKYRPPKWEYRHIKGKRIRIRVYPDSNPEVAAKGDPDTDELEELESTHLNNELDEAASSGLDRSVLDDAASGDLEYM

SEQ ID NO: 34928 - protein, 172 aa, Zea mays subsp. mays
MGSYYTLLNALIEDGRIEEAEELFGMVFSRYMEGLPRTFFMRMISFYYNVEAYDNMFEIFADMEELGVRPDGSIIRMLGDVFQKLEMMDKYEKLKKKYRPPKWEYRHIKGKRIRIRVYPDSNPEVAAKGDPDTDELEELESTHLNNELDEAASSGLDRSVLDDAASGDLEYM

SEQ ID NO: 34929 - DNA, 1434 bp, Zea mays subsp. mays
agcaaagtggtcggcgtacgtacgtgaacacacatcgatctccatatatctgtctagttagctagctagctagtagacatatggtgggctcgcagtacgacgacgacgatgacaatgttgttggtcgccggaagacgaggtggtacgctgtgaccggcggccgggggttcatggcgaggcacctggtggcggccttgctccgctccggtgagtggcgtgtccgggtcactgacctcgcccctactctagccctcggccctggagagacggatgggattctgagcgacgctctccgtgatggccgtgctgtctatgcctcggttgatgtctgcaaccttgaccagcttgccaaagcctttgaaggggtagacgttgttttccacacagctgctgcggatcctagcaagaacaacctgcaacttcactacaaggttaacgtggagggaacgaagaatgtaattgacgcttgcaagatatgcaaggtgaagaggctgatccacaccagtactagtgctgttgtgtttgacggcgttcatggactttttgacgcggatgagtcattgccatacccagataagtttcctgatgcatatgcacaaacaaaggcagaagcagagaagttagtcatcaaggccaatggcattaatggccttctaacttgttgcatacgtcctggtagtatgtttgacccaggtgacattatgatgccaactttggatcgttatggatggtcaaatgttactattggtgaagggaagaactatgatgattttgtgtatgttgaaaatgttgtccatggtcatctttgtgctgataagactctttctactattgagggtgcaagaaccagtggaggaaaagcatactttataactaatatggagccaatgaatatgtgggacttcttatatcttgttcaagaagaacttggatacaaaagaatattcaagataagggtacctataattgttatcaagccagcaagctatttgatagagtgggcatatagggctgttttctctcattttggaacttgccagcctcaaatactaacaccggcgaggattagatatgtaacgctcaatagaacatttagttgcaataaagctgttgaagaacttggctacaaacctattgtgacactacaggatggtttgaagaaagcggtgaaattgtatattcaactgagggataaagatttacctaaaatatagtgaagttgtgatgtaaaacaactctaccaaaatatcataagccaaagccagaggtgatcgatgatgtcccatcaataaaaatcgggtttgtgttttttattataataaaaaaagctatgtaaaggactacgaaatattgttgtaatgctctaatggtcaggcatgtatttatgttatctgggacgtagacgatattatatttgcttttatgttcctctct

SEQ ID NO: 34930 - protein, 377 aa, Zea mays subsp. mays
MVGSQYDDDDDNVVGRRKTRWYAVTGGRGFMARHLVAALLRSGEWRVRVTDLAPTLALGPGETDGILSDALRDGRAVYASVDVCNLDQLAKAFEGVDVVFHTAAADPSKNNLQLHYKVNVEGTKNVIDACKICKVKRLIHTSTSAVVFDGVHGLFDADESLPYPDKFPDAYAQTKAEAEKLVIKANGINGLLTCCIRPGSMFDPGDIMMPTLDRYGWSNVTIGEGKNYDDFVYVENVVHGHLCADKTLSTIEGARTSGGKAYFITNMEPMNMWDFLYLVQEELGYKRIFKIRVPIIVIKPASYLIEWAYRAVFSHFGTCQPQILTPARIRYVTLNRTFSCNKAVEELGYKPIVTLQDGLKKAVKLYIQLRDKDLPKI

SEQ ID NO: 34931 - protein, 347 aa, Zea mays subsp. mays
MARHLVAALLRSGEWRVRVTDLAPTLALGPGETDGILSDALRDGRAVYASVDVCNLDQLAKAFEGVDVVFHTAAADPSKNNLQLHYKVNVEGTKNVIDACKICKVKRLIHTSTSAVVFDGVHGLFDADESLPYPDKFPDAYAQTKAEAEKLVIKANGINGLLTCCIRPGSMFDPGDIMMPTLDRYGWSNVTIGEGKNYDDFVYVENVVHGHLCADKTLSTIEGARTSGGKAYFITNMEPMNMWDFLYLVQEELGYKRIFKIRVPIIVIKPASYLIEWAYRAVFSHFGTCQPQILTPARIRYVTLNRTFSCNKAVEELGYKPIVTLQDGLKKAVKLYIQLRDKDLPKI

SEQ ID NO: 34932 - DNA, 1507 bp, Zea mays subsp. mays
atactactacatgcaaaatggcgacggcggcgtggcgtccgtcctgttcaagccgtctgcgttctcgctccccctgctgcccagcatcaccggggcccagagcccgcgacccgtgcaacccgagcagaagcacgccggaccgggacaggcgcccccgccgccgccgccgccggtgctggccgatcgctgccacgggcggtacgtctacatgtacgaccttccgccgcgcttcaacgacgacctcgtccgcaactgcaggaacctccagatctggatggatatgtgcccgtacgtggtcaactgcggcatgggcccggcgatgggcgacgaggggggcgccttctccggccgcggctggttcgccaccgaccagttctcgctcgacatcatcttccacggccggatgaagcgctacgactgcctcaccgacgacccgtcccgcgccgccgccgtgtacgtgccgttctacgccagcctggacggcgggcggtaccagtggaacagcacgtcgatccgggacgcgctcggcctggacctcgtcgactggctggcgcggcggccggagtggcgcgccatgggcggccgcgaccacttcttggtggctggccggaccgcggtggacttcggccggaactccgacctcgaccacgagtggggcaccaagctcctcaacttcccggccgtcgagaacatgacggcgctggtcctggagaccaaccagtggaagcccaagaagcggcgcaatttggctgtcccctacccgacgtacttccaccccgagtcggcggccgacgtggtcgcctggcaggagaaggtgcgcaacaccgagcgcaactggctcttctccttcgccggcgggccgcgcccagggaacaccgagaccgtccgcgccgagatcatccagcagtgcgccgcgtccacccgctgcagactcttccactgcggcgccggccccgacgccggcgccaactgcagctcgccgggcggcgtcatgcgcgtgttcgagagctcggtcttctgcctccagccgcgcggggacacgctgacgcggcggtccacgttcgacaccatgctggccggctgcatccccgtcttcttccacccggggctcagcgtacaggcagtacacggcccacctccccaaggacccaaacagctactctgtgctcatcatgcacaccgatgtcaccggccggaacgtcagcatcgaggacacgctgagcaacatctcgctggcggcggtgaaagccatgcgcgaggaggtcatccggctcatcccgaggttggtttacgctgacccgaggtcgaggcgtgtcgatttcactgatgcgttcgacttggcgacggaggcggtcatcaaccgcgtggccaagcggcggcgcggcgtggtcggtagacagaactagtaacgccgccacgatgcgatcttgtgaccaacacagcccgtgagttttagtttgttgctgattgcaatttcacatagctatggcaaaattcattgatttcc

SEQ ID NO: 34933 - protein, 431 aa, Zea mays subsp. mays
YYYMQNGDGGVASVLFKPSAFSLPLLPSITGAQSPRPVQPEQKHAGPGQAPPPPPPPVLADRCHGRYVYMYDLPPRFNDDLVRNCRNLQIWMDMCPYVVNCGMGPAMGDEGGAFSGRGWFATDQFSLDIIFHGRMKRYDCLTDDPSRAAAVYVPFYASLDGGRYQWNSTSIRDALGLDLVDWLARRPEWRAMGGRDHFLVAGRTAVDFGRNSDLDHEWGTKLLNFPAVENMTALVLETNQWKPKKRRNLAVPYPTYFHPESAADVVAWQEKVRNTERNWLFSFAGGPRPGNTETVRAEIIQQCAASTRCRLFHCGAGPDAGANCSSPGGVMRVFESSVFCLQPRGDTLTRRSTFDTMLAGCIPVFFHPGLSVQAVHGPPPQGPKQLLCAHHAHRCHRPERQHRGHAEQHLAGGGESHARGGHPAHPEVGLR

SEQ ID NO: 34934 - protein, 428 aa, Zea mays subsp. mays
MQNGDGGVASVLFKPSAFSLPLLPSITGAQSPRPVQPEQKHAGPGQAPPPPPPPVLADRCHGRYVYMYDLPPRFNDDLVRNCRNLQIWMDMCPYVVNCGMGPAMGDEGGAFSGRGWFATDQFSLDIIFHGRMKRYDCLTDDPSRAAAVYVPFYASLDGGRYQWNSTSIRDALGLDLVDWLARRPEWRAMGGRDHFLVAGRTAVDFGRNSDLDHEWGTKLLNFPAVENMTALVLETNQWKPKKRRNLAVPYPTYFHPESAADVVAWQEKVRNTERNWLFSFAGGPRPGNTETVRAEIIQQCAASTRCRLFHCGAGPDAGANCSSPGGVMRVFESSVFCLQPRGDTLTRRSTFDTMLAGCIPVFFHPGLSVQAVHGPPPQGPKQLLCAHHAHRCHRPERQHRGHAEQHLAGGGESHARGGHPAHPEVGLR

SEQ ID NO: 34935 - protein, 406 aa, Zea mays subsp. mays
ILLHAKWRRRRGVRPVQAVCVLAPPAAQHHRGPEPATRATRAEARRTGTGAPAAAAAGAGRSLPRAVRLHVRPSAALQRRPRPQLQEPPDLDGYVPVRGQLRHGPGDGRRGGRLLRPRLVRHRPVLARHHLPRPDEALRLPHRRPVPRRRRVRAVLRQPGRRAVPVEQHVDPGRARPGPRRLAGAAAGVARHGRPRPLLGGWPDRGGLRPELRPRPRVGHQAPQLPGRREHDGAGPGDQPVEAQEAAQFGCPLPDVLPPRVGGRRGRLAGEGAQHRAQLALLLRRRAAPREHRDRPRRDHPAVRRVHPLQTLPLRRRPRRRRQLQLAGRRHARVRELGLLPPAARGHADAAVHVRHHAGRLHPRLLPPGAQRTGSTRPTSPRTQTATLCSSCTPMSPAGTSASRTR

SEQ ID NO: 34936 - DNA, 1485 bp, Zea mays subsp. mays
attttttttatatggagattatttctggtttatataaaaggacacaagtggggacgaagtagcagaagacttcccttcgtctgcttcccagagacccagccatggcgatctcccagatctcacgcatattcctggccatccttctcctggccgccgccttcgccgccgccccagctgcgcttgcggacggcgacgacgtggtggcccttaccgaatccacgttcgagaaggaggtcggaaaggaccgcggcgccctcgtcgagttctacgccccctggtgtggtcactgcaagaagcttgctcctgagtatgaaagacttggtgcaagttttaagaaagctaaatctgtcttgattgctaaggttgattgtgatgagcacaagagtttgtgcagcaagtatggagtttccgggtatccaacaatccaatggttcccgaaaggatccttggagcccaaaaagtatgaaggacaacgcactgcagaagcccttgctgaatttctcaatactgaaggaggcacaaatgtaaagctggcaaccattccttcaagtgttgtggttctcaccccagagacctttgactcaattgtccttgatgaaaccaaagatgtccttgttgagttctatgccccatggtgtggtcactgcaagagtcttgcaccgacgtatgagaaggtggcttctgttttcaagttggatgaaggagttgttattgctaaccttgacgctgacaaacacagggatttggctgagaagtatggagttagtggatttcctaccttgaagtttttcccaaagggaaacaaagctggtgaagattatgatggtgatagggacttggttgactttgtcaagttcattaacgagaagagtggtaccagccgtgacacaaagggtcaactaacctcagaggctggccgtatagcaagtctggatgtcctggctaaggagttccttggtgcttccggtgacaagcgaaaggaagtcctctccagtatggaggaggaggcagataagctcagtggttctgctgcaaggcatggaaaggtctatgtaaccatcgcaaagaagattctagagaaaggcaacgagtatactgagaaggaaaccaagaggcttgatcgcatgttggagaagtccatcagcccctccaaggccgacgagtttatcatcaagaagaacgttctttcgactttctcatcctaaggcatctgctagctccattttcacgtttcagatataggcgacaaaaactgcaggattataagtgtgataatgagagttaaatggtgctagaactaattttggggctttccctcgaggatatgtaatactcgtacgtcttgcgaattagttcttttccttgtgcttctggatttattccgtagcaccatagtttattttttggtttgacatggaggacattgtgactacagaactgagttttactatccaataacactgctcacttgatggggcttatgcc

SEQ ID NO: 34937 - protein, 367 aa, Zea mays subsp. mays
MAISQISRIFLAILLLAAAFAAAPAALADGDDVVALTESTFEKEVGKDRGALVEFYAPWCGHCKKLAPEYERLGASFKKAKSVLIAKVDCDEHKSLCSKYGVSGYPTIQWFPKGSLEPKKYEGQRTAEALAEFLNTEGGTNVKLATIPSSVVVLTPETFDSIVLDETKDVLVEFYAPWCGHCKSLAPTYEKVASVFKLDEGVVIANLDADKHRDLAEKYGVSGFPTLKFFPKGNKAGEDYDGDRDLVDFVKFINEKSGTSRDTKGQLTSEAGRIASLDVLAKEFLGASGDKRKEVLSSMEEEADKLSGSAARHGKVYVTIAKKILEKGNEYTEKETKRLDRMLEKSISPSKADEFIIKKNVLSTFSS

SEQ ID NO: 34938 - DNA, 1403 bp, Zea mays subsp. mays
gtcttccctgatcccttcgctccccgaagcaaaagcgcagagcgcatcagcgcagagtaggacagccatggcgacggcggcggcgcagtcccatccggcatcgatggacgcgcgccggtgggacgagtcatcgtaccgccgcggcatcctccgtgcccgcgacctctcgtcccgcaccctcttccgtgccgtcttctttgaccacagcgacgacccggataccgacatcctactcgccgccgcctccagcgacggctccctcgcttccttctccctttcatcctgcatctccgcatgttccgctacctcccaggtggagaccgccgccactctggtagatcctgtctgcatcgtgcaagcgcacagcggacctgcctacgacgtcaggttttaccccgatcaacagcagccgctgctcttcagctgcggggacgatggccgcatcaagggttggaggtggcacgagatgcagagctgccttgtcccgctctccctgcaaggggatcatctggaaccagcacttgacttggtcaaccctcagcacgagggtccttggggtgctcgatctccagtacctgaaaacaatgccattgcaattaataaacaggatggatccattttggcagcagcgggtgatgcatgtgcttactgctgggatgtggagaccagtaaatgtaaaatcacattcaaggggcatgctgattatttgcacagcattgcagttcgtgagtcaaaccgccaggttgtaacaggatcagaggatgggacagctcgtatctgggattgcagaagtgggaagtgcactcgggttatacagccaggaaagagcaaggcatttgaaagctcatgggtcagctgtgttgctattgatccaagtgaaagttggctggcttgtggcacgtctagcggtatatcagtttggagtcttctctcaaatgagtgcatctttaatttggactgtcatgctcctgttcaagatttattgtttgacaagaatcatattttagcagttggcgctgaacctctgctctcccgtctcacaataaacgggacagtcctttcacaagtaaaatgtgcccctcagtcggcgttttctgtctccatccactcaactgggatagcagctgttgctggatacggaggtctggtggatgtgatctcagaagttgggagccatctgtgcacattcggtagccggggcctagacaagtaaatgacccatgagcattccttgcgaacagcgcgcggagaatgcgagggctgtatctctttgcactgcagttgcacaagtttcatggaacgttgtcgctgacaatgctctactgaacaaagatagctagacggtaaaaaaaaacatttgatactagttcgagctaaacaaagttctgctctgacatctcttc

SEQ ID NO: 34939 - protein, 403 aa, Zea mays subsp. mays
SSLIPSLPEAKAQSASAQSRTAMATAAAQSHPASMDARRWDESSYRRGILRARDLSSRTLFRAVFFDHSDDPDTDILLAAASSDGSLASFSLSSCISACSATSQVETAATLVDPVCIVQAHSGPAYDVRFYPDQQQPLLFSCGDDGRIKGWRWHEMQSCLVPLSLQGDHLEPALDLVNPQHEGPWGARSPVPENNAIAINKQDGSILAAAGDACAYCWDVETSKCKITFKGHADYLHSIAVRESNRQVVTGSEDGTARIWDCRSGKCTRVIQPGKSKAFESSWVSCVAIDPSESWLACGTSSGISVWSLLSNECIFNLDCHAPVQDLLFDKNHILAVGAEPLLSRLTINGTVLSQVKCAPQSAFSVSIHSTGIAAVAGYGGLVDVISEVGSHLCTFGSRGLDK

SEQ ID NO: 34940 - protein, 381 aa, Zea mays subsp. mays
MATAAAQSHPASMDARRWDESSYRRGILRARDLSSRTLFRAVFFDHSDDPDTDILLAAASSDGSLASFSLSSCISACSATSQVETAATLVDPVCIVQAHSGPAYDVRFYPDQQQPLLFSCGDDGRIKGWRWHEMQSCLVPLSLQGDHLEPALDLVNPQHEGPWGARSPVPENNAIAINKQDGSILAAAGDACAYCWDVETSKCKITFKGHADYLHSIAVRESNRQVVTGSEDGTARIWDCRSGKCTRVIQPGKSKAFESSWVSCVAIDPSESWLACGTSSGISVWSLLSNECIFNLDCHAPVQDLLFDKNHILAVGAEPLLSRLTINGTVLSQVKCAPQSAFSVSIHSTGIAAVAGYGGLVDVISEVGSHLCTFGSRGLDK

SEQ ID NO: 34941 - protein, 369 aa, Zea mays subsp. mays
MDARRWDESSYRRGILRARDLSSRTLFRAVFFDHSDDPDTDILLAAASSDGSLASFSLSSCISACSATSQVETAATLVDPVCIVQAHSGPAYDVRFYPDQQQPLLFSCGDDGRIKGWRWHEMQSCLVPLSLQGDHLEPALDLVNPQHEGPWGARSPVPENNAIAINKQDGSILAAAGDACAYCWDVETSKCKITFKGHADYLHSIAVRESNRQVVTGSEDGTARIWDCRSGKCTRVIQPGKSKAFESSWVSCVAIDPSESWLACGTSSGISVWSLLSNECIFNLDCHAPVQDLLFDKNHILAVGAEPLLSRLTINGTVLSQVKCAPQSAFSVSIHSTGIAAVAGYGGLVDVISEVGSHLCTFGSRGLDK

SEQ ID NO: 34942 - DNA, 1516 bp, Zea mays subsp. mays
  misc_feature (142)..(142): n is a, c, g, or t
aaacgccgcctactccgcgctcctccaaaccaaactgaaccctatcctagcacgagtgcacgacggtggcagcaggagatggtggggacggcggaaggcggcgcggagagggcggtgcggcggtgggtggacgccgccggcngggcgcctgcgtcctggacggcgggctggccacggagctcgaggccaacggcgccgacctcaacgacccgctctggagcgccaagtgcctcctctcctccccgcacctcatccgcaaggtccatatggactacctagaagccggggcgaacattataatcacagcatcgtatcaggctactatccaagggtttgaatcaaagggcttttcaaaagaacaaagtgaaaacttgttaacaaagagtgttcagattgcactggaagcccgtgagatgttcttgaaggaacatttggagaaatccactcctatacagcatcctattctggttgcagcagctctagggagttatggggcttatcttgctgatggctctgagtacagtggggattatggtgaagctggtacgaaagagttcctgaaggactttcatcggcggaggcttcaggttcttgctgaagcaggcccggatttgattgcttttgaaacgatccccaacaaattggaagctcaggcatatgttgaactccttgaggaatgtaacattaatatcccttcatggctttccttcaactcaaaagatggagtgcatgttgtgagtggtgattcgttaattgaatgcgctactattgctgacaagtgtgcaaaggttggtgcagtcgggataaattgcacacctccaagatttattcatggactgatactctccattcgaaaggtcacagacaagcctattctgatatatcccaacagtggtgaaagatatgatggtgaaaaaaaggagtgggtggaatccactggtgtgtcagatggtgattttgtttcgtacgtaaatgaatggtgcaaagatggggctgcgcttatcgggggctgctgcaggacaactccaaacactatcagggccatacacagaactcttaaccaaggctgccacaagcatcagttacctgtaggctgtagcatagatctgtgctccactcctaatgctctcctcccagcagtaccttgagctgtatccccgagattccttaaccagcgcgaaccaatatactgttgcgtgttctcctgcaaatgagatgttctgcacctatgtttgtaatgttgtatttctgggtttttaagctatccaacttggagatacaaccggtgaggaagcagcaacaataggtagttctacttctgagtgaggaaaaacaacttgcggctgagttaatgaagcttagtagctaccaccgttgtatgacagttgctcagagatgttatcttcattaagtgcttatattaccgctagttccctgtgaaatttgttaaaccattatatgtaagttttgtttgacaagactgcatctcctgaaactaagatcttagtttcctgct

SEQ ID NO: 34943 - protein, 293 aa, Zea mays subsp. mays
MDYLEAGANIIITASYQATIQGFESKGFSKEQSENLLTKSVQIALEAREMFLKEHLEKSTPIQHPILVAAALGSYGAYLADGSEYSGDYGEAGTKEFLKDFHRRRLQVLAEAGPDLIAFETIPNKLEAQAYVELLEECNINIPSWLSFNSKDGVHVVSGDSLIECATIADKCAKVGAVGINCTPPRFIHGLILSIRKVTDKPILIYPNSGERYDGEKKEWVESTGVSDGDFVSYVNEWCKDGAALIGGCCRTTPNTIRAIHRTLNQGCHKHQLPVGCSIDLCSTPNALLPAVP

SEQ ID NO: 34944 - protein, 244 aa, Zea mays subsp. mays
MFLKEHLEKSTPIQHPILVAAALGSYGAYLADGSEYSGDYGEAGTKEFLKDFHRRRLQVLAEAGPDLIAFETIPNKLEAQAYVELLEECNINIPSWLSFNSKDGVHVVSGDSLIECATIADKCAKVGAVGINCTPPRFIHGLILSIRKVTDKPILIYPNSGERYDGEKKEWVESTGVSDGDFVSYVNEWCKDGAALIGGCCRTTPNTIRAIHRTLNQGCHKHQLPVGCSIDLCSTPNALLPAVP

SEQ ID NO: 34945 - DNA, 1041 bp, Zea mays subsp. mays
taatcgaaaaaggtctctagtctccactccgctgtcgctccggcccagcagctcgaccaccaccgctccgcaggcaggaagccgccaaggacatggacgacgctcaggagcctccctcccctccctccccctcgcagtcatcctcctcctcttcctcgtcgtcctccgtggccccgaacccgaagaagcgggcgcgcaaggacggcagccggcacccgacgtaccgcggcgtgcgcatgcggagctggggcaagtgggtgtcggagatcagggagccccgcaagaagtctcgcatctggctgggcaccttcgccaccgcggagatggcggcgcgcgcgcacgacgtggccgcgctcgccatcaagggcgcgcgcgacgcgcacctcaacttcccgggcctcgcgcacctgctcccgcgcccggccaccgcggcgcccaaggacgtgcaggccgcggccgcgctcgccgcggccgccgacttccctctgccgccgtcccccggcggcgccaatgccaagagccccgagagcagcagctccggctccgcctccgcctccgcctccgacgacgccagcgccgcctcgccggcggcgccgcaggacgccgagcccaacccggacgacgcgctgttcgacctcccggacctgcttctggacctgagatgctgcgggccgtcgtcgtgggccgtcgacgacgacgtggccggcggcggcgcgttccggatcatcgaggagccgctgctgtgggagtactgaactgatcaatgccaccgcgccagtcctgtccttgagcggttggcagtgatcagcgagttcatgcatcggtagctgttgagtgttagatcgaccggacggacacatgtaaatgcagctcctttccgctcctctgtttcgtgctctggattactctgctgtttcttctctttatgccagatttaggtgccgcgcttgtataaagttagttcctttttttccctccttctcttgcttgatttggaagacaagaatatgtataaccataagaagcatcttatcttgtgcc

SEQ ID NO: 34946 - protein, 252 aa, Zea mays subsp. mays
NRKRSLVSTPLSLRPSSSTTTAPQAGSRQGHGRRSGASLPSLPLAVILLLFLVVLRGPEPEEAGAQGRQPAPDVPRRAHAELGQVGVGDQGAPQEVSHLAGHLRHRGDGGARARRGRARHQGRARRAPQLPGPRAPAPAPGHRGAQGRAGRGRARRGRRLPSAAVPRRRQCQEPREQQLRLRLRLRLRRRQRRLAGGAAGRRAQPGRRAVRPPGPASGPEMLRAVVVGRRRRRGRRRRVPDHRGAAAVGVLN

SEQ ID NO: 34947 - protein, 220 aa, Zea mays subsp. mays
MDDAQEPPSPPSPSQSSSSSSSSSSVAPNPKKRARKDGSRHPTYRGVRMRSWGKWVSEIREPRKKSRIWLGTFATAEMAARAHDVAALAIKGARDAHLNFPGLAHLLPRPATAAPKDVQAAAALAAAADFPLPPSPGGANAKSPESSSSGSASASASDDASAASPAAPQDAEPNPDDALFDLPDLLLDLRCCGPSSWAVDDDVAGGGAFRIIEEPLLWEY

SEQ ID NO: 34948 - protein, 172 aa, Zea mays subsp. mays
MRSWGKWVSEIREPRKKSRIWLGTFATAEMAARAHDVAALAIKGARDAHLNFPGLAHLLPRPATAAPKDVQAAAALAAAADFPLPPSPGGANAKSPESSSSGSASASASDDASAASPAAPQDAEPNPDDALFDLPDLLLDLRCCGPSSWAVDDDVAGGGAFRIIEEPLLWEY

SEQ ID NO: 34949 - DNA, 1449 bp, Zea mays subsp. mays
agagcgaagagagcgaaatccagagcacacggcgtcgcatttggaacgctcctgctcgtcgcacgtacgaagcccacgcgtccgcgcacgtgccagagccgagcccccgcgccggcgccccgccggagaggatgacgcggcggtgctcgcactgcagcaacaacggccacaactcgcgtacctgccccgtccgctccgccggcggcggcagcggcggcggcggggtgaggctgttcggcgtgcggctcacgacggcgccggcgccggcggtgatgaagaagagcgccagcatgagctgcattgtgtcctcgctcggcggcggtttcggcggctcgtcgccgccggtggaaggagtgggtgctggcagaggaggggaagacagtgggaccggctacgtgtccgatgatcccgcgcacgcatcctgctcgacgaatggccgcgccgagcgcaagaaaggtacaccttggactgaagaagagcatagaatgtttctgatgggtctgcagaagcttggtaagggagactggcgcgggatatccagaaactttgttgtttccaggaccccgactcaagttgcaagccatgctcaaaagtactttgttagacagacaaactcatcgagacggaagaggcggtcaagcttatttgacatggtcccagaaatgccaatggatgagtccccagctgctgtggaacaatttactctccaaaatactcaagatgaagatacaagttcaaatcacgtgccaaccttacatcttggacaacggaaggaaacagagtttgctaagcagctacaaacttttcagccagggcaccatgagaaatctgaatacgcagaaccttcattgctgctaccagatttggagatgaaccccagtgtaccattcaagaccataactgatccaacaggaccagcattctacccatcattggtccctgttccactaactctttggcctccaagtgtttcccacgtggaggaagcagccagaacccatgaaatcctaaaaccaactcctttgaatggtaagggggtggttaaggcagatgatgttgttggtatgtctaagctcagcatcgacgaagctagctctggctccatggaacccactgctctttcccttgagcttattggatccacagatacaaggcaatcagcttttcatgtgagtccaccgatgaatagacctgaactaagcaagagaaacagcagtccaattcatgcagtttgaggaagcatgaaacatgcccgctgggtcaagtcttacaaattatactgatggtctcaatacctcagaacgtgaccatgtactttgtaacgactttttagttatcctgtttccagcttatgttccttgccatcgacaaatgtagagagatacatgtgtcaatggaagtagcatgccattagtttcaaaaaaaaaaaaaaaaaaaaaaaaataaaaa

SEQ ID NO: 34950 - protein, 410 aa, Zea mays subsp. mays
SEESEIQSTRRRIWNAPARRTYEAHASAHVPEPSPRAGAPPERMTRRCSHCSNNGHNSRTCPVRSAGGGSGGGGVRLFGVRLTTAPAPAVMKKSASMSCIVSSLGGGFGGSSPPVEGVGAGRGGEDSGTGYVSDDPAHASCSTNGRAERKKGTPWTEEEHRMFLMGLQKLGKGDWRGISRNFVVSRTPTQVASHAQKYFVRQTNSSRRKRRSSLFDMVPEMPMDESPAAVEQFTLQNTQDEDTSSNHVPTLHLGQRKETEFAKQLQTFQPGHHEKSEYAEPSLLLPDLEMNPSVPFKTITDPTGPAFYPSLVPVPLTLWPPSVSHVEEAARTHEILKPTPLNGKGVVKADDVVGMSKLSIDEASSGSMEPTALSLELIGSTDTRQSAFHVSPPMNRPELSKRNSSPIHAV

SEQ ID NO: 34951 - protein, 367 aa, Zea mays subsp. mays
MTRRCSHCSNNGHNSRTCPVRSAGGGSGGGGVRLFGVRLTTAPAPAVMKKSASMSCIVSSLGGGFGGSSPPVEGVGAGRGGEDSGTGYVSDDPAHASCSTNGRAERKKGTPWTEEEHRMFLMGLQKLGKGDWRGISRNFVVSRTPTQVASHAQKYFVRQTNSSRRKRRSSLFDMVPEMPMDESPAAVEQFTLQNTQDEDTSSNHVPTLHLGQRKETEFAKQLQTFQPGHHEKSEYAEPSLLLPDLEMNPSVPFKTITDPTGPAFYPSLVPVPLTLWPPSVSHVEEAARTHEILKPTPLNGKGVVKADDVVGMSKLSIDEASSGSMEPTALSLELIGSTDTRQSAFHVSPPMNRPELSKRNSSPIHAV

SEQ ID NO: 34952 - protein, 320 aa, Zea mays subsp. mays
MKKSASMSCIVSSLGGGFGGSSPPVEGVGAGRGGEDSGTGYVSDDPAHASCSTNGRAERKKGTPWTEEEHRMFLMGLQKLGKGDWRGISRNFVVSRTPTQVASHAQKYFVRQTNSSRRKRRSSLFDMVPEMPMDESPAAVEQFTLQNTQDEDTSSNHVPTLHLGQRKETEFAKQLQTFQPGHHEKSEYAEPSLLLPDLEMNPSVPFKTITDPTGPAFYPSLVPVPLTLWPPSVSHVEEAARTHEILKPTPLNGKGVVKADDVVGMSKLSIDEASSGSMEPTALSLELIGSTDTRQSAFHVSPPMNRPELSKRNSSPIHAV

SEQ ID NO: 34953 - DNA, 1329 bp, Zea mays subsp. mays
aaggaaagaaacagaatacaaattccatctcaaactcggtgttgtcgttcccttggcggctattcctggtgctcacgtcgcggcgatcttggtcgacggccacgggctgtgacagaacggtgggcgaggaggatgttggggtagacggcagcgtggatggcagaacgtgggcgagggttggtggggatggagggatagatgtggaagttgactctgaacttttaataaagtagtatagatttggagttggatgagtgctgcggatagcctgatcctgatgcaacacgacgaaagcaggatcaccggagtggcacagatctcacgtcctgtgtcgtcgtctgtctcgcgcgtgttcaagaactgagcccagcgggattggaaaaaagattcctcgcccaaccctaccccagtccccaggcgatctcgcatggccaccggaccgcggtctctccacgccctcctcggcggcggtgcagttgccgacttgctgctgtggcgacggaggaacgcctcggcggcagctgtggtgggcgccaccacggtctggttcgttttcgagcgcgcggggtacagcttcccctccgtcctctccaacgccctgctcctcctcgtcgccatcctcttcttctgggccaagtctgcgtcgctgctcaacaggcctcttccacctcttcctaatcttgaggtctcagatgcgattgttgaaaaagctgcaaatcatgctcttgtatggatcaataggctgctggctgttggtcatgacatcgccatcaagagagataggaaagtttttataaaggtgatactgattttgtgggtggtttcattcattggaatgctcttcaattttcttacgcttatttacattggtgtaatgctttctctgttggttccaccactctatgagaagtaccaggaccaggttgatgagaaggttggtgtagcgtacagtgtactatcaaggcacatagataccatcattaccagggctgggcaatcagccaagcagaagaagactgagtaaaagaaacgttttgctgtattgtggaacatccctggttgtccaatgaagttgacagtgggcctttcatctttgaccctctattccactaaaatgaaccctcgatatgctgatatgaggttttgatgtgcattacgggaaatgaggtggcttgtgtatttcctttttggacatggggtttactatgggtgcatatcgcactcgggatgatatcgagaaattgcgactcgtacatgcaattatgcaggctgcttgctctgttagtcatatgatctttccgtcagtgattttaagttttaggctgctcc

SEQ ID NO: 34954 - protein, 198 aa, Zea mays subsp. mays; identical to SEQ ID NO: 33158

SEQ ID NO: 34955 - DNA, 1681 bp, Zea mays subsp. mays
atctattgaactccactcacagacagcagccacagcggagcttaattagcaatcattgactatgggtgcgctcttgccatggctggcatggttgctcgtctccctcgtcggcgtctacctcctcggccatctcgtgcaggcccgtcgtcgtcgtggtctaccgccgggaccccacccgctgcccatcatcggcagcctccacctgctcggtaaccaaccgcaccgctccctcgccaggctcgccaagacccacggcccgctcgtgtcgctccgcctgggctcggtgaccacggtggtcgcctcctccccggccgccgcccgggagatcctgcagcggcacgacgccgccttcagcaacaggtccgtgccggacgccccgggcgcccacgccaggaactccacggtgtggctgcccaacgcgccgcgctggcgcgcgctgcggaagatcatgggcacgcagctgttcgcgccgcacaggctggacgcgctccagcacctccggcgcgacaaggcgcgggagctcgtggaccacgtgcggcggctggcgcgcaggggcgagcccgtgaacgtcggccgcgtcgccttcaccaccagcctcaacctcgtctcgcgcaccatcttctcccgcgacctggccagcctcgaggacgacggcgcgtccaggaagttccaggaggtggtgacggacatcatggaggccgtgggcagccccaacgtctccgacttcttcccggcgctcgccgttgccgacctgcagggctgccggcgtcggctggcgcggctgttcgcgcggctgcaccggatcttcgacgaagagatcgacgcgaggctgcgtggccgcgacgctggcgagcccaagaagaacgacttcctcgacctgctgctggacgccgcagaggacgatgacaacacggccggcctggatcgcgacacgctccgttcactcttcacggacttgttttctgctgggagtgacacaagctccagctcagtggaatgggcaatggtggagctgcttcgaagccccggcttcaatggctaaagcatgcgacgagcttgcaacagtcatcggcccaagaaaagacatcgaggaatctgatattgggcggctgccctacctccaagccgtggtgaaagagaccttcaggctgcatcctgctgccccgctgttgctaccgcggcgtgcccaggccgacgtgaagatgatgggctacgtgattcccgaaggttctcgagtgttcgtaaacgtatgggcgatgggtcgagacgaggagacgtggcctgagcctgagaagtttttgcccgagaggttcctggggaagaagacgcagcaggcggttgatctcaggggcggggacttcgatctcatcccgttcggtggaggacgccggatctgccctgggatgccgctggcgatcaggatggtgcatctgctgcttgcgtcgctcttgaatcagtttgcatggaggcttccggctgagctagagaggaatggagttgacatggctgagaatttcggcatcacgttgaccaaggccgtgcctctttgtgctatagccacagagatctgagtcggcaagctattctattctagttaactattctatggtcgatatatgtacatgtatccttatcaaatttcgaaataaacttagcaaataggttagaggatgtttggttc

SEQ ID NO: 34956 - protein, 326 aa, Zea mays subsp. mays
MGALLPWLAWLLVSLVGVYLLGHLVQARRRRGLPPGPHPLPIIGSLHLLGNQPHRSLARLAKTHGPLVSLRLGSVTTVVASSPAAAREILQRHDAAFSNRSVPDAPGAHARNSTVWLPNAPRWRALRKIMGTQLFAPHRLDALQHLRRDKARELVDHVRRLARRGEPVNVGRVAFTTSLNLVSRTIFSRDLASLEDDGASRKFQEVVTDIMEAVGSPNVSDFFPALAVADLQGCRRRLARLFARLHRIFDEEIDARLRGRDAGEPKKNDFLDLLLDAAEDDDNTAGLDRDTLRSLFTDLFSAGSDTSSSSVEWAMVELLRSPGFNG

SEQ ID NO: 34957 - protein, 222 aa, Zea mays subsp. mays
MTTRPAWIATRSVHSSRTCFLLGVTQAPAQWNGQWWSCFEAPASMAKACDELATVIGPRKDIEESDIGRLPYLQAVVKETFRLHPAAPLLLPRRAQADVKMMGYVIPEGSRVFVNVWAMGRDEETWPEPEKFLPERFLGKKTQQAVDLRGGDFDLIPFGGGRRICPGMPLAIRMVHLLLASLLNQFAWRLPAELERNGVDMAENFGITLTKAVPLCAIATEI

SEQ ID NO: 34958 - protein, 197 aa, Zea mays subsp. mays
MGTQLFAPHRLDALQHLRRDKARELVDHVRRLARRGEPVNVGRVAFTTSLNLVSRTIFSRDLASLEDDGASRKFQEVVTDIMEAVGSPNVSDFFPALAVADLQGCRRRLARLFARLHRIFDEEIDARLRGRDAGEPKKNDFLDLLLDAAEDDDNTAGLDRDTLRSLFTDLFSAGSDTSSSSVEWAMVELLRSPGFNG

SEQ ID NO: 34959 - DNA, 1059 bp, Zea mays subsp. mays
cctctcttccacccactgcaaccccaaatctctccttcctcacacacgcgaagctgagagaccaaagaagaagaagaaggaggagctgctagcgtggaagtgcccaaggcgagagagagacaagctagctaggacggccgcgacaggctagccagccagctgctagctcctgcggacgaggcgatggctggcgccgacgtcgacgtcgggacggagctccggctcggcctgccgggaggaggcgccgcggcggccaagaaggacaccatcgacctcaagctgaagctgcctaccgctggcatggaggaggctgctgccgccgccaggccggagccggcagccgataaggccaagaggcccgccgaggcgccggccgccgatgccgagaagccacctgcacccaaggcacaggccgtgggctggccaccagtccgatcgtaccgcaggaacgccatgacgaccgtcgtccaggccgtgaggagcaagaaggaagaggaacctgagaagcagcaacagcccgctgccgccaacgccttcgtgaaggtcagcatggacggcgcgccctacctgcgcaaggtggacctgaagacgtacagcagctacaaggacctctccgctgcactcaagaagatgttcggcaccttcaccgcatctgggaacagcatgaacgaggggagattggttgatccggccggcgatgctgatgatgtggtcactacttacgaagacaaggatggtgactggatgctggtcggcgacgtcccgtgggagatgtttgtcgagtcatgcaagcgtctgaggatcatgaagagttctgaagccataggtcttgcaccaagaacgaaggacaagtgcaagaacaagagctgaagaagatgcagtgttaaagatgttgcacattgtatcaaaagaatggtccccttgcagtgcgctgccgttttttttcctactagaaatataacgcgttttaattactactagttggagggagacctgtcttgttcaactcgttcatggaccagaagcaataatctatccgtgtgtagctggattggtgtt

SEQ ID NO: 34960 - protein, 228 aa, Zea mays subsp. mays
MAGADVDVGTELRLGLPGGGAAAAKKDTIDLKLKLPTAGMEEAAAAARPEPAADKAKRPAEAPAADAEKPPAPKAQAVGWPPVRSYRRNAMTTVVQAVRSKKEEEPEKQQQPAAANAFVKVSMDGAPYLRKVDLKTYSSYKDLSAALKKMFGTFTASGNSMNEGRLVDPAGDADDVVTTYEDKDGDWMLVGDVPWEMFVESCKRLRIMKSSEAIGLAPRTKDKCKNKS

SEQ ID NO: 34961 - protein, 189 aa, Zea mays subsp. mays
MEEAAAAARPEPAADKAKRPAEAPAADAEKPPAPKAQAVGWPPVRSYRRNAMTTVVQAVRSKKEEEPEKQQQPAAANAFVKVSMDGAPYLRKVDLKTYSSYKDLSAALKKMFGTFTASGNSMNEGRLVDPAGDADDVVTTYEDKDGDWMLVGDVPWEMFVESCKRLRIMKSSEAIGLAPRTKDKCKNKS

SEQ ID NO: 34962 - protein, 138 aa, Zea mays subsp. mays
MTTVVQAVRSKKEEEPEKQQQPAAANAFVKVSMDGAPYLRKVDLKTYSSYKDLSAALKKMFGTFTASGNSMNEGRLVDPAGDADDVVTTYEDKDGDWMLVGDVPWEMFVESCKRLRIMKSSEAIGLAPRTKDKCKNKS

SEQ ID NO: 34963 - DNA, 1878 bp, Zea mays subsp. mays
aaaaaaatttctccgcttcccgccctcctccccaatggcctcgccggcgaagcgtgccaagccctcgtcgccggccaagccctcgagtgcgccgcctcaggaagaggcgaccgccgccgccgtctctgaggaccccgtcgtcctcctccgccgccgctgggaacttgcatccgtgctccactttctcagggtgtttgagccggtgatcgaggcgaacttggggctatccgcggatgagatcgagatggcactcgcgtccaacaaccgcgacctagctcgcatacacattgcccttttgaagggaatacctccagttaacaaacatctaaaagatgaggatggatggattattgtaactgccaaaaagctaacagattggtggtcatgggttgctgaaggagcaaaccctttcagaaataattcagggtatgagtaagtctactattgcatttgtctatgatgattttattgctacaacctatttgtgtttgcaggaaagaagtcgagatgtataagcagcaagatccaatcaagcggttgttgatactaaaagcgctttgtgaagtccgatctgagcaagatgatgcggtgtggtatgttaatgatgaaatgaagaaaggaactcatatttccaactttcggaaagataaactaggcagtggcagtagtgggactacatactggtatgacggtgattcaactattggccatagattatacacagaagacgtaacagttaattttaagcagaattggatgggaaagggtggccgtttgacaaaaccagttaccaatatttactgggaaacagttgcaactaaccttgacgagtttcttgaaatatcagagaagttatccagaaagggtcgtgctgaatctgctatggcagattatcttaagacagaagttattccagctgtggagaattttcaaaagaaaaaagagagacgtttaaaacggcaggagaagaaggacaaacttttagcttttactaacacattccaaacccgttcattgcgggaacgtcggcctgtcagctacaattactctgattttgatcgttccatcgaggaggcgataagagctgtacagaaaggaaaagtacaaggttcacgtgaggcaggaacagaagagaaacctgcttcacatcatggagacaaaggtgccgatggaagatctgacatcaattctgaaaacaacaaaaatggaggacaggaggatgccaagtacctaagtgacctgagctctggcgacgaggaagacggagactacagtgacaggggtgtcagctccgctgacagtgacggagacaataatgcttctgattcctacaagagcgacatggaggaggatgtgtctgtaccacgcaagagaacccgtcttgctgcccgtttggcaaatgacaagcctcggccagggcttcgtcggagccaacgaaacatgaaaaatgatgaagagactatgcatccaggtcaggtcacccctccaccaatggcgaagaaaacactgaggcaaaggcccacgcctgtctccaagcagcctgacattactttctcgagctctgaagatgatcttgcacaggttgttgcagactcagaggatgaaagtgggtaatttggcagaggttcggttgcatgcggtattttggattttgccttgtgggagccggttgaattccacaggtttagcgtcactaggcacttccatagtttcacttctaccggctggccggaatcagacgcagacagcaccggcgttttccccatatccgatgagttatcttcacgaagtcattggggcacctctgacccacttgtatggtgatttgtacatatgcatttagacactatactgcgatgcatcaccactggagcaccc

SEQ ID NO: 34964 - protein, 385 aa, Zea mays subsp. mays
MMILLLQPICVCRKEVEMYKQQDPIKRLLILKALCEVRSEQDDAVWYVNDEMKKGTHISNFRKDKLGSGSSGTTYWYDGDSTIGHRLYTEDVTVNFKQNWMGKGGRLTKPVTNIYWETVATNLDEFLEISEKLSRKGRAESAMADYLKTEVIPAVENFQKKKERRLKRQEKKDKLLAFTNTFQTRSLRERRPVSYNYSDFDRSIEEAIRAVQKGKVQGSREAGTEEKPASHHGDKGADGRSDINSENNKNGGQEDAKYLSDLSSGDEEDGDYSDRGVSSADSDGDNNASDSYKSDMEEDVSVPRKRTRLAARLANDKPRPGLRRSQRNMKNDEETMHPGQVTPPPMAKKTLRQRPTPVSKQPDITFSSSEDDLAQVVADSEDESG

SEQ ID NO: 34965 - protein, 384 aa, Zea mays subsp. mays
MILLLQPICVCRKEVEMYKQQDPIKRLLILKALCEVRSEQDDAVWYVNDEMKKGTHISNFRKDKLGSGSSGTTYWYDGDSTIGHRLYTEDVTVNFKQNWMGKGGRLTKPVTNIYWETVATNLDEFLEISEKLSRKGRAESAMADYLKTEVIPAVENFQKKKERRLKRQEKKDKLLAFTNTFQTRSLRERRPVSYNYSDFDRSIEEAIRAVQKGKVQGSREAGTEEKPASHHGDKGADGRSDINSENNKNGGQEDAKYLSDLSSGDEEDGDYSDRGVSSADSDGDNNASDSYKSDMEEDVSVPRKRTRLAARLANDKPRPGLRRSQRNMKNDEETMHPGQVTPPPMAKKTLRQRPTPVSKQPDITFSSSEDDLAQVVADSEDESG

SEQ ID NO: 34966 - protein, 368 aa, Zea mays subsp. mays
MYKQQDPIKRLLILKALCEVRSEQDDAVWYVNDEMKKGTHISNFRKDKLGSGSSGTTYWYDGDSTIGHRLYTEDVTVNFKQNWMGKGGRLTKPVTNIYWETVATNLDEFLEISEKLSRKGRAESAMADYLKTEVIPAVENFQKKKERRLKRQEKKDKLLAFTNTFQTRSLRERRPVSYNYSDFDRSIEEAIRAVQKGKVQGSREAGTEEKPASHHGDKGADGRSDINSENNKNGGQEDAKYLSDLSSGDEEDGDYSDRGVSSADSDGDNNASDSYKSDMEEDVSVPRKRTRLAARLANDKPRPGLRRSQRNMKNDEETMHPGQVTPPPMAKKTLRQRPTPVSKQPDITFSSSEDDLAQVVADSEDESG

SEQ ID NO: 34967 - DNA, 1695 bp, Zea mays subsp. mays
tcttctgctaaaatagacccaaatctcgcagcaacgaattcgcatttcccccacctccacccccactttcccttccgtccccttctcctcgtcgcgatccaaatccgcggccatggacggcggggggcagcccccggacaccgagatgtcggaggccggcgcgggcggcggagggcagccgccgcagcagccactgccgccggtgggcgggggcgtgatgttggacaacatccaggcgacgctcagccacggcggccgcttcatccagtacaacatcttcggcaacgtgttcgaggtcaccgccaagtacaagccccccgtcctccccatcggcaagggcgcctacggcatcgtctgctcggcgctcaactccgagacggcggagcaggtgggccatcaagaagatcgccaacgccttcgacaacaagatcgatgccaagcgcacgctccgcgagatcaagctgctccgccacatggaccacgagaatattgttgcaataagggatatcatacctcctgcgcagagggctgcattcaatgatgtgtatattgcatatgaattgatggatactgatctgcatcaaattattcgttcaaatcaagctttgtcagaggagcactgtcagtattttctttatcaaattcttcgtggcttgaagtatatacattcagcaaatgttcttcaccgtgacttgaagcctagcaatcttcttttgaatgcaaactgtgacctcaagatatgtgattttgggcttgctcgcaccacctcagaaactgattttatgactgaatatgttgtcacaagatggtatagagcaccagagcttttgttgaactcctcagaatatactgctgccatcgatgtgtggtctgtgggctgtatatttatggaactgatggaccgcaaacccttgtttcctggaagagaccatgtccatcagctacgtcttctaatggagctcattggcacgccaaatgagggtgatcttgattttgtaaatgaaaatgcaagaagatatatccgccaacttcctcgtcaccctagacagtccttacctgaaaaatttccacatgtacaacccttagcaattgacctggtggaaaagatgctgacttttgatcctagacagagaataactgttgaaggcgcacttgcacacccttacttggcatcacttcatgacataagtgatgagccaggctgctcaatgcccttcagctttgacttcgagcagcatgcattgtctgaagaacaaatgaaggatcttatctaccaagaggctcttgcattcaaccctgattatcagtagccaaagttcaatttcagccggtgattggcttcattgacatggagattttttccccacctgatgtcagtgcaaaaagtcaccaactccgattgctagctgtaaataactgccttacctgaagatactccattcctctgattaaaagctggtgacggtgtcattaagggtagaaaagaacgagcttgtgaaggtcaaatttctgcgaagccatggatttctgtgcttacaatatgttgttttcaatcggactttccttcctttttcttggtcaaaaacgtctcgatgttgtctgtgagaggtagttcgtgaacgatggctgcctgaattcagtggtttcatcaaagttaacatttctggtcaacttaagattaagacttcgtggctt

SEQ ID NO: 34968 - protein, 278 aa, Zea mays subsp. mays
MDHENIVAIRDIIPPAQRAAFNDVYIAYELMDTDLHQIIRSNQALSEEHCQYFLYQILRGLKYIHSANVLHRDLKPSNLLLNANCDLKICDFGLARTTSETDFMTEYVVTRWYRAPELLLNSSEYTAAIDVWSVGCIFMELMDRKPLFPGRDHVHQLRLLMELIGTPNEGDLDFVNENARRYIRQLPRHPRQSLPEKFPHVQPLAIDLVEKMLTFDPRQRITVEGALAHPYLASLHDISDEPGCSMPFSFDFEQHALSEEQMKDLIYQEALAFNPDYQ

SEQ ID NO: 34969 - protein, 248 aa, Zea mays subsp. mays
MDTDLHQIIRSNQALSEEHCQYFLYQILRGLKYIHSANVLHRDLKPSNLLLNANCDLKICDFGLARTTSETDFMTEYVVTRWYRAPELLLNSSEYTAAIDVWSVGCIFMELMDRKPLFPGRDHVHQLRLLMELIGTPNEGDLDFVNENARRYIRQLPRHPRQSLPEKFPHVQPLAIDLVEKMLTFDPRQRITVEGALAHPYLASLHDISDEPGCSMPFSFDFEQHALSEEQMKDLIYQEALAFNPDYQ

SEQ ID NO: 34970 - protein, 175 aa, Zea mays subsp. mays
MTEYVVTRWYRAPELLLNSSEYTAAIDVWSVGCIFMELMDRKPLFPGRDHVHQLRLLMELIGTPNEGDLDFVNENARRYIRQLPRHPRQSLPEKFPHVQPLAIDLVEKMLTFDPRQRITVEGALAHPYLASLHDISDEPGCSMPFSFDFEQHALSEEQMKDLIYQEALAFNPDYQ

SEQ ID NO: 34971 - DNA, 848 bp, Zea mays subsp. mays
acacaccccagtttcttccttccttcctcggtctaaagaagcaagcagccatggacggcgacgtcgcgaccggcggcgtgcgggggcaccagcatccacatcacggcgctggacggcatcgtgaacgtgaattcgctcttcaccctggccgccttcctgggcctggcgtggcggccctcctccgacgggccggggctcgccgacggcgccgaccgcacgggcaacccctgcgccgcgggggaccgcgccgagtcggacctcgtctccttccacgtgctcgccttcgcctgcttcctcttctccagcctcgtcgcgctctgcctcaagcagctcgtccgcacctaccccgcgccccaccgccgccgcgccgcctccgcctccgcctccgccgccggcggcccgcaccgcgcggatcaaccgcgcggcgctccgcgtcgggatcctcgcgtccgccgtggggtccgtcgccggatgcggcttcctgatgatggccctcgtcaacgtggtgcaggtgaagctcgggcgactcgggtgcggcgccggcggggccgccgcctgggccgccgtcgtgccgctcgtcaccctcgtcccttccgccatgctcatctacatcggcaccgtcttctacgccttcacacgctagtcggtggcggatcaaggaacactctgaccaaagcacccgtttttcgatcagatctttatctgtgtgatccctcctcagtctttcttgtgtgtgattggtggtgatggcgtgagagaacttccaggggggaacaatgcagctgacttttgtagatttaagatatgtaaaatccatgcgatattatgattgtgttttggagttttgg

SEQ ID NO: 34972 - protein, 160 aa, Zea mays subsp. mays
TPQFLPSFLGLKKQAAMDGDVATGGVRGHQHPHHGAGRHREREFALHPGRLPGPGVAALLRRAGARRRRRPHGQPLRRGGPRRVGPRLLPRARLRLLPLLQPRRALPQAARPHLPRAPPPPRRLRLRLRRRRPAPRGSTARRSASGSSRPPWGPSPDAAS

SEQ ID NO: 34973 - protein, 144 aa, Zea mays subsp. mays
MDGDVATGGVRGHQHPHHGAGRHREREFALHPGRLPGPGVAALLRRAGARRRRRPHGQPLRRGGPRRVGPRLLPRARLRLLPLLQPRRALPQAARPHLPRAPPPPRRLRLRLRRRRPAPRGSTARRSASGSSRPPWGPSPDAAS

SEQ ID NO: 34974 - protein, 91 aa, Zea mays subsp. mays
MRLPDDGPRQRGAGEARATRVRRRRGRRLGRRRAARHPRPFRHAHLHRHRLLRLHTLVGGGSRNTLTKAPVFRSDLYLCDPSSVFLVCDWW

SEQ ID NO: 34975 - DNA, 1371 bp, Zea mays subsp. mays
aaacactagcagaggagaaccgtaggatttggcggacgggcgattgcacgcccgtgacttcgaccccgacgtcccttcccaactcgtccaccgccgccgcccgccgtcgcaaaactcgccagcggccagccatggggtacacgaaggaccagcttctcgcgcacctccagaagcttaagattgatttcacgtgctacgatcacccggttgtgttgacagtggaggaacaggccaaacatgttggccatttaggaggtgctttgagcaaaaatttactcttgaaggacaagaagcatcggttatatgttatttctgcccttgctggcaccaaagttgacatgaaaattctttcccaacgtcttgggttgggaaaaggtggtctacgaatggctcctgaggaaaatcttctagaagtacttcaggtgcccttagggtgtgttactccttttgctttaataaacgagtctgcgagtgctgtttcacttttacttgatcaaggtttcaagtctaaacagagctgctacttccatccactgacaaatgatgtgacaattgctcttagctcaagtaatctggacaagtttctcatctccattgggaagcaaccaacatatgtggacttggaggctgcaccagctgtgggtaaggataaccctcctgatctagcacatttggttccaactggcgtgccaaattcttcagaacaaccagttgagaacacggcacctactaatgttcttaaagagacagaagtgaaggctaaacccaaagttcagagcaagggtgcaaaacatcgagcaaagtagataaacctactatcgataccagtgttgacaaatttgtaaatgacgtgttcgagatcatctccccattgttcttgtctgaggcattgaagaaattggacattaagaaggaagatctttctttgatcttagaaggcctcaggggacgggcagatccagatttgaagagtatagcgatgactctgaagaatgcatcatatacctcagggtttcacgctggttacaaaaccatgcagaatcgtggtctaaacggctgacccacttaggttccagtctctcaattgaatggtttgatacaagaaacaggaatctgattttacatatttgtatgctgttgaatgaagtcaacatattatgtttgatgctctcgttctatctatgacgtattctcttttttttttgtgtgtgtggatttgccttttttctctctgagagatcaatgggaattttcaccataccgtgcagtgttccatagaatatgtatttacaagattctgctactcgctctaccaacatcagagtttcagtgtatcagatacatcacatagaaatgtcttcggtgcgttcc

SEQ ID NO: 34976 - protein, 267 aa, Zea mays subsp. mays
TLAEENRRIWRTGDCTPVTSTPTSLPNSSTAAARRRKTRQRPAMGYTKDQLLAHLQKLKIDFTCYDHPVVLTVEEQAKHVGHLGGALSKNLLLKDKKHRLYVISALAGTKVDMKILSQRLGLGKGGLRMAPEENLLEVLQVPLGCVTPFALINESASAVSLLLDQGFKSKQSCYFHPLTNDVTIALSSSNLDKFLISIGKQPTYVDLEAAPAVGKDNPPDLAHLVPTGVPNSSEQPVENTAPTNVLKETEVKAKPKVQSKGAKHRAK

SEQ ID NO: 34977 - protein, 224 aa, Zea mays subsp. mays
MGYTKDQLLAHLQKLKIDFTCYDHPVVLTVEEQAKHVGHLGGALSKNLLLKDKKHRLYVISALAGTKVDMKILSQRLGLGKGGLRMAPEENLLEVLQVPLGCVTPFALINESASAVSLLLDQGFKSKQSCYFHPLTNDVTIALSSSNLDKFLISIGKQPTYVDLEAAPAVGKDNPPDLAHLVPTGVPNSSEQPVENTAPTNVLKETEVKAKPKVQSKGAKHRAK

SEQ ID NO: 34978 - protein, 155 aa, Zea mays subsp. mays
MKILSQRLGLGKGGLRMAPEENLLEVLQVPLGCVTPFALINESASAVSLLLDQGFKSKQSCYFHPLTNDVTIALSSSNLDKFLISIGKQPTYVDLEAAPAVGKDNPPDLAHLVPTGVPNSSEQPVENTAPTNVLKETEVKAKPKVQSKGAKHRAK

SEQ ID NO: 34979 - DNA, 1636 bp, Zea mays subsp. mays
acacatttttacccctcgcggcggccccaccgaccgccggggcgcagcggcgtcgccgcgggcaacgccgtcacgtcacgtgcatcacgacaatctcctcctccgcctcgtcttcctgccaggccgcgggagcaccagcccagcggcagatcagtcgacgcgggcgattccagggtttagagaggagcggagatggtgaaggtcatccaggggcgcccggccgagatggggttccggatgccggcggagtgggagccgcacgagcagtgctggatgggatggcctgagcgtccagataactggagggagaatgctggtccagctcaagaggtatttgctagaactgcaattgccatttcaaagtttgaacccgtcacgttatgtgcaagtgccaagcagtaccccaaagtccacgagctgatggaacatgaaaccaacatcagggtcgttgagatgagcatgaacgattcctggttccgcgacatgggccccacttttgtcactcataaaggggattcaggaattgcagaacaaacaatagcaggaattgattggcaattcaatgcctggggaggaatctatgacgactggagtcttgacagcgatgttgccaagaaaatagtcgagatcgagaggatccctaggtttccccaaaaaattatccttgagggtggaagcattcatgtagatggagaaggtacatgcattacaacggaagaatgcttgctgaatcctaataggaaccccaacatgaccaaactagagatagagaatgagctgaaggattttcttggagtctcgaaggtcatctggatacctcgtggactttatggtgacgaggatacaaacggccacgttgacaacctgtgctgcttcatcaaacccggtgtgatcctgctgtcgtggaccgacgacgagaaggaccatcagtacgaacggtcggtcgaggcgctgtctgttctctcccagtccgtcgacgcgaaagggcggcagctccaagtggtgaagatccacgtccccgggcctctgtacatgacagaggaagaggcacagggcgttgtttcatcggggcattctgtaccgaggccagcgggcacgaggttggccgcctcgtacgtcaacttctacatcgccaatggggggatcatagcgccttccttcggtgacaggtgggacgaggaggcgtatgcggttctccagaaggcgtttcctgatcacgaggtggtgatggtcgaaggcggacgggagatcgcgctgggaggtgggaacattcactgcatcacgcagcagcagcccgtgcgcccgtcctaggtgaaaccggcgtcgacgcgaagcgatgaagagtatgctgctcctgtgtttaagcaggtgggttggtcccctgtcgttattacgctcaccaatacgcgcgcgaaataagccgtaggtacaagttccttgacaaatactgtatgagtactattaggccttgttggtgggtcggaacgattcctaaccgaattgtttatctaatttatataaattttgattagctggaacgattccgggtgtaatccgatagaaacgaacaaggccttatactatacggcacaaatgccacagtcgtggatcaaaatggtactagttcctgtctacg

SEQ ID NO: 34980 - protein, 372 aa, Zea mays subsp. mays
MVKVIQGRPAEMGFRMPAEWEPHEQCWMGWPERPDNWRENAGPAQEVFARTAIAISKFEPVTLCASAKQYPKVHELMEHETNIRVVEMSMNDSWFRDMGPTFVTHKGDSGIAEQTIAGIDWQFNAWGGIYDDWSLDSDVAKKIVEIERIPRFPQKIILEGGSIHVDGEGTCITTEECLLNPNRNPNMTKLEIENELKDFLGVSKVIWIPRGLYGDEDTNGHVDNLCCFIKPGVILLSWTDDEKDHQYERSVEALSVLSQSVDAKGRQLQVVKIHVPGPLYMTEEEAQGVVSSGHSVPRPAGTRLAASYVNFYIANGGIIAPSFGDRWDEEAYAVLQKAFPDHEVVMVEGGREIALGGGNIHCITQQQPVRPS

SEQ ID NO: 34981 - protein, 361 aa, Zea mays subsp. mays
MGFRMPAEWEPHEQCWMGWPERPDNWRENAGPAQEVFARTAIAISKFEPVTLCASAKQYPKVHELMEHETNIRVVEMSMNDSWFRDMGPTFVTHKGDSGIAEQTIAGIDWQFNAWGGIYDDWSLDSDVAKKIVEIERIPRFPQKIILEGGSIHVDGEGTCITTEECLLNPNRNPNMTKLEIENELKDFLGVSKVIWIPRGLYGDEDTNGHVDNLCCFIKPGVILLSWTDDEKDHQYERSVEALSVLSQSVDAKGRQLQVVKIHVPGPLYMTEEEAQGVVSSGHSVPRPAGTRLAASYVNFYIANGGIIAPSFGDRWDEEAYAVLQKAFPDHEVVMVEGGREIALGGGNIHCITQQQPVRPS

SEQ ID NO: 34982 - protein, 357 aa, Zea mays subsp. mays
MPAEWEPHEQCWMGWPERPDNWRENAGPAQEVFARTAIAISKFEPVTLCASAKQYPKVHELMEHETNIRVVEMSMNDSWFRDMGPTFVTHKGDSGIAEQTIAGIDWQFNAWGGIYDDWSLDSDVAKKIVEIERIPRFPQKIILEGGSIHVDGEGTCITTEECLLNPNRNPNMTKLEIENELKDFLGVSKVIWIPRGLYGDEDTNGHVDNLCCFIKPGVILLSWTDDEKDHQYERSVEALSVLSQSVDAKGRQLQVVKIHVPGPLYMTEEEAQGVVSSGHSVPRPAGTRLAASYVNFYIANGGIIAPSFGDRWDEEAYAVLQKAFPDHEVVMVEGGREIALGGGNIHCITQQQPVRPS

SEQ ID NO: 34983 - DNA, 1492 bp, Zea mays subsp. mays
aaaacctaggaggagcctagtggccacctagggtgaggaaaactgaggacgcgaggcgagagcgagatccaatctgcacccccccaccaaagaaagattcttccccgccggcctcgctctctcaacatccgtctcgctccttccaccctcgctgcgcctcaggcagcgagcgagcatatagcagcccaccacccacatgccgcagggccctcacccgtcgagccaattgagtggcagccagaaaaacccagagcgcgagcagcgagcgcgagcgactcggcagcgagcgcgggctcctgtgtgcagtgtgtctgcgctagagggcgaagggcacggaccgccttcgtcaataattgcggtacgaacggggcaaatccgtcgtttaaagaggtcgctgatagcgcctgctggtggcgagagagaaagcagcagaatcgctgagggatcgtcgatccggagaggcaaaaaagccgagagatcaggcagggcaccatggggcgcgggaaggtggtgctgcagcggatcgagaacaagatcagccggcaggtgaccttcgccaagcgccggaacggcctgctcaagaaggcgtacgagctctccgtcctctgcgacgccgaggtcgcgctcgtcctcttctcccacgccggccgcctctaccagttctcatcctcctccaatctgcttaagactctagagcggtaccagaggtacatctatgcttcagccgatgctgcagtgccatctagcgatcagatgcagaataactatcaagaatatgtgaagctgaaggcacgagttgaggttttacagcactcacaaaggaatcttcttggtgaagatctggccctacttagcccaagtgaacttgaccagcttgagaatcaagtagacaagaccttgaagcaaataagatcaagaaagactcaagtgttacttgatgaactttgtgacttaaagagaaaggaacaaatgctgcaagatgcaaacagggttctgaaaaggaagctgggcgagtttgaggcagaggcggcttctcccccgcagttagcgtggcaaggcgaaggcggcatgttgtcccatgaccctccacagccagaacacttcttccaggctctggagagcaacccatgtctgcaacctacataccatacgatggacatgaaccagcagccagtgccagcgccgggcggctgctatcctgcatggatgtcttagccagtgcttcattccattgccttgagaagtgtcctgaccttcacagatccctacgagctttattactgcttttgcctgcccctttgctgcttgcggtgcttactgaactgtccaaatgaccacatggtcatatataggttattgctgtctttatcttatgttgatcacggcctgctcagctgctttagcgccatgcaaaatggcttgggcgatgcacgcttgaatgggtcgaactgcttatgttttgggagtataaatcacttagcaataagcattg

SEQ ID NO: 34984 - protein, 240 aa, Zea mays subsp. mays
MGRGKVVLQRIENKISRQVTFAKRRNGLLKKAYELSVLCDAEVALVLFSHAGRLYQFSSSSNLLKTLERYQRYIYASADAAVPSSDQMQNNYQEYVKLKARVEVLQHSQRNLLGEDLALLSPSELDQLENQVDKTLKQIRSRKTQVLLDELCDLKRKEQMLQDANRVLKRKLGEFEAEAASPPQLAWQGEGGMLSHDPPQPEHFFQALESNPCLQPTYHTMDMNQQPVPAPGGCYPAWMS

SEQ ID NO: 34985 - protein, 153 aa, Zea mays subsp. mays
MQNNYQEYVKLKARVEVLQHSQRNLLGEDLALLSPSELDQLENQVDKTLKQIRSRKTQVLLDELCDLKRKEQMLQDANRVLKRKLGEFEAEAASPPQLAWQGEGGMLSHDPPQPEHFFQALESNPCLQPTYHTMDMNQQPVPAPGGCYPAWMS

SEQ ID NO: 34986 - DNA, 1232 bp, Zea mays subsp. mays
gatccacatctacaggccacagcacagacggagagcggagcagagctggcatggcggccgcgccgtcgcacccgttcgtctacatcgacgcggcggctctccactcgctgctccccttcgcgtcgctgatcccacacctccgcgcgggcctcgcccatccggagctctccgccggcatccagtgcccgcagcgcgtctccatcccgctccccacggcgccgtccgccgcgctcctcctcatgccctcctggtgcgcgcacccgtcgctgccctacctcgcgcttaaggccgtcacctcgttcccgtccaactcgccgcgcctcccgtccgtccacgccgccgtctccctcttcagcgccgccacgggcgcgccgctcgcgtccatcgacggctccgcgctcacgctgctccgcacggccgccgtctcggcactcgccgcctcgctcctcgcctccccgtcccgcccgccctcggtcctcgcgctcgcgggggccggcgcgctcgcgccctacctcgcggaggcgcacctcgcggcgctcccctccgtctcccgggtcctcgtctggaaccgcaccagggccaagtccgcggcgctcgtcgccaagctccgcgaatcgcacccgggcctcaccgtcgaggaggtgggcagcatggacgaggccgtcgccgcggcggacgtcgttagctgcgccacggggtcgcgggagcccatcgtgcgcggggagctgctgcgccccggcgcgcacctggacctggtggggtcgttcacgccggcgatgcgggagtgcgacgacgacgcgctgcgccgcgggcgggtgttcatcgactttgaggcggcgatggaggaggccggggaattggtgggtgcggtccagcgaggcgtgcttcggagggaggacgtggccgggacgctgtcggagctggccgccgggactgtggtgggcccacggagagacgacgagatcaccgtgtttaagtccgttggcaccgccgtggtggatctcttggcggcgcagctggcctacgagactcaccttgccgcaaccaaggatgcttgagctccaccctccaccagcttctagatgatgcggtgtttctttttcttgtccaatcctccgacgagttacaacagaaataaatggatcagctcaatccttatgcattaataatagattccagtgatagtgtacgtactccacatttgttacttgttagtatatatttgtttatgc

SEQ ID NO: 34987 - protein, 351 aa, Zea mays subsp. mays
STSTGHSTDGERSRAGMAAAPSHPFVYIDAAALHSLLPFASLIPHLRAGLAHPELSAGIQCPQRVSIPLPTAPSAALLLMPSWCAHPSLPYLALKAVTSFPSNSPRLPSVHAAVSLFSAATGAPLASIDGSALTLLRTAAVSALAASLLASPSRPPSVLALAGAGALAPYLAEAHLAALPSVSRVLVWNRTRAKSAALVAKLRESHPGLTVEEVGSMDEAVAAADVVSCATGSREPIVRGELLRPGAHLDLVGSFTPAMRECDDDALRRGRVFIDFEAAMEEAGELVGAVQRGVLRREDVAGTLSELAAGTVVGPRRDDEITVFKSVGTAVVDLLAAQLAYETHLAATKDA

SEQ ID NO: 34988 - protein, 335 aa, Zea mays subsp. mays
MAAAPSHPFVYIDAAALHSLLPFASLIPHLRAGLAHPELSAGIQCPQRVSIPLPTAPSAALLLMPSWCAHPSLPYLALKAVTSFPSNSPRLPSVHAAVSLFSAATGAPLASIDGSALTLLRTAAVSALAASLLASPSRPPSVLALAGAGALAPYLAEAHLAALPSVSRVLVWNRTRAKSAALVAKLRESHPGLTVEEVGSMDEAVAAADVVSCATGSREPIVRGELLRPGAHLDLVGSFTPAMRECDDDALRRGRVFIDFEAAMEEAGELVGAVQRGVLRREDVAGTLSELAAGTVVGPRRDDEITVFKSVGTAVVDLLAAQLAYETHLAATKDA

SEQ ID NO: 34989 - protein, 272 aa, Zea mays subsp. mays
MPSWCAHPSLPYLALKAVTSFPSNSPRLPSVHAAVSLFSAATGAPLASIDGSALTLLRTAAVSALAASLLASPSRPPSVLALAGAGALAPYLAEAHLAALPSVSRVLVWNRTRAKSAALVAKLRESHPGLTVEEVGSMDEAVAAADVVSCATGSREPIVRGELLRPGAHLDLVGSFTPAMRECDDDALRRGRVFIDFEAAMEEAGELVGAVQRGVLRREDVAGTLSELAAGTVVGPRRDDEITVFKSVGTAVVDLLAAQLAYETHLAATKDA

SEQ ID NO: 34990 - DNA, 1013 bp, Zea mays subsp. mays
gttcctgttcccctcggcgacgccagtacggcagtacgccacgccagtgcccagttgcattgactcctccccggtccccacatcttgccgccaatggatgtcgacgggcccgcccccgccgacgcctctgccaggcccgccaccaacggcgaggccccctccggcgcccgcgaggtcgacgtcggcgaggaggacacgctcgccggcgtcctccgcagcttcgtcgacggcgtctggtacccggacgagcctctgctccggcggctccgggcggcgtcctgcgacgccgcgccgcgcctgaggggggcgtcccggaactccgcgcgggacctgcttgagtggaccaggcggggcagcggcctccgcgccatcctcgtcatctcggtcgggacaatcacgcttatagcattgactggccttctgaccttcatgttcttcctattggttgccactgctaatgcgatcattgtctcagtcttgatgtcactggccgctgccggaggattcttggccatcttctttgcttgcttggttgcagtgtatattggagcagtatcagttgctatctttgtcatttctgcgactgttatctcagcagttgttggaattttggttgctaccggttgggttgggttcttctggattatctggttcaccgcaaggaagagcatggtcctgacgaagcactccttcggcatgacgagctcggcaatccaatcgtattccgcgtcccggcaagtgaagcagaagcctgtcgactgaggctagttggttgcgtcctgtatgaagcggatatatctatctatgtgaatcacggttttgctgtttgtttgtttgtaagagtgtagaagacagcttgcttgttgcggcagctctgtttctctcggtgactaggtgtataatgctagctctgaactttggcagcatgtacgttcggcatggcggtcaatgctgttatttaaaggatagtgagcagatgttaatgtttatagcaaataaaagcatgttaatgt

SEQ ID NO: 34991 - protein, 222 aa, Zea mays subsp. mays
MDVDGPAPADASARPATNGEAPSGAREVDVGEEDTLAGVLRSFVDGVWYPDEPLLRRLRAASCDAAPRLRGASRNSARDLLEWTRRGSGLRAILVISVGTITLIALTGLLTFMFFLLVATANAIIVSVLMSLAAAGGFLAIFFACLVAVYIGAVSVAIFVISATVISAVVGILVATGWVGFFWIIWFTARKSMVLTKHSFGMTSSAIQSYSASRQVKQKPVD

SEQ ID NO: 34992 - protein, 111 aa, Zea mays subsp. mays
SCSPRRRQYGSTPRQCPVALTPPRSPHLAANGCRRARPRRRLCQARHQRRGPLRRPRGRRRRGGHARRRPPQLRRRRLVPGRASAPAAPGGVLRRRAAPEGGVPELRAGPA

SEQ ID NO: 34993 - DNA, 1599 bp, Zea mays subsp. mays
ttgctgtcgcacggagaagaaaaaaaaaacaggcactgagctgagatggcgaagcacttggctgccatgtgcaggtgcagcctcctagtgcttgtactgctctgcttgggctcccagctggcccaatcccaggtcctcttccagggtttcaactgggagtcgtggaagaagcaaggtgggtggtacaactacctcctggggcgggtggacgacatcgccgcgacgggggccacgcacgtctggctcccgccgccgtcgcactcggtggcgccgcaggggtacatgcccggccggctctacgacctggacgcgtccaagtacggcacccacgcggagctcaagtcgctcaccgcggcgttccacgccaagggcgtcaagtgcgtcgccgacgtcgtgatcaaccaccgctgcgccgactacaaggacggccgcggcatctactgcgtcttcgagggcggcacgcccgacagccgcctcgactggggccccgacatgatctgcagcgacgacacgcagtactccaacgggcgcgggcaccgcgacacgggggccgacttcgccgccgcgcccgacatcgaccacctcaacccgcgcgtgcagcaggagctctcggactggctcaactggctcaagtccgacctcggcttcgacggctggcgcctcgacttcgccaagggctactccgccgccgtcgccaaggtgtacgtcgacagcaccgcccccaccttcgtcgtcgccgagatatggagctccctccactacgacggcaacggcgagccgtccagcaaccaggacgccgacaggcaggagctggtcaactgggcgcaggcggtgggcggccccgccgcggcgttcgacttcaccaccaagggcgtgctgcaggcggccgtccagggcgagctgtggcgcatgaaggacggcaacggcaaggcgcccgggatgatcggctggctgccggagaaggccgtcacgttcgtcgacaaccacgacaccggctccacgcagaactcgtggccattcccctccgacaaggtcatgcagggctacgcctatatcctcacgcacccaggaactccatgcatcttctacgaccacgttttcgactggaacctgaagcaggagatcagcgcgctgtctgcggtgaggtcaagaaacgggatccacccggggagcgagctgaacatcctcgccgccgacggggatctctacgtcgccaagattgacgacaaggtcatcgtgaagatcgggtcacggtacgacgtcgggaacctgatcccctcagacttccacgccgttgcccatggcaacaactactgcgtttgggagaagcacggtctgagagttccagcggggcggcaccactagactagacccattccgcccagcaacccctacagataattctcttttcaggtccattttgaacctggaaaagaaatttaagagaggctaaataaccggaatacgattgtgtactgagcttctttcacgtaattattgaaagaagattataatgtttggatgcactattaattatgttggcatggggatttttgtaacctcttaaaacgaggaaataaagactgttcttattaagcc

SEQ ID NO: 34994 - protein, 439 aa, Zea mays subsp. mays
MAKHLAAMCRCSLLVLVLLCLGSQLAQSQVLFQGFNWESWKKQGGWYNYLLGRVDDIAATGATHVWLPPPSHSVAPQGYMPGRLYDLDASKYGTHAELKSLTAAFHAKGVKCVADVVINHRCADYKDGRGIYCVFEGGTPDSRLDWGPDMICSDDTQYSNGRGHRDTGADFAAAPDIDHLNPRVQQELSDWLNWLKSDLGFDGWRLDFAKGYSAAVAKVYVDSTAPTFVVAEIWSSLHYDGNGEPSSNQDADRQELVNWAQAVGGPAAAFDFTTKGVLQAAVQGELWRMKDGNGKAPGMIGWLPEKAVTFVDNHDTGSTQNSWPFPSDKVMQGYAYILTHPGTPCIFYDHVFDWNLKQEISALSAVRSRNGIHPGSELNILAADGDLYVAKIDDKVIVKIGSRYDVGNLIPSDFHAVAHGNNYCVWEKHGLRVPAGRHH

SEQ ID NO: 34995 - protein, 432 aa, Zea mays subsp. mays
MCRCSLLVLVLLCLGSQLAQSQVLFQGFNWESWKKQGGWYNYLLGRVDDIAATGATHVWLPPPSHSVAPQGYMPGRLYDLDASKYGTHAELKSLTAAFHAKGVKCVADVVINHRCADYKDGRGIYCVFEGGTPDSRLDWGPDMICSDDTQYSNGRGHRDTGADFAAAPDIDHLNPRVQQELSDWLNWLKSDLGFDGWRLDFAKGYSAAVAKVYVDSTAPTFVVAEIWSSLHYDGNGEPSSNQDADRQELVNWAQAVGGPAAAFDFTTKGVLQAAVQGELWRMKDGNGKAPGMIGWLPEKAVTFVDNHDTGSTQNSWPFPSDKVMQGYAYILTHPGTPCIFYDHVFDWNLKQEISALSAVRSRNGIHPGSELNILAADGDLYVAKIDDKVIVKIGSRYDVGNLIPSDFHAVAHGNNYCVWEKHGLRVPAGRHH

SEQ ID NO: 34996 - protein, 360 aa, Zea mays subsp. mays
MPGRLYDLDASKYGTHAELKSLTAAFHAKGVKCVADVVINHRCADYKDGRGIYCVFEGGTPDSRLDWGPDMICSDDTQYSNGRGHRDTGADFAAAPDIDHLNPRVQQELSDWLNWLKSDLGFDGWRLDFAKGYSAAVAKVYVDSTAPTFVVAEIWSSLHYDGNGEPSSNQDADRQELVNWAQAVGGPAAAFDFTTKGVLQAAVQGELWRMKDGNGKAPGMIGWLPEKAVTFVDNHDTGSTQNSWPFPSDKVMQGYAYILTHPGTPCIFYDHVFDWNLKQEISALSAVRSRNGIHPGSELNILAADGDLYVAKIDDKVIVKIGSRYDVGNLIPSDFHAVAHGNNYCVWEKHGLRVPAGRHH

SEQ ID NO: 34997 - DNA, 1453 bp, Zea mays subsp. mays
cccctctgtgcgagtttaccgaaacgacctcggcccggcattaaataagcctcccaggctcacctgatcccctcccccttccctctcttccgcctccgattgagtggctcaccttctttcccagccagcacgagcttgcaagcaagcgagctcctgagatttcagctcgcttctcctccagaggtcgagcagaccagactcctccgaccgaagctctaccacttcccagttagcctgtccaggaactgcttggccggagatccaaacaaacctctgtgttggggttctccggggttccttgcgctggagggaggtttcgttctcgctggccatggtttggctgagaagcagcagcggcagcatcttgatgccaaatctctgagctttatgaagatcgccactcacctgcgccgctcctgcttcctccactccttctcggtagtcttcctctactggttttatgtgatctcataacttgccctcccccggatccgccattcccccgtgccctctctccgtcccctcaaccttctccctcctttcttgcttccctcaacaatcgccaaataacagcactagcggcagcggtagaggatcttttcgaggtaagctaggccggccggttccctgcgggaaaaagaaaagaaaaggaccctgtcttgatgtcgtcgtcgtcgctgtctccgacggcggggaggacgtccgggtcggacggcgactcggcggcggacacgcacaggcgcgagaagcgccggctgtcgaaccgcgagtcggcgcggcggtcccggctccggaagcagcagcacctggacgagctggtgcaggaggtggcgcgcctgcaggccgacaacgcgcgcgtggcggcccgcgcccgcgacatcgcgtcccagtacacccgcgtcgagcaggagaacaccgtgctccgggcccgcgccgccgagctcggcgaccgcctccgctccgtcaacgaggtgctccgcctcgtcgaggagttcagcggcgtcgccatggacatccaggaggagatgccggcggacgacccgctgctgcgtccctggcagctgccctacccggctgccgccatgcccatgggcgccccgcacatgctccactactgatgattgcctccaccaaccacaccaccatacatctgaggctgtcagctggggctggttggcaacaagacaagaagaattggctgcctctcaacaacattcacatctactacctacctggctgctttgagaattacagggcctctactatctgctgctgtgttaaatctacctcctggtttctccaataattgtcgctgttctgtactcttctcttatgttctgtctgtcagtgtgtatgagatgatgctcatcttatgttataaggcttaatcatgtgtctagttgtactttctgtcttgtaatgttatcagttatatgaataataagtgttatgt

SEQ ID NO: 34998 - protein, 151 aa, Zea mays subsp. mays
MSSSSLSPTAGRTSGSDGDSAADTHRREKRRLSNRESARRSRLRKQQHLDELVQEVARLQADNARVAARARDIASQYTRVEQENTVLRARAAELGDRLRSVNEVLRLVEEFSGVAMDIQEEMPADDPLLRPWQLPYPAAAMPMGAPHMLHY

SEQ ID NO: 34999 - DNA, 1812 bp, Zea mays subsp. mays
attaaaaaagggttccccacagcaccaagcgcgacgtgagcgaggaggcaggcgcgcacggcgtgtcggcgtcgcaccgaacccgacacggctcggcctacggcccccacacatccggctgggccgttccgttccgtttcgttcccttcccattcttctcgtacgcggccgattgctgaccctcgctcgccctcgcttccccaccacagcaccgaaactgccccgcctccgcagccgccgcccgcgcccgctcgtcctccccgcgccgcctcggggacgccccggtcggcgatgtggcgggagcatgctaggcccgctcctcaggctcctctcggcgtgcggcggggtctggcccacctcgccggcccccggcgccgcggcctcctcttccgcctcctccggggacgactctgagggccgcgacggccttctctggtggcgcgacctcgcgcgctgccacgccggcgacgtctccgtcgccgtcgcccaggccaaccaggtgctcgaggaccagtgccgcctcgactccgccccgtccatcggcaccgtcgtcggcgtcttcgacggccacggcggccccgacgccgcccgcttcgcctgcgaccaccttgtccccaacctccgagaggcgtcctccggcccgcggggcgtcaccgcagacgccatcagggaggccttcctggccacggaggaaggattcctcgcgctcgtgtcaagcctctgggaggcccagccggacatcgccacggccgggacatgctgccttgtcggcgtcgtgcacaacaggacccttttcgtcgccaacctcggcgactcccgggccgtcctcgggaagaaggcgggccgcgctggccagatcgccgcggagcagttgtccagcgagcacaatgccaaccaggaggctgtcaggcaggagctcatggcgcaacacccagatgatgctcagattgttgcgctcaagcatggggtctggagagtgaggggcctcatacaggtgtctagatcaatcggtgatgtatacctgaaacatgcaaagtataacacagaccagatcaaacccaagttcaggcttcccgaatcattcagcaagccactattgagtgccgatccatctatcatctcccgcgatcttgaaccaaatgactgtttcatcatattcgcatcagatggattgtgggagcacctcagcaatcaagaagccgttgagattgttcacagccatcaacgtgctggaagcgcaagaagactcattaaagccgctctacaagaagcagcgcggaagcgtgagatgcgttactcggatcttacaaagatcgataagaaagttcgcaggcatttccatgatgacattactgtcatcgtcttatttataaactatgacctattattgaaaggtgctccgcagggacaacccctctccatcagatgtgccctagattattgacagtgagctagttcacccactggtattcaagctcctgcgggcagccatatccagagtcagctgacatggtcaaccggttgtgaaaagcgcacaacctccggcaccagtttccttttcgtttccccttttttgcacataaaattgacaagtcgctgaaattgccagttttcccctcttggattatgtcggataaaatgcgtatactcttcggttttggagatatatgtctagactctagagcgtgagggaaggttataaagtcttgtatgtctttgttctcttgcagtcttgcttacagttacagctagctctttttgtatgtaacaattgtcagcaatcagcatgtttaaccacctccgtgacgtttt

SEQ ID NO: 35000 - protein, 480 aa, Zea mays subsp. mays
LKKGSPQHQARRERGGRRARRVGVAPNPTRLGLRPPHIRLGRSVPFRSLPILLVRGRLLTLARPRFPTTAPKLPRLRSRRPRPLVLPAPPRGRPGRRCGGSMLGPLLRLLSACGGVWPTSPAPGAAASSSASSGDDSEGRDGLLWWRDLARCHAGDVSVAVAQANQVLEDQCRLDSAPSIGTVVGVFDGHGGPDAARFACDHLVPNLREASSGPRGVTADAIREAFLATEEGFLALVSSLWEAQPDIATAGTCCLVGVVHNRTLFVANLGDSRAVLGKKAGRAGQIAAEQLSSEHNANQEAVRQELMAQHPDDAQIVALKHGVWRVRGLIQVSRSIGDVYLKHAKYNTDQIKPKFRLPESFSKPLLSADPSIISRDLEPNDCFIIFASDGLWEHLSNQEAVEIVHSHQRAGSARRLIKAALQEAARKREMRYSDLTKIDKKVRRHFHDDITVIVLFINYDLLLKGAPQGQPLSIRCALDY

SEQ ID NO: 35001 - protein, 379 aa, Zea mays subsp. mays
MLGPLLRLLSACGGVWPTSPAPGAAASSSASSGDDSEGRDGLLWWRDLARCHAGDVSVAVAQANQVLEDQCRLDSAPSIGTVVGVFDGHGGPDAARFACDHLVPNLREASSGPRGVTADAIREAFLATEEGFLALVSSLWEAQPDIATAGTCCLVGVVHNRTLFVANLGDSRAVLGKKAGRAGQIAAEQLSSEHNANQEAVRQELMAQHPDDAQIVALKHGVWRVRGLIQVSRSIGDVYLKHAKYNTDQIKPKFRLPESFSKPLLSADPSIISRDLEPNDCFIIFASDGLWEHLSNQEAVEIVHSHQRAGSARRLIKAALQEAARKREMRYSDLTKIDKKVRRHFHDDITVIVLFINYDLLLKGAPQGQPLSIRCALDY

SEQ ID NO: 35002 - DNA, 1608 bp, Zea mays subsp. mays
aattcttcagccgccagcgatccagctctagcgtttcttttttccagccccagaagctcgacgccggcggtgctccacgggagccaccagccccacctccatcggaggcagccaccggccacgggagcagcacgcctcctgcatcaactgctggcagccaccagccacctccatcgttggctacttggctccctcctccttggtagaagatggccccatcctcgtcctccagctccgatggacatggccatgctgctccgcgccctgggactggtagagttcaagtggcgttgcctaacgcagatgctgctgctgaagctgatgcagaggttagtggtggttatgctgaatctaacgagccaaattctactggtgctccatcatgtgggtctggtgtcgttcccaatgattctgagtctatagttgccaaaacattagagaagttgccaccagagcttgctgcactagctaaagatcctaagaggcatgctaaatctaaggaccctgggtggaagtatgggttctggccatatgaagggaagaaggatatggttcaatgcatattttgcaaaaaggtggttcctgcaggaatcaagagattcaagcaacacatcgcaggtggttatgcagtcatcgagaggtgtccagctgcacctgcaatgatcaggaaagaaatgtttgattttttggtgaaaaatgcaagaaaagaactgaacttgcagcaaggaagggaatgggattctgaaagtggaggtggagtgcaagaagtacctgttgtgccaagttcagggacaagagttaaggaaaataaaaggaaggttcaagcatccattggttcttatatggatccagttaagcaagggtcacagaagtacaccaaaaatgttgcttcaatgttgtgcaaatcacctgaagaagtggtcagtgagagacataattcaaagagttatcaaccttcaatggagcagtgtacacagaaatctaaggaatcaaagcaagtagttgatgaccatgttgcggatttcttgtatgagaatggaattccattgaatgttgttaactcaagaagctgggaaataatgttagagtccataggacaatatggtcctgggtatctgtcaccttcgtaccatcagttgaggaattcattacttgagagggcagtagacaagacaaatgaggtgagaaagaagcatgaggaagcatggaaaaagtatggctgcactctcatgtcagatgcatggactgacacacggcaccgtcatctcataaacttttttgtcaagagtccagtgcttgttgaaaatgaagaaaatgaggaagacgttgacatggaagatgaagaagatgatttcaatgaaatgcaggacgacgaagatgacgaagaggatgaggatggtggaggtggagctgcaggggccttccgagtggatgatgctttactttgagcatttactcattccatttcgtttccaggaattcagacaatcatacttgttagtttagttaatttcagtttcagaattcagactcctttttttatcaatgttccatgctgtgtaatgtactatccaagtgttctactgttctggagtggaacagccaagc

SEQ ID NO: 35003 - protein, 412 aa, Zea mays subsp. mays
MAPSSSSSSDGHGHAAPRPGTGRVQVALPNADAAAEADAEVSGGYAESNEPNSTGAPSCGSGVVPNDSESIVAKTLEKLPPELAALAKDPKRHAKSKDPGWKYGFWPYEGKKDMVQCIFCKKVVPAGIKRFKQHIAGGYAVIERCPAAPAMIRKEMFDFLVKNARKELNLQQGREWDSESGGGVQEVPVVPSSGTRVKENKRKVQASIGSYMDPVKQGSQKYTKNVASMLCKSPEEVVSERHNSKSYQPSMEQCTQKSKESKQVVDDHVADFLYENGIPLNVVNSRSWEIMLESIGQYGPGYLSPSYHQLRNSLLERAVDKTNEVRKKHEEAWKKYGCTLMSDAWTDTRHRHLINFFVKSPVLVENEENEEDVDMEDEEDDFNEMQDDEDDEEDEDGGGGAAGAFRVDDALL

SEQ ID NO: 35004 - protein, 299 aa, Zea mays subsp. mays
MVQCIFCKKVVPAGIKRFKQHIAGGYAVIERCPAAPAMIRKEMFDFLVKNARKELNLQQGREWDSESGGGVQEVPVVPSSGTRVKENKRKVQASIGSYMDPVKQGSQKYTKNVASMLCKSPEEVVSERHNSKSYQPSMEQCTQKSKESKQVVDDHVADFLYENGIPLNVVNSRSWEIMLESIGQYGPGYLSPSYHQLRNSLLERAVDKTNEVRKKHEEAWKKYGCTLMSDAWTDTRHRHLINFFVKSPVLVENEENEEDVDMEDEEDDFNEMQDDEDDEEDEDGGGGAAGAFRVDDALL

SEQ ID NO: 35005 - protein, 262 aa, Zea mays subsp. mays
MIRKEMFDFLVKNARKELNLQQGREWDSESGGGVQEVPVVPSSGTRVKENKRKVQASIGSYMDPVKQGSQKYTKNVASMLCKSPEEVVSERHNSKSYQPSMEQCTQKSKESKQVVDDHVADFLYENGIPLNVVNSRSWEIMLESIGQYGPGYLSPSYHQLRNSLLERAVDKTNEVRKKHEEAWKKYGCTLMSDAWTDTRHRHLINFFVKSPVLVENEENEEDVDMEDEEDDFNEMQDDEDDEEDEDGGGGAAGAFRVDDALL

SEQ ID NO: 35006 - DNA, 1389 bp, Zea mays subsp. mays
gcattgagcgcgattcattcccctcgtgggctcccagttcagtaaaccctacgccctgcggcacacacccatctcgccgcgccgccgcgtaaaccccacccgagcccatctcgccctcgcgcctccccgccctcgcgcaggcgcaacaatggcggccgcctcgaggggcctgctcgcgcgcctccgtgtcctctcactctccggcggcgggagcccgtggctccgcttccccgccttcccggctcttctccgcggaggccttcgtctcccattccgatgacgacgacgctgggggcgagggaggaggcgggggccggatcatcgaggcacggtccggggtgatgggccccacctcgcggcgcaccggcgtcatcggcgtcaagtgcgggatgtcggcgatgtgggacaagtggggcgccaaggtgcccatcaccgtcctctgggtcgacgacaacgttgttacccaggtcaagaccgccgagaaggagggtttcttcgccctacagcttggagcaggtcaaaagaaggaaaaacacctaacaaagcctgaagttggccactttagagcacagggagtgcctctgaaaagaaagctaagggaatttcctgtcactgaggatgcgcttcttcctgttggcacaagcatcacagttcgtcactttgttcctggacaatttgttgatgtcactggaatcacgaaggggaaaggttttgcaggtgtaatgaaaagatatggttttggtgggatgcctgcatcacatggaacatctttggcgcatcgcagtggtggctctactggtcaaagagatgctcctggaagggttttcaaaaacagaaaaatgcctggacgcatgggtggtgtgcaacgcacagtgaagaatgtatgggtctatcaaatagacccagccaggaacttactgtatctgaagggccaggttcctggtcctcaaggtagctttattttcgttaaggattctatatataagaaacctgacacggctttgctcccatttcctacatacttcacgcgtgaaggtgagcctgaagacttggagcccctgattgctgatcttggtgatgttgacccattcatggcagccgattaagacaatgcacaaagttggttaattcctttttgtgttctaagcactccttgagctcgtccattccacgagattgtcaaactctcgatggatgtgagcagttcctgaatcacaagctttatccggttactggccagcctgatcaatgttgttccatgtacattacctggcaagtataccagtgctctaatggtttttagatgattgttttgattgaccgaatataacctttttctcaataagttgtacgcggagccacaagtagtatataaaatcagaatatttc

SEQ ID NO: 35007 - protein, 254 aa, Zea mays subsp. mays
MGPTSRRTGVIGVKCGMSAMWDKWGAKVPITVLWVDDNVVTQVKTAEKEGFFALQLGAGQKKEKHLTKPEVGHFRAQGVPLKRKLREFPVTEDALLPVGTSITVRHFVPGQFVDVTGITKGKGFAGVMKRYGFGGMPASHGTSLAHRSGGSTGQRDAPGRVFKNRKMPGRMGGVQRTVKNVWVYQIDPARNLLYLKGQVPGPQGSFIFVKDSIYKKPDTALLPFPTYFTREGEPEDLEPLIADLGDVDPFMAAD

SEQ ID NO: 35008 - protein, 238 aa, Zea mays subsp. mays
MSAMWDKWGAKVPITVLWVDDNVVTQVKTAEKEGFFALQLGAGQKKEKHLTKPEVGHFRAQGVPLKRKLREFPVTEDALLPVGTSITVRHFVPGQFVDVTGITKGKGFAGVMKRYGFGGMPASHGTSLAHRSGGSTGQRDAPGRVFKNRKMPGRMGGVQRTVKNVWVYQIDPARNLLYLKGQVPGPQGSFIFVKDSIYKKPDTALLPFPTYFTREGEPEDLEPLIADLGDVDPFMAAD

SEQ ID NO: 35009 - protein, 235 aa, Zea mays subsp. mays
MWDKWGAKVPITVLWVDDNVVTQVKTAEKEGFFALQLGAGQKKEKHLTKPEVGHFRAQGVPLKRKLREFPVTEDALLPVGTSITVRHFVPGQFVDVTGITKGKGFAGVMKRYGFGGMPASHGTSLAHRSGGSTGQRDAPGRVFKNRKMPGRMGGVQRTVKNVWVYQIDPARNLLYLKGQVPGPQGSFIFVKDSIYKKPDTALLPFPTYFTREGEPEDLEPLIADLGDVDPFMAAD

SEQ ID NO: 35010 - DNA, 1628 bp, Zea mays subsp. mays
gcagcagccactcgctctccccacctcgtctctcttccactcatcccctccctcgccccttcgcctcgcctctcttcttcggatcgagcagcagtactgcactgcatgccgccgatacaaatcccatcctctccctcctctactgcacctgcaccacagtagctagctagctatctttgctacggcggctctgtaatctggtccactagcgctccattcgaccccacccacagccatggctgccgtgaccgcggcggccgtctctctgccctcctcctcctcctcccctgccgccgccaaggccaaggcgtccgcgtccgcgtccccgtcgtctccatgcggccacctccagttcccgcggcggcacggcggcccgcgcgcggtgcggctgcgcgtgcaggtgtccaccaccgagaccgcggaggcggagccggtcaagaagctggagaaggtgtccaagaagcaggaggaggggctcgtcaccaacaagtacaagcccaaggagccgtacgtcgggaggtgcctgctcaacaccaggatcaccggcgaccaagcgcccggggagacgtggcacatggtcttcagcacagaaggcgaggtcccctacagagagggccagtccatcggcgtcatcgcggatggcgaggacaagaacggcaagccgcacaagctcaggctctactccatcgccagcagcgccctcggagatttcggcgactccaagacggtgtcgctgtgcgtgaagaggctggtctacaccaacgatcagggggaggtcgtcaaaggagtctgctcgaacttcctctgtgacttgaagccaggcgctgaggtgaagatcacagggccagtgggcaaggagatgctcatgcccaaagaccccaacgcaacaatcatcatgctcgcaacgggtaccggcatcgctccgttccgctccttcttgtggaagatgttcttcgaggagcacgaggactacaagtacaccgggctggcgtggctgttcctgggcgtcccgaccagcgacaccctgctgtacaaggaggagctggagaagatgaaggagatggcgccggacaacttccggctggacttcgcggtgagccgggagcagacgaacgcggccggggagaagatgtacatccagacgcgcatggcggagtacaaggaggagctgtgggagctgctcaagaaggacaacacctacgtctacatgtgcgggctcaagggcatggagaagggcatcgacgacatcatgctcgacctcgcagccaaggacgggatcaactggttggactacaagaagcagctcaagaagagcgagcaatggaacgtcgaagtctactgatgatgatccttcattgtattgttcagctcaagcaatctggtggtgatgagtttgcattgcattgtacgtagtattgcggagatcaatcgaatcgtttggctcgtcgtcattctatcgatgtacatacattatatatgatgaaagacatatataatcgtttctttcaggaatttgttgtctctctgcacgtgaatttgttgcgagaaagaaaggacacacattagccttttctttattagggcaattatgaattatacccttctctgattctgattttacttttttc

SEQ ID NO: 35011 - protein, 368 aa, Zea mays subsp. mays
MAAVTAAAVSLPSSSSSPAAAKAKASASASPSSPCGHLQFPRRHGGPRAVRLRVQVSTTETAEAEPVKKLEKVSKKQEEGLVTNKYKPKEPYVGRCLLNTRITGDQAPGETWHMVFSTEGEVPYREGQSIGVIADGEDKNGKPHKLRLYSIASSALGDFGDSKTVSLCVKRLVYTNDQGEVVKGVCSNFLCDLKPGAEVKITGPVGKEMLMPKDPNATIIMLATGTGIAPFRSFLWKMFFEEHEDYKYTGLAWLFLGVPTSDTLLYKEELEKMKEMAPDNFRLDFAVSREQTNAAGEKMYIQTRMAEYKEELWELLKKDNTYVYMCGLKGMEKGIDDIMLDLAAKDGINWLDYKKQLKKSEQWNVEVY

SEQ ID NO: 35012 - protein, 255 aa, Zea mays subsp. mays
MVFSTEGEVPYREGQSIGVIADGEDKNGKPHKLRLYSIASSALGDFGDSKTVSLCVKRLVYTNDQGEVVKGVCSNFLCDLKPGAEVKITGPVGKEMLMPKDPNATIIMLATGTGIAPFRSFLWKMFFEEHEDYKYTGLAWLFLGVPTSDTLLYKEELEKMKEMAPDNFRLDFAVSREQTNAAGEKMYIQTRMAEYKEELWELLKKDNTYVYMCGLKGMEKGIDDIMLDLAAKDGINWLDYKKQLKKSEQWNVEVY

SEQ ID NO: 35013 - DNA, 1087 bp, Zea mays subsp. mays
cccgaaacccctatacgtaaataaaaaaaatccataacgcaatcgcaaggcgctgcctccaccgccgccacctgcacatccatcgtcgccgttcgcgtctccggatcccgcgaccggagtccggaccctcatcccgcggccgcatattctcccgtccgtgccctcgcgtgcgctctgcccctccggcgtccgccgccgccgtcgccctatcccaggtgccgtggtctccatctcccggagcttcgccggcgacgagaatcctccagagccatgctgggcgcgcgtgtgcagctgaaggggtggcaacaggcagctgttgcatttggttctgcgtttggggccttgcttgaccctaggagggctgatcttatagctgctcttggagagactactgggaaaccagcgtttgagcgtgtgctgcaacgaatgaagaacagtgcagaaggcagggaagttctttcggagcgtcctcgcgtggtatcctcgcaggtttcccatgcctgggacatgcctcagaacacatttggcgcggcgtatgctcagttcatgggatcaaggaacttctcaccagacgatcgcccgcctgtccgtttcatggacaccgatgagctcgcctacgtcgcgacacgtgctcgcgaggtgcacgacttttggccacgtgctgtttgggtcttccgacgaacctgattggggagaccgccctcaaggtgatagagtttgaacagatgttcctcccaatgtgcatgctgtcggtcgtcggtggctctgcgaggttcagtgacaaacaaagggcgctgtttttccagcactacttcccatgggcaacaaaagctggtctcaagtgtactgatctgatgtctgtatattacgagaagcactttcacgaagacctggaggaagtgagaaggaactggggaatccttccttgccccagtcccaaaaagagcagtgtataggccggcattttctgcgtgaactttctatctgtttcttctttggtttctgttagttgctcagttctttttggaataaaatcatgagctaatgttgatgaatactgatacgttaccgagttcgaagtatggtt

SEQ ID NO: 35014 - protein, 138 aa, Zea mays subsp. mays
MLGARVQLKGWQQAAVAFGSAFGALLDPRRADLIAALGETTGKPAFERVLQRMKNSAEGREVLSERPRVVSSQVSHAWDMPQNTFGAAYAQFMGSRNFSPDDRPPVRFMDTDELAYVATRAREVHDFWPRAVWVFRRT

SEQ ID NO: 35015 - protein, 86 aa, Zea mays subsp. mays
MKNSAEGREVLSERPRVVSSQVSHAWDMPQNTFGAAYAQFMGSRNFSPDDRPPVRFMDTDELAYVATRAREVHDFWPRAVWVFRRT

SEQ ID NO: 35016 - protein, 76 aa, Zea mays subsp. mays
MFLPMCMLSVVGGSARFSDKQRALFFQHYFPWATKAGLKCTDLMSVYYEKHFHEDLEEVRRNWGILPCPSPKKSSV

SEQ ID NO: 35017 - DNA, 1428 bp, Zea mays subsp. mays
tcacctttctcaaccccatctctctcgcctctgtttgttccttggagccgcccccgccgcccacgccaccggtcgcccctgccccgaccccttccgccgcggtcgcgaccgcccccgaccccagccctgcccgacgcttccgtttccttggataaccacaacgctcgcccgcccgccggcaagcgaaagcaaagcgagccaacctagccatggagaaggcgatctatcggtagcgggtcctcctggcgcaccttctcccctcctcctctaccatctcctcgcagcctcagcttgcggcgtcgacgtgcgcggccggggatagcgccgcctaccagaggtcctcctccttcggggacgatgtcgtcgctgcctacaggacgccaatatgcaaggccaagcgaggaggcttcaaggacacctacccagaggacctcctcactgttgttctcatggttcccttcccttcaaggtcaaccaccagtgttcatctgggctacaggcagtagccgatgtcgcagctgctataaaggctggttactatgacatagggattggtgctggtttggaatccatgtccataaattccattgctagggaaggacaagttaacccaaaaataagcgcattccagaaagcacaggattgtcttctgcccatgggaattacttctgaaaatgttgcccatcgatatggtgtaactagacaagagcaagatcaggccgcctctgagtctcataggagagctgctgcagccatggcctctagaaaactcaaggatgagatcgtccccgtgccaacaaagatcgttgatcctaaaactggagaggagaaggaagttgtgatatcagttgatgatgggattaggccagggaccacaacatctggattggcgaaactcaaaccagttttagaaaagcatgggactacaactgcaggcaattccagtcaagtgagtgatggtgctggagctgttcttctcatgaaaagatctgtggctctaaagaaagggctgcccattcttggtgttttcaggtgcccggtgcgtggctactcttctaaatgaaatgaagcgtcggggcaaagactgcagatttggtgttgtcaccatgtgtatcggatctagaatggggacagcagctgtgttcgagctgtgttcggcccggctggaggtatcgaccatcactcgtcactgtaacccgatggtgatcggtgatcgtgagcttccatgttattgcattctgatacttgagacttttattatgactatgtatgagatattgtctcttattagtactggatgatgagatgtgtcttattatgactatggatgagacttttgtgatgtaattgatgagacttttgtgatgtaattgatgagactatgtatttaaatattgttatgtgattgtgtgtgagatgttttatgtc

SEQ ID NO: 35018 - protein, 225 aa, Zea mays subsp. mays
MQGQARRLQGHLPRGPPHCCSHGSLPFKVNHQCSSGLQAVADVAAAIKAGYYDIGIGAGLESMSINSIAREGQVNPKISAFQKAQDCLLPMGITSENVAHRYGVTRQEQDQAASESHRRAAAAMASRKLKDEIVPVPTKIVDPKTGEEKEVVISVDDGIRPGTTTSGLAKLKPVLEKHGTTTAGNSSQVSDGAGAVLLMKRSVALKKGLPILGVFRCPVRGYSSK

SEQ ID NO: 35019 - protein, 163 aa, Zea mays subsp. mays
MSINSIAREGQVNPKISAFQKAQDCLLPMGITSENVAHRYGVTRQEQDQAASESHRRAAAAMASRKLKDEIVPVPTKIVDPKTGEEKEVVISVDDGIRPGTTTSGLAKLKPVLEKHGTTTAGNSSQVSDGAGAVLLMKRSVALKKGLPILGVFRCPVRGYSSK

SEQ ID NO: 35020 - protein, 135 aa, Zea mays subsp. mays
MGITSENVAHRYGVTRQEQDQAASESHRRAAAAMASRKLKDEIVPVPTKIVDPKTGEEKEVVISVDDGIRPGTTTSGLAKLKPVLEKHGTTTAGNSSQVSDGAGAVLLMKRSVALKKGLPILGVFRCPVRGYSSK

SEQ ID NO: 35021 - DNA, 788 bp, Zea mays subsp. mays
  misc_feature (183)..(183): n is a, c, g, or t
  misc_feature (187)..(188): n is a, c, g, or t
  misc_feature (190)..(190): n is a, c, g, or t
gaaaaagagggagagcagtcaccaaaccaaaaccgctctcgagtctccatccattctctccgctcatccgcagctctcgagtctccagctctagctagccttagcctcgtccaagggacgaaggggccaccatgagcgtggtgatcctggacggctccacggtgcgcggcttcgtggcggacnaggnngncttcgcgcgcagcctggacgcgcggttcgccgcgctggacgccaacggcgacggcgtgctgtcccgcgccgagctccggcgcgcgctcgagtccttccgcctcctcgacggcggcggcttcgggtccgcccagccggcgccgctccccgccgaggtcaccgcgctctacgacgccgtcttcgagcagttcgacgccgaccacagcggcgccgtcgaccgcgccgagttccacgacgagatgcgccgcatcatgctcgccgtcgccgacgggctcggctcccagccgctccaggtcgccgtggacgacgagggcgggagcttcctgctcgaggcagccgagcacgaggccgctgggatcgccgccaagatcgaagccaaccgcaaggcggaggcggaggcggaggcggccaagtgacgacgtgtccctcgtgcgggccctgcgcttgattttctgggtgtttgctactacgtactagtactacttacctggcggccgatgtgccgccgcacgtgtacggtatactacgtaactagaagcggccagcaccagctactcaaatcactgctgatgctacttgtgaacggaataaaacctgtc

SEQ ID NO: 35022 - protein, 157 aa, Zea mays subsp. mays
  misc_feature (18)..(20): Xaa can be any naturally occurring amino acid
MSVVILDGSTVRGFVADXXXFARSLDARFAALDANGDGVLSRAELRRALESFRLLDGGGFGSAQPAPLPAEVTALYDAVFEQFDADHSGAVDRAEFHDEMRRIMLAVADGLGSQPLQVAVDDEGGSFLLEAAEHEAAGIAAKIEANRKAEAEAEAAK

SEQ ID NO: 35023 - DNA, 1338 bp, Zea mays subsp. mays
gagacagccacccagttgctcaagtgattccaggcccacgccacgccaaccccgggctcaactcgagtccacacgccccagcaccacccctgcctctcagtccagtcccccacccaccaccaccactcctcccctcgccgccgcccgttcccgaccgatccggccggatcgccccgccatggaccagtacgagaaggtggagaagatcggggagggcacgtacggggtggtgtacaagggcaaggaccgccacaccaacgagacgatcgcgctcaagaagatccgcctcgagcaggaggacgagggcgtcccctccaccgccatccgcgagatctccctcctcaaggagatgcagcaccgcaacatcgtcaggctgcaggacgtcgtgcacaacgacaagtgcatctacctcgtcttcgagtacctcgacctcgacctcaagaagcacatggactcctccacggacttcaagaaccaccgcatagtcaaatccttcctctaccagattctgcggggcatcgcctactgccactcgcaccgcgtgctccaccgcgacctgaagccgcagaacctgctgattgaccgccgcaacaacctcttgaagctcgcggactttggactggcgagggcgttcggcatccctgtccggacgttcactcatgaggggcgttcggcattcatgtcctgacttttactcataaggtggtgacgctttggtatagagcgcccgaaatccttctcggtgcaaggcattattccacccctgttgatgtgtggtcagttggttgcattttcgctgaaatggtgaaccagaaggcgctttttcctggcgactctgagatcgatgagctgtttaagattttcaggtcttatttacaagtgttggttcaaacttcaatttagtttgttgcatgttgcatgtttgagattctcttctaccaatgcagaattttgggcactccaactaaagaaacatggccaggcgttgcttcgttgcccgattacaagtcaactttcccaaagtggccacctgtggatcttgcaacggtggtcccgacactcgaaccgtcgggaatcgatctcctatctaagatgctgcgtctagatcccagcaagaggatcaccgcgcgcgccgccctcgagcacgactacttcagggacctcgagcacgcctagcagggatggatggatggacggatgaaccatttcccctcccctgctccctctgtaaattacggtagcagccgcgatgcttggggccggcgagtacccccgtttgggcggccgctgagttatgtgtgttactctatagtatgactaagtaagctggagtgcccc

SEQ ID NO: 35024 - protein, 228 aa, Zea mays subsp. mays
RQPPSCSSDSRPTPRQPRAQLESTRPSTTPASQSSPPPTTTTPPLAAARSRPIRPDRPAMDQYEKVEKIGEGTYGVVYKGKDRHTNETIALKKIRLEQEDEGVPSTAIREISLLKEMQHRNIVRLQDVVHNDKCIYLVFEYLDLDLKKHMDSSTDFKNHRIVKSFLYQILRGIAYCHSHRVLHRDLKPQNLLIDRRNNLLKLADFGLARAFGIPVRTFTHEGRSAFMS

SEQ ID NO: 35025 - protein, 169 aa, Zea mays subsp. mays
MDQYEKVEKIGEGTYGVVYKGKDRHTNETIALKKIRLEQEDEGVPSTAIREISLLKEMQHRNIVRLQDVVHNDKCIYLVFEYLDLDLKKHMDSSTDFKNHRIVKSFLYQILRGIAYCHSHRVLHRDLKPQNLLIDRRNNLLKLADFGLARAFGIPVRTFTHEGRSAFMS

SEQ ID NO: 35026 - protein, 160 aa, Zea mays subsp. mays
DSHPVAQVIPGPRHANPGLNSSPHAPAPPLPLSPVPHPPPPLLPSPPPVPDRSGRIAPPWTSTRRWRRSGRARTGWCTRARTATPTRRSRSRRSASSRRTRASPPPPSARSPSSRRCSTATSSGCRTSCTTTSASTSSSSTSTSTSRSTWTPPRTSRTTA

SEQ ID NO: 35027 - DNA, 1444 bp, Zea mays subsp. mays
aaccacaccactcgagcgcgcgcgcggcccaccgctccgccgctgcccgcccgccgccatgcgagggatcctctcctcttcctccgctctcctccggcgagccggcgcccagctctcgcgcacggactgcagtagcccctcagcgtccgcgacctctcctctccgccgctcccctcttcagaatgggaaaagagacacattttgttcgctttggttcaaaggtcgttcggtatcaaccacagttgatatgcagttagactatgagagtgatccccctcttgacgatacaaaagctattgagaaggagtcatcacttaatgttgctgtttctcaactcgcaattgacttcgatagagactctaatttatgtttggagcgattttcccgtgcaaggaaagcatctgtagtctctactggttctcttaagcttgacctcgctctcggcgttggaggattaccgaagggtagaatggtggagatatatgggaaagaagcatctgggaagacaacactcgcgcttcatgttattaaggaagctcaaaagaatggaggttattgtgcttatattgatgcagaaaatgccttcaacccttcatttgctgaatctattggcgtagacagtgaaaggctcttgatagcccaacctgattctgctgaaaattctctaagcattgtaaacactcttgttggtggttctgttgctgttgttgttgtggacagtgtggcagcacttattcccaaatgtgaaattgaaggtgaaatatacacaaattgtggagacatccaatcccatttgatgactcgggcccttagaaaaattcagtacactttatgtcgatctgaaacacttattatttttgtgaatcaggttagaacaaagaggacatcaagtaatcctgggatctacaaggaggtgccttgcggtggtaatgcactaggattctatgctgcagtcagaatgaggacttcaaggagagaactgcgctatagtgaagatgaggctaccggcgtaggtatatcagtgcagatcatcaagaacaaattggctccagcgaacctgaagaaggaagccggcatcgacatcacattcggtaaggggatctgccacgagtcggagatcctggagacggcttcctccgtcggagtgatcctgaaagacgggtgtgggtattggatcaacaacgagttcctggcaggcaaggtggaagcggagaagttcctgcgtgaaaacgctgcagtggcagatgagatctgcaataccgtgaggaacgagttcttgcaaaggtgacatagggcgaccgattagagaggctaatgcattgttagtcggaaatgttgtaccgtcatgtattcatagaagaagatttatgtaggatgttgctgtgcctgtcgtgtaactttgactcgcaacagttcattgagtttaccagggccattccctcgc

SEQ ID NO: 35028 - protein, 428 aa, Zea mays subsp. mays
TTPLERARGPPLRRCPPAAMRGILSSSSALLRRAGAQLSRTDCSSPSASATSPLRRSPLQNGKRDTFCSLWFKGRSVSTTVDMQLDYESDPPLDDTKAIEKESSLNVAVSQLAIDFDRDSNLCLERFSRARKASVVSTGSLKLDLALGVGGLPKGRMVEIYGKEASGKTTLALHVIKEAQKNGGYCAYIDAENAFNPSFAESIGVDSERLLIAQPDSAENSLSIVNTLVGGSVAVVVVDSVAALIPKCEIEGEIYTNCGDIQSHLMTRALRKIQYTLCRSETLIIFVNQVRTKRTSSNPGIYKEVPCGGNALGFYAAVRMRTSRRELRYSEDEATGVGISVQIIKNKLAPANLKKEAGIDITFGKGICHESEILETASSVGVILKDGCGYWINNEFLAGKVEAEKFLRENAAVADEICNTVRNEFLQR

SEQ ID NO: 35029 - protein, 409 aa, Zea mays subsp. mays
MRGILSSSSALLRRAGAQLSRTDCSSPSASATSPLRRSPLQNGKRDTFCSLWFKGRSVSTTVDMQLDYESDPPLDDTKAIEKESSLNVAVSQLAIDFDRDSNLCLERFSRARKASVVSTGSLKLDLALGVGGLPKGRMVEIYGKEASGKTTLALHVIKEAQKNGGYCAYIDAENAFNPSFAESIGVDSERLLIAQPDSAENSLSIVNTLVGGSVAVVVVDSVAALIPKCEIEGEIYTNCGDIQSHLMTRALRKIQYTLCRSETLIIFVNQVRTKRTSSNPGIYKEVPCGGNALGFYAAVRMRTSRRELRYSEDEATGVGISVQIIKNKLAPANLKKEAGIDITFGKGICHESEILETASSVGVILKDGCGYWINNEFLAGKVEAEKFLRENAAVADEICNTVRNEFLQR

SEQ ID NO: 35030 - protein, 346 aa, Zea mays subsp. mays
MQLDYESDPPLDDTKAIEKESSLNVAVSQLAIDFDRDSNLCLERFSRARKASVVSTGSLKLDLALGVGGLPKGRMVEIYGKEASGKTTLALHVIKEAQKNGGYCAYIDAENAFNPSFAESIGVDSERLLIAQPDSAENSLSIVNTLVGGSVAVVVVDSVAALIPKCEIEGEIYTNCGDIQSHLMTRALRKIQYTLCRSETLIIFVNQVRTKRTSSNPGIYKEVPCGGNALGFYAAVRMRTSRRELRYSEDEATGVGISVQIIKNKLAPANLKKEAGIDITFGKGICHESEILETASSVGVILKDGCGYWINNEFLAGKVEAEKFLRENAAVADEICNTVRNEFLQR

SEQ ID NO: 35031 - DNA, 1837 bp, Zea mays subsp. mays
aatcgaaaacaacgaccatcgagtgccattggagtggctccattgcttggcaagctagctagtctcctgtcctgtcctgtcctgtccttccttggcaacaatatatagaatggtgggtagggagcagatctgtgcgacgacgcaggcgcccaacaaggtggcgatgagccgccaggttttccatgtcctcctccttgccgccgtcgtccttttggtcccgctgctatccgcgaaggagaagctgctggggctgagcccggctgcggtggcggtggcctgctgggcgggcgcggtggcggcgtgggcgtacgcggtgtcccgcccccgccccgtctacctggtggagctgtccgggtacgtgggcgggccttcgcacgaggcctcccgcgccaagacgatcgcccacttcgggcggtgcgggcggttcagcgacgagagcatggcgttccagaagcggatgctggagcggtcggggctcggggagcagacccacttcccggcgtcgctcatcagcgtgcccgtggacatgtgcctccgcacggcgcgggaggagtcgcacgccgtcatcttcggcgtcgtggacgaggtcctccgcagggcgcgcgtggcggccgccgacgtcggcgtgctcatcttcaactccagcctgctcagccccacgccgtccttcacgtcgctcatcgccaaccgctacgggatgcggcgcgacgtcgtcagccacaacctcagcgggatggggtgcagtgcaggcatcatcgccatcgacctcgccaagcgcctgctccaggtgcacccggacacgtacgcgctggtggtgagcacggagaacatcaccctcaacgcgtacatgggcaacaaccgccccatgctggtgaccaacacgctcttccgcgtgggcggcgcggccatcctgctctccaaccgcggcgccgaccgccggcgcgccaagtaccagctgatccacacggtgcgcacccaccgcggcgcgcacgaccagagcttcggctgcgtgacgcaggaggaggacgacgcgggctgcgtcggcgtctcgctctccaaggagctgatggtggtggccggcgaggccctgcgcaccaacatcaccacgctgggcccgctcgtcctgcccatgtccgagcagctgcgcttcctcgccaccgtcgtcctcaaccgcgtcttccgcgccaacgtgcgcgcctacctgcccgacttcaggctcgccttcgaccacttctgcatccacgccggcggccgcggcgtgctggacgagctggagcgcagcctcaagctcagcgcctggcacatggagccctcgcggatgacgctctgccgcttcggcaacacctccagcagctcgctctggtacgagctcgcctactgcgaggccaagggccgcatccggaagggcgaccgcgtctggcagatcgccttcggctccggcttcaagtgcaacagcgccgtctggaaggcgctccgcacggtggacgccagcgaggagggcaacccgtggacgccggaggtccacgtgctccccatccacgtgcccagggtgtcgcccatcgacgagaccgcatacacgttccctgacggcgccacgtacaaggtctctgtctcccaggcctgaaataatacagatttacatgattgatttctcatcatgtaacttataatcgagataatgaagaagcagcagctagcagcagcgccgttatagtaggagtattagttattagggcttgatttggttactctgtttgtcgtcatttgcatccacattgcatttgcatgtggtgtacgtcgagctctatgaactcacgcgccaagaattatttatttc

SEQ ID NO: 35032 - protein, 504 aa, Zea mays subsp. mays
MVGREQICATTQAPNKVAMSRQVFHVLLLAAVVLLVPLLSAKEKLLGLSPAAVAVACWAGAVAAWAYAVSRPRPVYLVELSGYVGGPSHEASRAKTIAHFGRCGRFSDESMAFQKRMLERSGLGEQTHFPASLISVPVDMCLRTAREESHAVIFGVVDEVLRRARVAAADVGVLIFNSSLLSPTPSFTSLIANRYGMRRDVVSHNLSGMGCSAGIIAIDLAKRLLQVHPDTYALVVSTENITLNAYMGNNRPMLVTNTLFRVGGAAILLSNRGADRRRAKYQLIHTVRTHRGAHDQSFGCVTQEEDDAGCVGVSLSKELMVVAGEALRTNITTLGPLVLPMSEQLRFLATVVLNRVFRANVRAYLPDFRLAFDHFCIHAGGRGVLDELERSLKLSAWHMEPSRMTLCRFGNTSSSSLWYELAYCEAKGRIRKGDRVWQIAFGSGFKCNSAVWKALRTVDASEEGNPWTPEVHVLPIHVPRVSPIDETAYTFPDGATYKVSVSQA

SEQ ID NO: 35033 - protein, 486 aa, Zea mays subsp. mays
MSRQVFHVLLLAAVVLLVPLLSAKEKLLGLSPAAVAVACWAGAVAAWAYAVSRPRPVYLVELSGYVGGPSHEASRAKTIAHFGRCGRFSDESMAFQKRMLERSGLGEQTHFPASLISVPVDMCLRTAREESHAVIFGVVDEVLRRARVAAADVGVLIFNSSLLSPTPSFTSLIANRYGMRRDVVSHNLSGMGCSAGIIAIDLAKRLLQVHPDTYALVVSTENITLNAYMGNNRPMLVTNTLFRVGGAAILLSNRGADRRRAKYQLIHTVRTHRGAHDQSFGCVTQEEDDAGCVGVSLSKELMVVAGEALRTNITTLGPLVLPMSEQLRFLATVVLNRVFRANVRAYLPDFRLAFDHFCIHAGGRGVLDELERSLKLSAWHMEPSRMTLCRFGNTSSSSLWYELAYCEAKGRIRKGDRVWQIAFGSGFKCNSAVWKALRTVDASEEGNPWTPEVHVLPIHVPRVSPIDETAYTFPDGATYKVSVSQA

SEQ ID NO: 35034 - protein, 394 aa, Zea mays subsp. mays
MAFQKRMLERSGLGEQTHFPASLISVPVDMCLRTAREESHAVIFGVVDEVLRRARVAAADVGVLIFNSSLLSPTPSFTSLIANRYGMRRDVVSHNLSGMGCSAGIIAIDLAKRLLQVHPDTYALVVSTENITLNAYMGNNRPMLVTNTLFRVGGAAILLSNRGADRRRAKYQLIHTVRTHRGAHDQSFGCVTQEEDDAGCVGVSLSKELMVVAGEALRTNITTLGPLVLPMSEQLRFLATVVLNRVFRANVRAYLPDFRLAFDHFCIHAGGRGVLDELERSLKLSAWHMEPSRMTLCRFGNTSSSSLWYELAYCEAKGRIRKGDRVWQIAFGSGFKCNSAVWKALRTVDASEEGNPWTPEVHVLPIHVPRVSPIDETAYTFPDGATYKVSVSQA

SEQ ID NO: 35035 - DNA, 1170 bp, Zea mays subsp. mays
gccatttttggtgagtgcgccctttcccttcctccccagatccccgtccccgttttccacttttgcctccgccccaattcggataacaaacccctccgcctcgtcgcgtctcctcccagccgagccgatccggtagagagagggagagggagggactgagggaggaggagctgggttccggtcccggccgcccggccggctgcgcgattcgattgcagctctcgtccccgggcggcgtccaggatggtgcggggcaagacgcagatgaagcggatagagaacccgaccagccgccaggtcaccttctccaagcgccgcaacggcctgctcaagaaggcgttcgagctctccgtcctctgcgacgccgaggtcgccctcgtcgtcttctccccgcgcggcaagctctacgaattcgccagcggaagtgcgcagaaaacgattgaacgttatagaacatacacaaaggataatgtcagcaacaagacagtgcagcaggatattgagcgagtaaaagctgatgcggatggcctgtcaaagagactcgaagcacttgaagcttacaaaaggaaacttttgggtgagaggttggaagactgctccattgaagagctgcacagtttggaagtcaagcttgagaagagcctgcattgcatcaggggaagaaagactgagctgctggaggagcaagtccgtaagctgaagcagaaggagatgagtctgcgcaagagcaacgaagatttgcgtgaaaagtgcaagaagcagccgcctgtgccgatggcttcggcgccgcctcgtgcgccggcagtcgacaacgtggaggacggtcaccgggagccgaaggacgacgggatggacgtggagacggagctgtacataggattgcccggcagagactaccgctcaagcaaagacaaggctgcagtggcggtcaggtcaggctagcagctacctcagccacgcacaggcccaatcaacgcaagctagctagctgagaataatcttttagatctctggtagtgtggagatcgagatgcaagccaagcaatgtgatatcgcgttgtgtgttaccaacctgtcagtctgtgtatcatcccgtcccgtccgtcagagtctcagagaacgaacacttcttctccttctccctgtagctagctgctcctgcttgtgtcc

SEQ ID NO: 35036 - protein, 232 aa, Zea mays subsp. mays
MVRGKTQMKRIENPTSRQVTFSKRRNGLLKKAFELSVLCDAEVALVVFSPRGKLYEFASGSAQKTIERYRTYTKDNVSNKTVQQDIERVKADADGLSKRLEALEAYKRKLLGERLEDCSIEELHSLEVKLEKSLHCIRGRKTELLEEQVRKLKQKEMSLRKSNEDLREKCKKQPPVPMASAPPRAPAVDNVEDGHREPKDDGMDVETELYIGLPGRDYRSSKDKAAVAVRSG

SEQ ID NO: 35037 - protein, 225 aa, Zea mays subsp. mays
MKRIENPTSRQVTFSKRRNGLLKKAFELSVLCDAEVALVVFSPRGKLYEFASGSAQKTIERYRTYTKDNVSNKTVQQDIERVKADADGLSKRLEALEAYKRKLLGERLEDCSIEELHSLEVKLEKSLHCIRGRKTELLEEQVRKLKQKEMSLRKSNEDLREKCKKQPPVPMASAPPRAPAVDNVEDGHREPKDDGMDVETELYIGLPGRDYRSSKDKAAVAVRSG

SEQ ID NO: 35038 - DNA, 1581 bp, Zea mays subsp. mays
aaaagagcaatcgagagcgtcacggcgccagcctgcctgtgccaatcatcatctgctgctggtgtggtggcgtcctctcaacaaaagcgagccgagcagagtgctgaggcacaaacaagtacaacaccatcccctctctaccttcttatctcttctcctcgtgcaccagcaacaaaggtggcaggcacagagagagctagctttggccaggcgtccacagcagccagcacaagtttgcgttcttcagatgtcgacggtggtcatgggggtggatcttgagtgccacaagtgctacaagaagatcaggaaggtcctctgcaaggtccaagacaaggtgagcatcaggaccatctcctgacgacgagaagaacaacacggtgacggtgtccgggcccttcgacgccgaggaggtcgccgacaggctcaccgccgacgccggcaaggtcatcaccgacatacacgtcgtcgggggcttcggcttcggcttgggcgggggcggaggcggaggcggagggaaacaacagaaacacggcgccgtcgcccccggcaaggcgcccaagccagggaaggccagcggcaacgggcacggccagggcgggcacggaggcggaggccatggcgggcacggcggcggcggcggcggaggcaacgggcacggccatgggcaggccggcgggcacggaggcggaggccacggcggcggaggcaagccgggtaagaataagcacgtcaagttcgacgacatggacatggacatggacgacgacttcgacgaccttgacatggacgagccggccggccgccacgcgcacgcgcacgggcacgggcacggcgacggcaagccgaagatcgtcaggacgacaaacacccccatcgcggcgcggctggaggcgccccgcacgggcccagccatgtcgatggccgcggcggcgcccgtgaggatgccgatgccgatgccggcgatggcgccaatgccgcagcagcagggcatggggggcgcgccgtccatctggccgcccgcccccgagtggggctacagcgcgcagccatacggcagctacagcggcccgcctactggcgggtactacggcggcgggggcggccccgccgggcactggccctatggtggcggctacggccggaacccgtacggccagcagtactacgaggacgaagagcccagcgctgcgtgcagcgtcatgtgatgtcaccggctcgtctccgctacgcgacatctcgtgtcacgcgctcttcgtgtccacgaccacgaccactgctgtaaaattattcctagtgctcgtgtatgtatgtaaattaagctgtatttttattttcgcccgccctattttcactgtttttttatggcgtttggtttgcttcatgtgttgtcagagtatcttgtttgtttgtgttgtgttgtgtgtgtgtgtgttttggagtggataaagttcgtcatagattgacggtacggtaataggacctaggacgaacgaagcttccatctccagactccagtgtgttgtatatgtatgctacactctttatgttcttcttaaactgtgttaatgcccggacaactgc

SEQ ID NO: 35039 - protein, 153 aa, Zea mays subsp. mays
MDMDMDDDFDDLDMDEPAGRHAHAHGHGHGDGKPKIVRTTNTPIAARLEAPRTGPAMSMAAAAPVRMPMPMPAMAPMPQQQGMGGAPSIWPPAPEWGYSAQPYGSYSGPPTGGYYGGGGGPAGHWPYGGGYGRNPYGQQYYEDEEPSAACSVM

SEQ ID NO: 35040 - protein, 151 aa, Zea mays subsp. mays
MDMDDDFDDLDMDEPAGRHAHAHGHGHGDGKPKIVRTTNTPIAARLEAPRTGPAMSMAAAAPVRMPMPMPAMAPMPQQQGMGGAPSIWPPAPEWGYSAQPYGSYSGPPTGGYYGGGGGPAGHWPYGGGYGRNPYGQQYYEDEEPSAACSVM

SEQ ID NO: 35041 - protein, 149 aa, Zea mays subsp. mays
MDDDFDDLDMDEPAGRHAHAHGHGHGDGKPKIVRTTNTPIAARLEAPRTGPAMSMAAAAPVRMPMPMPAMAPMPQQQGMGGAPSIWPPAPEWGYSAQPYGSYSGPPTGGYYGGGGGPAGHWPYGGGYGRNPYGQQYYEDEEPSAACSVM
